(19) United States
(12) Patent Application Publication
(10) Pub. No.: US 2006/0150283 A1
(43) Pub. Date: Jul. 6, 2006

(54) Sequence-determined DNA fragments and corresponding polypeptides encoded thereby

(76) Inventors: Nickolai Alexandrov, Thousand Oaks, CA (US); Vyacheslav Brover, Simi Valley, CA (US)

Correspondence Address: BIRCH STEWART KOLASCH & BIRCH, PO BOX 747, FALLS CHURCH, VA, 22040-0747, US

(21) Appl. No.: 11/056,355

(22) Filed: Feb. 14, 2005

Related U.S. Application Data
(60) Provisional application No. 60/544,190, filed on Feb. 13, 2004.

(51) Int. Cl. A01H 1/00; C12Q 1/68; C07H 21/04; C12N 15/82; C12N 5/04

(52) U.S. Cl. 800/288; 435/6; 435/419; 435/468; 536/23.6

(57) ABSTRACT

The present invention provides DNA molecules that constitute fragments of the genome of a plant, and polypeptides encoded thereby. The DNA molecules are useful for specifying a gene product in cells, either as a promoter or as a protein coding sequence or as an UTR or as a 3′ termination sequence, and are also useful in controlling the behavior of a gene in the chromosome, in controlling the expression of a gene or as tools for genetic mapping, recognizing or isolating identical or related DNA fragments, or identification of a particular individual organism, or for clustering of a group of organisms with a common trait. One of ordinary skill in the art, having this data, can obtain cloned DNA fragments, synthetic DNA fragments or polypeptides constituting desired sequences by recombinant methodology known in the art or described herein.

[0001] This Non-provisional application claims priority under 35 U.S.C. §119(e) on U.S. Provisional Application No. 60/544,190 filed on Feb. 13, 2004, the entire contents of which are hereby incorporated by reference.

[0002] This application contains a CDR, the entire contents of which are hereby incorporated by reference. The CDR contains the following files:

| Creation Date | File Size | File Name |
|---|---|---|
| 2005-02-14 | 54998 KB | 2005-02-14 Sequence Listing-Misc |
| | | Features (1) |
| 2005-02-14 | 56333 KB | 2005-02-14 Sequence Listing-Misc |
| | | Features (2) |
| 2005-02-14 | 129064 KB | 2005-02-14 Sequence Listing-Misc |
| | | Features (3) |
| 2005-02-14 | 21127 KB | 2005-02-14 Sequence Listing-Misc |
| | | Features (4) |
| 2005-02-14 | 185063 KB | 2005-02-14 Sequence Listing |
| | | (Batch 3 plus) |
| 2005-02-14 | 45865 KB | 2005-02-14 Sequence Listing (Batch 1a) |
| 2005-02-14 | 119718 KB | 2005-02-14 Sequence Listing (Batch 1b) |
| 2005-02-14 | 48031 KB | 2005-02-14 Sequence Listing (Batch 2) |

### FIELD OF THE INVENTION

[0003] The present invention relates to over 100,000 isolated polynucleotides from plants that include a complete coding sequence, or a fragment thereof, that is expressed. In addition, the present invention relates to the polypeptide or protein corresponding to the coding sequence of these polynucleotides. The present invention also relates to isolated polynucleotides that represent regulatory regions of genes. The present invention also relates to isolated polynucleotides that represent untranslated regions of genes. The present invention further relates to the use of these isolated polynucleotides and polypeptides and proteins.

### BACKGROUND OF THE INVENTION

[0004] There are more than 300,000 species of plants. They show a wide diversity of forms, ranging from delicate liverworts, adapted for life in a damp habitat, to cacti, capable of surviving in the desert. The plant kingdom includes herbaceous plants, such as corn, whose life cycle is measured in months, to the giant redwood tree, which can live for thousands of years. This diversity reflects the adaptations of plants to survive in a wide range of habitats. This is seen most clearly in the flowering plants (phylum Angiospermophyta), which are the most numerous, with over 250,000 species. They are also the most widespread, being found from the tropics to the arctic.

[0005] The process of plant breeding involving man's intervention in natural breeding and selection is some 20,000 years old. It has produced remarkable advances in adapting existing species to serve new purposes. The world's economics was largely based on the successes of agriculture for most of these 20,000 years.

[0006] Plant breeding involves choosing parents, making crosses to allow recombination of gene (alleles) and searching for and selecting improved forms. Success depends on the genes/alleles available, the combinations required and the ability to create and find the correct combinations necessary to give the desired properties to the plant. Molecular genetics technologies are now capable of providing new genes, new alleles and the means of creating and selecting plants with the new, desired characteristics.

[0007] When the molecular and genetic basis for different plant characteristics are understood, a wide variety of polynucleotides, both endogenous polynucleotides and created variants, polypeptides, cells, and whole organisms, can be exploited to engineer old and new plant traits in a vast range of organisms including plants. These traits can range from the observable morphological characteristics, through adaptation to specific environments to biochemical composition and to molecules that the plants (organisms) exude. Such engineering can involve tailoring existing traits, such as increasing the production of taxol in yew trees, to combining traits from two different plants into a single organism, such as inserting the drought tolerance of a cactus into a corn plant. Molecular and genetic knowledge also allows the creation of new traits. For example, the production of chemicals and pharmaceuticals that are not native to particular species or the plant kingdom as a whole.

[0008] The achievements described in this application were possible because of the results from a cluster of technologies, a genomic engine, depicted below in Schematic 1, that allows information on each gene to be integrated to provide a more comprehensive understanding of gene structure and function and the deployment of genes and gene components to make new products.

### I. The Discoveries of the Instant Application

[0009] Applicants have isolated and identified over one hundred thousand genes, gene components and their products and thousands of promoters. Specific genes were isolated and/or characterized from arabidopsis, soybean, maize, wheat and rice. These species were selected because of their economic value and scientific importance and were deliberately chosen to include representatives of the evolutionary divergent dicotyledonous and monocotyledonous groups of the plant kingdom.

[0010] The techniques used initially to isolate and characterize most of the genes, namely sequencing of full-length cDNAs, were deliberately chosen to provide information on complete coding sequences and on the complete sequences of their protein products.

[0011] Gene components and products the Applicants have identified include exons, introns, promoters, coding sequences, antisense sequences, terminators and other regulatory sequences. The exons are characterized by the proteins they encode and Arabidopsis promoters are characterized by their position in the genomic DNA relative to where mRNA synthesis begins and in what cells and to what extent they promote mRNA synthesis.

[0012] Further exploitation of molecular genetics technologies has helped the Applicants to understand the functions and characteristics of each gene and their role in a plant. Three powerful molecular genetics approaches were used to this end:
[0013] (a) Analyses of the phenotypic changes when the particular gene sequence is interrupted or activated differentially; (arabidopsis)
[0014] (b) Analyses of in what plant organs, to what extent, and in response to what environmental signals mRNA is synthesized from the gene; (arabidopsis and maize) and
[0015] (c) Analysis of the gene sequence and its relatives. (all species)

[0016] These were conducted using the genomics engine depicted in FIG. 1 that allows information on each gene to be integrated to provide a more comprehensive understanding of gene structure and function and linkage to potential products.

[0017] The species Arabidopsis was used extensively in these studies for several reasons: (1) the complete genomic sequence, though poorly annotated in terms of gene recognition, was being produced and published by others and (2) genetic experiments to determine the role of the genes in planta are much quicker to complete.

[0018] The phenotypic data, MA data, and reference data and sequence data indicate the results of these analyses and thus the specific functions and characteristics that are ascribed to the genes and gene components and products.

[image]

### II. Integration of Discoveries to Provide Scientific Understanding

[0019] From the discoveries made, Applicants have deduced the biochemical activities, pathways, cellular roles, and developmental and physiological processes that can be modulated using these components. These are discussed and summarized in sections based on the gene functions characteristics from the analyses and role in determining phenotypes. These sections illustrate and emphasize that each gene, gene component or product influences biochemical activities, cells or organisms in complex ways, from which there can be many phenotypic consequences.

[0020] An illustration of how the discoveries on gene structure, function, expression and phenotypic observation can be integrated together to understand complex phenotypes is provided in schematic 2. This sort of understanding enables conclusions to be made as to how the genes, gene components and product are useful for changing the properties of plants and other organisms. This example also illustrates how single gene changes in, for example, a metabolic pathway can cause gross phenotypic changes.

[image]

[0021] Furthermore, the development and properties of one part of plant can be interconnected with other parts. The dependence of shoot and leaf development on root cells is a classic example. Here, shoot growth and development require nutrients supplied from roots, so the protein complement of root cells can affect plant development, including flowers and seed production. Similarly, root development is dependent on the products of photosynthesis from leaves. Therefore, proteins in leaves can influence root developmental physiology and biochemistry.

[0022] Thus, the following sections describe both the functions and characteristics of the genes, gene components and products and also the multiplicity of biochemical activities, cellular functions, and the developmental and physiological processes influenced by them.

[0023] A. Analyses to Reveal Function and In Vivo Roles of Single Genes in One Plant Species

[0024] The genomics engine has focused on individual genes to reveal the multiple functions or characteristics that are associated to each gene, gene components and products of the instant invention in the living plant. For example, the biochemical activity of a protein is deduced based on its similarity to a protein of known function. In this case, the protein may be ascribed with, for example, an oxidase activity. Where and when this same protein is active can be uncovered from differential expression experiments, which show that the mRNA encoding the protein is differentially expressed in response to drought and in seeds but not roots. The gene disruption experiments reveal that absence of the same protein causes embryo lethality.

[0025] Thus, this protein is characterized as a seed protein and drought-responsive oxidase that is critical for embryo viability.

[0026] B. Analyses to Reveal Function and Roles of Single Genes in Different Species

[0027] The genomics engine has also been used to extrapolate knowledge from one species to many plant species. For example, proteins from different species, capable of performing identical or similar functions, preserve many features of amino acid sequence and structure during evolution. Complete protein sequences have been compared and contrasted within and between species to determine the functionally vital domains and signatures characteristic of each of the proteins that is the subject of this application. Thus, functions and characteristics of arabidopsis proteins have been extrapolated to proteins containing similar domains and signatures of corn, soybean, rice and wheat and by implication to all other (plant) species.

[image]

[0028] Schematic 3 provides an example. Two proteins with related structures, one from corn, a monocot, and one from arabidopsis, a dicot, have been concluded to be orthologs. The known characteristics of the arabidopsis protein (seed protein, drought responsive oxidase) can then be attributed to the corn protein.

[0029] C. Analyses Over Multiple Experiments to Reveal Gene Networks and Links Across Species

[0030] The genomics engine can identify networks or pathways of genes concerned with the same process and hence linked to the same phenotype(s). Genes specifying functions of the same pathway or developmental environmental responses are frequently co-regulated i.e. they are regulated by mechanisms that result in coincident increases or decreases for all gene members in the group. The Applicants have divided the genes of arabidopsis and maize into such co-regulated groups on the basis of their expression patterns and the function of each group has been deduced. This process has provided considerable insight into the function and role of thousands of the plant genes in diverse species included in this application.

[0031] D. Applications of Applicant's Discoveries

[0032] It will be appreciated while reading the sections that the different experimental molecular genetic approaches focused on different aspects of the pathway from gene and gene product through to the properties of tissues, organs and whole organisms growing in specific environments. For each endogenous gene, these pathways are delineated within the existing biology of the species. However, Applicants' inventions allow gene components or products to be mixed and matched to create new genes and placed in other cellular contexts and species, to exhibit new combinations of functions and characteristics not found in nature, or to enhance and modify existing ones. For instance, gene components can be used to achieve expression of a specific protein in a new cell type to introduce new biochemical activities, cellular attributes or developmental and physiological processes. Such cell-specific targeting can be achieved by combining polynucleotides encoding proteins with any one of a large array of promoters to facilitate synthesis of proteins in a selective set of plant cells. This emphasizes that each gene, component and protein can be used to cause multiple and different phenotypic effects depending on the biological context. The utilities are therefore not limited to the existing in vivo roles of the genes, gene components, and gene products.

[0033] While the genes, gene components and products disclosed herein can act alone, combinations are useful to modify or modulate different traits. Useful combinations include different polynucleotides and/or gene components or products that have (1) an effect in the same or similar developmental or biochemical pathways; (2) similar biological activities; (3) similar transcription profiles; or (4) similar physiological consequences.

[0034] Of particular interest are the transcription factors and key factors in regulatory transduction pathways, which are able to control entire pathways, segments of pathways or large groups of functionally related genes. Therefore, manipulation of such proteins, alone or in combination is especially useful for altering phenotypes or biochemical activities in plants. Because interactions exist between hormone, nutrition, and developmental pathways, combinations of genes and/or gene products from these pathways also are useful to produce more complex changes. In addition to using polynucleotides having similar transcription profiles and/or biological activities, useful combinations include polynucleotides that may exhibit different transcription profiles but which participate in common or overlapping pathways. Also, polynucleotides encoding selected enzymes can be combined in novel ways in a plant to create new metabolic pathways and hence new metabolic products.

[0035] The utilities of the various genes, gene components and products of the Application are described below in the sections entitled as follows:
[0036] I. Organ Affecting Genes, Gene Components, Products (Including Differentiation Function)
   [0037] I.A. Root Genes, Gene Components And Products
      [0038] I.A.1. Root Genes, Gene Components And Products
      [0039] I.A.2. Root Hair Genes, Gene Components And Products
   [0040] I.B. Leaf Genes, Gene Components And Products
      [0041] I.B.1. Leaf Genes, Gene Components And Products
      [0042] I.B.2. Trichome Genes And Gene Components
      [0043] I.B.3. Chloroplast Genes And Gene Components
   [0044] I.C. Reproduction Genes, Gene Components And Products
      [0045] I.C.1. Reproduction Genes, Gene Components And Products
      [0046] I.C.2. Ovule Genes, Gene Components And Products
      [0047] I.C.3. Seed And Fruit Development Genes, Gene Components And Products
   [0048] I.D. Development Genes, Gene Components And Products
      [0049] I.D.1. Imbibition And Germination Responsive Genes, Gene Components And Products
      [0050] I.D.2. Early Seedling Phase Genes, Gene Components And Products
      [0051] I.D.3. Size And Stature Genes, Gene Components And Products
      [0052] I.D.4. Shoot-Apical Meristem Genes, Gene Components And Products
      [0053] I.D.5. Vegetative-Phase Specific Responsive Genes, Gene Components And Products
[0054] II. Hormones Responsive Genes, Gene Components And Products
   [0055] II.A. Abscissic Acid Responsive Genes, Gene Components And Products
   [0056] II.B. Auxin Responsive Genes, Gene Components And Products
   [0057] II.C. Brassinosteroid Responsive Genes, Gene Components And Products
   [0058] II.D. Cytokinin Responsive Genes, Gene Components And Products
   [0059] II.E. Gibberellic Acid Responsive Genes, Gene Components And Products
[0060] III. Metabolism Affecting Genes, Gene Components And Products
   [0061] III.A. Nitrogen Responsive Genes, Gene Components And Products
   [0062] III.B. Circadian Rhythm Responsive Genes, Gene Components And Products
   [0063] III.C. Blue Light (Phototropism) Responsive Genes, Gene Components And Products
   [0064] III.D. Co2 Responsive Genes, Gene Components And Products
   [0065] III.E. Mitochondria Electron Transport Genes, Gene Components And Products
   [0066] III.F. Protein Degradation Genes, Gene Components And Products
   [0067] III.G. Carotenogenesis Responsive Genes, Gene Components And Products
[0068] IV. Viability Genes, Gene Components And Products
   [0069] IV.A. Viability Genes, Gene Components And Products
   [0070] IV.B. Histone Deacetylase (Axel) Responsive Genes, Gene Components And Products
[0071] V. Stress Responsive Genes, Gene Components And Products
   [0072] V.A. Cold Responsive Genes, Gene Components And Products
   [0073] V.B. Heat Responsive Genes, Gene Components And Products
   [0074] V.C. Drought Responsive Genes, Gene Components And Products
   [0075] V.D. Wounding Responsive Genes, Gene Components And Products
   [0076] V.E. Methyl Jasmonate Responsive Genes, Gene Components And Products
   [0077] V.F. Reactive Oxygen Responsive Genes, Gene Components And H2O2 Products
   [0078] V.G. Salicylic Acid Responsive Genes, Gene Components And Products
   [0079] V.H. Nitric Oxide Responsive Genes, Gene Components And Products
   [0080] V.I. Osmotic Stress Responsive Genes, Gene Components And Products
   [0081] V.J. Aluminum Responsive Genes, Gene Components And Products
   [0082] V.K. Cadmium Responsive Genes, Gene Components And Products
   [0083] V.L. Disease Responsive Genes, Gene Components And Products
   [0084] V.M. Defense Responsive Genes, Gene Components And Products
   [0085] V.N. Iron Responsive Genes, Gene Components And Products
   [0086] V.O. Shade Responsive Genes, Gene Components And Products
   [0087] V.P. Sulfur Responsive Genes, Gene Components And Products
   [0088] V.Q. Zinc Responsive Genes, Gene Components And Products
[0089] VI. Enhanced Food
[0090] VII. Promoters As Sentinels

### SUMMARY OF THE INVENTION

[0091] The present invention comprises polynucleotides, such as complete cDNA sequences and/or sequences of genomic DNA encompassing complete genes, fragments of genes, and/or regulatory elements of genes and/or regions with other functions and/or intergenic regions, hereinafter collectively referred to as Sequence-Determined DNA Fragments (SDFs) or sometimes collectively referred to as “genes or gene components”, or sometimes as “genes, gene components or products”, from different plant species, particularly corn, wheat, soybean, rice and Arabidopsis thaliana, and other plants and or mutants, variants, fragments or fusions of said SDFs and polypeptides or proteins derived therefrom. In some instances, the SDFs span the entirety of a protein-coding segment. In some instances, the entirety of an MRNA is represented. Other objects of the invention that are also represented by SDFs of the invention are control sequences, such as, but not limited to, promoters. Complements of any sequence of the invention are also considered part of the invention.

[0092] Other objects of the invention are polynucleotides comprising exon sequences, polynucleotides comprising intron sequences, polynucleotides comprising introns together with exons, intron/exon junction sequences, 5′ untranslated sequences, and 3′ untranslated sequences of the SDFs of the present invention. Polynucleotides representing the joinder of any exons described herein, in any arrangement, for example, to produce a sequence encoding any desirable amino acid sequence are within the scope of the invention.

[0093] The present invention also resides in probes useful for isolating and identifying nucleic acids that hybridize to an SDF of the invention. The probes can be of any length, but more typically are 12-2000 nucleotides in length; more typically, 15 to 200 nucleotides long; even more typically, 18 to 100 nucleotides long.

[0094] Yet another object of the invention is a method of isolating and/or identifying nucleic acids using the following steps:

[0095] (a) contacting a probe of the instant invention with a polynucleotide sample under conditions that permit hybridization and formation of a polynucleotide duplex; and

[0096] (b) detecting and/or isolating the duplex of step (a).

[0097] The conditions for hybridization can be from low to moderate to high stringency conditions. The sample can include a polynucleotide having a sequence unique in a plant genome. Probes and methods of the invention are useful, for example, without limitation, for mapping of genetic traits and/or for positional cloning of a desired fragment of genomic DNA.

[0098] Probes and methods of the invention can also be used for detecting alternatively spliced messages within a species. Probes and methods of the invention can further be used to detect or isolate related genes in other plant species using genomic DNA (gDNA) and/or cDNA libraries. In some instances, especially when longer probes and low to moderate stringency hybridization conditions are used, the probe will hybridize to a plurality of cDNA and/or gDNA sequences of a plant. This approach is useful for isolating representatives of gene families which are identifiable by possession of a common functional domain in the gene product or which have common cis-acting regulatory sequences. This approach is also useful for identifying orthologous genes from other organisms.

[0099] The present invention also resides in constructs for modulating the expression of the genes comprised of all or a fragment of an SDF. The constructs comprise all or a fragment of the expressed SDF, or of a complementary sequence. Examples of constructs include ribozymes comprising RNA encoded by an SDF or by a sequence complementary thereto, antisense constructs, constructs comprising coding regions or parts thereof and constructs comprising promoters. Such constructs can be constructed using viral, plasmid, bacterial artificial chromosomes (BACs), plasmid artificial chromosomes (PACs), autonomous plant plasmids, plant artificial chromosomes or other types of vectors and exist in the plant as autonomous replicating sequences or as DNA integrated into the genome. When inserted into a host cell the construct is, preferably, functionally integrated with, or operatively linked to, a heterologous polynucleotide. For instance, a coding region from an SDF might be operably linked to a promoter that is functional in a plant.

[0100] The present invention also resides in host cells, including bacterial or yeast cells or plant cells, and plants that harbor constructs such as described above. Another aspect of the invention relates to methods for modulating expression of specific genes in plants by expression of the coding sequence of the constructs, by regulation of expression of one or more endogenous genes in a plant or by suppression of expression of the polynucleotides of the invention in a plant. Methods of modulation of gene expression include without limitation (1) inserting into a host cell additional copies of a polynucleotide comprising a coding sequence; (2) modulating an endogenous promoter in a host cell; (3) inserting antisense or ribozyine constructs into a host cell and (4) inserting into a host cell a polynucleotide comprising a sequence encoding a variant, fragment, or fusion of the native polypeptides of the instant invention.

### DETAILED DESCRIPTION OF THE INVENTION

### I. DESCRIPTION OF THE DATA

[0101] As noted above, the Applicants have obtained and analyzed an extensive amount of information on a large number of genes by use of the Ceres Genomic Engine to determine. This information can be categorized into three basic types:

[0102] A. Sequence Information for the Inventions

[0103] B. Transcriptional Information for the Inventions

[0104] C. Phenotypic Information for the Inventions

### I.A. Sequence Information

[0105] To harness the potential of the plant genome, Applicants began by elucidating a large number gene sequences, including the sequences of gene components and products, and analyzing the data. The list of sequences and associated data are presented in the Sequence Listing and Sequence Listing-Miscellaneous Features documents of the present application (sometimes referred to as the “REF” and “SEQ” Tables). The REF and SEQ tables include:
[0106] cDNA sequence;
[0107] coding sequence;
[0108] 5′ & 3′ UTR;
[0109] transcription start sites;
[0110] exon and intron boundaries in genomic sequence; and
[0111] protein sequence.

[0112] The REF and SEQ tables also include computer-based, comparative analyses between the protein sequences of the invention and sequences with known function. Proteins with similar sequences typically exhibit similar biochemical activities. The REF table notes:
[0113] sequences of known function that are similar to the Applicants' proteins; and
[0114] biochemical activity that is associated with Applicants' proteins.

[0115] To identify gene components and products, Applicants took a cDNA/coding sequence approach. That is, Applicants initiated their studies either by isolating cDNAs and determining their sequences experimentally, or by identifying the coding sequence from genomic sequence with the aid of predictive algorithms. The cDNA sequences and coding sequences also are referred to as “Maximum Length Sequences” in the REF tables. The cDNA and coding sequences were given this designation to indicate these were the maximum length of coding sequences identified by Applicants.

[0116] Due to this cDNA/coding sequence focus of the present application, the REF and SEQ Tables were organized around cDNA and coding sequences. Each of these Maximum Length Sequences was assigned a unique identifier: Ceres Sequence ID NO, which is reported in the Tables.

[0117] All data that relate to these Maximum Length Sequences are grouped together, including 5′ & 3′ UTRs; transcription start sites; exon and intron boundaries in genomic sequence; protein sequence, etc.

[0118] Below, a more detailed explanation of the organization of the REF and SEQ Tables and how the data in the tables were generated is provided.

[0119] a. cDNA

[0120] Applicants have ascertained the sequences of mRNAs from different organisms by reverse transcription of mRNA to DNA, which was cloned and then sequenced. These complementary DNA or cDNA sequences also are referred to as Maximum Length Sequences in the REF Tables, which contain details on each of the sequences in the SEQ Tables.

[0121] Each sequence was assigned a Pat. Appln. Sequence ID NO: and an internal Ceres Sequence ID NO: as reported in the REF Table, the section labeled “(Ac) cDNA Sequence.” An example is shown below:
[0122] Max Len. Seq.:
[0123] (Ac) cDNA Sequence
   [0124] Pat. Appln. Sequence ID NO: 174538
   [0125] Ceres Sequence ID NO: 5673127

[0126] Both numbers are included in the Sequence Table to aid in tracking of information, as shown below:

<210> 174538 (Pat. Appln. Sequence ID NO:)
<211> 1846
<212> DNA (genomic)
<213> Arabidopsis thaliana
<220>
<221> misc_feature
<222> (1) . . . (1846)
<223> Ceres Seq. ID no. 5673127
<220>
<221> misc_feature
<222> () . . . ()
<223> n is a, c, t, g, unknown, or other
<400> 174538
acaagaacaa caaaacagag gaagaagaag aagaagatga agcttctggc tctgtttcca 60
tttctagcga tcgtgatcca actcagctgt . . . etc.

[0127] The Sequence and REF Tables are divided into sections by organism: Arabidopsis thaliana, Brassica napus, Glycine max, Zea mays, Triticum aestivum; and Oryza sativa.

[0128] b. Coding Sequence

[0129] The coding sequence portion of the cDNA was identified by using computer-based algorithms and comparative biology. The sequence of each coding sequence of the cDNA is reported in the “PolyP Sequence” section of the REF Tables, which are also divided into sections by organism. An example shown below for the peptides that relate to the cDNA sequence above

[0130] PolyP Sequence
[0131] Pat. Appln. Sequence ID NO 174539
[0132] Ceres Sequence ID NO 5673128
[0133] Loc. Sequence ID NO 174538: @ 1 nt.
[0134] Loc. Sig. P. Sequence ID NO 174539: @ 37 aa.

[0135] The polypeptide sequence can be found in the SEQ Tables by either the Pat. Appln. Sequence ID NO or by the Ceres Sequence ID NO: as shown below:

<210> 174539 (Pat. Appln. Sequence ID NO)
<211> 443
<212> PRT
<213> Arabidopsis thaliana
<220>
<221> peptide
<222> (1) . . . (443)
<223> Ceres Seq. ID no. 5673128
<220>
<221> misc_feature
<222> () . . . ()
<223> xaa is any aa, unknown or other
<400> 174539
Thr Arg Thr Thr Lys Gln Arg Lys Lys Lys Lys Lys Met Lys Leu Leu
1 5 10 15
Ala Leu Phe Pro Phe Leu Ala Ile . . . etc.
25

[0136] The PolyP section also indicates where the coding region begins in the Maximum Length Sequence. More than one coding region may be indicated for a single polypeptide due to multiple potential translation start codons. Coding sequences were identified also by analyzing genomic sequence by predictive algorithms, without the actual cloning of a cDNA molecule from a mRNA. By default, the cDNA sequence was considered the same as the coding sequence, when Maximum Length Sequence was spliced together from a genomic annotation.

[0137] c. 5′ and 3′ UTR

[0138] The 5′ UTR can be identified as any sequence 5′ of the initiating codon of the coding sequence in the cDNA sequence. Similarly, the 3′ UTR is any sequence 3′ of the terminating codon of the coding sequence.

[0139] d. Transcription Start Sites

[0140] Applicants cloned a number of cDNAs that encompassed the same coding sequence but comprised 5′ UTRs of different lengths. These different lengths revealed the multiple transcription start sites of the gene that corresponded to the cDNA. These multiple transcription start sites are reported in the “Sequence # w. TSS” section” of the REF Tables.

[0141] e. Exons & Introns

[0142] Alignment of the cDNA sequences and coding portions to genomic sequence permitted Applicants to pinpoint the exon/intron boundaries. These boundaries are identified in the REF Table under the “Pub gDNA” section. That section reports the gi number of the public BAC sequence that contains the introns and exons of interest. An example is shown below:

[0143] Max Len. Seq.:

[0144] Pub gDNA:
[0145] gi No: 1000000005
[0146] Gen. seq. in cDNA:
   [0147] 115777 . . . 115448 by Method #1
   [0148] 115105 . . . 114911 by Method #1
   [0149] 114822 . . . 114700 by Method #1
   [0150] 114588 . . . 114386 by Method #1
   [0151] 114295 . . . 113851 by Method #1
   [0152] 115777 . . . 115448 by Method #2
   [0153] 115105 . . . 114911 by Method #2
   [0154] 114822 . . . 114700 by Method #2
   [0155] 114588 . . . 114386 by Method #2
   [0156] 114295 . . . 113851 by Method #2
   [0157] 115813 . . . 115448 by Method #3
   [0158] 115105 . . . 114911 by Method #3
   [0159] 114822 . . . 114700 by Method #3
   [0160] 114588 . . . 114386 by Method #3
   [0161] 114295 . . . 113337 by Method #3

[0162] (Ac) cDNA Sequence

[0163] All the gi numbers were assigned by Genbank to track the public genomic sequences except:

[0164] gi 1000000001

[0165] gi 1000000002

[0166] gi 1000000003

[0167] gi 1000000004; and

[0168] gi 1000000005.

[0169] These gi numbers were assigned by Applicants to the five Arabidopsis chromosome sequences that were published by the Institute of Genome Research (TIGR). Gi 1000000001 corresponds to chromosome 1, Gi 1000000002 to chromosome 2, etc.

[0170] The method of annotation is indicated as well as any similar public annotations.

[0171] f. Promoters & Terminators

[0172] Promoter sequences are 5′ of the translational start site in a gene; more typically, 5′ of the transcriptional start site or sites. Terminator sequences are 3′ of the translational terminator codon; more typically, 3′ of the end of the 3′ UTR.

[0173] For even more specifics of the REF and SEQ Tables, see the section below titled “Brief Description of the Tables.”

### I.B. Transcriptional (Differental Expression) Information-Introduction to Differential Expression Data & Analyses

[0174] A major way that a cell controls its response to internal or external stimuli is by regulating the rate of transcription of specific genes. For example, the differentiation of cells during organogenensis into forms characteristic of the organ is associated with the selective activation and repression of large numbers of genes. Thus, specific organs, tissues and cells are functionally distinct due to the different populations of mRNAs and protein products they possess. Internal signals program the selective activation and repression programs. For example, internally synthesized hormones produce such signals. The level of hormone can be raised by increasing the level of transcription of genes encoding proteins concerned with hormone synthesis.

[0175] To measure how a cell reacts to internal and/or external stimuli, individual mRNA levels can be measured and used as an indicator for the extent of transcription of the gene. Cells can be exposed to a stimulus, and mRNA can be isolated and assayed at different time points after stimulation. The mRNA from the stimulated cells can be compared to control cells that were not stimulated. The mRNA levels of particular Maxiumum Length Sequences that are higher in the stimulated cell versus the control indicate a stimulus-specific response of the cell. The same is true of mRNA levels that are lower in stimulated cells versus the control condition.

[0176] Similar studies can be performed with cells taken from an organism with a defined mutation in their genome as compared with cells without the mutation. Altered mRNA levels in the mutated cells indicate how the mutation causes transcriptional changes. These transcriptional changes are associated with the phenotype that the mutated cells exhibit that is different from the phenotype exhibited by the control cells.

[0177] Applicants have utilized microarray techniques to measure the levels of mRNAs in cells from mutant plants, stimulated plants, and/or selected from specific organs. The differential expression of various genes in the samples versus controls are listed in the MA_diff Tables. Applicants have analyzed the differential data to identify genes whose mRNA transcription levels are positively correlated. From these analyses, Applicants were able to group different genes together whose transcription patterns are correlated. The results of the analyses are reported in the MA_clust Tables.

[0178] a. Experimental Detail

[0179] A microarray is a small solid support, usually the size of a microscope slide, onto which a number of polynucleotides have been spotted onto or synthesized in distinct positions on the slide (also referred to as a chip). Typically, the polynucleotides are spotted in a grid formation. The polynucleotides can either be Maximum Length Sequences or shorter synthetic oligonucleotides, whose sequence is complementary to specific Maximum Length Sequence entities. A typical chip format is as follows:

| | | |
|---|---|---|
| Oligo #1 | Oligo #2 | Oligo #3 |
| Oligo #4 | Oligo #5 | Oligo #6 |
| Oligo #7 | Oligo #8 | Oligo #9 |

[0180] For Applicants' experiments, samples were hybridized to the chips using the “two-color” microarray procedure. A fluorescent dye was used to label cDNA reverse-transcribed from mRNA isolated from cells that had been stimulated, mutated, or collected from a specific organ or developmental stage. A second fluorescent dye of another color was used to label cDNA prepared from control cells.

[0181] The two differentially-labeled cDNAs were mixed together. Microarray chips were incubated with this mixture. For Applicants' experiments the two dyes that are used are Cy3, which fluoresces in the red color range, and Cy5, which fluoresces in the green/blue color range. Thus, if:

[0182] cDNA#1 binds to Oligo #1;

[0183] cDNA#1 from the sample is labeled red;

[0184] cDNA#1 from the control is labeled green, and

[0185] cDNA#1 is in both the sample and control,

[0186] then cDNA#1 from both the sample and control will bind to Oligo#1 on the chip. If the sample has 10 times more cDNA#1 than the control, then 10 times more of the cDNA#1 would be hybridized to Oligo#1. Thus, the spot on the chip with Oligo#1 spot would look red.

| | | |
|---|---|---|
| | Oligo #2 | Oligo #3 |
| Oligo #4 | Oligo #5 | Oligo #6 |
| Oligo #7 | Oligo #8 | Oligo #9 |

If the situation were reversed, the spot would appear green. If the sample has approximately the same amount of cDNA#1 as the control, then the Oligo#1 spot on the chip would look yellow. These color differentials are measured quantitatively and used to deduce the relative concentration of mRNAs from individual genes in particular samples.

[0187] b. MA Diff Data

[0188] To generate data, Applicants labeled and hybridized the sample and control mRNA in duplicate experiments. One chip was exposed to a mixture of cDNAs from both a sample and control, where the sample cDNA was labeled with Cy3, and the control was labeled with Cy5 dye. For the second labeling and chip hybridization experiments, the fluorescent labels were reversed; that is, the Cy5 dye for the sample, and the Cy3 dye for the control.

[0189] Whether Cy5 or Cy3 was used to label the sample, the fluorescence produced by the sample was divided by the fluorescence of the control. A cDNA was determined to be differentially expressed in response to the stimulus in question if a statistically-significantly ration difference in the sample versus the control was measured by both chip hybridization experiments.

[0190] The MA_diff data show which cDNA were significantly up-regulated as designated by a “+” and which were significantly down-regulated as designated by a “−” for each pair of chips using the same sample and control.

### I.C. Phenotypic Information

[0191] One means of determining the phenotypic effect of a gene is either to insert extra active copies of the gene or coding sequence, or to disrupt an existing copy of the gene in a cell or organism and measure the effects of the genetic change on one or more phenotypic characters or traits. “Knock-in” is used herein to refer to insertion of additional active copies of a gene or coding sequence. “Knock-out” refers to a plant where an endogenous gene(s) is disrupted. Applicants have used both methods of addition or disruption to determine the phenotypic effects of gene or gene components or products, and have thereby discovered the function of the genes and their utilities.

[0192] 1. Knock-In Results

[0193] The coding sequence of a desired protein can be functionally linked to a heterologous promoter to facilitate expression. Here, Applicants have operably linked a number of coding sequences to either one of the promoters listed below:

| | Specific Promoter | Plant Line |
|---|---|---|
| GFP Pattern | activity | Descriptor |
| Root epidermis/mostly toward the lower | Specific to the root basal | Root basal |
| region of root (more intense than CS9094) | region. | |
| Root-endodermis/cortex (initials sharp); | Specific to the root | Root/Petiole/Flowers |
| shoot-mesophyll of one leaf, sharp guard cell | endodermis-cortex | |
| marking. New leaf petioles near tip of | region, leaf petiole, and | |
| primary inflorescence; floral stems; in | flowers. | |
| flowers at base of sepal, anther stems, and | | |
| pistil | | |
| Broad root exp. (some dermal, some cortical, | Specific to root and stem. | Root/Stem1 |
| some vascular); shoot apex. Faintly in | | |
| petiole; stem | | |
| High expression in stem, excluded from 1st | Specific to stem and root. | Root/Stem2 |
| true leaves/High in root. Faint expression in | | |
| stem | | |
| Shoot meristem/whole root region; little bit | Specific to roots, shoot | Root/Stem/Leaves/Flowers |
| on cotyledons. Base of leaves(axillary | meristem, base of leaves | |
| meristem?); base of sepals; inflorescence | and flowers. | |
| meristem; small amount in unfertilized pistil. | | |
| root tip vascular initials; vascular system | Specific to vascular | Vascular/Ovule/Young |
| throughout plant; Bud petal vasculature and | systems. | Seed/Embryo |
| pistil septum; Flower petal vascualture; | | |
| Flower pistil septum; Pre fertilization ovules; | | |
| Post fertilization ovule at chalazal end; | | |
| Developing seed (young, maturing siliques); | | |
| Seed coat and young embryos. GFP not | | |
| observed in mature embryos. | | |
| Flower, sepal/vascular tissue of root, stem, | Specific to flowers, seed | Flowers/Seed/Vasculature/ |
| and cotyledons. Stems of new flowers; | and vasculature. | Embryo |
| vasculature or petals, anthers, sepals, and | | |
| pistil/silique; Vasculature throughtout | | |
| seedling: root, hypocotyl, petioles, stem, | | |
| cotyledons, first true leaves; Rosette | | |
| vasculature; Cauline leaf vasculature; Bud | | |
| pedicel vasculature; Flower vasculature: | | |
| (sepals, petals, filaments, pistil); Bud | | |
| vasculature (sepal, petal, filament, pistil); | | |
| Funiculus in both flower and bud; Some | | |
| possible seed coat expression; Silique | | |
| funiculus; Very faint fluorescence in mature | | |
| embryo (auto fluorescence perhaps); | | |
| Root expression - primarily in cortex (upper | Specific to root. | Roots2 |
| refion of the root). No shoot expression | | |
| Root expression - less intense in whole root | Specific to root and shoot | Root/SAM |
| of young seedling. Shoot apical meristem; | apical meristem. | |
| organ primordia in SAM region. | | |
| Root epidermis/tip; shoot epidermis/vascular; | Specific to seed and to | Seed/Epidermis/Ovary/ |
| leaf epidermis; expression in developing | epidermal layers of roots, | Fruit |
| seed/ovule - mature embryo; Primary and | shoots and leaves. | |
| lateral root cortex; Very strong in root cap; | | |
| Base of flower bud and epidermis of carpels; | | |
| Base of flower, epidermis of filaments, | | |
| epidermis of carpels; Trichomes; Weak | | |
| (hardly detectable) gfp expression in | | |
| vasculature throughout seedling; Strong | | |
| expression in trichomes; POST- fertilization | | |
| SEED only; GFP strength increases as | | |
| silique matures; Weak at suspensor end of | | |
| the embryo; GFP observed in seed coat; Root | | |
| and post fertilization seed specific gfp | | |
| expression; Expression in seed coat. | | |
| Young root dermis; dermal/cortical?/vascular | Specific to roots, shoots, | Roots/Shoots/Ovule |
| in older root; general (epidermal?) shoot | and ovules. | |
| expression; ovules. some in sepals; | | |
| vasculature of stem | | |
| Vascular tissue of root; Meristem tissues: | Specific to root structural | Vasculature/Meristem |
| axillary meristems, floral meristems, base of | leaf vascular region and | |
| flowers/sepals; Weak expression in | to floral buds and axillary | |
| hypocotyl, petiole and cotyledon | meristem | |
| vasculature.. | | |

[0194] The chimeric constructs were transformed into Arabidopsis thaliana. The resulting transformed lines were screened to determine what phenotypes were changed due to introduced transgene. The phenotype changes, relative to the control, are reported in the Knock-in tables.

### I.D. Brief Description of the Individual Tables

1. Reference and Sequence Tables

[0195] The sequences of exemplary SDFs and polypeptides corresponding to the coding sequences of the instant invention are described in the Sequence Listing and Sequence Listing-Miscellaneous Feature documents (sometimes referred to as the REF and SEQ Tables. The REF Table refers to a number of “Maximum Length Sequences” or “MLS.” Each MLS corresponds to the longest cDNA obtained, either by cloning or by the prediction from genomic sequence. The sequence of the MLS is the cDNA sequence as described in the Av subsection of the REF Table.

[0196] The REF Table includes the following information relating to each MLS:

[0197] I. cDNA Sequence
[0198] A. 5′ UTR
[0199] B. Coding Sequence
[0200] C. 3′ UTR

[0201] II. Genomic Sequence
[0202] A. Exons
[0203] B. Introns
[0204] C. Promoters

[0205] III. Link of cDNA Sequences to Clone IDs

[0206] IV. Multiple Transcription Start Sites

[0207] V. Polypeptide Sequences
[0208] A. Signal Peptide
[0209] B. Domains
[0210] C. Related Polypeptides

[0211] VI. Related Polynucleotide Sequences

[0212] I. cDNA Sequence

[0213] The REF Table indicates which sequence in the SEQ Table represents the sequence of each MLS. The MLS sequence can comprise 5′ and 3′ UTR as well as coding sequences. In addition, specific cDNA clone numbers also are included in the REF Table when the MLS sequence relates to a specific cDNA clone.

[0214] A. 5′ UTR

[0215] The location of the 5′ UTR can be determined by comparing the most 5′ MLS sequence with the corresponding genomic sequence as indicated in the Reference Table. The sequence that matches, beginning at any of the transcriptional start sites and ending at the last nucleotide before any of the translational start sites corresponds to the 5′ UTR.

[0216] B. Coding Region

[0217] The coding region is the sequence in any open reading frame found in the MLS. Coding regions of interest are indicated in the PolyP SEQ subsection of the REF Table.

[0218] C. 3′ UTR

[0219] The location of the 3′ UTR can be determined by comparing the most 3′ MLS sequence with the corresponding genomic sequence as indicated in the REF Table. The sequence that matches, beginning at the translational stop site and ending at the last nucleotide of the MLS corresponds to the 3′ UTR.

[0220] II. Genomic Sequence

[0221] Further, the REF Table indicates the specific “gi” number of the genomic sequence if the sequence resides in a public databank. For each genomic sequence, REF tables indicate which regions are included in the MLS. These regions can include the 5′ and 3′ UTRs as well as the coding sequence of the MLS. See, for example, the scheme below:

```
                              Region 1 Region 2 Region 3
---------| 5′ UTR | Exon |---------| Exon |--------| Exon | 3′ UTR |-------
        \hat{ } _{—————————————————} \hat{ } _{——————————} \hat{ } _{—————————————————} \hat{ }
        | \hat{ } | | \hat{ } |
Promoter | Intron Intron |
                        Translational Stop Codon
                          Start Site
```

[0222] The REF Table reports the first and last base of each region that are included in an MLS sequence. An example is shown below:

[0223] gi No. 47000:

[0224] 37102 . . . 37497

[0225] 37593 . . . 37925

[0226] The numbers indicate that the MLS contains the following sequences from two regions of gi No. 47000; a first region including bases 37102-37497, and a second region including bases 37593-37925.

[0227] A. Exon Sequences

[0228] The location of the exons can be determined by comparing the sequence of the regions from the genomic sequences with the corresponding MLS sequence as indicated by the REF Table.

[0229] i. Initial Exon

[0230] To determine the location of the initial exon, information from the

[0231] (1) polypeptide sequence section;

[0232] (2) cDNA polynucleotide section; and

[0233] (3) the genomic sequence section

[0234] of the REF Table is used. First, the polypeptide section will indicate where the translational start site is located in the MLS sequence. The MLS sequence can be matched to the genomic sequence that corresponds to the MLS. Based on the match between the MLS and corresponding genomic sequences, the location of the translational start site can be determined in one of the regions of the genomic sequence. The location of this translational start site is the start of the first exon.

[0235] Generally, the last base of the exon of the corresponding genomic region, in which the translational start site was located, will represent the end of the initial exon. In some cases, the initial exon will end with a stop codon, when the initial exon is the only exon.

[0236] In the case when sequences representing the MLS are in the positive strand of the corresponding genomic sequence, the last base will be a larger number than the first base. When the sequences representing the MLS are in the negative strand of the corresponding genomic sequence, then the last base will be a smaller number than the first base.

[0237] ii. Internal Exons

[0238] Except for the regions that comprise the 5′ and 3′ UTRs, initial exon, and terminal exon, the remaining genomic regions that match the MLS sequence are the internal exons. Specifically, the bases defining the boundaries of the remaining regions also define the intron/exon junctions of the internal exons.

[0239] iii. Terminal Exon

[0240] As with the initial exon, the location of the terminal exon is determined with information from the

[0241] (1) polypeptide sequence section;

[0242] (2) cDNA polynucleotide section; and

[0243] (3) the genomic sequence section

[0244] of the REF Table. The polypeptide section will indicate where the stop codon is located in the MLS sequence. The MLS sequence can be matched to the corresponding genomic sequence. Based on the match between MLS and corresponding genomic sequences, the location of the stop codon can be determined in one of the regions of the genomic sequence. The location of this stop codon is the end of the terminal exon. Generally, the first base of the exon of the corresponding genomic region that matches the cDNA sequence, in which the stop codon was located, will represent the beginning of the terminal exon. In some cases, the translational start site will represent the start of the terminal exon, which will be the only exon.

[0245] In the case when the MLS sequences are in the positive strand of the corresponding genomic sequence, the last base will be a larger number than the first base. When the MLS sequences are in the negative strand of the corresponding genomic sequence, then the last base will be a smaller number than the first base.

[0246] B. Intron Sequences

[0247] In addition, the introns corresponding to the MLS are defined by identifying the genomic sequence located between the regions where the genomic sequence comprises exons. Thus, introns are defined as starting one base downstream of a genomic region comprising an exon, and end one base upstream from a genomic region comprising an exon.

[0248] C. Promoter Sequences

[0249] As indicated below, promoter sequences corresponding to the MLS are defined as sequences upstream of the first exon; more usually, as sequences upstream of the first of multiple transcription start sites; even more usually as sequences about 2,000 nucleotides upstream of the first of multiple transcription start sites.

[0250] III. Link of cDNA Sequences to Clone IDs

[0251] As noted above, the REF Table identifies the cDNA clone(s) that relate to each MLS. The MLS sequence can be longer than the sequences included in the cDNA clones. In such a case, the REF Table indicates the region of the MLS that is included in the clone. If either the 5′ or 3′ termini of the cDNA clone sequence is the same as the MLS sequence, no mention will be made.

[0252] IV. Multiple Transcription Start Sites

[0253] Initiation of transcription can occur at a number of sites of the gene. The REF Table indicates the possible multiple transcription sites for each gene. In the REF Table, the location of the transcription start sites can be either a positive or negative number.

[0254] The positions indicated by positive numbers refer to the transcription start sites as located in the MLS sequence. The negative numbers indicate the transcription start site within the genomic sequence that corresponds to the MLS.

[0255] To determine the location of the transcription start sites with the negative numbers, the MLS sequence is aligned with the corresponding genomic sequence. In the instances when a public genomic sequence is referenced, the relevant corresponding genomic sequence can be found by direct reference to the nucleotide sequence indicated by the “gi” number shown in the public genomic DNA section of the Reference Table. When the position is a negative number, the transcription start site is located in the corresponding genomic sequence upstream of the base that matches the beginning of the MLS sequence in the alignment. The negative number is relative to the first base of the MLS sequence which matches the genomic sequence corresponding to the relevant “gi” number.

[0256] In the instances when no public genomic DNA is referenced, the relevant nucleotide sequence for alignment is the nucleotide sequence associated with the amino acid sequence designated by “gi” number of the later PolyP SEQ subsection.

[0257] V. Polypeptide Sequences

[0258] The PolyP SEQ subsection lists SEQ ID NOs and Ceres SEQ ID NO for polypeptide sequences corresponding to the coding sequence of the MLS sequence and the location of the translational start site with the coding sequence of the MLS sequence.

[0259] The MLS sequence can have multiple translational start sites and can be capable of producing more than one polypeptide sequence.

[0260] A. Signal Peptide

[0261] The REF tables also indicate in subsection (B) the cleavage site of the putative signal peptide of the polypeptide corresponding to the coding sequence of the MLS sequence. Typically, signal peptide coding sequences comprise a sequence encoding the first residue of the polypeptide to the cleavage site residue.

[0262] B. Domains

[0263] Subsection (C) provides information regarding identified domains (where present) within the polypeptide and (where present) a name for the polypeptide domain.

[0264] C. Related Polypeptides

[0265] Subsection (Dp) provides (where present) information concerning amino acid sequences that are found to be related and have some percentage of sequence identity to the polypeptide sequences of the Reference and Sequence Tables. These related sequences are identified by a “gi” number.

[0266] VI. Related Polynucleotide Sequences

[0267] Subsection (Dn) provides polynucleotide sequences (where present) that are related to and have some percentage of sequence identity to the MLS or corresponding genomic sequence.

| Abbreviation | Description |
|---|---|
| Max Len. Seq. | Maximum Length Sequence |
| rel to | Related to |
| Clone Ids | Clone ID numbers |
| Pub gDNA | Public Genomic DNA |
| gi No. | gi number |
| Gen. Seq. in Cdna | Genomic Sequence in cDNA |
| | (Each region for a single gene prediction is |
| | listed on a separate line. |
| | In the case of multiple gene predictions, the |
| | group of regions relating to a single prediction |
| | are separated by a blank line) |
| (Ac) cDNA SEQ | cDNA sequence |
| Pat. Appln. SEQ ID NO | Patent Application SEQ ID NO: |
| Ceres SEQ ID NO: | Ceres SEQ ID NO: |
| 1673877 | |
| SEQ # w. TSS | Location within the cDNA sequence, SEQ ID |
| | NO:, of Transcription Start Sites which are |
| | listed below |
| Clone ID #: # -> # | Clone ID comprises bases # to # of the cDNA |
| | Sequence |
| PolyP SEQ | Polypeptide Sequence |
| Pat. Appln. SEQ ID NO: | Patent Application SEQ ID NO: |
| Ceres SEQ ID NO | Ceres SEQ ID NO: |
| Loc. SEQ ID NO: @ nt. | Location of translational start site in cDNA of |
| | SEQ ID NO: at nucleotide number |
| (C) Pred. PP Nom. & | Nomination and Annotation of Domains within |
| Annot. | Predicted Polypeptide(s) |
| (Title) | Name of Domain |
| Loc. SEQ ID NO #: | Location of the domain within the polypeptide |
| # -> # aa. | of SEQ ID NO: from # to # amino acid |
| | residues. |
| (Dp) Rel. AA SEQ | Related Amino Acid Sequences |
| Align. NO | Alignment number |
| gi No | Gi number |
| Desp. | Description |
| % Idnt. | Percent identity |
| Align. Len. | Alignment Length |
| Loc. SEQ ID NO: | Location within SEQ ID NO: from # to # |
| # -> # aa | amino acid residue. |

2. MA DATA

[0268] The MA DATA presents the results of the differential expression experiments for the mRNAs, as reported by their corresponding cDNA ID number, that were differentially transcribed under a particular set of conditions as compared to a control sample. The cDNA ID numbers correspond to those utilized in the Reference and Sequence Tables. Increases in mRNA abundance levels in experimental plants versus the controls are denoted with the plus sign (+). Likewise, reductions in mRNA abundance levels in the experimental plants are denoted with the minus (−) sign.

[0269] The “cDNA_ID provides the identifier number for the cDNA tracked in the experiment. The column headed “SHORT_NAME” (e.g. At_{—}0.001%_MeJa_cDNA_P) provides a short description of the experimental conditions used. The column headed “EXPT_REP_ID” provides an identifier number for the particular experiment conducted. The values in the column heades “Differential” indicate whether expression of the cDNA was increased (+) or decreased (−) compared to the control.

[0270] In some cases, data relating to how the experiment was conducted follows the results of the experiment. Here, the data following the expression results provides the experimental parameters used in conducting the microarray experiment. Again, the “SHORT_NAME” identifies the experiment t(e.g. At_{—}0.001%_MeJa_cDNA_P). The firest column, “EXPT_REP_ID,” indicates the individual experiment (e.g. 108569). The comnd column, “PARAM_NAME,” identifies the parameter used (e.g. Timepoint (hr)), while the third column, “Value” provides the descriptor for the particular parameter (e.g. “6”). As an example, when read together one understands that the “methyl jasmonate” section of the Specification provides information pertinent to the 0.001% MeJA (methyl jasmonate experiment 108569, which contains data taken from a 6 hr timepoint.

3. MA Parameters Data

[0271] This data provides the experimental parameters used in conducting the microarray experiments. The first column indicates the pertinent section of the Specification. The second column provides the “Short Name” for the experiment (e.g. At_{—}0.001%_MeJA_cDNA_P). The third column gives the “Experiment ID” number. The fourth column is the particular parameter being described (e.g. Timepoint (hr)). The last column provides the descriptor for the particular parameter (e.g. “6”). As an example, when read together one understands that the “Methyl Jasmonate” section of the Specification provides information pertinent to the 0.001% MeJA (methyl jasmonate) experiment 108569, which contains data taken from a 6 hr Timepoint.

4. Ortholog Pair Data

[0272] This table lists pairs of orthologs that were identified using the T Blast X program. Each column contains a cDNA_id number corresponding to a sequence from Arabidopsis, wheat, corn, soybean or canola. The sequence corresponding to all cDNA_id numbers can be found in either the SEQ Table or the REF Table.

5. Phenotype Data

[0273] This table provides information regarding the phenotype associated with expression of particular cDNAs. The first column identifies the cDNA_id or clone_id number of the sequence associated with the experiment.

[0274] The “Promoter” column identifies the promoter used to drive expression of the cDNA. “35S” refers to the Cauliflower Mosaic Virus (CMV) 35S promoter while the remaining entries signify a particular cDNA_id number. The endogenous promoter for the identified cDNA sequence, located immediately upstream from the cDNA start site, was used. These sequences appear in the “Promoter Table”

[0275] The“line_id” column gives the identifier number associated with the plant transformed with the CDNA or clone listed in the first column. For example, “ME0589-01” is a plant that resulted from a unique independent insertion of cDNA 3265003 into the plant genome. Likewise, “ME0589-02” was also the result of a unique independent insertion event. Consequently, the portion of the identifier located after the dash (e.g. “-03,” “-04,” etc.) indicates which of the series of “T1” plants generated was scored for a phenotype. That is, if ten T1 plants were grown from the transformation involving cDNA 3265003, these would be identified as ME0589-01 to ME0589-10.

[0276] The “Phenotype Present?” column identifies whether a gross visual phenotype was present. “Yes” indicates that a phenotype different from wildtype was observed while “No” indicates no visible change from wildtype. “Questionable” indicates that the transformant showed a phenotype, but that it was uncertain whether the phenotype was due to the gene inserted or to other factors (e.g. environmental).

[0277] The “Developmental Stage” column provides information as to the developmental stage of the plant when it was scored for phenotype. The following chart correlates a numerical value with a short description of a particular developmental stage.

| DEV_STAGE | DESCRIPTION |
|---|---|
| 0 | N/A |
| 0.10 | Seed imbibition |
| 0.50 | Radical emergence |
| 0.70 | Hypocotyl and cotyledon emergence |
| 1.00 | Cotyledons fully opened |
| 1.02 | 2 rosette leaves 1 mm in length |
| 1.03 | 3 rosette leaves 1 mm in length |
| 1.04 | 4 rosette leaves 1 mm in length |
| 1.05 | 5 rosette leaves 1 mm in length |
| 1.06 | 6 rosette leaves 1 mm in length |
| 1.07 | 7 rosette leaves 1 mm in length |
| 1.08 | 8 rosette leaves 1 mm in length |
| 1.09 | 9 rosette leaves 1 mm in length |
| 1.10 | 10 rosette leaves 1 mm in length |
| 1.11 | 11 rosette leaves 1 mm in length |
| 1.12 | 12 rosette leaves 1 mm in length |
| 1.13 | 13 rosette leaves 1 mm in length |
| 1.14 | 14 rosette leaves 1 mm in length |
| 3.50 | Rosette is 50% of final size |
| 5.10 | First flower buds visible |
| 6.00 | First flower open |
| 6.10 | 10% of flowers to be produced have opened |
| 6.30 | 30% of flowers to be produced have opened |
| 6.50 | 50% of flowers to be produced have opened |
| 6.90 | Flowering complete |
| 8.00 | First silique shattered |
| 8.50 | 50% of the siliques have shattered |
| 9.70 | Senescence complete |
| 10.0 | All Stages |
| [NULL] | No mutant phenotype or plant died |

[0278] The “Phenotype Observed” column describes the phenotype associated with the plant transformed with the particular cDNA_id or clone_id. The term “[NULL]” appears when no gross visual phenotype was present or where the plant died. Note that a single plant line may have more than one phenotype associated with it. For example, ME05809-01 has a short petiole phenotype associated with its rosette leaves as well as an oval leaf shape.

22. Promoter Table

[0279] This data identifies nucleic acid promoter sequences using the heading “PROMOTER ID NO.” The “PROMOTER ID NO” is a number that identifies the sequence of the promoter used in the experiments

### II. HOW THE INVENTIONS REVEAL HOW GENES, GENE COMPONENTS AND PRODUCTS FUNCTION

[0280] The different experimental molecular genetic approaches focused on different aspects of genes, gene components, and gene products of the inventions. The variety of the data demonstrates the multiple functions and characteristics of single genes, gene components, and products. The data also explain the pathways and networks in which individual genes and products participate and interact. As a result, the circumstances or conditions are now known when these genes and networks are active. These new understandings of biology are relevant for many plant species. The following section describes the process by which Applicants analyzed the experimental result relavent to the present invention.

### II.A. Experimental Results Reveal Many Facets of a Single Gene

[0281] The experimental results are used to dissect the function of individual components and products of the genes. For example, the biochemical activity of the encoded protein could be surmised from sequence analyses, and promoter specificity could be identified through transcriptional analyses. Generally, the data presented herein can be used to functionally annotate either the protein sequence and/or the regulatory sequence that control transcription and translation.

### II.A.1. Functions of Coding Sequences Revealed by the Ceres Genomic Engine

II.A.1.a. Sequence Similarity to Proteins of Known Function Can be Used to Associate Biochemical Activities and Molecular Interaction to the Proteins of the Invention

[0282] The protein sequences of the invention were analyzed to determine if they shared any sequence characteristics with proteins of known activity. Proteins can be grouped together based on sequence similarity, either localized or throughout the length of the proteins. Typically, such groups of proteins exhibit common biochemical activities or interact with similar molecules.

II.A.1.a.1 Presence of Amino Acid Motifs Indicates Biological Function

[0283] Localized protein sequence similarity, also referred to as amino acid motifs, have been attributed to enzyme or protein functions. A library of motifs, important for function, have been documented in PROSITE, a public database available at http://www.expasy.ch/prosite/. This library includes descriptions of the motifs and their functions. The zinc finger motif is one such entry in PROSITE, which reports that the zinc finger domain of DNA-binding proteins is typically defined by a 25-30 amino acid motif containing specific cysteine or histidine residues that are involved in the tetrahedral coordination of a zinc ion. Any protein comprising a sequence similar to the zinc finger amino acid motif will have similar functional activity (specific binding of DNA).

[0284] Protein sequences of the invention have been compared to a library of amino acid motifs in the pFAM database, which is linked to the PROSITE database. If any of Applicants' protein sequences exhibit similarity to these amino acid motifs or domains, the Reference Table notes the name and location of the motif in the “Pred. PP Nom. & Annot” section of the Reference tables. A description of any biochemical activities that are associated to these domains, and therefore associated with Applicants' proteins, is included in the Protein Domain table.

[0285] For example, polypeptide, CERES Sequence ID NO: 1545823 is associated with zinc finger motif as follows in the Reference Table:

[0286] (C) Pred. PP Nom. & Annot.
[0287] Zinc finger, C3HC4 type (RING finger)
[0288] Loc. Sequence ID NO 133059: 58→106 aa.
   II.A.1.a.2 Related Amino Acid Sequences Share Similar Biological Functions

[0289] When studying protein sequence families, it is apparent that some regions have been better conserved than others during evolution. These regions are generally important for the function of a protein and/or for the maintenance of its three-dimensional structure.

[0290] The Reference Table reports in section “(Dp) Rel. AA Sequence” when a protein shares amino acid similarity with a protein of known activity. The section reports the gi number of the protein of known activity, a brief description of the activity, and the location where it shares sequence similarity to Applicants' polypeptide sequence.

[0291] Using this analysis, biochemical activity of the known protein is associated with Applicants' proteins. An example for the polypeptide described above is as follows:

[0292] (Dp) Rel. AA Sequence
[0293] Align. NO 524716
[0294] gi No 2502079
[0295] Desp.: (AF022391) immediate early protein; ICPO [Feline herpesvirus 1]
[0296] % Idnt.: 33.7
[0297] Align. Len.: 87
[0298] Loc. Sequence ID NO 133059: 52→137 aa.
   II.A.1.b. Differential Expression Results Explain in Which Cellular Responses the Proteins of the Invention are Involved

[0299] Differential expression results show when the coding sequence is transcribed, and therefore when the activity of the protein is deployed by the cell. Similar coding sequences can have very different physiological consequences because the sequences are expressed at different times or places, rather than because of any differences in protein activity. Therefore, modified levels (increased or decreased) of expression as compared to a control provide an indication of the function of a corresponding gene, gene components, and gene products.

[0300] These experiments can determine which are genes “over-expressed” under a given stimulus. Such over-expressed genes give rise to higher transcript levels in a plant or cell that is stimulated as compared to the transcript levels of the same genes in a control organism or cell. Similarly, differential expression experiments can reveal “under-expressed” genes.

[0301] To increase the cellular response to a stimulus, additional copies of the coding sequences of a gene that is over-expressed are inserted into a cell. Increasing transcript levels of an over-expressed gene can either heighten or prolong the particular cellular response. A similar enhancement can occur when transcription of an under-expressed gene is inhibited. In contrast, the cellular response will be shortened or less severe when the over-expressed genes are inhibited or when expression of the under-expressed genes are increased.

[0302] In addition to analyzing the levels of transcription, the data were also analyzed to gain insight into the changes in transcription over time. That is, while the plants in the experiments were reacting to either an external or internal stimulus, a differential experiment takes a snapshot of the transcription levels in the cells at one specific time. However, a number of snap-shots can be taken at different time points during an external stimulus regime or at different stages of development during an internal stimulus. These results show how the plant changes transcription levels over time, and therefore protein levels in response to specific stimuli to produce phenotypic changes. These results show that a protein can be implicated in a single, but more likely, in a number of cellular responses.

II.A.1.b.1. The Transcript Levels of a Protein Over Time in Response to a Stimuli are Revealed by Transcriptional Analyses Over Many Experiments

[0303] Applicants produced data from plants at different times after a specific stimulus. These results show whether the expression level of a gene spikes at a key moment during the cellular response, or whether the transcript level remains constant. Thus, coding sequences not only can be determined to be over- or under-expressed, but also can be classified by the initial timing and duration of differential expression. This understanding of timing can be used to increase or decrease any desired cellular response.

[0304] Generally, Applicants have assayed plants at 2 to 4 different time points after exposing the plants to the desired stimuli. From these experiments, “early” and “late” responders were identified. These labels are applied to either the regulatory sequences driving transcription of the gene as well as to the protein encoded by the gene.

[0305] The following example illustrates how the genes, gene components and products were classified as either early or late responders following a specific. The mRNAs from plants exposed to drought conditions were isolated 1 hour and 6 hours after exposure to drought conditions. These mRNAs were tested utilizing microarray techniques. The graph below illuminates possible transcription profiles over the time course, plotting all the (+) data points as +1 and all the (−) data points as −1:

[image]

[0306] (The value for each time point was determined using a pair of microarray chips as described above.)

[0307] Data acquired from this type of time course experiment are useful to understand how one may increase or decrease the speed of the cellular response. Inserting into a cell extra copies of the coding sequence of early responders in order to over-express the specific gene can trigger a faster cellular response. Alternatively, coding sequences of late responders that are over-expressed can be placed under the control of promoters of early responders as another means to increase the cellular response.

[0308] Inserting anti-sense or sense mRNA suppression constructs of the early responders that are over-expressed can retard action of the late responders, thereby delaying the desired cellular response. In another embodiment, extra copies of the promoters of both early and late responders can be added to inhibit expression of both types of over-expressed genes.

[0309] The experiments described herein are grouped together to determine the time course of the transcript levels of different coding sequences in response to different stimuli.

II.A.1.b.2. The Transcript Levels of a Protein Over Different Developmental Stages Can be Identified by Transcriptional Analyses Over Many Experiments

[0310] Differential expression data were produced for different development stages of various organs and tissues. Measurement of transcript levels can divulge whether specific genes give rise to spikes of transcription at specific times during development, or whether transcription levels remain constant. This understanding can be used to increase speed of development, or to arrest development at a specific stage.

[0311] Like the time-course experiments, the developmental stage data can classify genes as being transcribed at early or late stages of development. Generally, Applicants assayed different organs or tissues at 2-4 different stages.

[0312] Inhibiting under-expressed genes at either early or late stages can trigger faster development times. The overall development time also can be increased by this means to allow organs and tissue to grow to a larger size or to allow more organs or tissues to be produced. Alternatively, coding sequences of late stage genes that are under-expressed can be placed under the control of promoters of early stage genes to increase heighten development.

[0313] Inserting extra copies of the coding sequence early stage genes that are under-expressed can retard action of the late-stage genes and delay the desired development.

[0314] Fruit development of Arabidopsis is one example that can be studied. Siliques of varying sizes, which are representative of different stages, were assayed by microarray techniques. Specifically, mRNA was isolated from siliques between 0-5 mm, between 5-10 mm and >10 mm in length. The graph below shows expression pattern of a cell wall synthesis gene, cDNA ID 1595707, during fruit development:

[image]

[0315] The developmental course shows that the gene encoding a cell wall synthesis protein is up-regulated when the fruit is 0-5 mm but returns to normal levels at 5-10 mm and >10 mm. Increase of cell wall synthesis can lead to larger cells and/or greater number of cells. This type of increase can boost fruit yield. The coding sequence of the cell wall synthesis protein under the control of a strong early stage promoter would increase fruit size or number.

[0316] A pectinesterase gene was also differentially expressed during fruit development, cDNA ID 1396123. Pectinesterase catalyzes the hydrolysis of pectin into pectate and methanol. This biochemical activity plays an important role in cell wall metabolism during fruit ripening. To shorten the time for fruit ripening, extra copies of this gene with its endogenous promoter can be inserted into a desired plant. With its native promoter, the extra copies of the gene will be expressed at the normal time, to promote extra pectinesterase at the optimal stage of fruit development thereby shortening ripening time.

II.A.1.b.3. Proteins that are Common in a Number of Similar Responses Can be Identified by Transcriptional Analyses Over a Number of Experiments

[0317] The differential expression experiments also reveal the genes, and therefore the coding sequence, that are common to a number of cellular responses. By identifying the genes that are differentially expressed in a number of similar responses, the genes at the nexus of a range of responses are discovered. For example, genes that are differentially expressed in all the stress responses are at the hub of many of the stress response pathways.

[0318] These types of nexus genes, proteins, and pathways are differentially expressed in many or majority of the responses or developmental conditions of interest. Typically, a nexus gene, protein, or pathway is differentially expressed in generally the same direction in many or majority of all the desired experiments. By doing so, the nexus gene can be responsible for triggering the same or similar set of pathways or networks for various cellular responses. This type of gene is useful in modulating pleiotropic effects or triggering or inhibiting a general class of responses.

[0319] When nexus genes are differentially expressed in a set of responses, but in different directions, these data indicate that a nexus gene is responsible for creating the specificity in a response by triggering the same pathway but to a different degree. Placing such nexus genes under a constitutive promoter to express the proteins at a more constant level can remove the fluctuations. For example, a plant that is better drought adapted, but not cold adapted can be modified to be tolerant to both conditions by placing under the control of a constitutive promoter a nexus gene that is up-regulated in drought but down regulated in cold.

[0320] Applicants' experiments can be grouped together to identify such nexus genes. Examples of these groups are as follows:
[0321] Herbicide Response
   [0322] Trimec, Finale, Glean, Round-up
[0323] Stress Response
   [0324] Drought, Cold, Heat, Osmotic, PEG, Trimec, Finale, Glean, Round-up
   [0325] Wounding, SA, MeJA, Reactive Oxygen, NO
[0326] Hormone Responses
   [0327] NAA, BA, BR, GA,
   [0328] NAA, Trimec
      II.A.1.b.4. Proteins that are Common to Disparate Responses Can be Identified by Transcriptional Analyses Over a Number of Experiments

[0329] Phenotypes and traits result from complex interactions between cellular pathways and networks. Which pathways are linked by expression of common genes to specify particular traits can be discerned by identifying the genes that show differential expression of seemingly disparate responses or developmental stages. For example, hormone fluxes in a plant can direct cell patterning and organ development. Genes that are differentially expressed both in the hormone experiments and organ development experiments would be of particular interest to control plant development.

[0330] Examples of Such Pathway Interactions Include:
[0331] (i) The Interaction Between Stress Tolerance Pathways And Metabolism Pathways;
[0332] (ii) Interaction Between Hormone Responses And Developmental Changes In The Plant;
[0333] (iii) Interactions Between Nutrient Uptake And Developmental Changes;
[0334] (iv) Mediation of Stress Response by Hormone Responses; And
[0335] (v) Interactions Between Stress Response And Development.
   Applicant's experiments can be grouped together to identify proteins that participate in interacting pathways or networks. Specific groups of experiments include, for example:
[0336] (i) Stress & Metabolism
   [0337] Germinating Seeds
[0338] (ii) Hormones & Development
   [0339] NAA, BA & Root Tips, Roots And/Or Root Tips, Leaf, ABA & Siliques (Of Any Size), GA, Imbibed & Germinating Seeds, Tissue Specific Expression
[0340] (iii) Nutrient Uptake and Development
   [0341] Any or All Nitrogen Experiments With Siliques (Of Any Size), Roots Or Root Tips
[0342] (iv) Stress & Hormones
   [0343] ABA, Drought, Cold, Heat, & Wounding, Tissue Specific Expression
[0344] (v) Stress & Hormones Stress & Hormones
   [0345] Nitrogen High transition to Low, Tissue Specific Expression
      II.A.1.c. Observations of Phenotypic Changes Show what Physiological Consequences Applicants' Proteins Can Produce

[0346] Another direct means of determining the physiological consequences of a protein is to make aberrant decreases or increases of its expression level in a cell. To this end, Applicants have produced plants where specific genes have been disrupted, or produced plants that include an extra expressed copy of the gene. The plants were then planted under various conditions to determine if any visible physiological changes are caused. These changes then are attributed to the changes in protein levels.

### II.A.2. Differential Expression Results Explain which External or Internal Stimuli Trigger the Regulatory Sequences

[0347] Transcriptional studies can reveal the time and place that genes are expressed. Typically, regulatory sequences, such as promoters, introns, UTRs, etc., control when and in which cells transcription occurs. Differential studies can explain the temporal- and location-specific regulatory sequences that control transcription.

[0348] Using the experiments that are provided herein, one skilled in the art can choose a promoter or any other regulatory sequence that is capable of facilitating the desired pattern of transcription. For example, if a promoter is needed to give rise to increased levels of transcription in response to Auxin, but little expression in response to cytokinin, then the promoters of cDNAs that were up-regulated in the Auxin experiments, but down-regulated the cytokinin experiments would be of interest.

[0349] Time Course Experiments—Time Sensitive

[0350] Evaluation of time-course data as described above is also useful to identify time-specific promoters. Promoters or regulatory sequences, like the coding sequences, can be classified as early or late responding according to the microarray data. Promoters that facilitate expression of early or late genes are useful to direct expression of heterologous coding sequences to modulate the cellular response. In the drought data, promoters from “early” responding genes can be selected to activate expression of any desired coding sequence. Thus, a coding sequence for a salt-tolerance protein that is not typically expressed early in response to drought could be linked to an “early” responding promoter to increase salt tolerance within one hour after exposure to drought conditions.

[0351] Developmental Experiments—Time Sensitive

[0352] Another class of time-sensitive promoters and other regulatory sequence can be identified from the experiments examining different developmental stages. These regulatory sequences can drive transcription of heterologous sequence at particular times during development. For example, expression of stress-responsive genes during fruit development can protect any gain in fruit yield.

[0353] Common to Many Pathways—Cause General Effects

[0354] Promoters and other regulatory sequence associated with cDNAs that are differentially expressed in a number of similar responses can be used to cause general effects. These types of regulatory sequences can be used to inhibit or increase expression of a desired coding sequence in a number circumstances. For example, protein that is capable of acting as an insecticide can be placed under the control a general “stress” promoter to increase expression, not only when the plant is wounded, but under other stress attack.

### II.B. Experimental Results Also Reveal the Functions of Genes

### II.B.1. Linking Signature Sequences to Conservation of Biochemical Activities and Molecular Interactions

[0355] Proteins that possess the same defined domains or motifs are likely to carry out the same biochemical activity or interact with a similar class of target molecule, e.g., DNA, RNA, proteins, etc. Thus, the pFAM domains listed in the Reference Tables are routinely used as predictors of these properties. Substrates and products for the specific reactions can vary from protein to protein. Where the substrates, ligands, or other molecules bound are identical the affinities may differ between the proteins. Typically, the affinities exhibited by different functional equivalents varies no more than 50%; more typically, no more than 25%; even more typically, no more than 10%; or even less.

[0356] Proteins with very similar biochemical activities or molecular interactions will share similar structural properties, such as substrate grooves, as well as sequence similarity in more than one motif. Usually, the proteins will share at least two motifs of the signature sequence; more usually, three motifs; even more usually four motifs or greater. Typically, the proteins exhibit 70% sequence identity in the shared motifs; more typically, 80% sequence identity; even more typically, 90% sequence identity or greater. These proteins also often share sequence similarity in the variable regions between the constant motif regions. Further, the shared motifs will be in the same order from amino- to carboxyl-termini. The length of the variable regions between the motifs in these proteins, generally, is similar. Specifically, the number of residues between the shared motifs in these proteins varies by less than 25%; more usually, does not vary by less than 20%; even more usually, less than 15%; even more usually less than 10% or even less.

### II.B.2. Linking Signature Sequences to Conservation of Cellular Responses or Activities

[0357] Proteins that exhibit similar cellular response or activities will possess the structural and conserved domain/motifs as described in the Biochemical Activities and Molecular Interactions above.

[0358] Proteins can play a larger role in cellular response than just their biochemical activities or molecular interactions suggest. A protein can initiate gene transcription, which is specific to the drought response of a cell. Other cellular responses and activities include: stress responses, hormonal responses, growth and differential of a cell, cell to cell interactions, etc.

[0359] The cellular role or activities of protein can be deduced by transcriptional analyses or phenotypic analyses as well as by determining the biochemical activities and molecular interactions of the protein. For example, transcriptional analyses can indicate that transcription of gene A is greatly increased during flower development. Such data would implicate protein A encoded by gene A, in the process of flower development. Proteins that shared sequence similarity in more than one motif would also act as functional equivalents for protein A during flower development.

### III. DESCRIPTION OF THE GENES, GENE COMPONENTS AND PRODUCTS, TOGETHER WITH THEIR USE AND APPLICATION

[0360] As described herein, the results of Applicant's experiments provide an understanding of the function and phenotypic implications of the genes, gene components and products of the present invention. Bioinformatic analysis provides such information. The sections of the present application containing the bioinformatic analysis, together with the Sequence and Reference Tables, teach those skilled in the art how to use the genes, gene components and products of the present invention to provide plants with novel characteristics. Similarly, differential expression analysis provides additional such information and the sections of the present application on that analysis; together with the MA_Diff Tables and MA_Cluster Tables, describe the functions of the genes, gene components and products of the present invention which are understood from the results of the differential expression experiments. The same is true with respect to the phenotype data, wherein the results of the Knock-in and Knock-out experiments and the sections of the present application on those experiments provide the skilled artisan with further description of the functions of the genes, gene components and products of the present invention.

[0361] As a result, one reading each of these sections of the present application as an independent report will understand the function of the genes, gene components and products of the present invention. But those sections and descriptions can also be read in combination, in an integrated manner, to gain further insight into the functions and uses for the genes, gene components and products of the present invention. Such an integrated analysis does not require extending beyond the teachings of the present application, but rather combining and integrating the teachings depending upon the particular purpose of the reader.

[0362] Some sections of the present application describe the function of genes, gene components and products of the present invention with reference to the type of plant tissue (e.g. root genes, leaf genes, etc.), while other sections describe the function of the genes, gene components and products with respect to responses under certain conditions (e.g. Auxin-responsive genes, heat-responsive genes, etc.). Thus, if one desires to utilize a gene understood from the application to be a particular tissue-type of gene, then the condition-specific responsiveness of that gene can be understood from the differential expression tables, and very specific characteristics of actions of that gene in a transformed plant will be understood by recognizing the overlap or intersection of the gene functions as understood from the two different types of information. Thus, for example, if one desires to transform a plant with a root gene for enhancing root growth and performance, one can know the useful root genes from the results reported in the knock-in and knock-out tables. A review of the differential expression data may then show that a specific root gene is also over-expressed in response to heat and osmotic stress. The function of that gene is then described in (1) the section of the present application that discusses root genes, (2) the section of the present application that discusses heat-responsive genes, and (3) the section of the application that discusses osmotic stress-responsive genes. The function(s) which are commonly described in those three sections will then be particularly characteristic of a plant transformed with that gene. This type of integrated analysis of data can be viewed from the following schematic that summarizes, for one particular gene, the function of that gene as understood from the phenotype and differential expression experiments.

| Gene function known | Gene function known | Gene function known |
|---|---|---|
| from phenotype | from first differential | from second differential |
| experiments | expression experiment | expression experiment |
| Function A | Function A | Function A |
| Function B | | |
| | Function C | Function C |
| | Function D | |
| | | Function E |
| Function F | Function F | Function F |
| Function G | Function G | |
| | | Function H |
| Function I | | Function I |
| | Function J | |

[0363] In the above example, one skilled in the art will understand that a plant transformed with this particular gene will particularly exhibit functions A and F because those are the functions which are understood in common from the three different experiments.

[0364] Similar analyses can be conducted on various genes of the present invention, by which one skilled in the art can effectively modulate plant functions depending upon the particular use or conditions envisioned for the plant.

### III.A. Organ-Affecting Genes, Gene Components, Products (Including Diferentation and Function)

### III.A.1. Root Genes, Gene Components and Products

[0365] The economic values of roots arise not only from harvested adventitious roots or tubers, but also from the ability of roots to funnel nutrients to support growth of all plants and increase their vegetative material, seeds, fruits, etc. Roots have four main functions. First, they anchor the plant in the soil. Second, they facilitate and regulate the molecular signals and molecular traffic between the plant, soil, and soil fauna. Third, the root provides a plant with nutrients gained from the soil or growth medium. Fourth, they condition local soil chemical and physical properties.

### Use of Promoters of Root Genes

[0366] Promoters of root genes, as described in the Reference tables, for example, can be used to modulate transcription that is induced by root development or any of the root biological processes or activities above. For example, when a selected polynucleotide sequence is operably linked to a promoter of a root gene, then the selected sequence is transcribed in the same or similar temporal, development or environmentally-specific patterns as the root gene from which the promoter was taken. The root promoters can also be used to activate antisense copies of any coding sequence to achieve down regulation of its protein product in roots. They can also be used to activate sense copies of mRNAs by RNA interference or sense suppression in roots.

### III.A.2. Root Hair Genes, Gene Components and Products

[0367] Root hairs are specialized outgrowths of single epidermal cells termed trichoblasts. In many and perhaps all species of plants, the trichoblasts are regularly arranged around the perimeter of the root. In Arabidopsis, for example, trichoblasts tend to alternate with non-hair cells or atrichoblasts. This spatial patterning of the root epidermis is under genetic control, and a variety of mutants have been isolated in which this spacing is altered or in which root hairs are completely absent.

### Use of Promotors of Root Hair Genes

[0368] Promoters of root hair development genes, as described in the Reference tables, for example, are useful to modulate transcription that is induced by root hair development or any of the following phenotypes or biological activities above. For example, any desired sequence can be transcribed in similar temporal, tissue, or environmentally-specific patterns as the root hair genes when the desired sequence is operably linked to a promoter of a root hair responsive gene.

### III.A.3. Leaf Genes, Gene Components and Products

[0369] Leaves are responsible for producing most of the fixed carbon in a plant and are critical to plant productivity and survival. Great variability in leaf shapes and sizes is observed in nature. Leaves also exhibit varying degrees of complexity, ranging from simple to multi-compound. Leaf genes as defined here, not only modulate morphology, but also influence the shoot apical meristem, thereby affecting leaf arrangement on the shoot, intemodes, nodes, axillary buds, photosynthetic capacity, carbon fixation, photorespiration and starch synthesis. Leaf genes elucidated here can be used to modify a number of traits of economic interest from leaf shape to plant yield, including stress tolerance, and to modify the efficiency of synthesis and accumulation of specific metabolites and macromolecules.

### Use of Leaf Gene Promoters

[0370] Promoters of leaf genes are useful for transcription of desired polynucleotides, both plant and non-plant. If the leaf gene is expressed only in leaves, or specifically in certain kinds of leaf cells, the promoter is used to drive the synthesis of proteins specifically in those cells. For example, extra copies of carbohydrate transporter cDNAs operably linked to a leaf gene promoter and inserted into a plant increase the “sink” strength of leaves. Similarly, leaf promoters are used to drive transcription of metabolic enzymes that alter the oil, starch, protein, or fiber contents of a leaf. Alternatively, leaf promoters direct expression of non-plant genes that can, for instance, confer insect resistance specifically to a leaf. Additionally the promoters are used to synthesize an antisense mRNA copy of a gene to inactivate the normal gene expression into protein. The promoters are used to drive synthesis of sense RNAs to inactivate protein production via RNA interference.

### III.A.4. Trichome Genes and Gene Components

[0371] Trichomes, defined as hair-like structures that extend from the epidermis of aerial tissues, are present on the surface of most terrestrial plants. Plant trichomes display a diverse set of structures, and many plants contain several types of trichomes on a single leaf. The presence of trichomes can increase the boundary layer thickness between the epidermal tissue and the environment, and can reduce heat and water loss. In many species, trichomes are thought to protect the plant against insect or pathogen attack, either by secreting chemical components or by physically limiting insect access to or mobility on vegetative tissues. The stellate trichomes of Arabidopsis do not have a secretory anatomy, but at a functional level, they might limit herbivore access to the leaf in the field. In addition, trichomes are known to secrete economically valuable substances, such as menthol in mint plants.

### Use of Promoters of Trichome Genes

[0372] Promoters of trichome genes are useful for facilitating transcription of desired polynucleotides, both plant and non-plant in trichomes. For example, extra copies of existing terpenoid synthesis coding sequences can be operably linked to a trichome gene promoter and inserted into a plant to increase the terpenoids in the trichome. Alternatively, trichome promoters can direct expression of non-plant genes or genes from another plant species that can, for instance, lead to new terpenoids being made. The promoters can also be operably linked to antisense copies of coding sequences to achieve down regulation of these gene products in cells.

### III.A5. Chloroplasts Genes, Gene Components and Products

[0373] The chloroplast is a complex and specialized organelle in plant cells. Its complexity comes from the fact that it has at least six suborganellar compartments subdivided by double-membrane envelope and internal thylakoid membranes. It is specialized to carry out different biologically important processes including photosynthesis and amino acid and fatty acid biosynthesis. The biogenesis and development of chloroplast from its progenitor (the proplasptid) and the conversion of one form of plastid to another (e.g., from chloroplast to amyloplast) depends on several factors that include the developmental and physiological states of the cells.

[0374] One of the contributing problems that complicate the biogenesis of chloroplast is the fact that some, if not most, of its components must come from the outside of the organelle itself. The import mechanisms must take into account to what part within the different sub-compartments the proteins are being targeted; hence the proteins being imported from the cytoplasm must be able to cross the different internal membrane barriers before they can reach their destinations. The import mechanism must also take into account how to tightly coordinate the interaction between the plastid and the nucleus such that both nuclear and plastidic components are expressed in a synchronous and orchestrated manner. Changes in the developmental and physiological conditions within or surrounding plant cells can consequently change this tight coordination and therefore change how import mechanisms are regulated as well. Manipulation of these conditions and modulation of expression of the import components and their function can have critical and global consequences to the development of the plant and to several biochemical pathways occurring outside the chloroplast.

### Use of Promoters of Chloroplast Genes

[0375] Promoters of Chloroplast genes are useful for transcription of any desired polynucleotide or plant or non-plant origin. Further, any desired sequence can be transcribed in a similar temporal, tissue, or environmentally specific patterns as the Chloroplast genes where the desired sequence is operably linked to a promoter of a Chloroplast gene. The protein product of such a polynucleotide is usually synthesized in the same cells, in response to the same stimuli as the protein product of the gene from which the promoter was derived. Such promoter are also useful to produce antisense mRNAs to down-regulate the product of proteins, or to produce sense mRNAs to down-regulate mRNAs via sense suppression

### III.A.6. Reproduction Genes, Gene Components and Products

[0376] Reproduction genes are defined as genes or components of genes capable of modulating any aspect of sexual reproduction from flowering time and inflorescence development to fertilization and finally seed and fruit development. These genes are of great economic interest as well as biological importance. The fruit and vegeTable industry grosses over $1 billion USD a year. The seed market, valued at approximately $15 billion USD annually, is even more lucrative.

### Use of Promoters and Reproduction Genes

[0377] Promoter of reproduction genes are useful for transcription of desired polynucleotides, both plant and non-plant. For example, extra copies of carbohydrate transporter genes can be operably linked to a reproduction gene promoter and inserted into a plant to increase the “sink” strength of flowers or siliques. Similarly, reproduction gene promoters can be used to drive transcription of metabolic enzymes capable of altering the oil, starch, protein or fiber of a flower or silique. Alternatively, reproduction gene promoters can direct expression of non-plant genes that can, for instance confer insect resistance specifically to a flower.

### III.A.7. Ovule Genes, Gene Components and Products

[0378] The ovule is the primary female sexual reproductive organ of flowering plants. It contains the egg cell and, after fertilization occurs, contains the developing seed. Consequently, the ovule is at times comprised of haploid, diploid and triploid tissue. As such, ovule development requires the orchestrated transcription of numerous polynucleotides, some of which are ubiquitous, others that are ovule-specific and still others that are expressed only in the haploid, diploid or triploid cells of the ovule.

[0379] Although the morphology of the ovule is well known, little is known of these polynucleotides and polynucleotide products. Mutants allow identification of genes that participate in ovule development. As an example, the pistillata (PI) mutant replaces stamens with carpels, thereby increasing the number of ovules present in the flower.

### Use of Promoters of Ovule Genes

[0380] Promoters of Ovule genes are useful for transcription of any desired polynucleotide or plant or non-plant origin. Further, any desired sequence can be transcribed in a similar temporal, tissue, or environmentally specific patterns as the Ovule genes where the desired sequence is operably linked to a promoter of a Ovule gene. The protein product of such a polynucleotide is usually synthesized in the same cells, in response to the same stimuli as the protein product of the gene from which the promoter was derived. Such promoter are also useful to produce antisense mRNAs to down-regulate the product of proteins, or to produce sense mRNAs to down-regulate mRNAs via sense suppression.

### III.A.8. Seed and Fruit Development Genes, Gene Components and Products

[0381] The ovule is the primary female sexual reproductive organ of flowering plants. At maturity it contains the egg cell and one large central cell containing two polar nuclei encased by two integuments that, after fertilization, develops into the embryo, endosperm, and seed coat of the mature seed, respectively. As the ovule develops into the seed, the ovary matures into the fruit or silique. As such, seed and fruit development requires the orchestrated transcription of numerous polynucleotides, some of which are ubiquitous, others that are embryo-specific and still others that are expressed only in the endosperm, seed coat, or fruit. Such genes are termed fruit development responsive genes.

### Use of Promoters of Seed and Fruit Development Genes

[0382] Promoters of seed and fruit development genes are useful for transcription of any desired polynucleotide or plant or non-plant origin. Further, any desired sequence can be transcribed in a similar temporal, tissue, or environmentally specific patterns as the seed and fruit development genes where the desired sequence is operably linked to a promoter of a seed and fruit development gene. The protein product of such a polynucleotide is usually synthesized in the same cells, in response to the same stimuli as the protein product of the gene from which the promoter was derived. Such a promoter is also useful to produce antisense mRNAs to down-regulate the product of proteins, or to produce sense mRNAs to down-regulate mRNAs via sense suppression.

### III.B. Development Genes, Gene Components and Products

### III.B.1. Imbibition and Germination Responsive Genes, Gene Components and Products

[0383] Seeds are a vital component of the world's diet. Cereal grains alone, which comprise ˜90% of all cultivated seeds, contribute up to half of the global per capita energy intake. The primary organ system for seed production in flowering plants is the ovule. At maturity, the ovule consists of a haploid female gametophyte or embryo sac surrounded by several layers of maternal tissue including the nucleus and the integuments. The embryo sac typically contains seven cells including the egg cell, two synergids, a large central cell containing two polar nuclei, and three antipodal cells. That pollination results in the fertilization of both egg and central cell. The fertilized egg develops into the embryo. The fertilized central cell develops into the endosperm. And the integuments mature into the seed coat. As the ovule develops into the seed, the ovary matures into the fruit or silique. Late in development, the developing seed ends a period of extensive biosynthetic and cellular activity and begins to desiccate to complete its development and enter a dormant, metabolically quiescent state. Seed dormancy is generally an undesirable characteristic in agricultural crops, where rapid germination and growth are required. However, some degree of dormancy is advantageous, at least during seed development. This is particularly true for cereal crops because it prevents germination of grains while still on the ear of the parent plant (preharvest sprouting), a phenomenon that results in major losses to the agricultural industry. Extensive domestication and breeding of crop species have ostensibly reduced the level of dormancy mechanisms present in the seeds of their wild ancestors, although under some adverse environmental conditions, dormancy may reappear. By contrast, weed seeds frequently mature with inherent dormancy mechanisms that allow some seeds to persist in the soil for many years before completing germination.

[0384] Germination commences with imbibition, the uptake of water by the dry seed, and the activation of the quiescent embryo and endosperm. The result is a burst of intense metabolic activity. At the cellular level, the genome is transformed from an inactive state to one of intense transcriptional activity. Stored lipids, carbohydrates and proteins are catabolized fueling seedling growth and development. DNA and organelles are repaired, replicated and begin functioning. Cell expansion and cell division are triggered. The shoot and root apical meristem are activated and begin growth and organogenesis. Schematic 4 summarizes some of the metabolic and cellular processes that occur during imbibition. Germination is complete when a part of the embryo, the radicle, extends to penetrate the structures that surround it. In Arabidopsis, seed germination takes place within twenty-four (24) hours after imbibition. As such, germination requires the rapid and orchestrated transcription of numerous polynucleotides. Germination is followed by expansion of the hypocotyl and opening of the cotyledons. Meristem development continues to promote root growth and shoot growth, which is followed by early leaf formation.

### Use of Promoters of Imbibition and Germination Genes

[0385] These promoters can be used to control expression of any polynucleotide, plant or non-plant, in a plant host. Selected promoters when operably linked to a coding sequence can direct synthesis of the protein in specific cell types or to loss of a protein product, for example when the coding sequence is in the antisense configuration. They are thus useful in controlling changes in imbibition and germination phenotypes or enabling novel proteins to be made in germinating seeds.

### III.B.2. Early Seedling-Phase Specific Responsive Genes, Gene Components and Products

[0386] One of the more active stages of the plant life cycle is a few days after germination is complete, also referred to as the early seedling phase. During this period the plant begins development and growth of the first leaves, roots, and other organs not found in the embryo. Generally this stage begins when germination ends. The first sign that germination has been completed is usually that there is an increase in length and fresh weight of the radicle.

### Use of Promoters of Early Seedling-Phase Genes

[0387] Promoters of early seedling phase genes are useful for transcription of desired polynucleotides, both plant and non-plant. If the gene is expressed only in the post-germination seedling, or in certain kinds of leaf cells, the promoter is used to drive the synthesis of proteins specifically in those cells. For example, extra copies of carbohydrate transporter cDNAs operably linked to a early seedling phase gene promoter and inserted into a plant increase the “sink” strength of leaves. Similarly, early seedling phase promoters are used to drive transcription of metabolic enzymes that alter the oil, starch, protein, or fiber contents of the seedling. Alternatively, the promoters direct expression of non-plant genes that can, for instance, confer resistance to specific pathogen. Additionally the promoters are used to synthesize an antisense mRNA copy of a gene to inactivate the normal gene expression into protein. The promoters are used to drive synthesis of sense RNAs to inactivate protein production via RNA interference.

### III.B.3. Size and Stature Genes, Gene Components and Products

[0388] Great agronomic value can result from modulating the size of a plant as a whole or of any of its organs. For example, the green revolution came about as a result of creating dwarf wheat plants, which produced a higher seed yield than taller plants because they could withstand higher levels and inputs of fertilizer and water. Size and stature genes elucidated here are capable of modifying the growth of either an organism as a whole or of localized organs or cells. Manipulation of such genes, gene components and products can enhance many traits of economic interest from increased seed and fruit size to increased lodging resistance. Many kinds of genes control the height attained by a plant and the size of the organs. For genes additional to the ones in this section other sections of the Application should be consulted.

### Use of Promoters of “Size and Stature” Genes

[0389] Promoters of “size and stature” genes are useful for controlling the transcription of any desired polynucleotides, both plant and non-plant. They can be discovered from the “size and stature” genes in the Reference Tables, and their patterns of activity from the MA Tables. When operably linked to any polynucleotide encoding a protein, and inserted into a plant, the protein will be synthesized in those cells in which the promoter is active. Many “size and stature” genes will function in meristems, so the promoters will be useful for expressing proteins in meristems. The promoters can be used to cause loss of, as well as synthesis of, specific proteins via antisense and sense suppression approaches.

### III.B.4. Shoot-Apical Meristem Genes, Gene Components and Products

[0390] New organs, stems, leaves, branches and inflorescences develop from the stem apical meristem (SAM). The growth structure and architecture of the plant therefore depends on the behavior of SAMs. Shoot apical meristems (SAMs) are comprised of a number of morphologically undifferentiated, dividing cells located at the tips of shoots. SAM genes elucidated here are capable of modifying the activity of SAMs and thereby many traits of economic interest from ornamental leaf shape to organ number to responses to plant density.

### Use of SAM Gene Promoters to Modify SAMS

[0391] Promoters of SAM genes, as described in the Reference tables, for example, can be used to modulate transcription of coding sequences in SAM cells to influence growth, differentiation or patterning of development or any of the phenotypes or biological activities above. For example, any desired sequence can be transcribed in similar temporal, tissue, or environmentally specific patterns as a SAM gene when the desired sequence is operably linked to the promoter of the SAM gene.

[0392] A specific instance is linking of a SAM gene promoter normally active in floral meristem primordia, to a phytotoxic protein coding sequence to inhibit apical meristem switching into an inflorescence and/or floral meristem, thereby preventing flowering.

[0393] SAM gene promoters can also be used to induce transcription of antisense RNA copies of a gene or an RNA variant to achieve reduced synthesis of a specific protein in specific SAM cells. This provides an alternative way to the example above, to prevent flowering.

### III.B.5. Vegetative-Phase Specific Responsive Genes, Gene Components and Products

[0394] Often growth and yield are limited by the ability of a plant to tolerate stress conditions, including water loss. To combat such conditions, plant cells deploy a battery of responses that are controlled by a phase shift, from so called juvenile to adult. These changes at distinct times involve, for example, cotyledons and leaves, guard cells in stomata, and biochemical activities involved with sugar and nitrogen metabolism. These responses depend on the functioning of an internal clock, that becomes entrained to plant development, and a series of downstream signaling events leading to transcription-independent and transcription-dependent stress responses. These responses involve changes in gene expression.

### Use of Promoters of Phase Responsive Genes

[0395] Promoters of phase responsive genes are useful for transcription of any desired polynucleotide or plant or non-plant origin. Further, any desired sequence can be transcribed in a similar temporal, tissue, or environmentally specific patterns as the phase responsive genes where the desired sequence is operably linked to a promoter of a phase responsive gene. The protein product of such a polynucleotide is usually synthesized in the same cells, in response to the same stimuli as the protein product of the gene from which the promoter was derived. Such promoter are also useful to produce antisense mRNAs to down-regulate the product of proteins, or to produce sense mRNAs to down-regulate mRNAs via sense suppression.

### III.C. Horomone Responsive Genes, Gene Components and Products

### III.C.1. Abiscissic Acid Responsive Genes, Gene Components and Products

[0396] Plant hormones are naturally occurring substances, effective in very small amounts, which act as signals to stimulate or inhibit growth or regulate developmental processes in plants. Abscisic acid (ABA) is a ubiquitous hormone in vascular plants that has been detected in every major organ or living tissue from the root to the apical bud. The major physiological responses affected by ABA are dormancy, stress stomatal closure, water uptake, abscission and senescence. In contrast to Auxins, cytokinins and gibberellins, which are principally growth promoters, ABA primarily acts as an inhibitor of growth and metabolic processes.

### Use of Promoters of ABA Responsive Genes

[0397] Promoters of ABA responsive genes are useful for transcription of any desired polynucleotide or plant or non-plant origin. Further, any desired sequence can be transcribed in a similar temporal, tissue, or environmentally specific patterns as the ABA responsive genes where the desired sequence is operably linked to a promoter of a ABA responsive gene. The protein product of such a polynucleotide is usually synthesized in the same cells, in response to the same stimuli as the protein product of the gene from which the promoter was derived. Such promoter are also useful to produce antisense mRNAs to down-regulate the product of proteins, or to produce sense mRNAs to down-regulate mRNAs via sense suppression.

### III.C.2. Auxin Responsive Genes, Gene Components and Products

[0398] Plant hormones are naturally occurring substances, effective in very small amounts that stimulate or inhibit growth or regulate developmental processes in plants. One of the plant hormones is indole-3-acetic acid (IAA), often referred to as Auxin.

### Use of Promoters of NAA Responsive Genes

[0399] Promoters of NAA responsive genes are useful for transcription of any desired polynucleotide or plant or non-plant origin. Further, any desired sequence can be transcribed in a similar temporal, tissue, or environmentally specific patterns as the NAA responsive genes where the desired sequence is operably linked to a promoter of a NAA responsive gene. The protein product of such a polynucleotide is usually synthesized in the same cells, in response to the same stimuli as the protein product of the gene from which the promoter was derived. Such promoter are also useful to produce antisense mRNAs to down-regulate the product of proteins, or to produce sense mRNAs to down-regulate mRNAs via sense suppression.

### III.C.3. Brassinosteroid Responsive Genes, Gene Components and Products

[0400] Plant hormones are naturally occuring substances, effective in very small amounts, which act as signals to stimulate or inhibit growth or regulate developmental processes in plants. Brassinosteroids (BRs) are the most recently discovered, and least studied, class of plant hormones. The major physiological response affected by BRs is the longitudinal growth of young tissue via cell elongation and possibly cell division. Consequently, disruptions in BR metabolism, perception and activity frequently result in a dwarf phenotype. In addition, because BRs are derived from the sterol metabolic pathway, any perturbations to the sterol pathway can affect the BR pathway. In the same way, perturbations in the BR pathway can have effects on the later part of the sterol pathway and thus the sterol composition of membranes.

### Use of Promoters of BR Responsive Genes

[0401] Promoters of BR responsive genes are useful for transcription of any desired polynucleotide or plant or non-plant origin. Further, any desired sequence can be transcribed in a similar temporal, tissue, or environmentally specific patterns as the BR responsive genes where the desired sequence is operably linked to a promoter of a BR responsive gene. The protein product of such a polynucleotide is usually synthesized in the same cells, in response to the same stimuli as the protein product of the gene from which the promoter was derived. Such promoter are also useful to produce antisense mRNAs to down-regulate the product of proteins, or to produce sense mRNAs to down-regulate mRNAs via sense suppression.

### III.C.4. Cytokinin Responsive Genes, Gene Components and Products

[0402] Plant hormones are naturally occurring substances, effective in very small amounts, which act as signals to stimulate or inhibit growth or regulate developmental processes in plants. Cytokinins (BA) are a group of hormones that are best known for their stimulatory effect on cell division, although they also participate in many other processes and pathways. All naturally occurring BAs are aminopurine derivatives, while nearly all synthetic compounds with BA activity are 6-substituted aminopurine derivatives. One of the most common synthetic BAs used in agriculture is benzylaminopurine (BAP).

### Use of Promoters of BA Responsive Genes

[0403] Promoters of Ba responsive genes are useful for transcription of any desired polynucleotide or plant or non-plant origin. Further, any desired sequence can be transcribed in a similar temporal, tissue, or environmentally specific patterns as the BA responsive genes where the desired sequence is operably linked to a promoter of a BA responsive gene. The protein product of such a polynucleotide is usually synthesized in the same cells, in response to the same stimuli as the protein product of the gene from which the promoter was derived. Such promoter are also useful to produce antisense mRNAs to down-regulate the product of proteins, or to produce sense mRNAs to down-regulate mRNAs via sense suppression.

### III.C.5. Gibberellic Acid Responsive Genes, Gene Components and Products

[0404] Plant hormones are naturally occuring substances, effective in very small amounts, which act as signals to stimulate or inhibit growth or regulate developmental processes in plants. Gibberellic acid (GA) is a hormone in vascular plants that is synthesized in proplastids (giving rise to chloroplasts or leucoplasts) and vascular tissues. The major physiological responses affected by GA are seed germination, stem elongation, flower induction, anther development and seed and pericarp growth. GA is similar to Auxins, cytokinins and gibberellins, in that they are principally growth promoters.

### Use of Promoters of GA Responsive Genes

[0405] Promoters of GA responsive genes are useful for transcription of any desired polynucleotide or plant or non-plant origin. Further, any desired sequence can be transcribed in a similar temporal, tissue, or environmentally specific patterns as the GA responsive genes where the desired sequence is operably linked to a promoter of a GA responsive gene. The protein product of such a polynucleotide is usually synthesized in the same cells, in response to the same stimuli as the protein product of the gene from which the promoter was derived. Such promoter are also useful to produce antisense mRNAs to down-regulate the product of proteins, or to produce sense mRNAs to down-regulate mRNAs via sense suppression.

### III.D. Metabolism Affecting Genes, Gene Components and Products

### III.D.1. Nitrogen Responsive Genes, Gene Components and Products

[0406] Nitrogen is often the rate-limiting element in plant growth, and all field crops have a fundamental dependence on exogenous nitrogen sources. Nitrogenous fertilizer which is usually supplied as ammonium nitrate, potassium nitrate, or urea, typically accounts for 40% of the costs associated with crops, such as corn and wheat in intensive agriculture. Increased efficiency of nitrogen use by plants should enable the production of higher yields with existing fertilizer inputs and/or enable existing yields of crops to be obtained with lower fertilizer input, or better yields on soils of poorer quality. Also, higher amounts of proteins in the crops could also be produced more cost-effectively.

### Use of Promoters of GA Responsive Genes

[0407] Promoters of nitrogen responsive genes are useful for transcription of any desired polynucleotide or plant or non-plant origin. Further, any desired sequence can be transcribed in a similar temporal, tissue, or environmentally specific patterns as the nitrogen responsive genes where the desired sequence is operably linked to a promoter of a nitrogen responsive gene. The protein product of such a polynucleotide is usually synthesized in the same cells, in response to the same stimuli as the protein product of the gene from which the promoter was derived. Such promoter are also useful to produce antisense mRNAs to down-regulate the product of proteins, or to produce sense mRNAs to down-regulate mRNAs via sense suppression.

### III.D.2. Circidian Rhythm (Clock) Responsive Genes, Gene Components and Products

[0408] Often growth and yield are limited by the ability of a plant to tolerate stress conditions, including water loss. To combat such conditions, plant cells deploy a battery of responses that are controlled by an internal circadian clock, including the timed movement of cotyledons and leaves, timed movements in guard cells in stomata, and timed biochemical activities involved with sugar and nitrogen metabolism. These responses depend on the functioning of an internal circadian clock, that becomes entrained to the ambient light/dark cycle, and a series of downstream signaling events leading to transcription independent and transcription dependent stress responses.

[0409] A functioning circadian clock can anticipate dark/light transitions and prepare the physiology and biochemistry of a plant accordingly. For example, expression of a chlorophyll a/b binding protein (CAB) is elevated before daybreak, so that photosynthesis can operate maximally as soon as there is light to drive it. Similar considerations apply to light/dark transitions and to many areas of plant physiology such as sugar metabolism, nitrogen metabolism, water uptake and water loss, flowering and flower opening, epinasty, germination, perception of season, and senescence.

### Use of Promoters of Clock Responsive Genes

[0410] Promoters of Clock responsive genes are useful for transcription of any desired polynucleotide or plant or non-plant origin. Further, any desired sequence can be transcribed in a similar temporal, tissue, or environmentally specific patterns as the Clock responsive genes where the desired sequence is operably linked to a promoter of a Clock responsive gene. The protein product of such a polynucleotide is usually synthesized in the same cells, in response to the same stimuli as the protein product of the gene from which the promoter was derived. Such promoter are also useful to produce antisense mRNAs to down-regulate the product of proteins, or to produce sense mRNAs to down-regulate mRNAs via sense suppression.

### III.D.3. Blue Light (Phototropism) Responsive Genes, Gene Components and Products

[0411] Phototropism is the orientation or growth of a cell, an organism or part of an organism in relation to a source of light. Plants can sense red (R), far-red (FR) and blue light in their environment and respond differently to particular ratios of these. For example, a low R:FR ratio enhances cell elongation and favors flowering over leaf production, but blue light regulated cryptochromes also appear to be involved in determining hypocotyl growth and flowering time. Phototropism of Arabidopsis thaliana seedlings in response to a blue light source is initiated by nonphototropic hypocotyl 1 (NPH1), a blue light-activated serine-threonine protein kinase, but the downstream signaling events are not entirely known. Blue light treatment leads to changes in gene expression. These genes have been identified by comparing the levels of mRNAs of individual genes in dark-grown seedlings, compared with in dark grown seedlings treated with 1 hour of blue light. Auxin also affects blue light phototropism. The effect of Auxin on gene expression stimulated by blue light has been explored by studying mRNA levels in a mutant of Arabidopsis thaliana nph4-2, grown in the dark and, treated with blue light for 1 hour compared with wild type seedlings treated similarly. This mutant is disrupted for Auxin-related growth and Auxin-induced gene transcription.

### Use of Promoters of Blue Light Responsive Genes

[0412] Promoters of Blue Light responsive genes are useful for transcription of any desired polynucleotide or plant or non-plant origin. Further, any desired sequence can be transcribed in a similar temporal, tissue, or environmentally specific patterns as the Blue Light responsive genes where the desired sequence is operably linked to a promoter of a Blue Light responsive gene. The protein product of such a polynucleotide is usually synthesized in the same cells, in response to the same stimuli as the protein product of the gene from which the promoter was derived. Such promoter are also useful to produce antisense mRNAs to down-regulate the product of proteins, or to produce sense mRNAs to down-regulate mRNAs via sense suppression.

### III.D.4 Responsive Genes, Gene Components and Products

[0413] There has been a recent and significant increase in the level of atmospheric carbon dioxide. This rise in level is projected to continue over the next 50 years. The effects of the increased level of carbon dioxide on vegetation are just now being examined, generally in large scale, whole plant (often trees) experiments. Some researchers have initiated physiological experiments in attempts to define the biochemical pathways that are either affected by and/or are activated to allow the plant to avert damage from the elevated carbon dioxide levels. A genomics approach to this issue, using a model plant system, allows identification of those pathways affected by and/or as having a role in averting damage due to the elevated carbon dioxide levels and affecting growth. Higher agronomic yields can be obtained for some crops grown in elevated CO₂.

### Use of Promoters of CO2 Responsive Genes

[0414] Promoters of CO2 responsive genes are useful for transcription of any desired polynucleotide or plant or non-plant origin. Further, any desired sequence can be transcribed in a similar temporal, tissue, or environmentally specific patterns as the CO2 responsive genes where the desired sequence is operably linked to a promoter of a CO2 responsive gene. The protein product of such a polynucleotide is usually synthesized in the same cells, in response to the same stimuli as the protein product of the gene from which the promoter was derived. Such promoter are also useful to produce antisense mRNAs to down-regulate the product of proteins, or to produce sense mRNAs to down-regulate mRNAs via sense suppression.

### III.D.5. Mitochrondria Electron Transport (Respiration) Genes, Gene Components and Products

[0415] One means to alter flux through metabolic pathways is to alter the levels of proteins in the pathways. Plant mitochondria contain many proteins involved in various metabolic processes, including the TCA cycle, respiration, and photorespiration and particularly the electron transport chain (mtETC). Most mtETC complexes consist of nuclearly-encoded mitochondrial proteins (NEMPs) and mitochondrially-encoded mitochondrial proteins (MEMPs). NEMPs are produced in coordination with MEMPs of the same complex and pathway and with other proteins in multi-organelle pathways. Enzymes involved in photorespiration, for example, are located in chloroplasts, mitochondria, and peroxisomes and many of the proteins are nuclearly-encoded. Manipulation of the coordination of protein levels within and between organelles can have critical and global consequences to the growth and yield of a plant.

### Use of Promoters of Resperation Genes

[0416] Promoters of Respiration genes are useful for transcription of any desired polynucleotide or plant or non-plant origin. Further, any desired sequence can be transcribed in a similar temporal, tissue, or environmentally specific patterns as the Respiration genes where the desired sequence is operably linked to a promoter of a Respiration gene. The protein product of such a polynucleotide is usually synthesized in the same cells, in response to the same stimuli as the protein product of the gene from which the promoter was derived. Such promoter are also useful to produce antisense mRNAs to down-regulate the product of proteins, or to produce sense mRNAs to down-regulate mRNAs via sense suppression.

### III.D.6. Protien Degradation Genes, Gene Components and Products

[0417] One of the components of molecular mechanisms that operate to support plant development is the “removal” of a gene product from a particular developmental circuit once the substrate protein is not functionally relevant anymore in temporal and/or spatial contexts. The “removal” mechanisms can be accomplished either by protein inactivation (e.g., phosphorylation or protein-protein interaction) or protein degradation most notably via ubiquitination-proteasome pathway. The ubiquitination-proteasome pathway is responsible for the degradation of a plethora of proteins involved in cell cycle, cell division, transcription, and signal transduction, all of which are required for normal cellular functions. Ubiquitination occurs through the activity of ubiquitin-activating enzymes (E1), ubiquitin-conjugating enzymes (E2), and ubiquitin-protein ligases (E3), which act sequentially to catalyze the attachment of ubiquitin (or other modifying molecules that are related to ubiquitin) to substrate proteins (Hochstrasser 2000, Science 289: 563). Ubiquitinated proteins are then routed to proteasomes for degradation processing [2000, Biochemistry and Molecular Biology of Plants, Buchanan, Gruissem, and Russel (eds), Amer. Soc. of Plant Physiologists, Rockville, Md.]. The degradation mechanism can be selective and specific to the concerned target protein (Joazeiro and Hunter 2001, Science 289: 2061; Sakamoto et al., 2001, PNAS Online 141230798). This selectivity and specificity may be one of the ways that the activity of gene products is modulated.

### Use of Promoters and “Protien Degradation Genes, Gene Components and Products”

[0418] Promoters of “protein degradation” genes, as described in the Reference tables, for example, can be used to modulate transcription of any polynucleotide, plant or non plant to achieve synthesis of a protein in association with production of the ubiquitination-proteasome pathway or the various cellular systems associated with it. Additionally such promoters can be used to synthesize antisense RNA copies of any gene to reduce the amount of protein product produced, or to synthesize RNA copies that reduce protein formation by RNA interference. Such modifications can make phenotypic changes and produce altered plants as described above.

### III.D.7. Cartenogenesis Responsive Genes, Gene Components and Products

[0419] Carotenoids serve important biochemical functions in both plants and animals. In plants, carotenoids function as accessory light harvesting pigments for photosynthesis and to protect chloroplasts and photosystem II from heat and oxidative damage by dissipating energy and scavenging oxygen radicals produced by high light intensities and other oxidative stresses. Decreases in yield frequently occur as a result of light stress and oxidative stress in the normal growth ranges of crop species. In addition light stress limits the geographic range of many crop species. Modest increases in oxidative stress tolerance would greatly improve the performance and growth range of many crop species. The development of genotypes with increased tolerance to light and oxidative stress would provide a more reliable means to minimize crop losses and diminish the use of energy-costly practices to modify the soil environment.

[0420] In animals carotenoids such as beta-carotene are essential provitamins required for proper visual development and function. In addition, their antioxidative properties are also thought to provide valuable protection from diseases such as cancer. Modest increases in carotenoid levels in crop species could produce a dramatic effect on plant nutritional quality. The development of genotypes with increased carotenoid content would provide a more reliable and effective nutritional source of Vitamin A and other carotenoid derived antioxidants than through the use of costly nutritional supplements.

### Use of Promoters of Carotenogenesis Responsive Genes

[0421] Promoters of Carotenogenesis responsive genes are useful for transcription of any desired polynucleotide or plant or non-plant origin. Further, any desired sequence can be transcribed in a similar temporal, tissue, or environmentally specific patterns as the Carotenogenesis responsive genes where the desired sequence is operably linked to a promoter of a Carotenogenesis responsive gene. The protein product of such a polynucleotide is usually synthesized in the same cells, in response to the same stimuli as the protein product of the gene from which the promoter was derived. Such promoter are also useful to produce antisense mRNAs to down-regulate the product of proteins, or to produce sense mRNAs to down-regulate mRNAs via sense suppression.

### III.D.8. Viability Genes, Gene Components and Products

[0422] Plants contain many proteins and pathways that when blocked or induced lead to cell, organ or whole plant death. Gene variants that influence these pathways can have profound effects on plant survival, vigor and performance. The critical pathways include those concerned with metabolism and development or protection against stresses, diseases and pests. They also include those involved in apoptosis and necrosis. The applicants have elucidated many such genes and pathways by discovering genes that when inactivated lead to cell or plant death.

[0423] Herbicides are, by definition, chemicals that cause death of tissues, organs and whole plants. The genes and pathways that are activated or inactivated by herbicides include those that cause cell death as well as those that function to provide protection. The applicants have elucidated these genes.

[0424] The genes defined in this section have many uses including manipulating which cells, tissues and organs are selectively killed, which are protected, making plants resistant to herbicides, discovering new herbicides and making plants resistant to various stresses.

### Use of Promoters of Viability Genes, Gene Components and Products

[0425] Promoters of viability genes can include those that are induced by (1) destructive chemicals, e.g. herbicides, (2) stress, or (3) death. These promoters can be linked operably to achieve expression of any polynucleotide from any organism. Specific promoters from viability genes can be selected to ensure transcription in the desired tissue or organ. Proteins expressed under the control of such promoters can include those that can induce or accelerate death or those that can protect plant cells organ death. For example, stress tolerance can be increased by using promoters of viability genes to drive transcription of cold tolerance proteins, for example. Alternatively, promoters induced by apoptosis can be utilized to drive transcription of antisense constructs that inhibit cell death.

### III.D.9. Histone Deactylase (Axel) Responsive Genes, Gene Components and Products

[0426] The deacetylation of histones is known to play an important role in regulating gene expression at the chromatin level in eukaryotic cells. Histone deacetylation is catalyzed by proteins known as histone deacetylases (HDAcs). HDAcs are found in multisubunit complexes that are recruited to specific sites on nuclear DNA thereby affecting chromatin architecture and target gene transcription. Mutations in plant HDAc genes cause alterations in vegetative and reproductive growth that result from changes in the expression and activities of HDAc target genes or genes whose expression is governed by HDAc target genes. For example, transcription factor proteins control whole pathways or segments of pathways and proteins also control the activity of signal transduction pathways. Therefore, manipulation of these types of protein levels is especially useful for altering phenotypes and biochemical activities.

### Use of Promoters of Histone Deacetylase Responsive Genes

[0427] Promoters of Histone Deacetylase responsive genes are useful for transcription of any desired polynucleotide or plant or non-plant origin. Further, any desired sequence can be transcribed in a similar temporal, tissue, or environmentally specific patterns as the Histone Deacetylase responsive genes where the desired sequence is operably linked to a promoter of a Histone Deacetylase responsive gene. The protein product of such a polynucleotide is usually synthesized in the same cells, in response to the same stimuli as the protein product of the gene from which the promoter was derived. Such promoter are also useful to produce antisense mRNAs to down-regulate the product of proteins, or to produce sense mRNAs to down-regulate mRNAs via sense suppression.

### III.E. Stress Responsive Genes, Gene Components and Products

### III.E.1. Cold Responsive Genes, Gene Components and Products

[0428] The ability to endure low temperatures and freezing is a major determinant of the geographical distribution and productivity of agricultural crops. Even in areas considered suitable for the cultivation of a given species or cultivar, can give rise to yield decreases and crop failures as a result of aberrant, freezing temperatures. Even modest increases (1-2° C.) in the freezing tolerance of certain crop species would have a dramatic impact on agricultural productivity in some areas. The development of genotypes with increased freezing tolerance would provide a more reliable means to minimize crop losses and diminish the use of energy-costly practices to modify the microclimate.

### Use of Promoters of Cold Responsive Genes

[0429] Promoters of cold responsive genes are useful for transcription of any desired polynucleotide or plant or non-plant origin. Further, any desired sequence can be transcribed in a similar temporal, tissue, or environmentally specific patterns as the cold responsive genes where the desired sequence is operably linked to a promoter of a cold responsive gene. The protein product of such a polynucleotide is usually synthesized in the same cells, in response to the same stimuli as the protein product of the gene from which the promoter was derived. Such promoter are also useful to produce antisense mRNAs to down-regulate the product of proteins, or to produce sense mRNAs to down-regulate mRNAs via sense suppression.

### III.E.2. Heat Responsive Genes, Gene Components and Products

[0430] The ability to endure high temperatures is a major determinant of the geographical distribution and productivity of agricultural crops. Decreases in yield and crop failure frequently occur as a result of aberrant, hot conditions even in areas considered suiTable for the cultivation of a given species or cultivar. Only modest increases in the heat tolerance of crop species would have a dramatic impact on agricultural productivity. The development of genotypes with increased heat tolerance would provide a more reliable means to minimize crop losses and diminish the use of energy-costly practices to modify the microclimate.

### Use of Promoters of Heat Responsive Genes

[0431] Promoters of heat responsive genes are useful for transcription of any desired polynucleotide or plant or non-plant origin. Further, any desired sequence can be transcribed in a similar temporal, tissue, or environmentally specific patterns as the heat responsive genes where the desired sequence is operably linked to a promoter of a heat responsive gene. The protein product of such a polynucleotide is usually synthesized in the same cells, in response to the same stimuli as the protein product of the gene from which the promoter was derived. Such promoter are also useful to produce antisense mRNAs to down-regulate the product of proteins, or to produce sense mRNAs to down-regulate mRNAs via sense suppression.

### III.E.3. Drought Responsive Genes, Gene Components and Products

[0432] The ability to endure drought conditions is a major determinant of the geographical distribution and productivity of agricultural crops. Decreases in yield and crop failure frequently occur as a result of aberrant, drought conditions even in areas considered suiTable for the cultivation of a given species or cultivar. Only modest increases in the drought tolerance of crop species would have a dramatic impact on agricultural productivity. The development of genotypes with increased drought tolerance would provide a more reliable means to minimize crop losses and diminish the use of energy-costly practices to modify the microclimate.

### Use of Promoters Drought Responsive Genes

[0433] Promoters of Drought responsive genes are useful for transcription of any desired polynucleotide or plant or non-plant origin. Further, any desired sequence can be transcribed in a similar temporal, tissue, or environmentally specific patterns as the Drought responsive genes where the desired sequence is operably linked to a promoter of a Drought responsive gene. The protein product of such a polynucleotide is usually synthesized in the same cells, in response to the same stimuli as the protein product of the gene from which the promoter was derived. Such promoter are also useful to produce antisense mRNAs to down-regulate the product of proteins, or to produce sense mRNAs to down-regulate mRNAs via sense suppression.

### III.E.4. Wounding Responsive Genes, Gene Components and Products

[0434] Plants are continuously subjected to various forms of wounding from physical attacks including the damage created by pathogens and pests, wind, and contact with other objects. Therefore, survival and agricultural yields depend on constraining the damage created by the wounding process and inducing defense mechanisms against future damage.

[0435] Plants have evolved complex systems to minimize and/or repair local damage and to minimize subsequent attacks by pathogens or pests or their effects. These involve stimulation of cell division and cell elongation to repair tissues, induction of programmed cell death to isolate the damage caused mechanically and by invading pests and pathogens, and induction of long-range signaling systems to induce protecting molecules, in case of future attack. The genetic and biochemical systems associated with responses to wounding are connected with those associated with other stresses such as pathogen attack and drought.

### Use of Promoters of Wounding Responsive Genes

[0436] Promoters of Wounding responsive genes are useful for transcription of any desired polynucleotide or plant or non-plant origin. Further, any desired sequence can be transcribed in a similar temporal, tissue, or environmentally specific patterns as the Wounding responsive genes where the desired sequence is operably linked to a promoter of a Wounding responsive gene. The protein product of such a polynucleotide is usually synthesized in the same cells, in response to the same stimuli as the protein product of the gene from which the promoter was derived. Such promoter are also useful to produce antisense mRNAs to down-regulate the product of proteins, or to produce sense mRNAs to down-regulate mRNAs via sense suppression.

### III.E.5. Methyl Jasmonate (Jasmonate) Responsive Genes, Gene Components and Products

[0437] Jasmonic acid and its derivatives, collectively referred to as jasmonates, are naturally occurring derivatives of plant lipids. These substances are synthesized from linolenic acid in a lipoxygenase-dependent biosynthetic pathway. Jasmonates are signalling molecules which have been shown to be growth regulators as well as regulators of defense and stress responses. As such, jasmonates represent a separate class of plant hormones.

### Use of Promoters Jasmonate Responsive Genes

[0438] Promoters of Jasmonate responsive genes are useful for transcription of any desired polynucleotide or plant or non-plant origin. Further, any desired sequence can be transcribed in a similar temporal, tissue, or environmentally specific patterns as the Jasmonate responsive genes where the desired sequence is operably linked to a promoter of a Jasmonate responsive gene. The protein product of such a polynucleotide is usually synthesized in the same cells, in response to the same stimuli as the protein product of the gene from which the promoter was derived. Such promoter are also useful to produce antisense mRNAs to down-regulate the product of proteins, or to produce sense mRNAs to down-regulate mRNAs via sense suppression.

### III.E.6. Reactive Oxygen Responsive Genes, Gene Components and H2O2 Products

[0439] Often growth and yield are limited by the ability of a plant to tolerate stress conditions, including pathogen attack, wounding, extreme temperatures, and various other factors. To combat such conditions, plant cells deploy a battery of inducible defense responses, including triggering an oxidative burst. The burst of reactive oxygen intermediates occurs in time, place and strength to suggest it plays a key role in either pathogen elimination and/or subsequent signaling of downstream defense functions. For example, H₂O₂ can play a key role in the pathogen resistance response, including initiating the hypersensitive response (HR). HR is correlated with the onset of systemic acquired resistance (SAR) to secondary infection in distal tissues and organs.

### Use of Promoters of Reactive Oxygen Responsive Genes

[0440] Promoters of Reactive Oxygen responsive genes are useful for transcription of any desired polynucleotide or plant or non-plant origin. Further, any desired sequence can be transcribed in a similar temporal, tissue, or environmentally specific patterns as the Reactive Oxygen responsive genes where the desired sequence is operably linked to a promoter of a Reactive Oxygen responsive gene. The protein product of such a polynucleotide is usually synthesized in the same cells, in response to the same stimuli as the protein product of the gene from which the promoter was derived. Such promoter are also useful to produce antisense mRNAs to down-regulate the product of proteins, or to produce sense mRNAs to down-regulate mRNAs via sense suppression.

### III.E.7. Salicycle Acid Responsive Genes, Gene Components and Products

[0441] Plant defense responses can be divided into two groups: constitutive and induced. Salicylic acid (SA) is a signaling molecule necessary for activation of the plant induced defense system known as systemic acquired resistance or SAR. This response, which is triggered by prior exposure to avirulent pathogens, is long lasting and provides protection against a broad spectrum of pathogens. Another induced defense system is the hypersensitive response (HR). HR is far more rapid, occurs at the sites of pathogen (avirulent pathogens) entry and precedes SAR. SA is also the key signaling molecule for this defense pathway.

### Use of Promoters of Salicycle Acid Responsive Genes

[0442] Promoters of Salicylic Acid responsive genes are useful for transcription of any desired polynucleotide or plant or non-plant origin. Further, any desired sequence can be transcribed in a similar temporal, tissue, or environmentally specific patterns as the Salicylic Acid responsive genes where the desired sequence is operably linked to a promoter of a Salicylic Acid responsive gene. The protein product of such a polynucleotide is usually synthesized in the same cells, in response to the same stimuli as the protein product of the gene from which the promoter was derived. Such promoter are also useful to produce antisense mRNAs to down-regulate the product of proteins, or to produce sense mRNAs to down-regulate mRNAs via sense suppression.

### III.E.8. Nitric Oxide Responsive Genes, Gene Components and Products

[0443] The rate-limiting element in plant growth and yield is often its ability to tolerate suboptimal or stress conditions, including pathogen attack conditions, wounding and the presence of various other factors. To combat such conditions, plant cells deploy a battery of inducible defense responses, including synergistic interactions between nitric oxide (NO), reactive oxygen intermediates (ROS), and salicylic acid (SA). NO has been shown to play a critical role in the activation of innate immune and inflammatory responses in animals. At least part of this mammalian signaling pathway is present in plants, where NO is known to potentiate the hypersensitive response (HR). In addition, NO is a stimulator molecule in plant photomorphogenesis.

### Use of Promoters of No Responsive Genes

[0444] Promoters of NO responsive genes are useful for transcription of any desired polynucleotide or plant or non-plant origin. Further, any desired sequence can be transcribed in a similar temporal, tissue, or environmentally specific patterns as the NO responsive genes where the desired sequence is operably linked to a promoter of a NO responsive gene. The protein product of such a polynucleotide is usually synthesized in the same cells, in response to the same stimuli as the protein product of the gene from which the promoter was derived. Such promoter are also useful to produce antisense mRNAs to down-regulate the product of proteins, or to produce sense mRNAs to down-regulate mRNAs via sense suppression.

111.9. Osmotic Stress Responsive Genes, Gene Components and Products

[0445] The ability to endure and recover from osmotic and salt related stress is a major determinant of the geographical distribution and productivity of agricultural crops. Osmotic stress is a major component of stress imposed by saline soil and water deficit. Decreases in yield and crop failure frequently occur as a result of aberrant or transient environmental stress conditions even in areas considered suitable for the cultivation of a given species or cultivar. Only modest increases in the osmotic and salt tolerance of a crop species would have a dramatic impact on agricultural productivity. The development of genotypes with increased osmotic tolerance would provide a more reliable means to minimize crop losses and diminish the use of energy-costly practices to modify the soil environment.

### Use of Promoters of Osmotic Stress Responsive Genes

[0446] Promoters of Osmotic Stress responsive genes are useful for transcription of any desired polynucleotide or plant or non-plant origin. Further, any desired sequence can be transcribed in a similar temporal, tissue, or environmentally specific patterns as the Osmotic Stress responsive genes where the desired sequence is operably linked to a promoter of a Osmotic Stress responsive gene. The protein product of such a polynucleotide is usually synthesized in the same cells, in response to the same stimuli as the protein product of the gene from which the promoter was derived. Such promoter are also useful to produce antisense mRNAs to down-regulate the product of proteins, or to produce sense mRNAs to down-regulate mRNAs via sense suppression.

### III.E.10. Aluminum Responsive Genes, Gene Components and Products

[0447] Aluminum is toxic to plants in soluble form (Al³⁺). Plants grown under aluminum stress have inhibited root growth and function due to reduced cell elongation, inhibited cell division and metabolic interference. As an example, protein inactivation frequently results from displacement of the Mg2+ cofactor with aluminum. These types of consequences result in poor nutrient and water uptake. In addition, because stress perception and response occur in the root apex, aluminum exposure leads to the release of organic acids, such as citrate, from the root as the plant attempts to prevent aluminum uptake.

[0448] The ability to endure soluble aluminum is a major determinant of the geographical distribution and productivity of agricultural crops. Decreases in yield and crop failure frequently occur as a result of aberrant, hot conditions even in areas considered suiTable for the cultivation of a given species or cultivar. Only modest increases in the aluminum tolerance of crop species would have a dramatic impact on agricultural productivity. The development of genotypes with increased aluminum tolerance would provide a more reliable means to minimize crop losses and diminish the use of costly practices to modify the environment.

### Use of Promoters of Aluminum Responsive Genes

[0449] Promoters of Aluminum responsive genes are useful for transcription of any desired polynucleotide or plant or non-plant origin. Further, any desired sequence can be transcribed in a similar temporal, tissue, or environmentally specific patterns as the Aluminum responsive genes where the desired sequence is operably linked to a promoter of a Aluminum responsive gene. The protein product of such a polynucleotide is usually synthesized in the same cells, in response to the same stimuli as the protein product of the gene from which the promoter was derived. Such promoter are also useful to produce antisense mRNAs to down-regulate the product of proteins, or to produce sense mRNAs to down-regulate mRNAs via sense suppression.

### III.E.11. Cadium Responsive Genes, Gene Components and Products

[0450] Cadmium (Cd) has both toxic and non-toxic effects on plants. Plants exposed to non-toxic concentrations of cadmium are blocked for viral disease due to the inhibition of systemic movement of the virus. Surprisingly, higher, toxic levels of Cd do not inhibit viral systemic movement, suggesting that cellular factors that interfere with the viral movement are triggered by non-toxic Cd concentrations but repressed in high Cd concentrations. Furthermore, exposure to non-toxic Cd levels appears to reverse posttranslational gene silencing, an inherent plant defense mechanism. Consequently, exploring the effects of Cd exposure has potential for advances in plant disease control in addition to soil bio-remediation and the improvement of plant performance in agriculture.

### Use of Promoters of Cadium Responsive Genes

[0451] Promoters of Cadmium responsive genes are useful for transcription of any desired polynucleotide or plant or non-plant origin. Further, any desired sequence can be transcribed in a similar temporal, tissue, or environmentally specific patterns as the Cadmium responsive genes where the desired sequence is operably linked to a promoter of a Cadmium responsive gene. The protein product of such a polynucleotide is usually synthesized in the same cells, in response to the same stimuli as the protein product of the gene from which the promoter was derived. Such promoter are also useful to produce antisense mRNAs to down-regulate the product of proteins, or to produce sense mRNAs to down-regulate mRNAs via sense suppression.

### III.12. Disease Responsive Genes, Gene Components and Products

[0452] Often growth and yield are limited by the ability of a plant to tolerate stress conditions, including pathogen attack. To combat such conditions, plant cells deploy a battery of inducible defense responses, including the triggering of an oxidative burst and the transcription of pathogenesis-related protein (PR protein) genes. These responses depend on the recognition of a microbial avirulence gene product (avr) by a plant resistance gene product (R), and a series of downstream signaling events leading to transcription- independent and transcription-dependent disease resistance responses. Reactive oxygen species (ROS) such as H₂O₂ and NO from the oxidative burst plays a signaling role, including initiation of the hypersensitive response (HR) and induction of systemic acquired resistance (SAR) to secondary infection by unrelated pathogens. PR proteins are able to degrade the cell walls of invading microorganisms, and phytoalexins are directly microbicidal.

### Use of Promoters of Disease Responsive Genes

[0453] Promoters of Disease responsive genes are useful for transcription of any desired polynucleotide or plant or non-plant origin. Further, any desired sequence can be transcribed in a similar temporal, tissue, or environmentally specific patterns as the Disease responsive genes where the desired sequence is operably linked to a promoter of a Disease responsive gene. The protein product of such a polynucleotide is usually synthesized in the same cells, in response to the same stimuli as the protein product of the gene from which the promoter was derived. Such promoter are also useful to produce antisense mRNAs to down-regulate the product of proteins, or to produce sense mRNAs to down-regulate mRNAs via sense suppression.

### II.E.13. Defense (LOL2) Responsive Genes, Gene Components and Products

[0454] Often growth and yield are limited by the ability of a plant to tolerate stress conditions, including pathogen attack. To combat such conditions, plant cells deploy a battery of inducible defense responses, including the triggering of an oxidative burst and the transcription of pathogenesis-related protein (PR protein) genes. Reactive oxygen species (ROS) such as H₂O₂ and NO from the oxidative burst play a signaling role, including initiation of the hypersensitive response (HR) and induction of systemic acquired resistance (SAR) to secondary infection by unrelated pathogens. Some PR proteins are able to degrade the cell walls of invading microorganisms, and phytoalexins are directly microbicidal. Other defense related pathways are regulated by salicylic acid (SA) or methyl jasmonate (MeJ).

[0455] These responses depend on the recognition of a microbial avirulence gene product (avr) by a plant resistance gene product (R), and a series of downstream signaling events leading to transcription-independent and transcription-dependent disease resistance responses. Current models suggest that R-gene-encoded receptors specifically interact with pathogen-encoded ligands to trigger a signal transduction cascade. Several components include ndr1 and eds1 loci. NDR1, EDS1, PR1, as well as PDF1.2, a MeJ regulated gene and Nim1, a SA regulated gene, are differentially regulated in plants with mutations in the LOL2 gene.

[0456] LOL2 shares a novel zinc finger motif with LSD1, a negative regulator of cell death and defense response. Due to an alternative splice site the LOL2 gene encodes two different proteins, one of which contains an additional, putative DNA binding motif. Northern analysis demonstrated that LOL2 transcripts containing the additional DNA binding motif are predominantly upregulated after treatment with both virulent and avirulent Pseudomonas syringae pv maculicola strains. Modulation in this gene can also confer enhanced resistance to virulent and avirulent Peronospora parasitica isolates.

### Use of Promoters of Defense Responsive Genes

[0457] Promoters of Defense responsive genes are useful for transcription of any desired polynucleotide or plant or non-plant origin. Further, any desired sequence can be transcribed in a similar temporal, tissue, or environmentally specific patterns as the Defense responsive genes where the desired sequence is operably linked to a promoter of a Defense responsive gene. The protein product of such a polynucleotide is usually synthesized in the same cells, in response to the same stimuli as the protein product of the gene from which the promoter was derived. Such promoter are also useful to produce antisense mRNAs to down-regulate the product of proteins, or to produce sense mRNAs to down-regulate mRNAs via sense suppression.

### III.E.14. Iron Responsive Genes, Gene Components and Products

[0458] Iron (Fe) deficiency in humans is the most prevalent nutritional problem worldwide today. Increasing iron availability via diet is a sustainable malnutrition solution for many of the world's nations. One-third of the world's soils, however, are iron deficient. Consequently, to form a food-based solution to iron malnutrition, we need a better understanding of iron uptake, storage and utilization by plants. Furthermore, exposure to non-toxic Fe levels appears to affect inherent plant defense mechanisms. Consequently, exploring the effects of Fe exposure has potential for advances in plant disease resistance in addition to human nutrition.

### Use of Promoters of Iron Responsive Genes

[0459] Promoters of Iron responsive genes are useful for transcription of any desired polynucleotide or plant or non-plant origin. Further, any desired sequence can be transcribed in a similar temporal, tissue, or environmentally specific patterns as the Iron responsive genes where the desired sequence is operably linked to a promoter of a Iron responsive gene. The protein product of such a polynucleotide is usually synthesized in the same cells, in response to the same stimuli as the protein product of the gene from which the promoter was derived. Such promoter are also useful to produce antisense mRNAs to down-regulate the product of proteins, or to produce sense mRNAs to down-regulate mRNAs via sense suppression.

### III.E.15. Shade Responsive Genes, Gene Components and Products

[0460] Plants sense the ratio of Red (R): Far Red (FR) light in their environment and respond differently to particular ratios. A low R:FR ratio, for example, enhances cell elongation and favors flowering over leaf production. The changes in R:FR ratios mimic and cause the shading response effects in plants. The response of a plant to shade in the canopy structures of agricultural crop fields influences crop yields significantly. Therefore manipulation of genes regulating the shade avoidance responses can improve crop yields. While phytochromes mediate the shade avoidance response, the down-stream factors participating in this pathway are largely unknown. One potential downstream participant, ATHB-2, is a member of the HD-Zip class of transcription factors and shows a strong and rapid response to changes in the R:FR ratio. ATHB-2 overexpressors have a thinner root mass, smaller and fewer leaves and longer hypocotyls and petioles. This elongation arises from longer epidermal and cortical cells, and a decrease in secondary vascular tissues, paralleling the changes observed in wild-type seedlings grown under conditions simulating canopy shade. On the other hand, plants with reduced ATHB-2 expression have a thick root mass and many larger leaves and shorter hypocotyls and petioles. Here, the changes in the hypocotyl result from shorter epidermal and cortical cells and increased proliferation of vascular tissue. Interestingly, application of Auxin is able to reverse the root phenotypic consequences of high ATHB-2 levels, restoring the wild-type phenotype. Consequently, given that ATHB-2 is tightly regulated by phytochrome, these data suggest that ATHB-2 may link the Auxin and phytochrome pathways in the shade avoidance response pathway.

### Use of Promoters of Shade Avoidance Genes

[0461] Promoters of Shade Avoidance genes are useful for transcription of any desired polynucleotide or plant or non-plant origin. Further, any desired sequence can be transcribed in a similar temporal, tissue, or environmentally specific patterns as the Shade Avoidance genes where the desired sequence is operably linked to a promoter of a Shade Avoidance gene. The protein product of such a polynucleotide is usually synthesized in the same cells, in response to the same stimuli as the protein product of the gene from which the promoter was derived. Such promoter are also useful to produce antisense mRNAs to down-regulate the product of proteins, or to produce sense mRNAs to down-regulate mRNAs via sense suppression.

### III.E.16. Sulfur Responsive Genes, Gene Components and Products

[0462] Sulfur is one of the important macronutrients required by plants. It is taken up from the soil solution by roots as in the form of sulfate anion which higher plants are dependent on to fulfill their nutritional sulfur requirement. After uptake from the soil, sulfate is either accumulated and stored in vacuole or it is assimilated into various organic compounds, e.g. cysteine, glutathione, methionine, etc. Thus, plants also serve as nutritional sulfur sources for animals. Sulfur can be assimilated in one of two ways: it is either incorporated as sulfate in a reaction called sulfation, or it is first reduced to sulfide, the substrate for cysteine synthesis. In plants, majority of sulfur is assimilated in reduced form.

[0463] Sulfur comprises a small by vital fraction of the atoms in many protein molecules. As disulfide bridges, the sulfur atoms aid in stabilizing the folded proteins, such cysteine residues. Cys is the first sulfur-containing amino acids, which in proteins form disulfide bonds that may affect the tertiary structures and enzyme activities. This redox balance is mediated by the disulfide/thiol interchange of thioredoxin or glutaredoxin using NADPH as an electron donor. Sulfur can also become sulfhydryl (SH) groups participating in the active sites of some enzymes and some enzymes require the aid of small molecules that contain sulfur. In addition, the machinery of photosynthesis includes some sulfur-containing compounds, such as ferrodoxin. Thus, sulfate assimilation plays important roles not only in the sulfur nutrition but also in the ubiquitous process that may regulate the biochemical reactions of various metabolic pathways.

[0464] Deficiency of sulfur leads to a marked chlorosis in younger leaves, which may become white in color. Other symptoms of sulfur deficiency also include weak stems and reduced growth. Adding sulfur fertilizer to plants can increase root development and a deeper green color of the leaves in sulfur-deficient plants. However, Sulfur is generally sufficient in soils for two reasons: it is a contaminant in potassium and other fertilizers and a product of industrial combustion. Sulfur limitation in plants is thus likely due to the limitation of the uptake and distribution of sulfate in plants. Seven cell type specific sulfate transporter genes have been isolated from Arabidopsis. In sulfate-starved plants, expression of the high-affinity transporter, AtST1-1, is induced in root epidermis and cortex for acquisition of sulfur. The low affinity transporter, AtST2-1 (AST68), accumulates in the root vascular tissue by sulfate starvation for root-to-shoot transport of sulfate. These studies have shown that the whole-plant process of sulfate transport is coordinately regulated by the expression of these 2 sulfate transporter genes under sulfur limited conditions. Recent studies have proposed that feeding of O-acetylserine, GSH and selenate may regulate the expression of AtSTl-I and AtST2-1 (AST68) in roots either positively or negatively. However, regulatory proteins that may directly control the expression of these genes have not been identified yet.

[0465] It has been established that there are regulatory interactions between assimilatory sulfate and nitrate reduction in plants. The two assimilatory pathways are very similar and well coordinated; deficiency for one element was shown to repress the other pathway. The coordination between them should be taken into consideration when one tries to alter one of pathways.

### Use of Promoters of Sulfur Responsive Genes

[0466] Promoters of Sulfur responsive genes are useful for transcription of any desired polynucleotide or plant or non-plant origin. Further, any desired sequence can be transcribed in a similar temporal, tissue, or environmentally specific patterns as the Sulfur responsive genes where the desired sequence is operably linked to a promoter of a Sulfur responsive gene. The protein product of such a polynucleotide is usually synthesized in the same cells, in response to the same stimuli as the protein product of the gene from which the promoter was derived. Such promoter are also useful to produce antisense mRNAs to down-regulate the product of proteins, or to produce sense mRNAs to down-regulate mRNAs via sense suppression.

### III.E.17. Zinc Responsive Genes, Gene Components and Products

[0467] Phytoremediation of soils contaminated with toxic levels of heavy metals requires the understanding of plant metal transport and tolerance. The numerous Arabidopsis thaliana studies have given scientists the potential for dissection and elucidation of plant micronutrient/heavy metal uptake and accumulation pathways. It has been shown altered regulation of ZNT1, a Zn/Cd transporter, contributes to high Zn uptake. Isolation and characterization of Zn/Cd hyperaccumulation genes may allow expression in higher biomass plant species for efficient contaminated soil clean up. Identification of additional Zn transport, tolerance and nutrition-related genes involved in heavy metal accumulation will enable manipulation of increased uptake (for phytoremediation) as well as limitation of uptake or leak pathways that contribute to toxicity in crop plants. Additionally, Zn-binding ligands involved in Zn homeostasis or tolerance may be identified, as well as factors affecting the activity or expression of Zn binding transcription factors. Gene products acting in concert to effect Zn uptake, which would not have been identified in complementation experiments, including multimeric transporter proteins, could also be identified.

### Use of Promoters of Zinc Responsive Genes

[0468] Promoters of Zinc responsive genes are useful for transcription of any desired polynucleotide or plant or non-plant origin. Further, any desired sequence can be transcribed in a similar temporal, tissue, or environmentally specific patterns as the Zinc responsive genes where the desired sequence is operably linked to a promoter of a Zinc responsive gene. The protein product of such a polynucleotide is usually synthesized in the same cells, in response to the same stimuli as the protein product of the gene from which the promoter was derived. Such promoter are also useful to produce antisense mRNAs to down-regulate the product of proteins, or to produce sense mRNAs to down-regulate mRNAs via sense suppression.

### IV. UTILITIES OF PARTICULAR INTEREST

[0469] Genes capable of modulating the phenotypes in the following table are useful produce the associated utilities in the table. Such genes can be identified by their cDNA ID number in the Knock-in and Knock-out Tables. That is, those genes noted in those Tables to have a phenotype as listed in the following column entitled “Phenotype Modulated by a Gene” are useful for the purpose identified in the corresponding position in the column entitled “Utilities”.

| Phenotype | | |
|---|---|---|
| Modulated by a | | |
| Gene | | Utilities |
| Leaf shape | Cordate | decrease wind opacity, |
| | Cup-shaped | decrease lodging (plant fall over), |
| | Curled | increase biomass by making larger or |
| | | different shaped leaves, |
| | Laceolate | improve the efficiency of mechanical |
| | | harvesting, |
| | Lobed | decrease transpiration for better drought |
| | | tolerance, |
| | Oval | changing leaf shape to collect and absorb |
| | | water, |
| | Ovate | modulation of canopy structure and shading |
| | | for altered irradiance close to the ground, |
| | Serrate | enhanced uptake of pesticides (herbicides, |
| | | fungicides, etc), |
| | Trident | creation of ornamental leaf shapes, |
| | Undulate | increase resistance to pathogens by |
| | | decreasing amount of water that collects on |
| | | leaves, |
| | Vertically Oblong | change proporation of cell types in the |
| | | leaves for enhanced photosynthesis, |
| | | decreased transpiration, and enhanced |
| | Other Shapes | accumulation of desirable compounds |
| | | including secondary metabolites in |
| | | specialized cells, |
| | | decrease insect feeding, |
| | Long petioles | decrease wind opacity, |
| | Short petioles | decrease lodging (plant fall over), |
| | | increase biomass by better positioning of |
| | | the leaf blade, |
| | | decrease insect feeding, |
| | | decrease transpiration for better drought |
| | | tolerance, |
| | | position leaves most effectively for |
| | | photosynthetic efficiency |
| | Fused | ornamental applications to make distinctive |
| | | plants, |
| Reduced fertility | Short siliques | increase or decrease the number of seeds in |
| | | a fruit, |
| | | increasing fruit size, |
| | | modulating fruit shape to better fit |
| | | harvesting or packaging requirements, |
| | | useful for controlling dehisence and seed |
| | | scatter |
| | Reduced fertility | useful in hybrid breeding programs, |
| | Sterility | increasing fruit size, |
| | | production of seedless fruit, |
| | | useful as targets for gametocides, |
| | | modulating fruit shape to better fit |
| | | harvesting or packaging requirements, |
| | | useful for controlling dehisence and seed |
| | | scatter |
| | Flower size | useful for edible flowers |
| | | useful for flower derived products such as |
| | | fragrances |
| | | useful for modulating seed size and number |
| | | in combination with seed-specific genes |
| | | value in the ornamental industry |
| Stature | Large | increasing or decreasing plant biomass, |
| | Small | optimizing plant stature to increase yield |
| | | under various diverse environmental |
| | | conditions, e.g., when water or nutrients |
| | | are limiting, |
| | Dwarfs | decreasing lodging, |
| | | increasing fruit number and size, |
| | | controlling shading and canopy effects |
| Meristems | | Change plant architecture, |
| | | increase or decrease number of leaves as |
| | | well as change the types of leaves to |
| | | increase biomass, |
| | | improve photosynthetic efficiency, |
| | | create new varieties of ornamental plants |
| | | with enhanced leaf design, |
| | | preventing flowering to opimize vegetative |
| | | growth, |
| | | control of apical dominace, |
| | | increase or decrease flowering time to fit |
| | | season, water or fertilizer schedules, |
| | | change arrangement of leaves on the stem |
| | | (phyllotaxy) to optimize plant density, |
| | | decrease insect feeding, |
| | | or decrease pathogen infection, |
| | | increase number of trichome/glandular |
| | | trichome producing leaves |
| | | targets for herbicides, |
| | | generate ectopic meristems and ectopic |
| | | growth of vegetative and floral tissues and |
| | | seeds and fruits |
| Stem | Strong | modify lignin content/composition for |
| | | creation of harder woods or reduce |
| | | difficulty/costs in pulping for |
| | Weak | paper production or increase |
| | | digestibility of forage crops, |
| | | decrease lodging, |
| | | modify cell wall polysaccharides in stems |
| | | and fruits for improved texture and |
| | | nutrition. |
| | | increase biomass |
| | Late/Early Bolting | Break the need for long vernalization of |
| | | vernalization-dependent crops, e.g., winter |
| | | wheat, thereby increasing yield |
| | | decrease or increase generaton time |
| | | increase biomass |
| Lethals | Embryo-lethal | produce seedless fruit, |
| | | use as herbicide targets |
| | Embryo-defective | produce seedless fruit, |
| | | use as herbicide targets |
| | Seedling | use as herbicide targets, |
| | | useful for metabolic engineering, |
| | Pigment-lethals | use as herbicide targets, |
| | | increase photosynthetic efficiency |
| Pigment | Dark Green | Increase nutritional value, |
| | | enhanced photosynthesis and carbon |
| | | dioxide combustion and therefore increase |
| | | plant vigor and biomass, |
| | | enhanced photosynthetic efficiency and |
| | | therefore increase plant vigor and biomass, |
| | | prolong vegetative development, |
| | | enhanced protection against pathogens, |
| | YGV1 | Useful as targets for herbicides, |
| | | increase photosynthetic efficiency and |
| | | therefore increase plant vigor and biomass, |
| | YGV2 | Useful as targets for herbicides, |
| | | control of change from embryonic to adult |
| | | organs, |
| | | increase metabolic efficiency, |
| | | increase photosynthetic efficiency and |
| | | therefore increased plant vigor and biomass, |
| | YGV3 | Useful as targets for herbicides, |
| | | nitrogen sensing/uptake/usage, |
| | | increase metabolic efficiency and therefore |
| | | increased plant vigor and biomass, |
| | Interveinal chlorosis | to increase photosynthetic efficiency and |
| | | therefore increase plant vigor and biomass |
| | | to increase or decrease nitrogen transport |
| | | and therefore increase plant vigor and |
| | | biomass |
| | | use as herbicide targets |
| | | increase metabolic efficiency, |
| Roots | Short (primary root) | to access water from rainfall, |
| | | to access rhizobia spray application, for |
| | | anaerobic soils, |
| | | useful to facilitate harvest of root crops, |
| | Thick (primary root) | useful for increasing biomass of root crops, |
| | | for preventing plants dislodging during |
| | | picking and harvesting, |
| | | as root grafts, for animal feeds |
| | Branching (primary root) | modulation allows betters access to water, |
| | | minerals, fertilizers, rhizobia prevent soil |
| | | erosion, s |
| | | increasing root biomass |
| | | decrease root lodging, |
| | Long (lateral roots) | modulation allows improved access to |
| | | water, nutrients, fertilizer, rhizobia, prevent |
| | | soil erosion |
| | | increase root biomass |
| | | decrease root lodging |
| | | modulation allows control on the depth of |
| | | root growth in soil to access water and |
| | | nutriennts |
| | | modulation allows hormonal control of root |
| | | growth and development (size) |
| | Agravitropic | modulation allows control on the depth of |
| | | root growth in soil |
| | Curling (primary root) | modulation allows hormonal control of root |
| | | growth and development (size) |
| | | useful in anaerobic soils in allowing roots |
| | | to stay close to surface |
| | | harvesting of root crops |
| | Poor germination | |
| Trichome | Reduced Number | Genes useful for decreasing transpiration, |
| | Glabrous | increased production of glandular trichomes |
| | | for oil or other secreted chemicals of value, |
| | Increased Number | use as deterrent for insect herbivory and |
| | | ovipostion |
| | | modulation will increase resistance to UV |
| | | light, |
| Wax mutants | | decrease insect herbivory and oviposition, |
| | | compostion changes for the cosmetics |
| | | industry, |
| | | decrease transpiration, |
| | | provide pathogen resistance, |
| | | UV protection, |
| | | modulation of leaf runoff properties and |
| | | improved access for herbicides and |
| | | fertilizers |
| Cotyledons | | modulation of seeds structure in legumes, |
| | | increase nutritional value, |
| | | improve seedling competion under field |
| | | conditions, |
| Seeds | Transparent testa | genes useful for metabolic engineering |
| | Light | anthocyanin and flavonoid pathways |
| | Dark | mproved nutritional content |
| | | decrease petal abscission |
| Flowers | Other | decrease pod shattering |
| Hypocotysl | Long | to improve germination rates |
| | | to improve plant survivability |
| | Short | to improve germination rates |
| | | to improve plant survivability |

### V. ENHANCED FOODS

[0470] Animals require external supplies of amino acids that they cannot synthesize themselves. Also, some amino acids are required in larger quantities. The nutritional values of plants for animals and humans can thus be modified by regulating the amounts of the constituent amino acids that occur as free amino acids or in proteins. For instance, higher levels of lysine and/or methionine would enhance the nutritional value of corn seed. Applicants herein provide several methods for modulating the amino acid content:
[0471] (1) expressing a naturally occurring protein that has a high percentage of the desired amino acid(s);
[0472] (2) expressing a modified or synthetic coding sequence that has an enhanced percentage of the desired amino acids; or
[0473] (3) expressing the protein(s) that are capable of synthesizing more of the desired amino acids.
   A specific example is expressing proteins with enhanced, for example, methionine content, preferentially in a corn or cereal seed used for animal nutrition or in the parts of plants used for nutritional purposes.

[0474] A protein is considered to have a high percentage of an amino acid if the amount of the desired amino acid is at least 1% of the total number of residues in a protein; more preferably 2% or greater. Amino acids of particular interest are tryptophan, lysine, methionine, phenylalanine, threonine leucine, valine, and isoleucine. Examples of naturally occurring proteins with a high percentage of any one of the amino acid of particular interest are listed in the Enhanced Amino Acid Table.

[0475] The sequence(s) encoding the selected protein(s) are operably linked to a promoter and other regulatory sequences and transformed into a plant as described below. The promoter is chosen optimally for promoting the desired level of expression of the protein in the selected organ e.g. a promoter highly functional in seeds. Modifications may be made to the sequence encoding the protein to ensure protein transport into, for example, organelles or storage bodies or its accumulation in the organ. Such modifications may include addition of signal sequences at or near the N terminus and amino acid residues to modify protein stability or appropriate glycosylation. Other modifications may be made to the transcribed nucleic acid sequence to enhance the stability or translatability of the mRNA, in order to ensure accumulation of more of the desired protein. Suitable versions of the gene construct and transgenic plants are selected on the basis of, for example, the improved amino acid content and nutritional value measured by standard biochemical tests and animal feeding trials.

### VI. USE OF NOVEL GENES TO FACILITATE EXPLOITATION OF PLANTS AS FACTORIES FOR THE SYNTHESIS OF VALUABLE MOLECULES

[0476] Plants and their constituent cells, tissues, and organs are factories that manufacture small organic molecules such as sugars, amino acids, fatty acids, vitamins, etc., as well as macromolecules such as proteins, nucleic acids, oils/fats and carbohydrates. Plants have long been a source of pharmaceutically beneficial chemicals; particularly, the secondary metabolites and hormone-related molecules synthesized by plants. Plants can also be used as factories to produce carbohydrates or lipids that comprises a carbon backbone useful as precursors of plastics, fiber, fuel, paper, pulp, rubber, solvents, lubricants, construction materials, detergents, and other cleaning materials. Plants can also generate other compounds that are of economic value, such as dyes, flavors, and fragrances. Both the intermediates as well as the end-products of plant bio-synthetic pathways have been found useful.

[0477] With the polynucleotides and polypeptides of the instant invention, modification of both in-vitro and in-vivo synthesis of such products is possible. One method of increasing the amount of either the intermediates or the end-products synthesized in a cell is to increase the expression of one or more proteins in the synthesis pathway as discussed below. Another method of increasing production of an intermediate is to inhibit expression of protein(s) that synthesize the end-product from the intermediate. Levels of end-products and intermediates can also be modified by changing the levels of enzymes that specifically change or degrade them. The kinds of molecules made can be also be modified by changing the genes encoding specific enzymes performing reactions at specific steps of the biosynthetic pathway. These genes can be from the same or a different organism. The molecular structures in the biosynthetic pathways can thus be modified or diverted into different branches of a pathway to make novel end-products.

[0478] The modifications are made by designing one or more novel genes per application comprising promoters, to ensure production of the enzyme(s) in the relevant cells, in the right amount, and polynucleotides encoding the relevant enzyme. The promoters and polynucleotides are the subject of this application. The novel genes are transformed into the relevant species using standard procedures. Their effects are measured by standard assays for the specific chemical/biochemical products.

[0479] These polynucleotides and proteins of the invention that participate in the relevant pathways and are useful for changing production of the above chemicals and biochemicals are identified in the Reference tables by their enzyme function. More specifically, proteins of the invention that have the enzymatic activity of one of the entries in the following table entitled “Emzymes Effecting Modulation of Biological Pathways” are of interest to modulate the corresponding pathways to produce precursors or final products noted above that are of industrial use. Biological activities of particular interest are listed below.

[0480] Other polynucleotides and proteins that regulate where, when and to what extent a pathway is active in a plant are extremely useful for modulating the synthesis and accumulation of valuable chemicals. These elements including transcription factors, proteins involved in signal transduction and other proteins in the control of gene expression are described elsewhere in this application.

| Pathway | | |
|---|---|---|
| Name | Enzyme Description | Comments |
| Alkaloid | Morphine 6- | Also acts on other alkaloids, including codeine, |
| biosynthesis I | dehydrogenase | normorphine and ethylmorphine, but only very |
| | | slowly on 7,8-saturated derivatives such as |
| | | dihydromorphine and dihydrocodeine In the |
| | | reverse direction, also reduces naloxone to the |
| | | 6-alpha-hydroxy analog Activated by 2- |
| | | mercaptoethanol |
| | Codeinone reductase | Stereospecifically catalyses the reversible |
| | (NADPH) | reduction of codeinone to codeine, which is a |
| | | direct precursor of morphine in the opium |
| | | poppy plant, Papaver somniferum |
| | Salutaridine reductase | Stereospecifically catalyses the reversible |
| | (NADPH) | reduction of salutaridine to salutaridinol, which |
| | | is a direct precursor of morphinan alkaloids in |
| | | the poppy plant, Papaver somniferum |
| | (S)-stylopine synthase | Catalyses an oxidative reaction that does not |
| | | incorporate oxygen into the product Forms the |
| | | second methylenedioxy bridge of the |
| | | protoberberine alkaloid stylopine from |
| | | oxidative ring closure of adjacent phenolic and |
| | | methoxy groups of cheilanthifoline |
| | (S)-cheilanthifoline | Catalyses an oxidative reaction that does not |
| | synthase | incorporate oxygen into the product Forms the |
| | | methylenedioxy bridge of the protoberberine |
| | | alkaloid cheilanthifoline from oxidative ring |
| | | closure of adjacent phenolic and methoxy |
| | | groups of scoulerine |
| | Salutaridine synthase | Forms the morphinan alkaloid salutaridine by |
| | | intramolecular phenol oxidation of reticuline |
| | | without the incorporation of oxygen into the |
| | | product |
| | (S)-canadine synthase | Catalyses an oxidative reaction that does not |
| | | incorporate oxygen into the product Oxidation |
| | | of the methoxyphenol group of the alkaloid |
| | | tetrahydrocolumbamine results in the |
| | | formation of the methylenedioxy bridge of |
| | | canadine |
| | Protopine 6- | Involved in benzophenanthridine alkaloid |
| | monooxygenase | synthesis in higher plants |
| | Dihydrosanguinarine | Involved in benzophenanthridine alkaloid |
| | 10-monooxygenase | synthesis in higher plants |
| | Monophenol | A group of copper proteins that also catalyse |
| | monooxygenase | the reaction of BC 1.10.3.1, if only 1,2- |
| | | benzenediols are available as substrate |
| | L-amino acid oxidase | |
| | 1,2-dehydroreticulinium | Stereospecifically reduces the 1,2- |
| | reductase (NADPH) | dehydroreticulinium ion to (R)-reticuline, |
| | | which is a direct precursor of morphinan |
| | | alkaloids in the poppy plant, papaver |
| | | somniferum The enzyme does not catalyse the |
| | | reverse reaction to any significant extent under |
| | | physiological conditions |
| | Dihydrobenzophenanthridine | Also catalyzes: dihydrochelirubine + O(2) = chelirubine + H(2)O(2) |
| | oxidase | Also catalyzes: |
| | | dihydromacarpine + O(2) = macarpine + H(2)O(2) |
| | | Found in higher plants Produces |
| | | oxidized forms of the benzophenanthridine |
| | | alkaloids |
| | Reticuline oxidase | The product of the reaction, (S)-scoulerine, is a |
| | | precursor of protopine, protoberberine and |
| | | benzophenanthridine alkaloid biosynthesis in |
| | | plants Acts on (S)-reticuline and related |
| | | compounds, converting the N-methyl group |
| | | into the methylene bridge (‘berberine |
| | | bridge[PRIME]) of (S)- |
| | | tetrahydroprotoberberines |
| | 3[PRIME]-hydroxy-N- | Involved in isoquinoline alkaloid metabolism |
| | methyl-(S)-coclaurine | in plants Has also been shown to catalyse the |
| | 4[PRIME]-O- | methylation of (R,S)-laudanosoline, (S)- |
| | methyltransferase | 3[PRIME]-hydroxycoclaurine and (R,S)-7-O- |
| | | methylnoraudanosoline |
| | (S)-scoulerine 9-O- | The product of this reaction is a precursor for |
| | methyltransferase | protoberberine alkaloids in plants |
| | Columbamine O- | The product of this reaction is a protoberberine |
| | methyltransferase | alkaloid that is widely distributed in the plant |
| | | kingdom Distinct in specificity from EC |
| | | 2.1.1.88 |
| | 10-hydroxydihydro- | Part of the pathway for synthesis of |
| | sanguinarine 10-O- | benzophenanthridine alkaloids in plants |
| | methyltransferase | |
| | 12-hydroxydi- | Part of the pathway for synthesis of |
| | hydrochelirubine 12-O- | benzophenanthridine alkaloid macarpine in |
| | methyltransferase | plants |
| | (R,S)-norcoclaurine 6- | Norcoclaurine is 6,7-dihydroxy-1-[(4- |
| | O-methyltransferase | hydroxyphenyl)methyl]-1,2,3,4- |
| | | tetrahydroisoquinoline The enzyme will also |
| | | catalyse the 6-O-methylation of (R,S)- |
| | | norlaudanosoline to form 6-O-methyl- |
| | | norlaudanosoline, but this alkaloid has not |
| | | been found to occur in plants |
| | Salutaridinol 7-O- | At higher pH values the product, 7-O- |
| | acetyltransferase | acetylsalutaridinol, spontaneously closes the 4- |
| | | >5 oxide bridge by allylic elimination to form |
| | | the morphine precursor thebaine From the |
| | | opium poppy plant, Papaver somniferum |
| | Aspartate | Also acts on L-tyrosine, L-phenylalanine and |
| | aminotransferase | L-tryptophan. This activity can be formed from |
| | | EC 2.6.1.57 by controlled proteolysis |
| | Tyrosine | L-phenylalanine can act instead of L-tyrosine |
| | aminotransferase | The mitochondrial enzyme may be identical |
| | | with EC 2.6.1.1 The three isoenzymic forms |
| | | are interconverted by EC 3.4.22.4 |
| | Aromatic amino acid | L-methionine can also act as donor, more |
| | transferase | slowly Oxaloacetate can act as acceptor |
| | | Controlled proteolysis converts the enzyme to |
| | | EC 2.6.1.1 |
| | Tyrosine decarboxylase | The bacterial enzyme also acts on 3- |
| | | hydroxytyrosine and, more slowly, on 3- |
| | | hydroxyphenylalanine |
| | Aromatic-L-amino-acid | Also acts on L-tryptophan, 5-hydroxy-L- |
| | decarboxylase | tryptophan and dihydroxy-L-phenylalanine |
| | | (DOPA) |
| Alkaloid | Tropine dehydrogenase | Oxidizes other tropan-3-alpha-ols, but not the |
| biosynthesis | | corresponding beta-derivatives |
| II | | |
| | Tropinone reductase | |
| | Hyoscyamine (6S)- | |
| | dioxygenase | |
| | 6-beta- | |
| | hydroxyhyoscyamine | |
| | epoxidase | |
| | Amine oxidase (copper- | A group of enzymes including those oxidizing |
| | containing) | primary amines, diamines and histamine One |
| | | form of EC 1.3.1.15 from rat kidney also |
| | | catalyses this reaction |
| | Putrescine N- | |
| | methyltransferase | |
| | Ornithine | |
| | decarboxylase | |
| | Oxalyl-CoA | |
| | decarboxylase | |
| | Phenylalanine | May also act on L-tyrosine |
| | ammonia-lyase | |
| Androgen and | 3-beta-hydroxy- | Acts on 3-beta-hydroxyandrost-5-en-17-one to |
| estrogen | delta(5)-steroid | form androst-4-ene-3,17-dione and on 3-beta- |
| metabolism | dehydrogenase | hydroxypregn-5-en-20-one to form |
| | | progesterone |
| | 11-beta-hydroxysteroid | |
| | dehydrogenase | |
| | Estradiol 17-alpha- | |
| | dehydrogenase | |
| | 3-alpha-hydroxy-5- | |
| | beta-androstane-17-one | |
| | 3-alpha-dehydrogenase | |
| | 3-alpha (17-beta)- | Also acts on other 17-beta-hydroxysteroids, on |
| | hydroxysteroid | the 3-alpha-hydroxy group of pregnanes and |
| | dehydrogenase (NAD+) | bile acids, and on benzene dihydrodiol |
| | | Different from EC 1.1.1.50 or EC 1.1.1.213 |
| | 3-alpha-hydroxysteroid | Acts on other 3-alpha-hydroxysteroids and on |
| | dehydrogenase (B- | 9-, 11- and 15-hydroxyprostaglandin B- |
| | specific) | specific with respect to NAD(+) or NADP(+) |
| | | (cf. EC 1.1.1.213) |
| | 3(or 17)beta- | Also acts on other 3-beta- or 17-beta- |
| | hydroxysteroid | hydroxysteroids (cf EC 1.1.1.209) |
| | dehydrogenase | |
| | Estradiol 17 beta- | Also acts on (S)-20-hydroxypregn-4-en-3-one |
| | dehydrogenase | and related compounds, oxidizing the (S)-20- |
| | | group B-specific with respect to NAD(P)(+) |
| | Testosterone 17-beta- | |
| | dehydrogenase | |
| | Testosterone 17-beta- | Also oxidizes 3-hydroxyhexobarbital to 3- |
| | dehydrogenase | oxohexobarbital |
| | (NADP+) | |
| | Steroid 11-beta- | Also hydroxylates steroids at the 18-position, |
| | monooxygenase | and converts 18-hydroxycorticosterone into |
| | | aldosterone |
| | Estradiol 6-beta- | |
| | monooxygenase | |
| | Androst-4-ene-3,17- | Has a wide specificity A single enzyme from |
| | dione monooxygenase | Cylindrocarpon radicicola (EC 1.14.13.54) |
| | | catalyses both this reaction and that catalysed |
| | | by EC 1.14.99.4 |
| | 3-oxo-5-alpha-steroid | |
| | 4-dehydrogenase | |
| | 3-oxo-5-beta-steroid 4- | |
| | dehydrogenase | |
| | UDP- | Family of enzymes accepting a wide range of |
| | glucuronosyltransferase | substrates, including phenols, alcohols, amines |
| | | and fatty acids Some of the activities catalysed |
| | | were previously listed separately as EC |
| | | 2.4.1.42, EC 2.4.1.59, EC 2.4.1.61, EC |
| | | 2.4.1.76, EC 2.4.1.77, EC 2.4.1.84, EC |
| | | 2.4.1.107 and EC 2.4.1.108 A temporary |
| | | nomenclature for the various forms whose |
| | | delineation is in a state of flux |
| | Steroid sulfotransferase | Broad specificity resembling EC 2.8.2.2, but |
| | | also acts on estrone |
| | Alcohol | Primary and secondary alcohols, including |
| | sulfotransferase | aliphatic alcohols, ascorbate, chloramphenicol, |
| | | ephedrine and hydroxysteroids, but not |
| | | phenolic steroids, can act as acceptors (cf. EC |
| | | 2.8.2.15) |
| | Estrone sulfotransferase | |
| | Arylsulfatase | A group of enzymes with rather similar |
| | | specificities |
| | Steryl-sulfatase | Also acts on some related steryl sulfates |
| | 17-alpha- | |
| | hydroxyprogesterone | |
| | aldolase | |
| | Steroid delta-isomerase | |
| C21-Steroid | 3-beta-hydroxy- | Acts on 3-beta-hydroxyandrost-5-en-17-one to |
| hormone | delta(5)-steroid | form androst-4-ene-3,17-dione and on 3-beta- |
| metabolism | dehydrogenase | hydroxypregn-5-en-20-one to form |
| | | progesterone |
| | 11-beta-hydroxysteroid | |
| | dehydrogenase | |
| | 20-alpha- | A-specific with respect to NAD(P)(+) |
| | hydroxysteroid | |
| | dehydrogenase | |
| | 3-alpha-hydroxysteroid | Acts on other 3-alpha-hydroxysteroids and on |
| | dehydrogenase (B- | 9-, 11- and 15-hydroxyprostaglandin B- |
| | specific) | specific with respect to NAD(+) or NADP(+) |
| | | (cf. EC 1.1.1.213) |
| | 3-alpha(or 20-beta)- | The 3-alpha-hydroxyl group or 20-beta- |
| | hydroxysteroid | hydroxyl group of pregnane and androstane |
| | dehydrogenase | steroids can act as donors |
| | Steroid 11-beta- | Also hydroxylates steroids at the 18-position, |
| | monooxygenase | and converts 18-hydroxycorticosterone into |
| | | aldosterone |
| | Corticosterone 18- | |
| | monooxygenase | |
| | Cholesterol | The reaction proceeds in three stages, with |
| | monooxygenase (side- | hydroxylation at C-20 and C-22 preceding |
| | chain cleaving) | scission of the side-chain at C-20 |
| | Steroid 21- | |
| | monooxygenase | |
| | Progesterone 11-alpha- | |
| | monooxygenase | |
| | Steroid 17-alpha- | |
| | monooxygenase | |
| | Cholestenone 5-beta- | |
| | reductase | |
| | Cortisone beta- | |
| | reductase | |
| | Progesterone 5-alpha- | Testosterone and 20-alpha-hydroxy-4-pregnen- |
| | reductase | 3-one can act in place of progesterone |
| | 3-oxo-5-beta-steroid 4- | |
| | dehydrogenase | |
| | Steroid delta-isomerase | |
| Flavonoids, | Coniferyl-alcohol | Specific for coniferyl alcohol; does not act on |
| stilbene and | dehydrogenase | cinnamyl alcohol, 4-coumaryl alcohol or |
| lignin | | sinapyl alcohol |
| biosynthesis | | |
| | Cinnamyl-alcohol | Acts on coniferyl alcohol, sinapyl alcohol, 4- |
| | dehydrogenase | coumaryl alcohol and cinnamyl alcohol (cf. EC |
| | | 1.1.1.194) |
| | Dihydrokaempferol 4- | Also acts, in the reverse direction, on (+)- |
| | reductase | dihydroquercetin and (+)-dihydromyricetin |
| | | Each dihydroflavonol is reduced to the |
| | | corresponding cis-flavon-3,4-diol NAD(+) can |
| | | act instead of NADP(+), more slowly Involved |
| | | in the biosynthesis of anthocyanidins in plants |
| | Flavonone 4-reductase | Involved in the biosynthesis of 3- |
| | | deoxyanthocyanidins from flavonones such as |
| | | naringenin or eriodictyol |
| | Peroxidase | |
| | Caffeate 3,4- | |
| | dioxygenase | |
| | Naringenin 3- | |
| | dioxygenase | |
| | Trans-cinnamate 4- | Also acts on NADH, more slowly |
| | monooxygenase | |
| | Trans-cinnamate 2- | |
| | monooxygenase | |
| | Flavonoid 3[PRIME]- | Acts on a number of flavonoids, including |
| | monooxygenase | naringenin and dihydrokaempferol Does not |
| | | act on 4-coumarate or 4-coumaroyl-CoA |
| | Monophenol | A group of copper proteins that also catalyse |
| | monooxygenase | the reaction of EC 1.10.3.1, if only 1,2- |
| | | benzenediols are available as substrate |
| | Cinnamoyl-CoA | Also acts on a number of substituted |
| | reductase | cinnamoyl esters of coenzyme A |
| | Caffeoyl-CoA O- | |
| | methyltransferase | |
| | Luteolin O- | Also acts on luteolin-7-O-beta-D-glucoside |
| | methyltransferase | |
| | Caffeate O- | 3,4-dihydroxybenzaldehyde and catechol can |
| | methyltransferase | act as acceptor, more slowly |
| | Apigenin 4[PRIME]-O- | Converts apigenin into acacetin Naringenin |
| | methyltransferase | (5,7,4[PRIME]-trihydroxyflavonone) can also |
| | | act as acceptor, more slowly |
| | Quercetin 3-O- | Specific for quercetin. Related enzymes bring |
| | methyltransferase | about the 3-O-methylation of other flavonols, |
| | | such as galangin and kaempferol |
| | Isoflavone-7-O-beta- | The 6-position of the glucose residue of |
| | glucoside | formononetin can also act as acceptor Some |
| | 6[PRIME][PRIME]-O- | other 7-O-glucosides of isoflavones, flavones |
| | malonyltransferase | and flavonols can also act, more slowly |
| | Pinosylvin synthase | Not identical with EC 2.3.1.74 or EC 2.3.1.95 |
| | Naringenin-chalcone | In the presence of NADH and a reductase, |
| | synthase | 6[PRIME]-deoxychalcone is produced |
| | Trihydroxystilbene | Not identical with EC 2.3.1.74 or EC 2.3.1.146 |
| | synthase | |
| | Quinate O- | Caffeoyl-CoA and 4-coumaroyl-CoA can also |
| | hydroxycinnamoyltransferase | act as donors, more slowly Involved in the |
| | | biosynthesis of chlorogenic acid in sweet |
| | | potato and, with EC 2.3.1.98 in the formation |
| | | of caffeoyl-CoA in tomato |
| | Coniferyl-alcohol | Sinapyl alcohol can also act as acceptor |
| | glucosyltransferase | |
| | 2-coumarate O-beta- | Coumarinate (cis-2-hydroxycinnamate) does |
| | glucosyltransferase | not act as acceptor |
| | Scopoletin | |
| | glucosyltransferase | |
| | Flavonol-3-O-glucoside | Converts flavonol 3-O-glucosides to 3-O- |
| | L-rhamnosyltransferase | rutinosides Also acts, more slowly, on rutin, |
| | | quercetin 3-O-galactoside and flavonol O3- |
| | | rhamnosides |
| | Flavone 7-O-beta- | A number of flavones, flavonones and |
| | glucosyltransferase | flavonols can function as acceptors Different |
| | | from EC 2.4.1.91 |
| | Flavonol 3-O- | Acts on a variety of flavonols, including |
| | glucosyltransferase | quercetin and quercetin 7-O-glucoside |
| | | Different from EC 2.4.1.81 |
| | Flavone | 7-O-beta-D-glucosides of a number of |
| | apiosyltransferase | flavonoids and of 4-substituted phenols can act |
| | | as acceptors |
| | Coniferin beta- | Also hydrolyzes syringin, 4-cinnamyl alcohol |
| | glucosidase | beta-glucoside, and, more slowly, some other |
| | | aryl beta-glycosides A plant cell-wall enzyme |
| | | involved in the biosynthesis of lignin |
| | Beta-glucosidase | Wide specificity for beta-D-glucosides. Some |
| | | examples also hydrolyse one or more of the |
| | | following: beta-D-galactosides, alpha-L- |
| | | arabinosides, beta-D-xylosides, and beta-D- |
| | | fucosides |
| | Chalcone isomerase | |
| | 4-coumarate-CoA | |
| | ligase | |
| TABLE Continued | | |
| Pathway Name | Enzyme Description | Enzyme Comments |
| Ascorbate and aldarate | D-threo-aldose 1- | Acts on L-fucose, D-arabinose and L- |
| metabolism | dehydrogenase | xylose The animal enzyme was also |
| | | shown to act on L-arabinose, and the |
| | | enzyme from Pseudomonas caryophylli |
| | | on L-glucose |
| | L-threonate 3- | |
| | dehydrogenase | |
| | Glucuronate reductase | Also reduces D-galacturonate May be |
| | | identical with EC 1.1.1.2 |
| | Glucuronolactone | |
| | reductase | |
| | L-arabinose 1- | |
| | dehydrogenase | |
| | L-galactonolactone | Acts on the 1,4-lactones of L-galactonic, |
| | oxidase | D-altronic, L-fuconic, D-arabinic and D- |
| | | threonic acids Not identical with EC |
| | | 1.1.3.8 (cf. EC 1.3.2.3) |
| | L-gulonolactone | The product spontaneously isomerizes to |
| | oxidase | L-ascorbate |
| | L-ascorbate oxidase | |
| | L-ascorbate peroxidase | |
| | Ascorbate 2,3- | |
| | dioxygenase | |
| | 2,5-dioxovalerate | |
| | dehydrogenase | |
| | Aldehyde | Wide specificity, including oxidation of |
| | dehydrogenase (NAD+) | D-glucuronolactone to D-glucarate |
| | Galactonolactone | Cf. EC 1.1.3.24 |
| | dehydrogenase | |
| | Monodehydroascorbate | |
| | reductase (NADH) | |
| | Glutathione | |
| | dehydrogenase | |
| | (ascorbate) | |
| | L-arabinonolactonase | |
| | Gluconolactonase | Acts on a wide range of hexono-1,5- |
| | | lactones |
| | Uronolactonase | |
| | 1,4-lactonase | Specific for 1,4-lactones with 4-8 carbon |
| | | atoms Does not hydrolyse simple |
| | | aliphatic esters, acetylcholine, sugar |
| | | lactones or substituted aliphatic lactones, |
| | | e.g. 3-hydroxy-4-butyrolactone |
| | 2-dehydro-3- | |
| | deoxyglucarate aldolase | |
| | L-arabinonate | |
| | dehydratase | |
| | Glucarate dehydratase | |
| | 5-dehydro-4- | |
| | deoxyglucarate | |
| | dehydratase | |
| | Galactarate dehydratase | |
| | 2-dehydro-3-deoxy-L- | |
| | arabinonate | |
| | dehydratase | |
| Carbon fixation | Malate dehydrogenase | Also oxidizes some other 2- |
| | | hydroxydicarboxylic acids |
| | Malate dehydrogenase | Does not decarboxylates added |
| | (decarboxylating) | oxaloacetate |
| | Malate dehydrogenase | Also decarboxylates added oxaloacetate |
| | (oxaloacetate | |
| | decarboxylating) | |
| | (NADP+) | |
| | Malate dehydrogenase | Activated by light |
| | (NADP+) | |
| | Glyceraldehyde-3- | |
| | phosphate | |
| | dehydrogenase | |
| | (NADP+) | |
| | (phosphorylating) | |
| | Transketolase | Wide specificity for both reactants, e.g. |
| | | converts hydroxypyruvate and R—CHO |
| | | into CO(2) and R—CHOH—CO—CH(2)OH |
| | | Transketolase from Alcaligenes faecalis |
| | | shows high activity with D-erythrose as |
| | | acceptor |
| | Aspartate | Also acts on L-tyrosine, L-phenylalanine |
| | aminotransferase | and L-tryptophan. This activity can be |
| | | formed from EC 2.6.1.57 by controlled |
| | | proteolysis |
| | Alanine | 2-aminobutanoate acts slowly instead of |
| | aminotransferase | alanine |
| | Sedoheptulokinase | |
| | Phosphoribulokinase | |
| | Pyruvate kinase | UTP, GTP, CTP, ITP and dATP can also |
| | | act as donors Also phosphorylates |
| | | hydroxylamine and fluoride in the |
| | | presence of CO(2) |
| | Phosphoglycerate | |
| | kinase | |
| | Pyruvate, phosphate | |
| | dikinase | |
| | Fructose- | The animal enzyme also acts on |
| | bisphosphatase | sedoheptulose 1,7-bisphosphate |
| | Sedoheptulose- | |
| | bisphosphatase | |
| | Phosphoenolpyruvate | |
| | carboxylase | |
| | Ribulose-bisphosphate | Will utilize O(2) instead of CO(2), |
| | carboxylase | forming 3-phospho-D-glycerate and 2- |
| | | phosphoglycolate |
| | Phosphoenolpyruvate | |
| | carboxykinase (ATP) | |
| | Fructose-bisphosphate | Also acts on (3S,4R)-ketose 1-phosphates |
| | aldolase | The yeast and bacterial enzymes are zinc |
| | | proteins The enzymes increase electron- |
| | | attraction by the carbonyl group, some |
| | | (Class I) forming a protonated imine with |
| | | it, others (Class II), mainly of microbial |
| | | origin, polarizing it with a metal ion, e.g |
| | | zinc |
| | Phosphoketolase | |
| | Ribulose-phosphate 3- | Also converts D-erythrose 4-phosphate |
| | epimerase | into D-erythrulose 4-phosphate and D- |
| | | threose 4-phosphate |
| | Triosephosphate | |
| | isomerase | |
| | Ribose 5-phosphate | Also acts on D-ribose 5-diphosphate and |
| | epimerase | D-ribose 5-triphosphate |
| Phenylalanine | (R)-4- | Also acts, more slowly, on (R)-3- |
| metabolism | hydroxyphenyllactate | phenyllactate, (R)-3-(indole-3-yl)lactate |
| | dehydrogenase | and (R)-lactate |
| | Hydroxyphenyl- | Also acts on 3-(3,4- |
| | pyruvate reductase | dihydroxyphenyl)lactate Involved with |
| | | EC 2.3.1.140 in the biosynthesis of |
| | | rosmarinic acid |
| | Aryl-alcohol | A group of enzymes with broad |
| | dehydrogenase | specificity towards primary alcohols with |
| | | an aromatic or cyclohex-1-ene ring, but |
| | | with low or no activity towards short- |
| | | chain aliphatic alcohols |
| | Peroxidase | |
| | Catechol 1,2- | Involved in the metabolism of nitro- |
| | dioxygenase | aromatic compounds by a strain of |
| | | Pseudomonas putida |
| | 2,3-dihydroxybenzoate | |
| | 3,4-dioxygenase | |
| | 3-carboxyethylcatechol | |
| | 2,3-dioxygenase | |
| | Catechol 2,3- | The enzyme from Alcaligines sp. strain |
| | dioxygenase | O-1 has also been shown to catalyse the |
| | | reaction: 3-Sulfocatechol + O(2) + H(2)O = 2- |
| | | hydroxymuconate + bisulfite. It has |
| | | been referred to as 3-sulfocatechol 2,3- |
| | | dioxygenase. Further work will be |
| | | necessary to show whether or not this is a |
| | | distinct enzyme |
| | 4- | |
| | hydroxyphenylpyruvate | |
| | dioxygenase | |
| | Protocatechuate 3,4- | |
| | dioxygenase | |
| | Hydroxyquinol 1,2- | The product isomerizes to 2- |
| | dioxygenase | maleylacetate (cis-hex-2-enedioate) |
| | | Highly specific; catechol and pyrogallol |
| | | are acted on at less than 1% of the rate at |
| | | which benzene-1,2,4-triol is oxidized |
| | Protocatechuate 4,5- | |
| | dioxygenase | |
| | Phenylalanine 2- | Also catalyses a reaction similar to that |
| | monooxygenase | of EC 1.4.3.2, forming 3-phenylpyruvate, |
| | | NH(3) and H(2)O(2), but more slowly |
| | Anthranilate 1,2- | |
| | dioxygenase | |
| | (deaminating, | |
| | decarboxylating) | |
| | Benzoate 1,2- | A system, containing a reductase which |
| | dioxygenase | is an iron-sulfur flavoprotein (FAD), and |
| | | an iron-sulfur oxygenase |
| | Toluene dioxygenase | A system, containing a reductase which |
| | | is an iron-sulfur flavoprotein (FAD), an |
| | | iron-sulfur oxygenase, and a ferredoxin |
| | | Some other aromatic compounds, |
| | | including ethylbenzene, 4-xylene and |
| | | some halogenated toluenes, are converted |
| | | into the corresponding cis-dihydrodiols |
| | Naphthalene 1,2- | A system, containing a reductase which |
| | dioxygenase | is an iron-sulfur flavoprotein (FAD), an |
| | | iron-sulfur oxygenase, and ferredoxin |
| | Benzene 1,2- | A system, containing a reductase which |
| | dioxygenase | is an iron-sulfur flavoprotein, an iron- |
| | | sulfur oxygenase and ferredoxin |
| | Salicylate 1- | |
| | monooxygenase | |
| | Trans-cinnamate 4- | Also acts on NADH, more slowly |
| | monooxygenase | |
| | Benzoate 4- | |
| | monooxygenase | |
| | 4-hydroxybenzoate 3- | Most enzymes from Pseudomonas are |
| | monooxygenase | highly specific for NAD(P)H (cf EC |
| | | 1.14.13.33) |
| | 3-hydroxybenzoate 4- | Also acts on a number of analogs of 3- |
| | monooxygenase | hydroxybenzoate substituted in the 2, 4, 5 |
| | | and 6 positions |
| | 3-hydroxybenzoate 6- | Also acts on a number of analogs of 3- |
| | monooxygenase | hydroxybenzoate substituted in the 2, 4, 5 |
| | | and 6 positions NADPH can act instead |
| | | of NADH, more slowly |
| | 4-hydroxybenzoate 3- | The enzyme from Corynebacterium |
| | monooxygenase | cyclohexanicum is highly specific for 4- |
| | (NAD(P)H) | hydroxybenzoate, but uses NADH and |
| | | NADPH at approximately equal rates (cf. |
| | | EC 1.14.13.2). It is less specific for |
| | | NADPH than EC 1.14.13.2 |
| | Anthranilate 3- | The enzyme from Aspergillus niger is an |
| | monooxygenase | iron protein; that from the yeast |
| | (deaminating) | Trichosporon cutaneum is a flavoprotein |
| | | (FAD) |
| | Melilotate 3- | |
| | monooxygenase | |
| | Phenol 2- | Also active with resorcinol and O-cresol |
| | monooxygenase | |
| | Mandelate 4- | |
| | monooxygenase | |
| | 3-hydroxybenzoate 2- | |
| | monooxygenase | |
| | 4-cresol dehydrogenase | Phenazine methosulfate can act as |
| | (hydroxylating) | acceptor A quinone methide is probably |
| | | formed as intermediate The product is |
| | | oxidized further to 4-hydroxybenzoate |
| | Benzaldehyde | |
| | dehydrogenase (NAD+) | |
| | Aminomuconate- | Also acts on 2-hydroxymuconate |
| | semialdehyde | semialdehyde |
| | dehydrogenase | |
| | Phenylacetaldehyde | |
| | dehydrogenase | |
| | 4-carboxy-2- | Does not act on unsubstituted aliphatic or |
| | hydroxymuconate-6- | aromatic aldehydes or glucose NAD(+) |
| | semialdehyde | can replace NADP(+), but with lower |
| | dehydrogenase | affinity |
| | Aldehyde | |
| | dehydrogenase | |
| | (NAD(P)+) | |
| | Benzaldehyde | |
| | dehydrogenase | |
| | (NADP+) | |
| | Coumarate reductase | |
| | Cis-1,2- | |
| | dihydrobenzene-1,2- | |
| | diol dehydrogenase | |
| | Cis-1,2-dihydro-1,2- | Also acts, at half the rate, on cis- |
| | dihydroxynaphthalene | anthracene dihydrodiol and cis- |
| | dehydrogenase | phenanthrene dihydrodiol |
| | 2-enoate reductase | Acts, in the reverse direction, on a wide |
| | | range of alkyl and aryl alpha, beta- |
| | | unsaturated carboxylate ions 2-butenoate |
| | | was the best substrate tested |
| | Maleylacetate reductase | |
| | Phenylalanine | The enzyme from Bacillus badius and |
| | dehydrogenase | Sporosarcina ureae are highly specific for |
| | | L-phenylalanine, that from Bacillus |
| | | sphaericus also acts on L-tyrosine |
| | L-amino acid oxidase | |
| | Amine oxidase (flavin- | Acts on primary amines, and usually also |
| | containing) | on secondary and tertiary amines |
| | Amine oxidase (copper- | A group of enzymes including those |
| | containing) | oxidizing primary amines, diamines and |
| | | histamine One form of EC 1.3.1.15 from |
| | | rat kidney also catalyses this reaction |
| | D-amino-acid | Acts to some extent on all D-amino acids |
| | dehydrogenase | except D-aspartate and D-glutamate |
| | Aralkylamine | Phenazine methosulfate can act as |
| | dehydrogenase | acceptor Acts on aromatic amines and, |
| | | more slowly, on some long-chain |
| | | aliphatic amines, but not on methylamine |
| | | or ethylamine (cf EC 1.4.99.3) |
| | Glutamine N- | |
| | phenylacetyltransferase | |
| | Acetyl-CoA C- | |
| | acyltransferase | |
| | D-amino-acid N- | |
| | acetyltransferase | |
| | Phenylalanine N- | Also acts, more slowly, on L-histidine |
| | acetyltransferase | and L-alanine |
| | Glycine N- | Not identical with EC 2.3.1.13 or EC |
| | benzoyltransferase | 2.3.1.68 |
| | Aspartate | Also acts on L-tyrosine, L-phenylalanine |
| | aminotransferase | and L-tryptophan. This activity can be |
| | | formed from EC 2.6.1.57 by controlled |
| | | proteolysis |
| | D-alanine | Acts on the D-isomers of leucine, |
| | aminotransferase | aspartate, glutamate, aminobutyrate, |
| | | norvaline and asparagine |
| | Tyrosine | L-phenylalanine can act instead of L- |
| | aminotransferase | tyrosine The mitochondrial enzyme may |
| | | be identical with EC 2.6.1.1 The three |
| | | isoenzymic forms are interconverted by |
| | | EC 3.4.22.4 |
| | Aromatic amino acid | L-methionine can also act as donor, more |
| | transferase | slowly Oxaloacetate can act as acceptor |
| | | Controlled proteolysis converts the |
| | | enzyme to EC 2.6.1.1 |
| | Histidinol-phosphate | |
| | aminotransferase | |
| | 3-oxoadipate CoA- | |
| | transferase | |
| | 3-oxoadipate enol- | Acts on the product of EC 4.1.1.44 |
| | lactonase | |
| | Carboxymethylene- | |
| | butenolidase | |
| | 2-pyrone-4,6- | The product isomerizes to 4- |
| | dicarboxylate lactonase | oxalmesaconate |
| | Hippurate hydrolase | Acts on various N-benzoylamino acids |
| | Amidase | |
| | Acylphosphatase | |
| | 2-hydroxymuconate- | |
| | semialdehyde hydrolase | |
| | Aromatic-L-amino-acid | Also acts on L-tryptophan, 5-hydroxy-L- |
| | decarboxylase | tryptophan and dihydroxy-L- |
| | | phenylalanine (DOPA) |
| | Phenylpyruvate | Also acts on indole-3-pyruvate |
| | decarboxylase | |
| | 4-carboxymucono- | |
| | lactone decarboxylase | |
| | O-pyrocatechuate | |
| | decarboxylase | |
| | Phenylalanine | Also acts on tyrosine and other aromatic |
| | decarboxylase | amino acids |
| | 4-hydroxybenzoate | |
| | decarboxylase | |
| | Protocatechuate | |
| | decarboxylase | |
| | Benzoylformate | |
| | decarboxylase | |
| | 4-oxalocrotonate | Involved in the meta-cleavage pathway |
| | decarboxylase | for the degradation of phenols, cresols |
| | | and catechols |
| | 4-hydroxy-4-methyl-2- | Also acts on 4-hydroxy-4-methyl-2- |
| | oxoglutarate aldolase | oxoadipate and 4-carboxy-4-hydroxy-2- |
| | | oxohexadioate |
| | 2-oxopent-4-enoate | Also acts, more slowly, on cis-2-oxohex- |
| | hydratase | 4-enoate, but not on the trans-isomer |
| | Phenylalanine | May also act on L-tyrosine |
| | ammonia-lyase | |
| | Phenylalanine racemase | |
| | (ATP-hydrolysing) | |
| | Mandelate racemase | |
| | Phenylpyruvate | Also acts on other arylpyruvates |
| | tautomerase | |
| | 5-carboxymethyl-2- | |
| | hydroxymuconate | |
| | delta-isomerase | |
| | Muconolactone delta- | |
| | isomerase | |
| | Muconate | Also acts, in the reverse reaction, on 3- |
| | cycloisomerase | methyl-cis-cis-hexa-dienedioate and, |
| | | very slowly, on cis-trans-hexadienedioate |
| | | Not identical with EC 5.5.1.7 or EC |
| | | 5.5.1.11 |
| | 3-carboxy-cis,cis- | |
| | muconate | |
| | cycloisomerase | |
| | Carboxy-cis,cis- | |
| | muconate cyclase | |
| | Chloromuconate | Spontaneous elimination of HCl produces |
| | cycloisomerase | cis-4-carboxymethylenebut-2-en-4-olide |
| | | Also acts in reverse direction on 2- |
| | | chloro-cis,cis-muconate Not identical |
| | | with EC 5.5.1.1 or EC 5.5.1.11 |
| | Phenylacetate-CoA | Phenoxyacetate can replace phenylacetate |
| | ligase | |
| | Benzoate-CoA ligase | Also acts on 2-, 3- and 4-fluorobenzoate, |
| | | but only very slowly on the |
| | | corresponding chlorobenzoates |
| | 4-hydroxybenzoate-CoA | |
| | ligase | |
| | Phenylacetate-CoA | Also acts, more slowly, on acetate, |
| | ligase | propanoate and butanoate, but not on |
| | | hydroxy derivatives of phenylacetate and |
| | | related compounds |
| Phenylalanine, tyrosine | Quinate 5- | |
| and tryptophan biosynthesis | dehydrogenase | |
| | Shikimate 5- | |
| | dehydrogenase | |
| | Quinate dehydrogenase | |
| | (pyrroloquinoline- | |
| | quinone) | |
| | Phenylalanine 4- | |
| | monooxygenase | |
| | Prephenate | This enzyme in the enteric bacteria also |
| | dehydrogenase | possesses chorismate mutase activity (EC |
| | | 5.4.99.5) and converts chorismate into |
| | | prephenate |
| | Prephenate | |
| | dehydrogenase | |
| | (NADP+) | |
| | Cyclohexadienyl | Also acts on prephenate and D- |
| | dehydrogenase | prephenyllactate (cf. EC 1.3.1.12) |
| | 2-methyl-branched- | From Ascaris suum The reaction |
| | chain-enoyl-CoA | proceeds only in the presence of another |
| | reductase | flavoprotein (ETF = [PRIME]Electron- |
| | | Transferring Flavoprotein[PRIME]) |
| | Phenylalanine | The enzyme from Bacillus badius and |
| | dehydrogenase | Sporosarcina ureae are highly specific for |
| | | L-phenylalanine, that from Bacillus |
| | | sphaericus also acts on L-tyrosine |
| | L-amino acid oxidase | |
| | Anthranilate | In some organisms, this enzyme is part of |
| | phosphoribosyl- | a multifunctional protein together with |
| | transferase | one or more components of the system |
| | | for biosynthesis of tryptophan (EC |
| | | 4.1.1.48, EC 4.1.3.27, EC 4.2.1.20, and |
| | | EC 5.3.1.24) |
| | 3-phosphoshikimate 1- | |
| | carboxyvinyl- | |
| | transferase | |
| | Aspartate | Also acts on L-tyrosine, L-phenylalanine |
| | aminotransferase | and L-tryptophan. This activity can be |
| | | formed from EC 2.6.1.57 by controlled |
| | | proteolysis |
| | Tyrosine | L-phenylalanine can act instead of L- |
| | aminotransferase | tyrosine The mitochondrial enzyme may |
| | | be identical with EC 2.6.1.1 The three |
| | | isoenzymic forms are interconverted by |
| | | EC 3.4.22.4 |
| | Aromatic amino acid | L-methionine can also act as donor, more |
| | transferase | slowly Oxaloacetate can act as acceptor |
| | | Controlled proteolysis converts the |
| | | enzyme to EC 2.6.1.1 |
| | Histidinol-phosphate | |
| | aminotransferase | |
| | Shikimate kinase | |
| | Indole-3-glycerol- | In some organisms, this enzyme is part of |
| | phosphate synthase | a multifunctional protein together with |
| | | one or more components of the system |
| | | for biosynthesis of tryptophan (EC |
| | | 2.4.2.18, EC 4.1.3.27, EC 4.2.1.20, and |
| | | EC 5.3.1.24) |
| | 2-dehydro-3- | |
| | deoxyphosphoheptonate | |
| | aldolase | |
| | Anthranilate synthase | In some organisms, this enzyme is part of |
| | | a multifunctional protein together with |
| | | one or more components of the system |
| | | for biosynthesis of tryptophan (EC |
| | | 2.4.2.18, EC 4.1.1.48, EC 4.2.1.20, and |
| | | EC 5.3.1.24) The native enzyme in the |
| | | complex with uses either glutamine or |
| | | (less efficiently) NH(3). The enzyme |
| | | separated from the complex uses NH(3) |
| | | only |
| | 3-dehydroquinate | |
| | dehydratase | |
| | Phosphopyruvate | Also acts on 3-phospho-D-erythronate |
| | hydratase | |
| | Tryptophan synthase | Also catalyses the conversion of serine |
| | | and indole into tryptophan and water and |
| | | of indoleglycerol phosphate into indole |
| | | and glyceraldehyde phosphate In some |
| | | organisms, this enzyme is part of a |
| | | multifunctional protein together with one |
| | | or more components of the system for |
| | | biosynthesis of tryptophan (EC 2.4.2.18, |
| | | EC 4.1.1.48, EC 4.1.3.27, and EC |
| | | 5.3.1.24) |
| | Prephenate dehydratase | This enzyme in the enteric bacteria also |
| | | possesses chorismate mutase activity and |
| | | converts chorismate into prephenate |
| | Carboxycyclohexadienyl | Also acts on prephenate and D- |
| | dehydratase | prephenyllactate Cf. EC 4.2.1.51 |
| | 3-dehydroquinate | The hydrogen atoms on C-7 of the |
| | synthase | substrate are retained on C-2 of the |
| | | products |
| | Chorismate synthase | Shikimate is numbered so that the |
| | | double-bond is between C-1 and C-2, but |
| | | some earlier papers numbered in the |
| | | reverse direction |
| | Phosphoribosylanthranilate | In some organisms, this enzyme is part of |
| | isomerase | a multifunctional protein together with |
| | | one or more components of the system |
| | | for biosynthesis of tryptophan (EC |
| | | 2.4.2.18, EC 4.1.1.48, EC 4.1.3.27, and |
| | | EC 4.2.1.20) |
| | Chorismate mutase | |
| | Tyrosine-tRNA ligase | |
| | Phenylalanine-tRNA | |
| | ligase | |
| Starch and sucrose | UDP-glucose 6- | Also acts on UDP-2-deoxyglucose |
| metabolism | dehydrogenase | |
| | Glucoside 3- | The enzyme acts on D-glucose, D- |
| | dehydrogenase | galactose, D-glucosides and D- |
| | | galactosides, but D-glucosides react more |
| | | rapidly than D-galactosides |
| | CDP-4-dehydro-6- | Two proteins are involved but no partial |
| | deoxyglucose reductase | reaction has been observed in the |
| | | presence of either alone |
| | Phosphorylase | The recommended name should be |
| | | qualified in each instance by adding the |
| | | name of the natural substance, e.g. |
| | | maltodextrin phosphorylase, starch |
| | | phosphorylase, glycogen phosphorylase |
| | Levansucrase | Some other sugars can act as D-fructosyl |
| | | acceptors |
| | Glycogen (starch) | The recommended name varies according |
| | synthase | to the source of the enzyme and the |
| | | nature of its synthetic product Glycogen |
| | | synthase from animal tissues is a |
| | | complex of a catalytic subunit and the |
| | | protein glycogenin The enzyme requires |
| | | glucosylated glycogenin as a primer; this |
| | | is the reaction product of EC 2.4.1.186 A |
| | | similar enzyme utilizes ADP-glucose (Cf. |
| | | EC 2.4.1.21) |
| | Cellulose synthase | Involved in the synthesis of cellulose A |
| | (UDP-forming) | similar enzyme utilizes GDP-glucose (Cf. |
| | | EC 2.4.1.29) |
| | Sucrose synthase | |
| | Sucrose-phosphate | |
| | synthase | |
| | Alpha,alpha-trehalose- | See also EC 2.4.1.36 |
| | phosphate synthase | |
| | (UDP-forming) | |
| | UDP- | Family of enzymes accepting a wide |
| | glucuronosyltransferase | range of substrates, including phenols, |
| | | alcohols, amines and fatty acids Some of |
| | | the activities catalysed were previously |
| | | listed separately as EC 2.4.1.42, EC |
| | | 2.4.1.59, EC 2.4.1.61, EC 2.4.1.76, EC |
| | | 2.4.1.77, EC 2.4.1.84, EC 2.4.1.107 and |
| | | EC 2.4.1.108 A temporary nomenclature |
| | | for the various forms whose delineation |
| | | is in a state of flux |
| | 1,4-alpha-glucan | Converts amylose into amylopectin The |
| | branching enzyme | recommended name requires a |
| | | qualification depending on the product, |
| | | glycogen or amylopectin, e.g. glycogen |
| | | branching enzyme, amylopectin |
| | | branching enzyme. The latter has |
| | | frequently been termed Q-enzyme |
| | Cellobiose | |
| | phosphorylase | |
| | Starch (bacterial | The recommended name various |
| | glycogen) synthase | according to the source of the enzyme |
| | | and the nature of its synthetic product, |
| | | e.g. starch synthase, bacterial glycogen |
| | | synthase A similar enzyme utilizes UDP- |
| | | glucose (Cf. EC 2.4.1.11) |
| | 4-alpha- | An enzymic activity of this nature forms |
| | glucanotransferase | part of the mammalian and Yeast |
| | | glycogen branching system (see EC |
| | | 3.2.1.33) |
| | Cellulose synthase | Involved in the synthesis of cellulose A |
| | (GDP-forming) | similar enzyme utilizes UDP-glucose (Cf. |
| | | EC 2.4.1.12) |
| | 1,3-beta-glucan | |
| | synthase | |
| | Phenol beta- | Acts on a wide range of phenols |
| | glucosyltransferase | |
| | Amylosucrase | |
| | Polygalacturonate 4- | |
| | alpha- | |
| | galacturonosyltransferase | |
| | Dextransucrase | |
| | Alpha,alpha-trehalose | |
| | phosphorylase | |
| | Sucrose phosphorylase | In the forward reaction, arsenate may |
| | | replace phosphate In the reverse reaction |
| | | various ketoses and L-arabinose may |
| | | replace D-fructose |
| | Maltose phosphorylase | |
| | 1,4-beta-D-xylan | |
| | synthase | |
| | Hexokinase | D-glucose, D-mannose, D-fructose, |
| | | sorbitol and D-glucosamine can act as |
| | | acceptors ITP and dATP can act as |
| | | donors The liver isoenzyme has |
| | | sometimes been called glucokinase |
| | Phosphoglucokinase | |
| | Glucose-1,6- | D-glucose 6-phosphate can act as |
| | bisphosphate synthase | acceptor, forming D-glucose 1,6- |
| | | bisphosphate |
| | Glucokinase | A group of enzymes found in |
| | | invertebrates and microorganisms highly |
| | | specific for glucose |
| | Fructokinase | |
| | Glucose-1-phosphate | |
| | phosphodismutase | |
| | Protein-N(PI)- | Comprises a group of related enzymes |
| | phosphohistidine-sugar | The protein substrate is a phosphocarrier |
| | phosphotransferase | protein of low molecular mass (9.5 Kd) A |
| | | phosphoenzyme intermediate is formed |
| | | The enzyme translocates the sugar it |
| | | phosphorylates into bacteria Aldohexoses |
| | | and their glycosides and alditols are |
| | | phosphorylated on O-6; fructose and |
| | | sorbose on O-1 Glycerol and |
| | | disaccharides are also substrates |
| | Glucose-1-phosphate | |
| | adenylyltransferase | |
| | Glucose-1-phosphate | |
| | cytidylyltransferase | |
| | Glucose-1-phosphate | Also acts, more slowly, on D-mannose 1- |
| | guanylyltransferase | phosphate |
| | UTP-glucose-1- | |
| | phosphate | |
| | uridylyltransferase | |
| | Pectinesterase | |
| | Trehalose-phosphatase | |
| | Sucrose-phosphatase | |
| | Glucose-6-phosphatase | Wide distribution in animal tissues Also |
| | | catalyses potent transphosphorylations |
| | | from carbamoyl phosphate, hexose |
| | | phosphates, pyrophosphate, |
| | | phosphoenolpyruvate and nucleoside di- |
| | | and triphosphates, to D-glucose, D- |
| | | mannose, 3-methyl-D-glucose, or 2- |
| | | deoxy-D-glucose (cf. EC 2.7.1.62, EC |
| | | 2.7.1.79, and EC 3.9.1.1) |
| | Alpha-amylase | Acts on starch, glycogen and related |
| | | polysaccharides and oligosaccharides in a |
| | | random manner; reducing groups are |
| | | liberated in the alpha-configuration |
| | Oligo-1,6-glucosidase | Also hydrolyses palatinose The enzyme |
| | | from intestinal mucosa is a single |
| | | polypeptide chain also catalysing the |
| | | reaction of EC 3.2.1.48 |
| | Maltose-6[PRIME]- | Hydrolyses a variety of 6-phospho-D- |
| | phosphate glucosidase | glucosides, including maltose 6- |
| | | phosphate, alpha[PRIME]alpha-trehalose |
| | | 6-phosphate, sucrose 6-phosphate and p- |
| | | nitrophenyl-alpha-D-glucopyranoside 6- |
| | | phosphate (as a chromogenic substrate) |
| | | The enzyme is activated by Fe(II), |
| | | Mn(II), Co(II) and Ni(II). It is rapidly |
| | | inactivated in air |
| | Polygalacturonase | |
| | Beta-amylase | Acts on starch, glycogen and related |
| | | polysaccharides and oligosaccharides |
| | | producing beta-maltose by an inversion |
| | Alpha-glucosidase | Group of enzymes whose specificity is |
| | | directed mainly towards the |
| | | exohydrolysis of 1,4-alpha-glucosidic |
| | | linkages, and that hydrolyse |
| | | oligosaccharides rapidly, relative to |
| | | polysaccharides, which are hydrolysed |
| | | relatively slowly, or not at all The |
| | | intestinal enzyme also hydrolyses |
| | | polysaccharides, catalysing the reactions |
| | | of EC 3.2.1.3, and, more slowly, |
| | | hydrolyses 1,6-alpha-D-glucose links |
| | Beta-glucosidase | Wide specificity for beta-D-glucosides. |
| | | Some examples also hydrolyse one or |
| | | more of the following: beta-D- |
| | | galactosides, alpha-L-arabinosides, beta- |
| | | D-xylosides, and beta-D-fucosides |
| | Beta-fructofuranosidase | Substrates include sucrose Also catalyses |
| | | fructotransferase reactions |
| | Alpha,alpha-trehalase | |
| | Glucan 1,4-alpha- | Most forms of the enzyme can rapidly |
| | glucosidase | hydrolyse 1,6-alpha-D-glucosidic bonds |
| | | when the next bond in sequence is 1,4, |
| | | and some preparations of this enzyme |
| | | hydrolyse 1,6- and 1,3-alpha-D- |
| | | glucosidic bonds in other polysaccharides |
| | | This entry covers all such enzymes acting |
| | | on polysaccharides more rapidly than on |
| | | oligosaccharides EC 3.2.1.20 from |
| | | mammalian intestine can catalyse similar |
| | | reactions |
| | Beta-glucuronidase | |
| | Amylo-1,6-glucosidase | In mammals and yeast this enzyme is |
| | | linked to a glycosyltransferase similar to |
| | | EC 2.4.1.25; together these two activities |
| | | constitute the glycogen debranching |
| | | system |
| | Xylan 1,4-beta- | Also hydrolyses xylobiose Some other |
| | xylosidase | exoglycosidase activities have been |
| | | found associated with this enzyme in |
| | | sheep liver |
| | Glucan endo-1,3-beta- | Very limited action on mixed-link (1,3- |
| | D-glucosidase | 1,4-)-beta-D-glucans Hydrolyses |
| | | laminarin, paramylon and pachyman |
| | | Different from EC 3.2.1.6 |
| | Cellulase | Will also hydrolyse 1,4-linkages in beta- |
| | | D-glucans also containing 1,3-linkages |
| | Sucrose alpha- | This enzyme is isolated from intestinal |
| | glucosidase | mucosa as a single polypeptide chain also |
| | | displaying activity towards isomaltose |
| | | (oligo-1,6-glucosidase, cf. EC 3.2.1.10) |
| | Cyclomaltodextrinase | Also hydrolyses linear maltodextrin |
| | Glucan 1,3-beta- | Acts on oligosaccharides but very slowly |
| | glucosidase | on laminaribiose |
| | Levanase | |
| | Galacturan 1,4-alpha- | |
| | galacturonidase | |
| | Glucan 1,4-beta- | Acts on 1,4-beta-D-glucans and related |
| | glucosidase | oligosaccharides Cellobiose is |
| | | hydrolysed, very slowly |
| | Cellulose 1,4-beta- | |
| | cellobiosidase | |
| | Alpha,alpha- | |
| | phosphotrehalase | |
| | ADP-sugar | Has a distinct specificity from the UDP- |
| | diphosphatase | sugar pyrophosphatase (EC 3.6.1.45) |
| | Nucleotide | Substrates include NAD(+), NADP(+), |
| | pyrophosphatase | FAD, CoA and also ATP and ADP |
| | UDP-glucuronate | |
| | decarboxylase | |
| | CDP-glucose 4,6- | |
| | dehydratase | |
| | CDP-abequose | |
| | epimerase | |
| | UDP-glucuronate 4- | |
| | epimerase | |
| | Glucose-6-phosphate | Also catalyses the anomerization of D- |
| | isomerase | glucose 6-phosphate |
| | Phosphoglucomutase | Maximum activity is only obtained in the |
| | | presence of alpha-D-glucose 1,6- |
| | | bisphosphate. This bisphosphate is an |
| | | intermediate in the reaction, being |
| | | formed by transfer of a phosphate residue |
| | | from the enzyme to the substrate, but the |
| | | dissociation of bisphosphate from the |
| | | enzyme complex is much slower than the |
| | | overall isomerization Also, more slowly, |
| | | catalyses the interconversion of 1- |
| | | phosphate and 6-phosphate isomers of |
| | | many other alpha-D-hexoses, and the |
| | | interconversion of alpha-D-ribose 1- |
| | | phosphate and 5-phosphate |
| | Beta- | |
| | phosphoglucomutase | |
| | Maltose alpha-D- | |
| | glucosyltransferase | |
| Tryptophan metabolism | Indole-3-lactate | |
| | dehydrogenase | |
| | Indole-3-acetaldehyde | |
| | reductase (NADH) | |
| | Indole-3-acetaldehyde | |
| | reductase (NADPH) | |
| | 3-hydroxyacyl-CoA | Also oxidizes S-3-hydroxyacyl-N- |
| | dehydrogenase | acylthioethanolamine and S-3- |
| | | hydroxyacylhydrolipoate Some enzymes |
| | | act, more slowly, with NADP(+) Broad |
| | | specificity to acyl chain-length (cf. EC |
| | | 1.1.1.211) |
| | O-aminophenol oxidase | Isophenoxazine may be formed by a |
| | | secondary condensation from the initial |
| | | oxidation product |
| | Catalase | This enzyme can also act as a peroxidase |
| | | (EC 1.11.1.7) for which several organic |
| | | substances, especially ethanol, can act as |
| | | a hydrogen donor A manganese protein |
| | | containing Mn(III) in the resting state, |
| | | which also belongs here, is often called |
| | | pseudocatalase Enzymes from some |
| | | microorganisms, such as Penicillium |
| | | simplicissimum, which exhibit both |
| | | catalase and peroxidase activity, have |
| | | sometimes been referred to as catalase- |
| | | peroxidase |
| | 7,8- | |
| | dihydroxykynurenate | |
| | 8,8A-dioxygenase | |
| | Tryptophan 2,3- | Broad specificity towards tryptamine and |
| | dioxygenase | derivatives including D- and L- |
| | | tryptophan, 5-hydroxytryptophan and |
| | | serotonin |
| | Indole 2,3-dioxygenase | The enzyme from jasminum is a |
| | | flavoprotein containing copper, and |
| | | forms anthranilate as the final product |
| | | One enzyme from Tecoma stans is also a |
| | | flavoprotein containing copper and uses |
| | | three atoms of oxygen per molecule of |
| | | indole, to form anthranil (3,4- |
| | | benzisoxazole) A second enzyme from |
| | | Tecoma stans, which is not a |
| | | flavoprotein, uses four atoms of oxygen |
| | | and forms anthranilate as the final |
| | | product |
| | 2,3-dihydroxyindole | |
| | 2,3-dioxygenase | |
| | Indoleamine-pyrrole | Acts on many substituted and |
| | 2,3-dioxygenase | unsubstituted indoleamines, including |
| | | melatonin Involved in the degradation of |
| | | melatonin |
| | 3-hydroxyanthranilate | The product of the reaction |
| | 3,4-dioxygenase | spontaneously rearrange to quinolinic |
| | | acid (quin) |
| | Tryptophan 2- | |
| | monooxygenase | |
| | Tryptophan 2[PRIME]- | Acts on a number of indolyl-3-alkane |
| | dioxygenase | derivatives, oxidizing the 3-side-chain in |
| | | the 2[PRIME]-position. Best substrates |
| | | are L-tryptophan and 5-hydroxy-L- |
| | | tryptophan |
| | Kynurenine 3- | |
| | monooxygenase | |
| | Unspecific | Acts on a wide range of substrates |
| | monooxygenase | including many xenobiotics, steroids, |
| | | fatty acids, vitamins and prostaglandins |
| | | Reactions catalysed include |
| | | hydroxylation, epoxidation, N-oxidation, |
| | | sulfooxidation, N-, S- and O- |
| | | dealkylations, desulfation, deamination, |
| | | and reduction of azo, nitro, and N-oxide |
| | | groups |
| | Anthranilate 3- | |
| | monooxygenase | |
| | Tryptophan 5- | Activated by phosphorylation, catalysed |
| | monooxygenase | by a CA(2+)-activated protein kinase |
| | Kynurenine 7,8- | |
| | hydroxylase | |
| | Aldehyde | Wide specificity, including oxidation of |
| | dehydrogenase (NAD+) | D-glucuronolactone to D-glucarate |
| | Aminomuconate- | Also acts on 2-hydroxymuconate |
| | semialdehyde | semialdehyde |
| | dehydrogenase | |
| | Aldehyde oxidase | Also oxidizes quinoline and pyridine |
| | | derivatives May be identical with EC |
| | | 1.1.3.22 |
| | Indole-3-acetaldehyde | Also oxidizes indole-3-aldehyde and |
| | oxidase | acetaldehyde, more slowly |
| | Oxoglutarate | Component of the multienzyme 2- |
| | dehydrogenase | oxoglutarate dehydrogenase complex |
| | (lipoamide) | |
| | Kynurenate-7,8- | |
| | dihydrodiol | |
| | dehydrogenase | |
| | Glutaryl-CoA | |
| | dehydrogenase | |
| | L-amino acid oxidase | |
| | Amine oxidase (flavin- | Acts on primary amines, and usually also |
| | containing) | on secondary and tertiary amines |
| | Amine oxidase (copper- | A group of enzymes including those |
| | containing) | oxidizing primary amines, diamines and |
| | | histamine One form of EC 1.3.1.15 from |
| | | rat kidney also catalyses this reaction |
| | Acetylindoxyl oxidase | |
| | Acetylserotonin O- | Some other hydroxyindoles also act as |
| | methyltransferase | acceptor, more slowly |
| | Indole-3-pyruvate C- | |
| | methyltransferase | |
| | Amine N- | A wide range of primary, secondary, and |
| | methyltransferase | tertiary amines can act as acceptors, |
| | | including tryptamine, aniline, nicotine |
| | | and a variety of drugs and other |
| | | xenobiotics |
| | Aralkylamine N- | Narrow specificity towards |
| | acetyltransferase | aralkylamines, including serotonin Not |
| | | identical with EC 2.3.1.5 |
| | Acetyl-CoA C- | |
| | acetyltransferase | |
| | Tryptophan | Also acts on 5-hydroxytryptophan and, to |
| | aminotransferase | a lesser extent on the phenyl amino acids |
| | Kynurenine- | Also acts on 3-hydroxykynurenine |
| | oxoglutarate | |
| | aminotransferase | |
| | Thioglucosidase | Has a wide specificity for thioglycosides |
| | Amidase | |
| | Formamidase | Also acts, more slowly, on acetamide, |
| | | propanamide and butanamide |
| | Arylformamidase | Also acts on other aromatic |
| | | formylamines |
| | Nitrilase | Acts on a wide range of aromatic nitriles |
| | | including (indole-3-yl)-acetonitrile and |
| | | also on some aliphatic nitriles, and on the |
| | | corresponding acid amides (cf. EC |
| | | 4.2.1.84) |
| | Kynureninase | Also acts on 3[PRIME]- |
| | | hydroxykynurenine and some other (3- |
| | | arylcarbonyl)-alanines |
| | Aromatic-L-amino-acid | Also acts on L-tryptophan, 5-hydroxy-L- |
| | decarboxylase | tryptophan and dihydroxy-L- |
| | | phenylalanine (DOPA) |
| | Phenylpyruvate | Also acts on indole-3-pyruvate |
| | decarboxylase | |
| | Aminocarboxymuconate- | The product rearranges non-enzymically |
| | semialdehyde | to picolinate |
| | decarboxylase | |
| | Tryptophanase | Also catalyses the synthesis of |
| | | tryptophan from indole and serine Also |
| | | catalyses 2,3-elimination and beta- |
| | | replacement reactions of some indole- |
| | | substituted tryptophan analogs of L- |
| | | cysteine, L-serine and other 3-substituted |
| | | amino acids |
| | Enoyl-CoA hydratase | Acts in the reverse direction With cis- |
| | | compounds, yields (3R)-3-hydroxyacyl- |
| | | CoA (cf. EC 4.2.1.74) |
| | Nitrile hydratase | Acts on short-chain aliphatic nitriles, |
| | | converting them into the corresponding |
| | | acid amides Does not act on these amides |
| | | or on aromatic nitriles (cf EC 3.5.5.1) |
| | Tryptophan-tRNA | |
| | ligase | |
| Tyrosine metabolism | Alcohol dehydrogenase | Acts on primary or secondary alcohols or |
| | | hemiacetals The animal, but not the |
| | | yeast, enzyme acts also on cyclic |
| | | secondary alcohols |
| | (R)-4- | Also acts, more slowly, on (R)-3- |
| | hydroxyphenyllactate | phenyllactate, (R)-3-(indole-3-yl)lactate |
| | dehydrogenase | and (R)-lactate |
| | Hydroxyphenylpyruvate | Also acts on 3-(3,4- |
| | reductase | dihydroxyphenyl)lactate Involved with |
| | | EC 2.3.1.140 in the biosynthesis of |
| | | rosmarinic acid |
| | Aryl-alcohol | A group of enzymes with broad |
| | dehydrogenase | specificity towards primary alcohols with |
| | | an aromatic or cyclohex-1-ene ring, but |
| | | with low or no activity towards short- |
| | | chain aliphatic alcohols |
| | Catechol oxidase | Also acts on a variety of substituted |
| | | catechols Many of these enzymes also |
| | | catalyse the reaction listed under EC |
| | | 1.14.18.1; this is especially true for the |
| | | classical tyrosinase |
| | Iodide peroxidase | |
| | 3,4- | |
| | dihydroxyphenylacetate | |
| | 2,3-dioxygenase | |
| | 4- | |
| | hydroxyphenylpyruvate | |
| | dioxygenase | |
| | Stizolobate synthase | The intermediate product undergoes ring |
| | | closure and oxidation, with NAD(P)(+) |
| | | as acceptor, to stizolobic acid |
| | Stizolobinate synthase | The intermediate product undergoes ring |
| | | closure and oxidation, with NAD(P)(+) |
| | | as acceptor, to stizolobinic acid |
| | Gentisate 1,2- | |
| | dioxygenase | |
| | Homogentisate 1,2- | |
| | dioxygenase | |
| | 4-hydroxyphenylacetate | Also acts on 4-hydroxyhydratropate |
| | 1-monooxygenase | forming 2-methylhomogentisate and on |
| | | 4-hydroxyphenoxyacetate forming |
| | | hydroquinone and glycolate |
| | 4-hydroxyphenylacetate | |
| | 3-monooxygenase | |
| | Tyrosine N- | |
| | monooxygenase | |
| | Hydroxyphenylacetonitrile | |
| | 2-monooxygenase | |
| | Tyrosine 3- | Activated by phosphorylation, catalysed |
| | monooxygenase | by EC 2.7.1.128 |
| | Dopamine-beta- | Stimulated by fumarate |
| | monooxygenase | |
| | Monophenol | A group of copper proteins that also |
| | monooxygenase | catalyse the reaction of EC 1.10.3.1, if |
| | | only 1,2-benzenediols are available as |
| | | substrate |
| | Succinate- | |
| | semialdehyde | |
| | dehydrogenase | |
| | (NAD(P)+) | |
| | Aryl-aldehyde | Oxidizes a number of aromatic |
| | dehydrogenase | aldehydes, but not aliphatic aldehydes |
| | Aldehyde | Wide specificity, including oxidation of |
| | dehydrogenase (NAD+) | D-glucuronolactone to D-glucarate |
| | 4-carboxy-2- | Does not act on unsubstituted aliphatic or |
| | hydroxymuconate-6- | aromatic aldehydes or glucose NAD(+) |
| | semialdehyde | can replace NADP(+), but with lower |
| | dehydrogenase | affinity |
| | Aldehyde | |
| | dehydrogenase | |
| | (NAD(P)+) | |
| | 4- | With EC 4.2.1.87, brings about the |
| | hydroxyphenylacetaldehyde | metabolism of octopamine in |
| | dehydrogenase | Pseudomonas |
| | Aldehyde oxidase | Also oxidizes quinoline and pyridine |
| | | derivatives May be identical with EC |
| | | 1.1.3.22 |
| | L-amino acid oxidase | |
| | Amine oxidase (flavin- | Acts on primary amines, and usually also |
| | containing) | on secondary and tertiary amines |
| | Amine oxidase (copper- | A group of enzymes including those |
| | containing) | oxidizing primary amines, diamines and |
| | | histamine One form of EC 1.3.1.15 from |
| | | rat kidney also catalyses this reaction |
| | Aralkylamine | Phenazine methosulfate can act as |
| | dehydrogenase | acceptor Acts on aromatic amines and, |
| | | more slowly, on some long-chain |
| | | aliphatic amines, but not on methylamine |
| | | or ethylamine (cf EC 1.4.99.3) |
| | Phenol O- | Acts on a wide variety of simple alkyl-, |
| | methyltransferase | methoxy- and halo-phenols |
| | Tyramine N- | Has some activity on phenylethylamine |
| | methyltransferase | analogs |
| | Phenylethanolamine N- | Acts on various phenylethanolamines; |
| | methyltransferase | converts noradrenalin into adrenalin |
| | Catechol O- | The mammalian enzymes act more |
| | methyltransferase | rapidly on catecholamines such as |
| | | adrenaline or noradrenaline than on |
| | | catechols |
| | Glutamine N- | |
| | phenylacetyltransferase | |
| | Rosmarinate synthase | Involved with EC 1.1.1.237 in the |
| | | biosynthesis of rosmarinic acid |
| | Hydroxymandelonitrile | 3,4-dihydroxymandelonitrile can also act |
| | glucosyltransferase | as acceptor |
| | Aspartate | Also acts on L-tyrosine, L-phenylalanine |
| | aminotransferase | and L-tryptophan. This activity can be |
| | | formed from EC 2.6.1.57 by controlled |
| | | proteolysis |
| | Dihydroxyphenylalanine | |
| | aminotransferase | |
| | Tyrosine | L-phenylalanine can act instead of L- |
| | aminotransferase | tyrosine The mitochondrial enzyme may |
| | | be identical with EC 2.6.1.1 The three |
| | | isoenzymic forms are interconverted by |
| | | EC 3.4.22.4 |
| | Aromatic amino acid | L-methionine can also act as donor, more |
| | transferase | slowly Oxaloacetate can act as acceptor |
| | | Controlled proteolysis converts the |
| | | enzyme to EC 2.6.1.1 |
| | Histidinol-phosphate | |
| | aminotransferase | |
| | Fumarylacetoacetase | Also acts on other 3,5- and 2,4-dioxo |
| | | acids |
| | Acylpyruvate hydrolase | Acts on formylpyruvate, 2,4- |
| | | dioxopentanoate, 2,4-dioxohexanoate and |
| | | 2,4-dioxoheptanoate |
| | Tyrosine decarboxylase | The bacterial enzyme also acts on 3- |
| | | hydroxytyrosine and, more slowly, on 3- |
| | | hydroxyphenylalanine |
| | Aromatic-L-amino-acid | Also acts on L-tryptophan, 5-hydroxy-L- |
| | decarboxylase | tryptophan and dihydroxy-L- |
| | | phenylalanine (DOPA) |
| | Gentisate | |
| | decarboxylase | |
| | 5-oxopent-3-ene-1,2,5- | |
| | tricarboxylate | |
| | decarboxylase | |
| | Tyrosine phenol-lyase | Also slowly catalyses pyruvate formation |
| | | from D-tyrosine, S-methyl-L-cysteine, |
| | | L-cysteine, L-serine and D-serine |
| | (S)-norcoclaurine | The reaction makes a 6-membered ring |
| | synthase | by forming a bond between C-6 of the |
| | | 3,4-dihydroxyphenyl group of the |
| | | dopamine and C-1 of the aldehyde in the |
| | | imine formed between the substrates The |
| | | product is the precursor of the |
| | | benzylisoquinoline alkaloids in plants |
| | | Will also catalyse the reaction of 4-(2- |
| | | aminoethyl)benzene-1,2-diol + (3,4- |
| | | dihydroxyphenyl)acetaldehyde to form |
| | | (S)-norlaudanosoline, but this alkaloid |
| | | has not been found to occur in plants |
| | Dihydroxyphenylalanine | |
| | ammonia-lyase | |
| | Phenylalanine | May also act on L-tyrosine |
| | ammonia-lyase | |
| | Maleylacetoacetate | Also acts on maleylpyruvate |
| | isomerase | |
| | Maleylpyruvate | |
| | isomerase | |
| | Phenylpyruvate | Also acts on other arylpyruvates |
| | tautomerase | |
| | 5-carboxymethyl-2- | |
| | hydroxymuconate | |
| | delta-isomerase | |
| | Tyrosine 2,3- | |
| | aminomutase | |
| | Phenylacetate-CoA | Also acts, more slowly, on acetate, |
| | ligase | propanoate and butanoate, but not on |
| | | hydroxy derivatives of phenylacetate and |
| | | related compounds |

### VII. PROMOTERS AS SENTINELS

[0481] Useful promoters include those that are capable of facilitating preferential transcription, i.e. tissue-specific or developmentally regulated gene expression and being a component of facile systems to evaluate the metabolic/physiological state of a plant cell, tissue or organ. Many such promoters are included in this application. Operably linking a sequence to these promoters that can act as a reporter and inserting the construct into a plant allows detection of the preferential in plantar transcription. For example, the quantitative state of responses to environmental conditions can be detected by using a plant having a construct that contains a stress-inducible promoter linked to and controlling expression of a sequence encoding GFP. The greater the stress promoter is induced, the greater the levels of fluorescence from GFP will be produced and this provides a measure of the level of stress being expressed by the plant and/or the ability of the plant to respond internally to the stress.

[0482] More specifically, using this system the activities of any metabolic pathway (catabolic and anabolic), stress-related pathways as on any plant gene repeated activity can be monitored. In addition, assays can be developed using this sentinel system to select for superior genotypes with greater yield characteristics or to select for plants with altered responses to chemical, herbicide, or plant growth regulators or to identify chemical, herbicides or plant growth regulators by their response on such sentinels.

[0483] Specifically, a promoter that is regulated in plants in the desired way, is operably linked to a reporter such as GFP, RFP, etc., and the constructs are introduced into the plant of interest. The behavior of the reporter is monitored using technologies typically specific for that reporter. With GFP, RFP, etc., it could typically be by microscopy of whole plants, organs, tissues or cells under excitation by an appropriate wavelength of UV light.

### VIII. HOW TO MAKE DIFFERENT EMBODIMENTS OF THE INVENTION

[0484] The invention relates to (I) polynucleotides and methods of use thereof, such as

[0485] IA. Probes, Primers and Substrates;

[0486] IB. Methods of Detection and Isolation;
[0487] B.1. Hybridization;
[0488] B.2. Methods of Mapping;
[0489] B.3. Southern Blotting;
[0490] B.4. Isolating cDNA from Related Organisms;
[0491] B.5. Isolating and/or Identifying Orthologous Genes

[0492] IC. Methods of Inhibiting Gene Expression
[0493] C.1. Antisense
[0494] C.2. Ribozyme Constructs;
[0495] C.3. Chimeraplasts;
[0496] C.4. Co-Suppression;
[0497] C.5. Transcriptional Silencing
[0498] C.6. Other Methods to Inhibit Gene Expression

[0499] ID. Methods of Functional Analysis;

[0500] IE. Promoter Sequences and Their Use;

[0501] IF. UTRs and/or Intron Sequences and Their Use; and

[0502] IG. Coding Sequences and Their Use.

[0503] The invention also relates to (II) polypeptides and proteins and methods of use thereof, such as

[0504] IIA. Native Polypeptides and Proteins
[0505] A.1 Antibodies
[0506] A.2 In Vitro Applications

[0507] IIB. Polypeptide Variants, Fragments and Fusions
[0508] B.1 Variants
[0509] B.2 Fragments
[0510] B.3 Fusions

[0511] The invention also includes (III) methods of modulating polypeptide production, such as

[0512] IIIA. Suppression
[0513] A.1 Antisense
[0514] A.2 Ribozymes
[0515] A.3 Co-suppression
[0516] A.4 Insertion of Sequences into the Gene to be Modulated
[0517] A.5 Promoter Modulation
[0518] A.6 Expression of Genes containing Dominant-Negative Mutations

[0519] IIIB. Enhanced Expression
[0520] B.1 Insertion of an Exogenous Gene
[0521] B.2 Promoter Modulation

[0522] The invention further concerns (IV) gene constructs and vector construction, such as

[0523] IVA. Coding Sequences

[0524] IVB. Promoters

[0525] IVC. Signal Peptides

[0526] The invention still further relates to

[0527] V. Transformation Techniques

I. Polynucleotides

[0528] Exemplified SDFs of the invention represent fragments of the genome of corn, wheat, rice, soybean or Arabidopsis and/or represent mRNA expressed from that genome. The isolated nucleic acid of the invention also encompasses corresponding fragments of the genome and/or cDNA complement of other organisms as described in detail below.

[0529] Polynucleotides of the invention are isolated from polynucleotide libraries using primers comprising sequences similar to those described, in the attached Reference and Sequences Tables or complements thereof. See, for example, the methods described in Sambrook et al., supra.

[0530] Alternatively, the polynucleotides of the invention can be produced by chemical synthesis. Such synthesis methods are described below.

[0531] It is contemplated that the nucleotide sequences presented herein contain some small percentage of errors. These errors arise in the normal course of determination of nucleotide sequences. Sequence errors can be corrected by obtaining seeds deposited under the accession numbers cited above, propagating them, isolating genomic DNA or appropriate mRNA from the resulting plants or seeds thereof, amplifying the relevant fragment of the genomic DNA or mRNA using primers having a sequence that flanks the erroneous sequence and sequencing the amplification product.

[0532] I.A. Probes, Primers and Substrates

[0533] SDFs of the invention can be applied to substrates for use in array applications such as, but not limited to, assays of global gene expression, under varying conditions of development, and growth conditions. The arrays are also used in diagnostic or forensic methods (WO95/35505, U.S. Pat. No. 5,445,943 and U.S. Pat. No. 5,410,270).

[0534] Probes and primers of the instant invention hybridize to a polynucleotide comprising a sequence in or encoded by those in the Reference and Sequence Tables or fragments or complements thereof. Though many different nucleotide sequences can encode an amino acid sequence, the sequences of the Reference and Sequence Table are generally preferred for encoding polypeptides of the invention. However, the sequence of the probes and/or primers of the instant invention need not be identical to those in the Reference and Sequence Tables or the complements thereof. For example, some variation in probe or primer sequence and/or length allows detection of additional family members as well as orthologous genes and more taxonomically distant related sequences. Similarly, probes and/or primers of the invention include additional nucleotides that serve as a label for detecting the formed duplex or for subsequent cloning purposes.

[0535] Probe length varys depending on the application. For use as primers, probes are 12-40 nucleotides, preferably 18-30 nucleotides long. For use in mapping, probes are preferably 50 to 500 nucleotides, preferably 100-250 nucleotides long. For Southern hybridizations, probes as long as several kilobases are used as explained below.

[0536] The probes and/or primers are produced by synthetic procedures such as the triester method of Matteucci et al. J. Am. Chem. Soc. 103:3185 (1981) or according to Urdea et al. Proc. Natl. Acad. 80:7461 (1981) or using commercially available automated oligonucleotide synthesizers.

[0537] I.B. Methods of Detection and Isolation

[0538] The polynucleotides of the invention can be utilized in a number of methods known to those skilled in the art as probes and/or primers to isolate and detect polynucleotides including, without limitation: Southerns, Northerns, Branched DNA hybridization assays, polymerase chain reaction microarray assays and variations thereof. Specific methods given by way of examples, and discussed below include:

[0539] Hybridization

[0540] Methods of Mapping

[0541] Southern Blotting

[0542] Isolating cDNA from Related Organisms

[0543] Isolating and/or Identifying Orthologous Genes.

[0544] Also, the nucleic acid molecules of the invention can used in other methods, such as high density oligonucleotide hybridizing assays, described, for example, in U.S. Pat. Nos. 6,004,753; 5,945,306; 5,945,287; 5,945,308; 5,919,686; 5,919,661; 5,919,627; 5,874,248; 5,871,973; 5,871,971; 5,871,930; and PCT Pub. Nos. WO 9946380; WO 9933981; WO 9933870; WO 9931252; WO 9915658; WO 9906572; WO 9858052; WO 9958672; and WO 9810858.

[0545] B.1. Hybridization

[0546] The isolated SDFs of the Reference and Sequence tables or fragments thereof of the present invention can be used as probes and/or primers for detection and/or isolation of related polynucleotide sequences through hybridization. Hybridization of one nucleic acid to another constitutes a physical property that defines the subject SDF of the invention and the identified related sequences. Also, such hybridization imposes structural limitations on the pair. A good general discussion of the factors for determining hybridization conditions is provided by Sambrook et al. (“Molecular Cloning, a Laboratory Manual, 2and ed., c. 1989 by Cold Spring Harbor Laboratory Press, Cold Spring Harbor, N.Y.; see esp., chapters 11 and 12). Additional considerations and details of the physical chemistry of hybridization are provided by G. H. Keller and M. M. Manak “DNA Probes”, 2^{and} Ed. pp. 1-25, c. 1993 by Stockton Press, New York, N.Y.

[0547] Depending on the stringency of the conditions under which these probes and/or primers are used, polynucleotides exhibiting a wide range of similarity to those in the Reference and Sequence or fragments thereof are detected or isolated. When the practitioner wishes to examine the result of membrane hybridizations under a variety of stringencies, an efficient way to do so is to perform the hybridization under a low stringency condition, then to wash the hybridization membrane under increasingly stringent conditions.

[0548] When using SDFs to identify orthologous genes in other species, the practitioner will preferably adjust the amount of target DNA of each species so that, as nearly as is practical, the same number of genome equivalents are present for each species examined. This prevents faint signals from species having large genomes, and thus small numbers of genome equivalents per mass of DNA, from erroneously being interpreted as absence of the corresponding gene in the genome.

[0549] The probes and/or primers of the instant invention can also be used to detect or isolate nucleotides that are “identical” to the probes or primers. Two nucleic acid sequences or polypeptides are said to be “identical” if the sequence of nucleotides or amino acid residues, respectively, in the two sequences is the same when aligned for maximum correspondence as described below.

[0550] Isolated polynucleotides within the scope of the invention also include allelic variants of the specific sequences presented in the Reference and Sequence tables. The probes and/or primers of the invention are also used to detect and/or isolate polynucleotides exhibiting at least 80% sequence identity with the sequences of the Reference and Sequence tables or fragments thereof.

[0551] With respect to nucleotide sequences, degeneracy of the genetic code provides the possibility to substitute at least one nucleotide of the nucleotide sequence of a gene with a different nucleotide without changing the amino acid sequence of the polypeptide. Hence, the DNA of the present invention also has any base sequence that has been changed from a sequence in the Reference and Sequence tables by substitution in accordance with degeneracy of genetic code. References describing codon usage include: Carels et al., J. Mol. Evol. 46: 45 (1998) and Fennoy et al., Nucl. Acids Res. 21(23): 5294 (1993).

[0552] B.2. Mapping

[0553] The isolated SDF DNA of the invention is used to create various types of genetic and physical maps of the genome of corn, Arabidopsis, soybean, rice, wheat, or other plants. Some SDFs are absolutely associated with particular phenotypic traits, allowing construction of gross genetic maps. While not all SDFs are immediately associated with a phenotype, all SDFs can be used as probes for identifying polymorphisms associated with phenotypes of interest. Briefly, one method of mapping involves total DNA isolation from individuals. The DNA is subsequently cleaved with one or more restriction enzymes, separated according to mass, transferred to a solid support, hybridized with SDF DNA and the pattern of fragments compared. Polymorphisms associated with a particular SDF are visualized as differences in the size of fragments produced between individual DNA samples after digestion with a particular restriction enzyme and hybridization with the SDF. After identification of polymorphic SDF sequences, linkage studies are conducted. By using the polymeric individuals as parents in crossing programs, F2 progeny recombinants or recombinant inbreds, for example, are then analyzed. The order of DNA polymorphisms along the chromosomes is determined based on the frequency with which they are inherited together versus independently. The closer the location of two polymorphisms on a chromosome, the higher the probability that they are inherited together. Integration of the relative positions of all the polymorphisms and associated marker SDFs produce a genetic map of the species where the distances between markers reflect the recombination frequencies in that chromosome segment.

[0554] The use of recombinant inbred lines for such genetic mapping is described for Arabidopsis by Alonso-Blanco et al. (Methods in Molecular Biology, vol.82, “Arabidopsis Protocols”, pp. 137-146, J. M. Martinez-Zapater and J. Salinas, eds., c. 1998 by Humana Press, Totowa, N.J.) and for corn by Burr (“Mapping Genes with Recombinant Inbreds”, pp. 249-254. In Freeling, M. and V. Walbot (Ed.), The Maize Handbook, c. 1994 by Springer-Verlag New York, Inc.: New York, N.Y., USA; Berlin Germany; Burr et al. Genetics (1998) 118: 519; Gardiner, J. et al., (1993) Genetics 134: 917). This procedure, however, is not limited to plants and is used for other organisms (such as yeast) or for individual cells.

[0555] The SDFs of the present invention are also used for simple sequence repeat (SSR) mapping. Rice SSR mapping is described by Morgante et al. (The Plant Journal (1993) 3: 165), Panaud et al. (Genome (1995) 38: 1170); Senior et al. (Crop Science (1996) 36: 1676), Taramino et al. (Genome (1996) 39: 277) and Ahn et al. (Molecular and General Genetics (1993) 241: 483-90). SSR mapping is achieved using various methods. In one instance, polymorphisms are identified when sequence specific probes contained within an SDF flanking an SSR are made and used in polymerase chain reaction (PCR) assays with template DNA from two or more individuals of interest. Here, a change in the number of tandem repeats between the SSR-flanking sequences produces differently sized fragments (U.S. Pat. No. 5,766,847). Alternatively, polymorphisms are identified by using the PCR fragment produced from the SSR-flanking sequence specific primer reaction as a probe against Southern blots representing different individuals (U. H. Refseth et al., (1997) Electrophoresis 18: 1519).

[0556] Genetic and physical maps of crop species have many uses. For example, these maps are used to devise positional cloning strategies for isolating novel genes from the mapped crop species. In addition, because the genomes of closely related species are largely syntenic (i.e. they display the same ordering of genes within the genome), these maps are used to isolate novel alleles from relatives of crop species by positional cloning strategies.

[0557] The various types of maps discussed above are used with the SDFs of the invention to identify Quantitative Trait Loci (QTLs). Many important crop traits, such as the solids content of tomatoes, are quantitative traits and result from the combined interactions of several genes. These genes reside at different loci in the genome, often times on different chromosomes, and generally exhibit multiple alleles at each locus. The SDFs of the invention are used to identify QTLs and isolate specific alleles as described by de Vicente and Tanksley (Genetics 134:585 (1993)). In addition to isolating QTL alleles in present crop species, the SDFs of the invention are also used to isolate alleles from the corresponding QTL of wild relatives. Transgenic plants having various combinations of QTL alleles are then created and the effects of the combinations measured. Once a desired allele combination is identified, crop improvement is accomplished either through biotechnological means or by directed conventional breeding programs (for review see Tanksley and McCouch, Science 277:1063 (1997)).

[0558] In another embodiment, the SDFs are used to help create physical maps of the genome of corn, Arabidopsis and related species. Where SDFs are ordered on a genetic map, as described above, they are used as probes to discover which clones in large libraries of plant DNA fragments in YACs, BACs, etc. contain the same SDF or similar sequences, thereby facilitating the assignment of the large DNA fragments to chromosomal positions. Subsequently, the large BACs, YACs, etc. are ordered unambiguously by more detailed studies of their sequence composition (e.g. Marra et al. (1997) Genomic Research 7:1072-1084) and by using their end or other sequences to find the identical sequences in other cloned DNA fragments. The overlapping of DNA sequences in this way allows building large contigs of plant sequences to be built that, when sufficiently extended, provide a complete physical map of a chromosome. Sometimes the SDFs themselves provide the means of joining cloned sequences into a contig. All scientific and patent publications cited in this paragraph are hereby incorporated by reference.

[0559] The patent publication WO95/35505 and U.S. Pat. Nos. 5,445,943 and 5,410,270, both hereby incorporated by reference, describe scanning multiple alleles of a plurality of loci using hybridization to arrays of oligonucleotides. These techniques are useful for each of the types of mapping discussed above.

[0560] Following the procedures described above and using a plurality of the SDFs of the present invention, any individual is genotyped. These individual genotypes are used for the identification of particular cultivars, varieties, lines, ecotypes and genetically modified plants or can serve as tools for subsequent genetic studies involving multiple phenotypic traits.

[0561] B.3 Southern Blot Hybridization

[0562] The sequences from Reference and Sequence tables or fragments thereof can be used as probes for various hybridization techniques. These techniques are useful for detecting target polynucleotides in a sample or for determining whether transgenic plants, seeds or host cells harbor a gene or sequence of interest and thus are expected to exhibit a particular trait or phenotype.

[0563] In addition, the SDFs from the invention are used to isolate additional members of gene families from the same or different species and/or orthologous genes from the same or different species. This is accomplished by hybridizing an SDF to, for example, a Southern blot containing the appropriate genomic DNA or cDNA. Given the resulting hybridization data, one of ordinary skill in the art distinguishes and isolates the correct DNA fragments by size, restriction sites, sequence and stated hybridization conditions from a gel or from a library.

[0564] Identification and isolation of orthologous genes from closely related species and alleles within a species is particularly desirable because of their potential for crop improvement. Many important crop traits, such as the solid content of tomatoes, result from the combined interactions of the products of several genes residing at different loci in the genome. Generally, alleles at each of these loci make quantitative differences to the trait. By identifying and isolating numerous alleles for each locus from within or different species, transgenic plants with various combinations of alleles are created and the effects of the combinations measured. Once a more favorable allele combination is identified, crop improvement is accomplished either through biotechnological means or by directed conventional breeding programs (Tanksley et al. Science 277:1063(1997)). All scientific and patent publications cited in this paragraph are hereby incorporated by reference.

[0565] The results from hybridizations of the SDFs of the invention to, for example, Southern blots containing DNA from another species are also used to generate restriction fragment maps for the corresponding genomic regions. These maps provide additional information about the relative positions of restriction sites within fragments, further distinguishing mapped DNA from the remainder of the genome.

[0566] Physical maps are made by digesting genomic DNA with different combinations of restriction enzymes.

[0567] Probes for Southern blotting to distinguish individual restriction fragments can range in size from 15 to 20 nucleotides to several thousand nucleotides. More preferably, the probe is 100 to 1,000 nucleotides long for identifying members of a gene family when it is found that repetitive sequences would complicate the hybridization. For identifying an entire corresponding gene in another species, the probe is more preferably the length of the gene, typically 2,000 to 10,000 nucleotides, but probes 50-1,000 nucleotides long are also used. Some genes, however, require probes up to 1,500 nucleotides long or overlapping probes constituting the full-length sequence to span their lengths.

[0568] Also, while it is preferred that the probe be homogeneous with respect to its sequence, it is not necessary. For example, as described below, a probe representing members of a gene family having diverse sequences is generated using PCR to amplify genomic DNA or RNA templates using primers derived from SDFs that include sequences that define the gene family.

[0569] For identifying corresponding genes in another species, the next most preferable probe is a cDNA spanning the entire coding sequence, which allows all of the mRNA-coding fragment of the gene to be identified. Probes for Southern blotting are easily generated from SDFs by making primers having the sequence at the ends of the SDF and using corn or Arabidopsis genomic DNA as a template. In instances where the SDF includes sequence conserved among species, primers including the conserved sequence are used for PCR with genomic DNA from a species of interest to obtain a probe.

[0570] Similarly, if the SDF includes a domain of interest, that fragment of the SDF is used to make primers and, with appropriate template DNA, used to make a probe to identify genes containing the domain. Alternatively, the PCR products are resolved, for example by gel electrophoresis and cloned and/or sequenced. Using Southern hybridization, the variants of the domain among members of a gene family, both within and across species, are examined.

[0571] B.4.1 Isolating DNA from Related Organisms

[0572] The SDFs of the invention are used to isolate the corresponding DNA from other organisms. Either cDNA or genomic DNA is isolated. For isolating genomic DNA, a lambda, cosmid, BAC, YAC, or other large insert genomic library from the plant of interest is constructed using standard molecular biology techniques as described in detail by Sambrook et al. 1989 (Molecular Cloning: A Laboratory Manual, 2^{nd} ed. Cold Spring Harbor Laboratory Press, New York) and by Ausubel et al. 1992 (Current Protocols in Molecular Biology, Greene Publishing, New York).

[0573] To screen a phage library, for example, recombinant lambda clones are plated out on appropriate bacterial medium using an appropriate E. coli host strain. The resulting plaques are lifted from the plates using nylon or nitrocellulose filters. The plaque lifts are processed through denaturation, neutralization, and washing treatments following the standard protocols outlined by Ausubel et al. (1992). The plaque lifts are hybridized to either radioactively labeled or non-radioactively labeled SDF DNA at room temperature for about 16 hours, usually in the presence of 50% formamide and 5×SSC (sodium chloride and sodium citrate) buffer and blocking reagents. The plaque lifts are then washed at 42° C. with 1% Sodium Dodecyl Sulfate (SDS) and at a particular concentration of SSC. The SSC concentration used is dependent upon the stringency at which hybridization occurred in the initial Southern blot analysis performed. For example, if a fragment hybridized under medium stringency (e.g., Tm −20° C.), then this condition is maintained or preferably adjusted to a less stringent condition (e.g., Tm −30° C.) to wash the plaque lifts. Positive clones show detectable hybridization, e.g. by exposure to X-ray films or chromogen formation. The positive clones are then subsequently isolated for purification using the same general protocol outlined above. Once the clone is purified, restriction analysis is conducted to narrow the region corresponding to the gene of interest. The restriction analysis and succeeding subcloning steps are done using procedures described by, for example Sambrook et al. (1989) cited above.

[0574] The procedures outlined for the lambda library are essentially similar to those used for YAC library screening, except that the YAC clones are harbored in bacterial colonies. The YAC clones are plated out at reasonable density on nitrocellulose or nylon filters supported by appropriate bacterial medium in petri plates. Following the growth of the bacterial clones, the filters are processed through the denaturation, neutralization, and washing steps following the procedures of Ausubel et al. 1992. The same hybridization procedures for lambda library screening are followed.

[0575] To isolate cDNA, similar procedures using appropriately modified vectors are employed. For instance, the library is constructed in a lambda vector appropriate for cloning cDNA such as λgt11. Alternatively, the cDNA library is made in a plasmid vector. cDNA for cloning is prepared by any of the methods known in the art, but is preferably prepared as described above. Preferably, a cDNA library includes a high proportion of full-length clones.

[0576] B.5. Isolating and/or Identifying Orthologous Genes

[0577] Probes and primers of the invention are used to identify and/or isolate polynucleotides related to those in the Reference and Sequence tables. Related polynucleotides are those that are native to other plant organisms and exhibit either similar sequence or encode polypeptides with similar biological activity. One specific example is an orthologous gene. Orthologous genes have the same functional activity. As such, orthologous genes are distinguished from homologous genes. The percentage of identity is a function of evolutionary separation and, in closely related species, the percentage of identity can be 98% to 100%. The amino acid sequence of a protein encoded by an orthologous gene can be less than 75% identical, but tends to be at least75% or at least 80% identical, more preferably at least 90%, most preferably at least 95% identical to the amino acid sequence of the reference protein.

[0578] To find orthologous genes, the probes are hybridized to nucleic acids from a species of interest under low stringency conditions, preferably one where sequences containing as much as 40-45% mismatches are able to hybridize. This condition is established by Tₘ−40° C. to Tm −48° C. (see below). Blots are then washed under conditions of increasing stringency. It is preferable that the wash stringency be such that sequences that are 85 to 100% identical will hybridize. More preferably, sequences 90 to 100% identical hybridize and most preferably only sequences greater than 95% identical hybridize. One of ordinary skill in the art will recognize that, due to degeneracy in the genetic code, amino acid sequences that are identical can be encoded by DNA sequences as little as 67% identity or less. Thus, it is preferable, for example, to make an overlapping series of shorter probes, on the order of 24 to 45 nucleotides, and individually hybridize them to the same arrayed library to avoid the problem of degeneracy introducing large numbers of mismatches.

[0579] As evolutionary divergence increases, genome sequences also tend to diverge. Thus, one of skill will recognize that searches for orthologous genes between more divergent species require the use of lower stringency conditions compared to searches between closely related species. Also, degeneracy of the genetic code is more of a problem for searches in the genome of a species more evolutionarily distant from the species that is the source of the SDF probe sequence(s).

[0580] Therefore the method described in Bouckaert et al., U.S. Ser. No. 60/121,700 Atty. Dkt. No. 2750-117P, Client Dkt. No. 00010.001, filed Feb. 25, 1999, hereby incorporated in its entirety by reference, is applied to the SDFs of the present invention to isolate related genes from plant species which do not hybridize to the corn, Arabidopsis, soybean, rice, wheat, and other plant sequences of the Reference and Sequence tables.

[0581] The SDFs of the invention are also used as probes to search for genes that are related to the SDF within a species. Such related genes are typically considered to be members of a gene family. In such a case, the sequence similarity is often concentrated into one or a few fragments of the sequence. The fragments of similar sequence that define the gene family typically encode a fragment of a protein or RNA that has an enzymatic or structural function. The percentage of identity in the amino acid sequence of the domain that defines the gene family is preferably at least 70%, more preferably at least 80 to 95%, most preferably at least 85 to 99%. To search for members of a gene family within a species, a low stringency hybridization is usually performed, but this will depend upon the size, distribution and degree of sequence divergence of domains that define the gene family. SDFs encompassing regulatory regions are used to identify coordinately expressed genes by using the regulatory region sequence of the SDF as a probe.

[0582] In the instances where the SDFs are identified as being expressed from genes that confer a particular phenotype, then the SDFs are also used as probes to assay plants of different species for those phenotypes.

[0583] I.C. Methods to Inhibit Gene Expression

[0584] The nucleic acid molecules of the present invention are used to inhibit gene transcription and/or translation. Example of such methods include, without limitation:

[0585] Antisense Constructs;

[0586] Ribozyme Constructs;

[0587] Chimeraplast Constructs;

[0588] Co-Suppression;

[0589] Transcriptional Silencing; and

[0590] Other Methods of Gene Expression.

[0591] C.1 Antisense

[0592] In some instances it is desirable to suppress expression of an endogenous or exogenous gene. A well-known instance is the FLAVOR-SAVOR™ tomato, in which the gene encoding ACC synthase is inactivated by an antisense approach, thus delaying softening of the fruit after ripening. See for example, U.S. Pat. No. 5,859,330; U.S. Pat. No. 5,723,766; Oeller, et al, Science, 254:437-439(1991); and Hamilton et al, Nature, 346:284-287 (1990). As another example, timing of flowering is controlled by suppression of the FLOWERING LOCUS C (FLC). High levels of this transcript are associated with late flowering, while absence of FLC is associated with early flowering (S. D. Michaels et al., Plant Cell 11:949 (1999). Other examples include the transition of apical meristem from leaf and shoot production to flowering which is regulated by TERMINAL FLOWER1, APETALA1 and LEAFY. Suppressing TFL1 expression induce a transition from shoot production to flowering (S. J. Liljegren, Plant Cell 11: 1007 (1999)). In yet another example, arrested ovule development and female sterility result from suppression of the ethylene forming enzyme, but can be reversed by application of ethylene (D. De Martinis et al., Plant Cell 11:1061 (1999)). The ability to manipulate female fertility of plants is useful in increasing fruit production and creating hybrids.

[0593] Some polynucleotide SDFs in the Reference and Sequence tables represent sequences that are expressed in corn, wheat, rice, soybean Arabidopsis and/or other plants. Thus the invention includes using these sequences to generate antisense constructs to inhibit translation and/or degradation of transcripts of said SDFs, typically in a plant cell.

[0594] To accomplish this, a polynucleotide segment from the desired gene that hybridizes to the mRNA expressed from the desired gene (the “antisense segment”) is operably linked to a promoter such that the antisense strand of RNA is transcribed when the construct is present in a host cell. A regulated promoter is used in the construct to control transcription of the antisense segment so that transcription occurs only under desired circumstances.

[0595] The antisense segment introduced is typically substantially identical to at least a fragment of the endogenous gene or genes to be repressed. The sequence, however, need not be perfectly identical to inhibit expression. Further, the antisense product may hybridize to the untranslated region instead of or in addition to the coding sequence of the gene. The vectors of the present invention designed such that the inhibitory effect applies to other proteins within a family of genes exhibiting homology or substantial homology to the target gene.

[0596] For antisense suppression, the introduced antisense segment sequence also need not be full length relative to either the primary transcription product or the fully processed mRNA. Generally, a higher percentage of sequence identity is used to compensate for the use of a shorter sequence. Furthermore, the introduced sequence need not have the same intron or exon pattern, and homology of non-coding segments are equally effective. Normally, a sequence of between about 30 or 40 nucleotides and the full length of the transcript can be used, although a sequence of at least about 100 nucleotides is preferred, a sequence of at least about 200 nucleotides is more preferred, and a sequence of at least about 500 nucleotides is especially preferred.

[0597] C.2. Ribozymes

[0598] It is also contemplated that gene constructs representing ribozymes and based on the SDFs in the Reference and Sequence tables tables and fragment thereof are an object of the invention. Ribozymes are also used to inhibit expression of genes by suppressing the translation of the mRNA into a polypeptide. It is possible to design ribozymes that specifically pair with virtually any target RNA and cleave the phosphodiester backbone at a specific location, thereby functionally inactivating the target RNA. In carrying out this cleavage, the ribozyme is not itself altered, and is thus capable of recycling and cleaving other molecules, making it a true enzyme. The inclusion of ribozyme sequences within antisense RNAs confers RNA-cleaving activity upon them, thereby increasing the activity of the constructs.

[0599] A number of classes of ribozymes are known. One class of ribozymes is derived from a number of small circular RNAs, which are capable of self-cleavage and replication in plants. The RNAs replicate either alone (viroid RNAs) or with a helper virus (satellite RNAs). Examples include RNAs from avocado sunblotch viroid and the satellite RNAs from tobacco ringspot virus, lucerne transient streak virus, velvet tobacco mottle virus, solanum nodiflorum mottle virus and subterranean clover mottle virus. The design and use of target RNA-specific ribozymes is described in Haseloff et al. Nature, 334:585 (1988).

[0600] Like the antisense constructs above, the ribozyme sequence fragment necessary for pairing need not be identical to the target nucleotides to be cleaved, nor identical to the sequences in the Reference and Sequence tables or fragments thereof. Ribozymes are constructed by combining the ribozyme sequence and some fragment of the target gene which allows recognition of the target gene mRNA by the resulting ribozyme molecule. Generally, the sequence in the ribozyme capable of binding to the target sequence exhibits a percentage of sequence identity with at least 80%, preferably with at least 85%, more preferably with at least 90% and most preferably with at least 95%, even more preferably, with at least 96%, 97%, 98% or 99% sequence identity to some fragment of a sequence in the Reference and Sequence tables or the complements thereof. The ribozyme is equally effective in inhibiting mRNA translation by cleaving either in the untranslated or coding regions. Generally, a higher percentage of sequence identity is used to compensate for the use of a shorter sequence. Furthermore, the introduced sequence need not have the same intron or exon pattern, and homology of non-coding segments are equally effective.

[0601] C.3. Chimeraplasts

[0602] The SDFs of the invention, such as those described by Reference and Sequence tables are also used to construct chimeraplasts that introduced into a cell to produce at least one specific nucleotide change in a sequence corresponding to the SDF of the invention. A chimeraplast is an oligonucleotide comprising DNA and/or RNA that specifically hybridizes to a target region in a manner which creates a mismatched base-pair. This mismatched base-pair signals the cell's repair enzyme machinery which acts on the mismatched region and results in the replacement, insertion or deletion of designated nucleotide(s). The altered sequence is then expressed by the cell's normal cellular mechanisms. Chimeraplasts are designed to repair mutant genes, modify genes, introduce site-specific mutations, and/or act to interrupt or alter normal gene function (U.S. Pat. Nos. 6,010,907 and 6,004,804; and PCT Pub. No. WO99/58723 and WO99/07865).

[0603] C.4. Sense Suppression

[0604] The SDFs of the Reference and Sequence tables of the present invention are also useful to modulate gene expression by sense suppression. Sense suppression represents another method of gene suppression that introduces at least one exogenous copy or fragment of the endogenous sequence to be suppressed.

[0605] Introduction of expression cassettes in which a nucleic acid is configured in the sense orientation with respect to the promoter into the chromosome of a plant or by a self-replicating virus is an effective means by which to induce degradation of mRNAs of target genes. For an example of the use of this method to modulate expression of endogenous genes see, Napoli et al., The Plant Cell 2:279 (1990), and U.S. Pat. Nos. 5,034,323, 5,231,020, and 5,283,184. Inhibition of expression requires some transcription of the introduced sequence.

[0606] For sense suppression, the introduced sequence generally is substantially identical to the endogenous sequence intended to be inactivated. The minimal percentage of sequence identity is typically greater than about 65%, but a higher percentage of sequence identity might exert a more effective reduction in the level of normal gene products. Sequence identity of more than about 80% is preferred, though about 95% to absolute identity is most preferred. As with antisense regulation, the effect applys to any other proteins within a similar family of genes exhibiting homology or substantial homology to the suppressing sequence.

[0607] C.5. Transcriptional Silencing

[0608] The nucleic acid sequences of the invention, including the SDFs of the reference, Sequence, Protein Group, and Protein Group Matrix tables, and fragments thereof, contain sequences that can be inserted into the genome of an organism resulting in transcriptional silencing. Such regulatory sequences need not be operatively linked to coding sequences to modulate transcription of a gene. Specifically, a promoter sequence without any other element of a gene can be introduced into a genome to transcriptionally silence an endogenous gene (see, for example, Vaucheret, H et al. (1998) The Plant Journal 16: 651-659). As another example, triple helices can be formed using oligonucleotides based on sequences from Reference, Sequence, Protein Group, and Protein Group Matrix tables, fragments thereof, and substantially similar sequence thereto. The oligonucleotide can be delivered to the host cell and can bind to the promoter in the genome to form a triple helix and prevent transcription. An oligonucleotide of interest is one that can bind to the promoter and block binding of a transcription factor to the promoter. In such a case, the oligonucleotide can be complementary to the sequences of the promoter that interact with transcription binding factors.

[0609] C.6. Other Methods to Inhibit Gene Expression

[0610] Yet another means of suppressing gene expression is to insert a polynucleotide into the gene of interest to disrupt transcription or translation of the gene.

[0611] Low frequency homologous recombination is used to target a polynucleotide insert to a gene by flanking the polynucleotide insert with sequences that are substantially similar to the gene to be disrupted. Sequences from the Reference and Sequence tables, fragments thereof and substantially similar sequences thereto are used for homologous recombination.

[0612] In addition, random insertion of polynucleotides into a host cell genome is used to disrupt the gene of interest (Azpiroz-Leehan et al., Trends in Genetics 13:152 (1997). In this method, screening for clones from a library containing random insertions is preferred to identifying those that have polynucleotides inserted into the gene of interest. Such screening is performed using probes and/or primers described above based on sequences from Reference and Sequence tables, fragments thereof, and substantially similar sequence thereto. The screening is also performed by selecting clones or R₁ plants having a desired phenotype.

[0613] I.D. Methods of Functional Analysis

[0614] The constructs described in the methods under I.C. above are used to determine the function of the polypeptide encoded by the gene that is targeted by the constructs.

[0615] Down-regulating the transcription and translation of the targeted gene in the host cell or organisms, such as a plant, produces phenotypic changes as compared to a wild-type cell or organism. In addition, in vitro assays are used to determine if any biological activity, such as calcium flux, DNA transcription, nucleotide incorporation, etc., are being modulated by the down-regulation of the targeted gene.

[0616] Coordinated regulation of sets of genes, e.g. those contributing to a desired polygenic trait, is sometimes necessary to obtain a desired phenotype. SDFs of the invention representing transcription activation and DNA binding domains are assembled into hybrid transcriptional activators. These hybrid transcriptional activators are used with their corresponding DNA elements (i.e. those bound by the DNA-binding SDFs) to effect coordinated expression of desired genes (J. J. Schwarz et al., Mol. Cell. Biol. 12:266 (1992), A. Martinez et al., Mol. Gen. Genet. 261:546 (1999)).

[0617] The SDFs of the invention are also used in the two-hybrid genetic systems to identify networks of protein-protein interactions (L. McAlister-Henn et al., Methods 19:330 (1999), J. C. Hu et al., Methods 20:80 (2000), M. Golovkin et al., J. Biol. Chem. 274:36428 (1999), K. Ichimura et al., Biochem. Biophys. Res. Comm. 253:532 (1998)). The SDFs of the invention also are used in various expression display methods to identify important protein-DNA interactions (e.g. B. Luo et al., J. Mol. Biol. 266:479 (1997)).

[0618] I.E. Promoters

[0619] The SDFs of the invention are also useful as structural or regulatory sequences in a construct for modulating the expression of the corresponding gene in a plant or other organism, e.g. a symbiotic bacterium. For example, promoter sequences associated to SDFs of the reference, Sequence, Protein Group, and Protein Group Matrix tables of the present invention can be useful in directing expression of coding sequences either as constitutive promoters or to direct expression in particular cell types, tissues, or organs or in response to environmental stimuli.

[0620] With respect to the SDFs of the present invention a promoter is likely to be a relatively small portion of a genomic DNA (gDNA) sequence located in the first 2000 nucleotides upstream from an initial exon identified in a gDNA sequence or initial “ATG” or methionine codon or translational start site in a corresponding cDNA sequence. Such promoters are more likely to be found in the first 1000 nucleotides upstream of an initial ATG or methionine codon or translational start site of a cDNA sequence corresponding to a gDNA sequence. In particular, the promoter is usually located upstream of the transcription start site. The fragments of a particular gDNA sequence that function as elements of a promoter in a plant cell will preferably be found to hybridize to gDNA sequences presented and described in the Reference table at medium or high stringency, relevant to the length of the probe and its base composition.

[0621] Promoters are generally modular in nature. Promoters can consist of a basal promoter that functions as a site for assembly of a transcription complex comprising an RNA polymerase, for example RNA polymerase II. A typical transcription complex will include additional factors such as TF_{II}B, TF_{II}D, and TF_{II}E. Of these, TF_{II}D appears to be the only one to bind DNA directly. The promoter might also contain one or more enhancers and/or suppressors that function as binding sites for additional transcription factors that have the function of modulating the level of transcription with respect to tissue specificity and of transcriptional responses to particular environmental or nutritional factors, and the like.

[0622] Short DNA sequences representing binding sites for proteins can be separated from each other by intervening sequences of varying length. For example, within a particular functional module, protein binding sites may be constituted by regions of 5 to 60, preferably 10 to 30, more preferably 10 to 20 nucleotides. Within such binding sites, there are typically 2 to 6 nucleotides that specifically contact amino acids of the nucleic acid binding protein. The protein binding sites are usually separated from each other by 10 to several hundred nucleotides, typically by 15 to 150 nucleotides, often by 20 to 50 nucleotides. DNA binding sites in promoter elements often display dyad symmetry in their sequence. Often elements binding several different proteins, and/or a plurality of sites that bind the same protein, will be combined in a region of 50 to 1,000 basepairs.

[0623] Elements that have transcription regulatory function can be isolated from their corresponding endogenous gene, or the desired sequence can be synthesized, and recombined in constructs to direct expression of a coding region of a gene in a desired tissue-specific, temporal-specific or other desired manner of inducibility or suppression. When hybridizations are performed to identify or isolate elements of a promoter by hybridization to the long sequences presented in the Reference tables, conditions are adjusted to account for the above-described nature of promoters. For example short probes, constituting the element sought, are preferably used under low temperature and/or high salt conditions. When long probes, which might include several promoter elements are used, low to medium stringency conditions are preferred when hybridizing to promoters across species.

[0624] If a nucleotide sequence of an SDF, or part of the SDF, functions as a promoter or fragment of a promoter, then nucleotide substitutions, insertions or deletions that do not substantially affect the binding of relevant DNA binding proteins would be considered equivalent to the exemplified nucleotide sequence. It is envisioned that there are instances where it is desirable to decrease the binding of relevant DNA binding proteins to silence or down-regulate a promoter, or conversely to increase the binding of relevant DNA binding proteins to enhance or up-regulate a promoter and vice versa. In such instances, polynucleotides representing changes to the nucleotide sequence of the DNA-protein contact region by insertion of additional nucleotides, changes to identity of relevant nucleotides, including use of chemically-modified bases, or deletion of one or more nucleotides are considered encompassed by the present invention. In addition, fragments of the promoter sequences described by Reference tables and variants thereof can be fused with other promoters or fragments to facilitate transcription and/or transcription in specific type of cells or under specific conditions.

[0625] Promoter function can be assayed by methods known in the art, preferably by measuring activity of a reporter gene operatively linked to the sequence being tested for promoter function. Examples of reporter genes include those encoding luciferase, green fluorescent protein, GUS, neo, cat and bar.

[0626] I.F. UTRs and Junctions

[0627] Polynucleotides comprising untranslated (UTR) sequences and intron/exon junctions are also within the scope of the invention. UTR sequences include introns and 5′ or 3′ untranslated regions (5′ UTRs or 3′ UTRs). Fragments of the sequences shown in the Reference and Sequence tables comprise UTRs and intron/exon junctions.

[0628] Some of these fragments of SDFs, especially UTRs, have regulatory functions related to, for example, translation rate and mRNA stability. Thus, these fragments of SDFs are isolated for use as elements of gene constructs for regulated production of polynucleotides encoding desired polypeptides.

[0629] Some introns of genomic DNA segments also have regulatory functions. Sometimes regulatory elements, especially transcription enhancer or suppressor elements, are found within introns. Also, elements related to stability of heteronuclear RNA and efficiency of splicing and of transport to the cytoplasm for translation are found in intron elements. Thus, these segments also find use as elements of expression vectors intended for use to transform plants.

[0630] Just as with promoters UTR sequences and intron/exon junctions vary from those shown in the Reference and Sequence tables. Such changes from those sequences preferably do not affect the regulatory activity of the UTRs or intron/exon junction sequences on expression, transcription, or translation unless selected to do so. However, in some instances, down- or up-regulation of such activity may be desired to modulate traits or phenotypic or in vitro activity.

[0631] I.G. Coding Sequences

[0632] Isolated polynucleotides of the invention include coding sequences that encode polypeptides comprising an amino acid sequence encoded by sequences described in the Reference and Sequence tables.

[0633] A nucleotide sequence encodes a polypeptide if a cell (or a cell free in vitro system) expressing that nucleotide sequence produces a polypeptide having the recited amino acid sequence when the nucleotide sequence is transcribed and the primary transcript is subsequently processed and translated by a host cell (or a cell free in vitro system) harboring the nucleic acid. Thus, an isolated nucleic acid that encodes a particular amino acid sequence is a genomic sequence comprising exons and introns or a cDNA sequence that represents the product of splicing thereof. An isolated nucleic acid encoding an amino acid sequence also encompasses heteronuclear RNA, which contains sequences that are spliced out during expression, and mRNA, which lacks those sequences.

[0634] Coding sequences are constructed using chemical synthesis techniques or by isolating coding sequences or by modifying such synthesized or isolated coding sequences as described above.

[0635] In addition to coding sequences encoding the polypeptide sequences of the Reference and Sequence tables, which are native to corn, Arabidopsis, soybean, rice, wheat, and other plants, the isolated polynucleotides are polynucleotides that encode variants, fragments, and fusions of those native proteins. Such polypeptides are described below in part II.

[0636] In variant polynucleotides generally, the number of substitutions, deletions or insertions is preferably less than 20%, more preferably less than 15%; even more preferably less than 10%, 5%, 3% or 1% of the number of nucleotides comprising a particularly exemplified sequence. It is generally expected that non-degenerate nucleotide sequence changes that result in I to 10, more preferably 1 to 5 and most preferably 1 to 3 amino acid insertions, deletions or substitutions do not greatly affect the function of an encoded polypeptide. The most preferred embodiments are those wherein 1 to 20, preferably 1 to 10, most preferably 1 to 5 nucleotides are added to, or deleted from and/or substituted in the sequences specifically disclosed in the Reference and Sequence tables or fragments thereof.

[0637] Insertions or deletions in polynucleotides intended to be used for encoding a polypeptide preferably preserve the reading frame. This consideration is not so important in instances when the polynucleotide is intended to be used as a hybridization probe.

II. Polypeptides and Proteins

[0638] IIA. Native Polypeptides and Proteins

[0639] Polypeptides within the scope of the invention include both native proteins as well as variants, fragments, and fusions thereof. Polypeptides of the invention are those encoded by any of the six reading frames of sequences shown in the Reference and Sequence tables, preferably encoded by the three frames reading in the 5′ to 3′ direction of the sequences as shown.

[0640] Native polypeptides include the proteins encoded by the sequences shown in the Reference and Sequence tables. Such native polypeptides include those encoded by allelic variants.

[0641] Polypeptide and protein variants will exhibit at least 75% sequence identity to those native polypeptides of the Reference and Sequence tables. More preferably, the polypeptide variants will exhibit at least 85% sequence identity; even more preferably, at least 90% sequence identity; more preferably at least 95%, 96%, 97%, 98%, or 99% sequence identity. Fragments of polypeptide or fragments of polypeptides exhibit similar percentages of sequence identity to the relevant fragments of the native polypeptide. Fusions exhibit a similar percentage of sequence identity in that fragment of the fusion represented by the variant of the native peptide.

[0642] Furthermore, polypeptide variants exhibit at least one of the functional properties of the native protein. Such properties include, without limitation, protein interaction, DNA interaction, biological activity, immunological activity, receptor binding, signal transduction, transcription activity, growth factor activity, secondary structure, three-dimensional structure, etc. As to properties related to in vitro or in vivo activities, the variants preferably exhibit at least 60% of the activity of the native protein; more preferably at least 70%, even more preferably at least 80%, 85%, 90% or 95% of at least one activity of the native protein.

[0643] One type of variant of native polypeptides comprises amino acid substitutions, deletions and/or insertions. Conservative substitutions are preferred to maintain the function or activity of the polypeptide.

[0644] Within the scope of percentage of sequence identity described above, a polypeptide of the invention may have additional individual amino acids or amino acid sequences inserted into the polypeptide in the middle thereof and/or at the N-terminal and/or C-terminal ends thereof. Likewise, some of the amino acids or amino acid sequences may be deleted from the polypeptide.

[0645] A.1 Antibodies

[0646] Isolated polypeptides are utilized to produce antibodies. Polypeptides of the invention are generally used, for example, as antigens for raising antibodies by known techniques. The resulting antibodies are useful as reagents for determining the distribution of the antigen protein within the tissues of a plant or within a cell of a plant. The antibodies are also useful for examining the production level of proteins in various tissues, for example in a wild-type plant or following genetic manipulation of a plant, by methods such as Western blotting.

[0647] Antibodies of the present invention, both polyclonal and monoclonal, are prepared by conventional methods. In general, the polypeptides of the invention are first used to immunize a suitable animal, such as a mouse, rat, rabbit, or goat. Rabbits and goats are preferred for the preparation of polyclonal sera due to the volume of serum obtainable and the availability of labeled anti-rabbit and anti-goat antibodies as detection reagents. Immunization is generally performed by mixing or emulsifying the protein in saline, preferably in an adjuvant such as Freund's complete adjuvant, and injecting the mixture or emulsion parenterally (generally subcutaneously or intramuscularly). A dose of 50-200 μg/injection is typically sufficient. Immunization is generally boosted 2-6 weeks later with one or more injections of the protein in saline, preferably using Freund's incomplete adjuvant. One may alternatively generate antibodies by in vitro immunization using methods known in the art, which for the purposes of this invention is considered equivalent to in vivo immunization.

[0648] Polyclonal antisera is obtained by bleeding the immunized animal into a glass or plastic container, incubating the blood at 25° C. for one hour, followed by incubating the blood at 4° C. for 2-18 hours. The serum is recovered by centrifugation (e.g., 1,000×g for 10 minutes). About 20-50 ml per bleed may be obtained from rabbits.

[0649] Monoclonal antibodies are prepared using the method of Kohler and Milstein, Nature 256: 495 (1975), or modification thereof. Typically, a mouse or rat is immunized as described above. However, rather than bleeding the animal to extract serum, the spleen (and optionally several large lymph nodes) is removed and dissociated into single cells. If desired, the spleen cells can be screened (after removal of nonspecifically adherent cells) by applying a cell suspension to a plate or well coated with the protein antigen. B-cells producing membrane-bound immunoglobulin specific for the antigen bind to the plate and are not rinsed away with the rest of the suspension. Resulting B-cells, or all dissociated spleen cells, are then induced to fuse with myeloma cells to form hybridomas and are cultured in a selective medium (e.g., hypoxanthine, aminopterin, thymidine medium, “HAT”). The resulting hybridomas are plated by limiting dilution, and are assayed for the production of antibodies which bind specifically to the immunizing antigen (and which do not bind to unrelated antigens). The selected Mab-secreting hybridomas are then cultured either in vitro (e.g., in tissue culture bottles or hollow fiber reactors) or in vivo (as ascites in mice).

[0650] Other methods for sustaining antibody-producing B-cell clones, such as by EBV transformation, are known.

[0651] If desired, the antibodies (whether polyclonal or monoclonal) may be labeled using conventional techniques. Suitable labels include fluorophores, chromophores, radioactive atoms (particularly ³²p and ¹²⁵I, electron-dense reagents, enzymes and ligands having specific binding partners. Enzymes are typically detected by their activity. For example, horseradish peroxidase is usually detected by its ability to convert 3,3′,5,5′-tetramethylbenzidine (TNB) to a blue pigment, quantifiable with a spectrophotometer.

[0652] A.2 In Vitro Applications of Polypeptides

[0653] Some polypeptides of the invention will have enzymatic activities that are useful in vitro. For example, the soybean trypsin inhibitor (Kunitz) family is one of the numerous families of proteinase inhibitors. It comprises plant proteins which have inhibitory activity against serine proteinases from the trypsin and subtilisin families, thiol proteinases and aspartic proteinases. Thus, these peptides find in vitro use in protein purification protocols and in therapeutic settings requiring topical application of protease inhibitors.

[0654] Delta-aminolevulinic acid dehydratase (EC 4.2.1.24) (ALAD) catalyzes the second step in the biosynthesis of heme, the condensation of two molecules of 5-aminolevulinate to form porphobilinogen and is also involved in chlorophyll biosynthesis (Kaczor et al. (1994) Plant Physiol. 1-4: 1411-7; Smith (1988) Biochem. J. 249: 423-8; Schneider (1976) Z. naturforsch. [C] 31: 55-63). Thus, ALAD proteins can be used as catalysts in synthesis of heme derivatives. Enzymes of biosynthetic pathways generally can be used as catalysts for in vitro synthesis of the compounds representing products of the pathway.

[0655] Polypeptides encoded by SDFs of the invention are engineered to provide purification reagents to identify and purify additional polypeptides that bind to them. This allows one to identify proteins that function as multimers or elucidate signal transduction or metabolic pathways. In the case of DNA binding proteins, the polypeptide are used in a similar manner to identify the DNA determinants of specific binding (S. Pierrou et al., Anal. Biochem. 229:99 (1995), S. Chusacultanachai et al., J. Biol. Chem. 274:23591 (1999), Q. Lin et al., J. Biol. Chem. 272:27274 (1997)).

II.B. Polypeptide Variants, Fragments, and Fusions

[0656] Generally, variants , fragments, or fusions of the polypeptides encoded by the maximum length sequence(MLS) can exhibit at least one of the activities of the identified domains and/or related polypeptides described in Sections (C) and (D) of The Reference tables corresponding to the MLS of interest.

[0657] II.B1 Variants

[0658] A type of variant of the native polypeptides comprises amino acid substitutions. Conservative substitutions, described above (see II.), are preferred to maintain the function or activity of the polypeptide. Such substitutions include conservation of charge, polarity, hydrophobicity, size, etc. For example, one or more amino acid residues within the sequence is substituted with another amino acid of similar polarity that acts as a functional equivalent, for example providing a hydrogen bond in an enzymatic catalysis. Substitutes for an amino acid within an exemplified sequence are preferably made among the members of the class to which the amino acid belongs. For example, the nonpolar (hydrophobic) amino acids include alanine, leucine, isoleucine, valine, proline, phenylalanine, tryptophan and methionine. The polar neutral amino acids include glycine, serine, threonine, cysteine, tyrosine, asparagine, and glutamine. The positively charged (basic) amino acids include arginine, lysine and histidine. The negatively charged (acidic) amino acids include aspartic acid and glutamic acid.

[0659] Within the scope of percentage of sequence identity described above, a polypeptide of the invention may have additional individual amino acids or amino acid sequences inserted into the polypeptide in the middle thereof and/or at the N-terminal and/or C-terminal ends thereof. Likewise, some of the amino acids or amino acid sequences may be deleted from the polypeptide. Amino acid substitutions may also be made in the sequences; conservative substitutions being preferred.

[0660] One preferred class of variants are those that comprise (1) the domain of an encoded polypeptide and/or (2) residues conserved between the encoded polypeptide and related polypeptides. For this class of variants, the encoded polypeptide sequence is changed by insertion, deletion, or substitution at positions flanking the domain and/or conserved residues.

[0661] Another class of variants includes those that comprise an encoded polypeptide sequence that is changed in the domain or conserved residues by a conservative substitution.

[0662] Yet another class of variants includes those that lack one of the in vitro activities, or structural features of the encoded polypeptides. One example is polypeptides or proteins produced from genes comprising dominant negative mutations. Such a variant may comprise an encoded polypeptide sequence with non-conservative changes in a particular domain or group of conserved residues.

[0663] II.A.2 Fragments

[0664] Fragments of particular interest are those that comprise a domain identified for a polypeptide encoded by an MLS of the instant invention and variants thereof. Also, fragments that comprise at least one region of residues conserved between an MLS encoded polypeptide and its related polypeptides are of great interest. Fragments are sometimes useful as polypeptides corresponding to genes comprising dominant negative mutations.

[0665] II.A.3 Fusions

[0666] Of interest are chimeras comprising (1) a fragment of the MLS encoded polypeptide or variants thereof of interest and (2) a fragment of a polypeptide comprising the same domain. For example, an AP2 helix encoded by a MLS of the invention fused to second AP2 helix from ANT protein, which comprises two AP2 helices. The present invention also encompasses fusions of MLS encoded polypeptides, variants, or fragments thereof fused with related proteins or fragments thereof.

Definition of Domains

[0667] The polypeptides of the invention possess identifying domains as shown in The Reference tables, which indicate specific domains within the MLS encoded polypeptides. In addition, the domains within the MLS encoded polypeptide are defined by the region that exhibits at least 70% sequence identity with the consensus sequences listed in the detailed description below of each of the domains.

[0668] The majority of the protein domain descriptions given in the protein domain table are obtained from the Prosite and the Pfam websites available on the internet.

[0669] A. Activities of Polypeptides Comprising Signal Peptides

[0670] Polypeptides comprising signal peptides are a family of proteins that are typically targeted to (1) a particular organelle or intracellular compartment, (2) interact with a particular molecule or (3) for secretion outside of a host cell. Example of polypeptides comprising signal peptides include, without limitation, secreted proteins, soluble proteins, receptors, proteins retained in the ER, etc.

[0671] These proteins comprising signal peptides are useful to modulate ligand-receptor interactions, cell-to-cell communication, signal transduction, intracellular communication, and activities and/or chemical cascades that take part in an organism outside or within of any particular cell.

[0672] One class of such proteins are soluble proteins which are transported out of the cell. These proteins act as ligands that bind to receptor to trigger signal transduction or to permit communication between cells.

[0673] Another class is receptor proteins which also comprise a retention domain that lodges the receptor protein in the membrane when the cell transports the receptor to the surface of the cell. Like the soluble ligands, receptors also modulate signal transduction and communication between cells.

[0674] In addition the signal peptide itself can serve as a ligand for some receptors. An example is the interaction of the ER targeting signal peptide with the signal recognition particle (SRP). Here, the SRP binds to the signal peptide, halting translation, and the resulting SRP complex then binds to docking proteins located on the surface of the ER, prompting transfer of the protein into the ER.

[0675] A description of signal peptide residue composition is described below in Subsection IV.C. 1.

III. Methods of Modulating Polypeptide Production

[0676] It is contemplated that polynucleotides of the invention are incorporated into a host cell or in-vitro system to modulate polypeptide production. For instance, the SDFs prepared as described herein are used to prepare expression cassettes useful in a number of techniques for suppressing or enhancing expression.

[0677] An example are polynucleotides comprising sequences to be transcribed, such as coding sequences, of the present invention are inserted into nucleic acid constructs to modulate polypeptide production. Typically, such sequences to be transcribed are heterologous to at least one element of the nucleic acid construct to generate a chimeric gene or construct.

[0678] Another example of useful polynucleotides are nucleic acid molecules comprising regulatory sequences of the present invention. Chimeric genes or constructs are generated when the regulatory sequences of the invention linked to heterologous sequences in a vector construct. Within the scope of the invention are such chimeric gene and/or constructs.

[0679] Also within the scope of the invention are nucleic acid molecules, whereof at least a part or fragment of these DNA molecules are presented in the Reference and Sequence tables of the present application, and wherein the coding sequence is under the control of its own promoter and/or its own regulatory elements. Such molecules are useful for transforming the genome of a host cell or an organism regenerated from said host cell for modulating polypeptide production.

[0680] Additionally, a vector capable of producing the oligonucleotide can be inserted into the host cell to deliver the oligonucleotide.

[0681] More detailed description of components to be included in vector constructs are described both above and below.

[0682] Whether the chimeric vectors or native nucleic acids are utilized, such polynucleotides are incorporated into a host cell to modulate polypeptide production. Native genes and/or nucleic acid molecules are effective when exogenous to the host cell.

[0683] Methods of modulating polypeptide expression includes, without limitation:

[0684] Suppression methods, such as
[0685] Antisense
[0686] Ribozymes
[0687] Co-suppression
[0688] Insertion of Sequences into the Gene to be Modulated
[0689] Regulatory Sequence Modulation.

[0690] as well as Methods for Enhancing Production, such as
[0691] Insertion of Exogenous Sequences; and

[0692] Regulatory Sequence Modulation.

[0693] III.A. Suppression

[0694] Expression cassettes of the invention are used to suppress expression of endogenous genes which comprise the SDF sequence. Inhibiting expression is useful, for instance, to tailor the ripening characteristics of a fruit (Oeller et al., Science 254:437 (1991)) or to influence seed size (WO98/07842) or to provoke cell ablation (Mariani et al., Nature 357: 384-387 (1992).

[0695] As described above, a number of methods are used to inhibit gene expression in plants, such as antisense, ribozyme, introduction of exogenous genes into a host cell, insertion of a polynucleotide sequence into the coding sequence and/or the promoter of the endogenous gene of interest and the like.

[0696] III.A.1. Antisense

[0697] An expression cassette as described above transformed into host cell or plant to produce an antisense strand of RNA. For plant cells, antisense RNA inhibits gene expression by preventing the accumulation of mRNA which encodes the enzyme of interest, see, e.g., Sheehy et al., Proc. Nat. Acad. Sci. USA, 85:8805 (1988), and Hiatt et al., U.S. Pat. No. 4,801,340.

[0698] III.A.2. Ribozymes

[0699] Similarly, ribozyme constructs are transformed into a plant to cleave mRNA and down-regulate translation.

[0700] III.A.3. Co-Suppression

[0701] Another method of suppression occurs by introducing an exogenous copy of the gene to be suppressed. Introduction of expression cassettes in which a nucleic acid is configured in the sense orientation with respect to the promoter prevents the accumulation of mRNA. A detailed description of this method is described above.

[0702] III.A.4. Insertion of Sequences into the Gene to be Modulated

[0703] Yet another means of suppressing gene expression is to insert a polynucleotide into the gene of interest to disrupt transcription or translation of the gene.

[0704] Homologous recombination could be used to target a polynucleotide insert to a gene using the Cre-Lox system (A. C. Vergunst et al., Nucleic Acids Res. 26:2729 (1998), A. C. Vergunst et al., Plant Mol. Biol. 38:393 (1998), H. Albert et al., Plant J 7:649 (1995)).

[0705] In addition, random insertion of polynucleotides into a host cell genome are also used to disrupt the gene of interest (Azpiroz-Leehan et al., Trends in Genetics 13:152 (1997)). In this method, screening for clones from a library containing random insertions is preferred for identifying those that have polynucleotides inserted into the gene of interest. Such screening is performed using probes and/or primers described above based on sequences from the Reference and Sequence tables, fragments thereof, and substantially similar sequence thereto. The screening is also performed by selecting clones or any transgenic plants having a desired phenotype.

[0706] III.A.5. Regulatory Sequence Modulation

[0707] The SDFs described in the Reference and Sequence tables or polynucleotides encoding polypeptides of the Protein Group or Protein Group Matrix tables, and fragments thereof are examples of nucleotides of the invention that contain regulatory sequences that can be used to suppress or inactivate transcription and/or translation from a gene of interest as discussed in I.C.5.

[0708] III.A.6. Genes Comprising Dominant-Negative Mutations

[0709] When suppression of production of the endogenous, native protein is desired it is often helpful to express a gene comprising a dominant negative mutation. Genes comprising dominant negative mutations produce a variant polypeptide that is capable of competing with the native polypeptide, but which does not produce the native result. Consequently, over-expression of genes comprising these mutations titrate out an undesired activity of the native protein. For example, the product from a gene comprising a dominant negative mutation of a receptor is used to constitutively activate or suppress a signal transduction cascade, allowing examination of the phenotype and thus the trait(s) controlled by that receptor and pathway. Alternatively, the protein arising from the gene comprising a dominant-negative mutation is an inactive enzyme still capable of binding to the same substrate as the native protein and therefore competes with such native proteins.

[0710] Products from genes comprising dominant-negative mutations also act upon the native protein itself to prevent activity. For example, the native protein may be active only as a homo-multimer or as one subunit of a hetero-multimer. Incorporation of an inactive subunit into the multimer with native subunit(s) inhibits activity.

[0711] Thus, gene function is modulated in host cells of interest by insertion into these cells vector constructs comprising a gene comprising a dominant-negative mutation.

[0712] III.B. Enhanced Expression

[0713] Enhanced expression of a gene of interest in a host cell is accomplished by either (1) insertion of an exogenous gene; or (2) promoter modulation.

[0714] III.B.1. Insertion of an Exogenous Gene

[0715] Insertion of an expression construct encoding an exogenous gene boosts the number of gene copies expressed in a host cell.

[0716] Such expression constructs comprise genes that either encode the native protein that is of interest or that encode a variant that exhibits enhanced activity as compared to the native protein. Such genes encoding proteins of interest are constructed from the sequences from the Reference and Sequence tables, fragments thereof, and substantially similar sequence thereto.

[0717] Such an exogenous gene includes a constitutive promoter permitting expression in any cell in a host organism or a promoter that directs transcription only in particular cells or times during a host cell life cycle or in response to environmental stimuli.

[0718] III.B.2. Regulatory Sequence Modulation

[0719] The SDFs of the Reference and Sequence tables, and fragments thereof, contain regulatory sequences that are used to enhance expression of a gene of interest. For example, some of these sequences contain useful enhancer elements. In some cases, duplication of enhancer elements or insertion of exogenous enhancer elements increases expression of a desired gene from a particular promoter. As other examples, all 11 promoters require binding of a regulatory protein to be activated, while some promoters may need a protein that signals a promoter binding protein to expose a polymerase binding site. In either case, over-production of such proteins are used to enhance expression of a gene of interest by increasing the activation time of the promoter.

[0720] Such regulatory proteins are encoded by some of the sequences in the Reference and Sequence tables, fragments thereof, and substantially similar sequences thereto.

[0721] Coding sequences for these proteins are constructed as described above.

IV. Gene Constructs and Vector Construction

[0722] To use isolated SDFs of the present invention or a combination of them or parts and/or mutants and/or fusions of said SDFs in the above techniques, recombinant DNA vectors that comprise said SDFs and are suitable for transformation of cells, such as plant cells, are usually prepared. The SDF construct are made using standard recombinant DNA techniques (Sambrook et al. 1989) and is introduced to the species of interest by Agrobacterium mediated transformation or by other means of transformation (e.g. particle gun bombardment) as referenced below.

[0723] The vector backbone can be any of those typical in the art such as plasmids, viruses, artificial chromosomes, BACs, YACs, PACs and vectors of the sort described by

[0724] (a) BAC: Shizuya et al., Proc. Natl. Acad. Sci. USA 89: 8794-8797 (1992); Hamilton et al., Proc. Natl. Acad. Sci. USA 93: 9975-9979 (1996);

[0725] (b) YAC: Burke et al., Science 236:806-812 (1987);.

[0726] (c) PAC: Sternberg N. et al., Proc Natl Acad Sci U S A. January;87(1):103-7 (1990);

[0727] (d) Bacteria-Yeast Shuttle Vectors: Bradshaw et al., Nucl Acids Res 23: 4850-4856 (1995);

[0728] (e) Lambda Phage Vectors: Replacement Vector, e.g., Frischauf et al., J. Mol Biol 170: 827-842 (1983); or Insertion vector, e.g., Huynh et al., In: Glover N M (ed) DNA Cloning: A practical Approach, Vol.1 Oxford: IRL Press (1985);

[0729] (f) T-DNA gene fusion vectors Walden et al., Mol Cell Biol 1: 175-194 (1990); and

[0730] (g) Plasmid vectors: Sambrook et al., infra.

[0731] Typically, a vector comprises the exogenous gene, which in its turn comprises an SDF of the present invention to be introduced into the genome of a host cell, and which gene may be an antisense construct, a ribozyme construct chimeraplast, or a coding sequence with any desired transcriptional and/or translational regulatory sequences, such as promoters, UTRs, and 3′ end termination sequences. Vectors of the invention also include origins of replication, scaffold attachment regions (SARs), markers, homologous sequences, introns, etc.

[0732] A DNA sequence coding for the desired polypeptide, for example a cDNA sequence encoding a full length protein, are preferably combined with transcriptional and translational initiation regulatory sequences which direct the transcription of the sequence from the gene in the intended tissues of the transformed plant. For example, for over-expression, a plant promoter fragment is employed that direct transcription of the gene in all tissues of a regenerated plant. Alternatively, the plant promoter directs transcription of an SDF of the invention in a specific tissue (tissue-specific promoters) or is otherwise under more precise environmental control (inducible promoters).

[0733] If proper polypeptide production is desired, a polyadenylation region at the 3′-end of the coding region is typically included. The polyadenylation region is derived from the natural gene, from a variety of other plant genes, or from T-DNA.

[0734] The vector comprising the sequences from genes or SDF or the invention comprises a marker gene that confers a selectable phenotype on plant cells. The vector includes promoter and coding sequence, for instance. For example, the marker may encode biocide resistance, particularly antibiotic resistance, such as resistance to kanamycin, G418, bleomycin, hygromycin, or herbicide resistance, (e.g. resistance to chlorosulfuron or phosphinotricin).

[0735] IV.A. Coding Sequences

[0736] Generally, the sequence in the transformation vector and to be introduced into the genome of the host cell does not need to be absolutely identical to an SDF of the present invention. Also, it is not necessary for it to be full length, relative to either the primary transcription product or fully processed mRNA. Furthermore, the introduced sequence need not have the same intron or exon pattern as a native gene. Also, heterologous non-coding segments can be incorporated into the coding sequence without changing the desired amino acid sequence of the polypeptide to be produced.

[0737] IV.B. Promoters

[0738] As explained above, introducing an exogenous SDF from the same species or an orthologous SDF from another species is useful to modulate the expression of a native gene corresponding to that SDF of interest. Such an SDF construct is under the control of either a constitutive promoter or a highly regulated inducible promoter (e.g., a copper inducible promoter). The promoter of interest is initially either endogenous or heterologous to the species in question. When re-introduced into the genome of said species, such promoter becomes exogenous to said species. Over-expression of an SDF transgene leads to co-suppression of the homologous endogeneous sequence thereby creating some alterations in the phenotypes of the transformed species as demonstrated by similar analysis of the chalcone synthase gene (Napoli et al., Plant Cell 2:279 (1990) and van der Krol et al., Plant Cell 2:291 (1990)). If an SDF is found to encode a protein with desirable characteristics, its over-production is controlled so that its accumulation is manipulated in an organ- or tissue-specific manner utilizing a promoter having such specificity.

[0739] Likewise, if the promoter of an SDF (or an SDF that includes a promoter) is found to be tissue-specific or developmentally regulated, such a promoter is utilized to drive or facilitate the transcription of a specific gene of interest (e.g., seed storage protein or root-specific protein). Thus, the level of accumulation of a particular protein is manipulated or its spatial localization in an organ- or tissue- specific manner is altered.

[0740] IV.C Signal Peptides

[0741] SDFs of the present invention containing signal peptides are indicated in the Reference and Sequence tables. In some cases it may be desirable for the protein encoded by an introduced exogenous or orthologous SDF to be targeted (1) to a particular organelle intracellular compartment, (2) to interact with a particular molecule such as a membrane molecule or (3) for secretion outside of the cell harboring the introduced SDF. This is accomplished using a signal peptide.

[0742] Signal peptides direct protein targeting, are involved in ligand-receptor interactions and act in cell to cell communication. Many proteins, especially soluble proteins, contain a signal peptide that targets the protein to one of several different intracellular compartments. In plants, these compartments include, but are not limited to, the endoplasmic reticulum (ER), mitochondria, plastids (such as chloroplasts), the vacuole, the Golgi apparatus, protein storage vessicles (PSV) and, in general, membranes. Some signal peptide sequences are conserved, such as the Asn-Pro-Ile-Arg amino acid motif found in the N-terminal propeptide signal that targets proteins to the vacuole (Marty (1999) The Plant Cell 11: 587-599). Other signal peptides do not have a consensus sequence per se, but are largely composed of hydrophobic amino acids, such as those signal peptides targeting proteins to the ER (Vitale and Denecke (1999) The Plant Cell 11: 615-628). Still others do not appear to contain either a consensus sequence or an identified common secondary sequence, for instance the chloroplast stromal targeting signal peptides (Keegstra and Cline (1999) The Plant Cell 11: 557-570). Furthermore, some targeting peptides are bipartite, directing proteins first to an organelle and then to a membrane within the organelle (e.g. within the thylakoid lumen of the chloroplast; see Keegstra and Cline (1999) The Plant Cell 11: 557-570). In addition to the diversity in sequence and secondary structure, placement of the signal peptide is also varied. Proteins destined for the vacuole, for example, have targeting signal peptides found at the N-terminus, at the C-terminus and at a surface location in mature, folded proteins. Signal peptides also serve as ligands for some receptors.

[0743] These characteristics of signal proteins are used to more tightly control the phenotypic expression of introduced SDFs. In particular, associating the appropriate signal sequence with a specific SDF allows sequestering of the protein in specific organelles (plastids, as an example), secretion outside of the cell, targeting interaction with particular receptors, etc. Hence, the inclusion of signal proteins in constructs involving the SDFs of the invention increases the range of manipulation of SDF phenotypic expression. The nucleotide sequence of the signal peptide is isolated from characterized genes using common molecular biological techniques or is synthesized in vitro.

[0744] In addition, the native signal peptide sequences, both amino acid and nucleotide, described in the Reference and Sequence tables is used to modulate polypeptide transport. Further variants of the native signal peptides described in the Reference and Sequence tables are contemplated. Insertions, deletions, or substitutions can be made. Such variants retain at least one of the functions of the native signal peptide as well as exhibiting some degree of sequence identity to the native sequence.

[0745] Also, fragments of the signal peptides of the invention are useful and are fused with other signal peptides of interest to modulate transport of a polypeptide.

V. Transformation Techniques

[0746] A wide range of techniques for inserting exogenous polynucleotides are known for a number of host cells, including, without limitation, bacterial, yeast, mammalian, insect and plant cells. Techniques for transforming a wide variety of higher plant species are well known and described in the technical and scientific literature. See, e.g. Weising et al., Ann. Rev. Genet. 22:421 (1988); and Christou, Euphytica, v. 85, n.1-3:13-27, (1995).

[0747] DNA constructs of the invention are introduced into the genome of the desired plant host by a variety of conventional techniques. For example, the DNA construct is introduced directly into the genomic DNA of the plant cell using techniques such as electroporation and microinjection of plant cell protoplasts, or the DNA constructs are introduced directly to plant tissue using ballistic methods, such as DNA particle bombardment. Alternatively, the DNA constructs are combined with suitable T-DNA flanking regions and introduced into a conventional Agrobacterium tumefaciens host vector. The virulence functions of the Agrobacterium tumefaciens host will direct the insertion of the construct and adjacent marker into the plant cell DNA when the cell is infected by the bacteria (McCormac et al., Mol. Biotechnol. 8:199 (1997); Hamilton, Gene 200:107 (1997); Salomon et al. EMBO J. 3:141 (1984); Herrera-Estrella et al. EMBO J. 2:987 (1983)).

[0748] Microinjection techniques are known in the art and are described in the scientific and patent literature. The introduction of DNA constructs using polyethylene glycol precipitation is described in Paszkowski et al. EMBO J. 3:2717 (1984). Electroporation techniques are described in Fromm et al. Proc. Natl Acad. Sci. USA 82:5824 (1985). Ballistic transformation techniques are described in Klein et al. Nature 327:773 (1987). Agrobacterium tumefaciens-mediated transformation techniques, including disarming and use of binary or co-integrate vectors, are well described in the scientific literature. See, for example Hamilton, C M., Gene 200:107 (1997); Müller et al. Mol. Gen. Genet. 207:171 (1987); Komari et al. Plant J. 10: 165 (1996); Venkateswarlu et al. Biotechnology 9:1103 (1991) and Gleave, A P., Plant Mol. Biol. 20:1203 (1992); Graves and Goldman, Plant Mol. Biol. 7:34 (1986) and Gould et al., Plant Physiology 95:426 (1991).

[0749] Transformed plant cells which are derived by any of the above transformation techniques are cultured to regenerate a whole plant that possesses the transformed genotype and thus the desired phenotype, for example seedlessness. Such regeneration techniques rely on manipulation of certain phytohormones in a tissue culture growth medium, typically relying on a biocide and/or herbicide marker which has been introduced together with the desired nucleotide sequences. Plant regeneration from cultured protoplasts is described in Evans et al., Protoplasts Isolation and Culture in “Handbook of Plant Cell Culture,” pp. 124-176, MacMillan Publishing Company, New York, 1983; and Binding, Regeneration of plants, Plant Protoplasts, pp. 21-73, CRC Press, Boca Raton, 1988. Regeneration is also obtained from plant callus, explants, organs, or parts thereof. Such regeneration techniques are described generally in Klee et al. Ann. Rev. of plant Phys. 38:467 (1987). Regeneration of monocots (rice) is described by Hosoyama et al. (Biosci. Biotechnol. Biochem. 58:1500 (1994)) and by Ghosh et al. (J. Biotechnol. 32:1 (1994)). The nucleic acids of the invention are used to confer desired traits on essentially any plant.

[0750] Thus, the invention has use over a broad range of plants, including species from the genera Anacardium, Arachis, Asparagus, Atropa, Avena, Brassica, Citrus, Citrullus, Capsicum, Carthamus, Cocos, Coffea, Cucumis, Cucurbita, Daucus, Elaeis, Fragaria, Glycine, Gossypium, Helianthus, Heterocallis, Hordeum, Hyoscyamus, Lactuca, Linum, Lolium, Lupinus, Lycopersicon, Malus, Manihot, Majorana, Medicago, Nicotiana, Olea, Oryza, Panieum, Pannesetum, Persea, Phaseolus, Pistachia, Pisum, Pyrus, Prunus, Raphanus, Ricinus, Secale, Senecio, Sinapis, Solanum, Sorghum, Theobromus, Trigonella, Triticum, Vicia, Vitis, Vigna, and, Zea.

[0751] One of skill recognizes that after the expression cassette is stably incorporated in transgenic plants and confirmed to be operable, it can be introduced into other plants by sexual crossing. Any of a number of standard breeding techniques are used, depending upon the species to be crossed.

[0752] The particular sequences of SDFs identified are provided in the attached Reference and Sequence tables.

### IX. DEFINITIONS

[0753] The following terms are utilized throughout this application:

[0754] Allelic variant: An “allelic variant” is an alternative form of the same SDF, which resides at the same chromosomal locus in the organism. Allelic variations can occur in any portion of the gene sequence, including regulatory regions. Allelic variants can arise by normal genetic variation in a population. Allelic variants can also be produced by genetic engineering methods. An allelic variant can be one that is found in a naturally occurring plant, including a cultivar or ecotype. An allelic variant may or may not give rise to a phenotypic change, and may or may not be expressed. An allele can result in a detectable change in the phenotype of the trait represented by the locus. A phenotypically silent allele can give rise to a product. Alternatively spliced messages: Within the context of the current invention, “alternatively spliced messages” refers to mature mRNAs originating from a single gene with variations in the number and/or identity of exons, introns and/or intron-exon junctions.

[0755] Chimeric: The term “chimeric” is used to describe genes, as defined supra, or contructs wherein at least two of the elements of the gene or construct, such as the promoter and the coding sequence and/or other regulatory sequences and/or filler sequences and/or complements thereof, are heterologous to each other.

[0756] Constitutive Promoter: Promoters referred to herein as “constitutive promoters” actively promote transcription under most, but not necessarily all, environmental conditions and states of development or cell differentiation. Examples of constitutive promoters include the cauliflower mosaic virus (CaMV) 35S transcript initiation region and the 1′ or 2′ promoter derived from T-DNA of Agrobacterium tumefaciens, and other transcription initiation regions from various plant genes, such as the maize ubiquitin-1 promoter, known to those of skill.

[0757] Coordinately Expressed: The term “coordinately expressed,” as used in the current invention, refers to genes that are expressed at the same or a similar time and/or stage and/or under the same or similar environmental conditions.

[0758] Domain: Domains are fingerprints or signatures that can be used to characterize protein families and/or parts of proteins. Such fingerprints or signatures can comprise conserved (1) primary sequence, (2) secondary structure, and/or (3) three-dimensional conformation. Generally, each domain has been associated with either a family of proteins or motifs. Typically, these families and/or motifs have been correlated with specific in-vitro and/or in-vivo activities. A domain can be any length, including the entirety of the sequence of a protein. Detailed descriptions of the domains, associated families and motifs, and correlated activities of the polypeptides of the instant invention are described below. Usually, the polypeptides with designated domain(s) can exhibit at least one activity that is exhibited by any polypeptide that comprises the same domain(s).

[0759] Endogenous: The term “endogenous,” within the context of the current invention refers to any polynucleotide, polypeptide or protein sequence which is a natural part of a cell or organisms regenerated from said cell.

[0760] Exogenous: “Exogenous,” as referred to within, is any polynucleotide, polypeptide or protein sequence, whether chimeric or not, that is initially or subsequently introduced into the genome of an individual host cell or the organism regenerated from said host cell by any means other than by a sexual cross. Examples of means by which this can be accomplished are described below, and include Agrobacterium-mediated transformation (of dicots—e.g. Salomon et al. EMBO J. 3:141 (1984); Herrera-Estrella et al. EMBO J. 2:987 (1983); of monocots, representative papers are those by Escudero et al., Plant J. 10:355 (1996), Ishida et al., Nature Biotechnology 14:745 (1996), May et al., Bio/Technology 13:486 (1995)), biolistic methods (Armaleo et al., Current Genetics 17:97 1990)), electroporation, in planta techniques, and the like. Such a plant containing the exogenous nucleic acid is referred to here as a T₀ for the primary transgenic plant and T₁ for the first generation. The term “exogenous” as used herein is also intended to encompass inserting a naturally found element into a non-naturally found location.

[0761] Filler sequence: As used herein, “filler sequence” refers to any nucleotide sequence that is inserted into DNA construct to evoke a particular spacing between particular components such as a promoter and a coding region and may provide an additional attribute such as a restriction enzyme site.

[0762] Gene: The term “gene,” as used in the context of the current invention, encompasses all regulatory and coding sequence contiguously associated with a single hereditary unit with a genetic function (see SCHEMATIC 1). Genes can include non-coding sequences that modulate the genetic function that include, but are not limited to, those that specify polyadenylation, transcriptional regulation, DNA conformation, chromatin conformation, extent and position of base methylation and binding sites of proteins that control all of these. Genes comprised of “exons” (coding sequences), which may be interrupted by “introns” (non-coding sequences), encode proteins. A gene's genetic function may require only RNA expression or protein production, or may only require binding of proteins and/or nucleic acids without associated expression. In certain cases, genes adjacent to one another may share sequence in such a way that one gene will overlap the other. A gene can be found within the genome of an organism, artificial chromosome, plasmid, vector, etc., or as a separate isolated entity.

[0763] Gene Family: “Gene family” is used in the current invention to describe a group of functionally related genes, each of which encodes a separate protein.

[0764] Heterologous sequences: “Heterologous sequences” are those that are not operatively linked or are not contiguous to each other in nature. For example, a promoter from corn is considered heterologous to an Arabidopsis coding region sequence. Also, a promoter from a gene encoding a growth factor from corn is considered heterologous to a sequence encoding the corn receptor for the growth factor. Regulatory element sequences, such as UTRs or 3′ end termination sequences that do not originate in nature from the same gene as the coding sequence originates from, are considered heterologous to said coding sequence. Elements operatively linked in nature and—contiguous to each other are not heterologous to each other. On the other hand, these same elements remain operatively linked but become heterologous if other filler sequence is placed between them. Thus, the promoter and coding sequences of a corn gene expressing an amino acid transporter are not heterologous to each other, but the promoter and coding sequence of a corn gene operatively linked in a novel manner are heterologous.

[0765] Homologous gene: In the current invention, “homologous gene” refers to a gene that shares sequence similarity with the gene of interest. This similarity may be in only a fragment of the sequence and often represents a functional domain such as, examples including without limitation a DNA binding domain, a domain with tyrosine kinase activity, or the like. The functional activities of homologous genes are not necessarily the same.

[0766] Inducible Promoter: An “inducible promoter” in the context of the current invention refers to a promoter which is regulated under certain conditions, such as light, chemical concentration, protein concentration, conditions in an organism, cell, or organelle, etc. A typical example of an inducible promoter, which can be utilized with the polynucleotides of the present invention, is PARSK1, the promoter from the Arabidopsis gene encoding a serine-threonine kinase enzyme, and which promoter is induced by dehydration, abscissic acid and sodium chloride (Wang and Goodman, Plant J. 8:37 (1995)) Examples of environmental conditions that may affect transcription by inducible promoters include anaerobic conditions, elevated temperature, or the presence of light.

[0767] Intergenic region: “Intergenic region,” as used in the current invention, refers to nucleotide sequence occurring in the genome that separates adjacent genes.

[0768] Mutant gene: In the current invention, “mutant” refers to a heritable change in DNA sequence at a specific location. Mutants of the current invention may or may not have an associated identifiable function when the mutant gene is transcribed.

[0769] Orthologous Gene: In the current invention “orthologous gene” refers to a second gene that encodes a gene product that performs a similar function as the product of a first gene. The orthologous gene may also have a degree of sequence similarity to the first gene. The orthologous gene may encode a polypeptide that exhibits a degree of sequence similarity to a polypeptide corresponding to a first gene. The sequence similarity can be found within a functional domain or along the entire length of the coding sequence of the genes and/or their corresponding polypeptides.

[0770] Percentage of sequence identity: “Percentage of sequence identity,” as used herein, is determined by comparing two optimally aligned sequences over a comparison window, where the fragment of the polynucleotide or amino acid sequence in the comparison window may comprise additions or deletions (e.g., gaps or overhangs) as compared to the reference sequence (which does not comprise additions or deletions) for optimal alignment of the two sequences. The percentage is calculated by determining the number of positions at which the identical nucleic acid base or amino acid residue occurs in both sequences to yield the number of matched positions, dividing the number of matched positions by the total number of positions in the window of comparison and multiplying the result by 100 to yield the percentage of sequence identity. Optimal alignment of sequences for comparison may be conducted by the local homology algorithm of Smith and Waterman Add. APL. Math. 2:482 (1981), by the homology alignment algorithm of Needleman and Wunsch J. Mol. Biol. 48:443 (1970), by the search for similarity method of Pearson and Lipman Proc. Natl. Acad. Sci. (USA) 85: 2444 (1988), by computerized implementations of these algorithms (GAP, BESTFIT, BLAST, PASTA, and TFASTA in the Wisconsin Genetics Software Package, Genetics Computer Group (GCG), 575 Science Dr., Madison, Wis.), or by inspection. Given that two sequences have been identified for comparison, GAP and BESTFIT are preferably employed to determine their optimal alignment. Typically, the default values of 5.00 for gap weight and 0.30 for gap weight length are used. The term “substantial sequence identity” between polynucleotide or polypeptide sequences refers to polynucleotide or polypeptide comprising a sequence that has at least 80% sequence identity, preferably at least 85%, more preferably at least 90% and most preferably at least 95%, even more preferably, at least 96%, 97%, 98% or 99% sequence identity compared to a reference sequence using the programs.

[0771] Plant Promoter: A “plant promoter” is a promoter capable of initiating transcription in plant cells and can drive or facilitate transcription of a fragment of the SDF of the instant invention or a coding sequence of the SDF of the instant invention. Such promoters need not be of plant origin. For example, promoters derived from plant viruses, such as the CaMV35S promoter or from Agrobacterium tumefaciens such as the T-DNA promoters, can be plant promoters. A typical example of a plant promoter of plant origin is the maize ubiquitin-l (ubi-l)promoter known to those of skill.

[0772] Promoter: The term “promoter,” as used herein, refers to a region of sequence determinants located upstream from the start of transcription of a gene and which are involved in recognition and binding of RNA polymerase and other proteins to initiate and modulate transcription. A basal promoter is the minimal sequence necessary for assembly of a transcription complex required for transcription initiation. Basal promoters frequently include a “TATA box” element usually located between 15 and 35 nucleotides upstream from the site of initiation of transcription. Basal promoters also sometimes include a “CCAAT box” element (typically a sequence CCAAT) and/or a GGGCG sequence, usually located between 40 and 200 nucleotides, preferably 60 to 120 nucleotides, upstream from the start site of transcription.

[0773] Public sequence: The term “public sequence,” as used in the context of the instant application, refers to any sequence that has been deposited in a publicly accessible database. This term encompasses both amino acid and nucleotide sequences. Such sequences are publicly accessible, for example, on the BLAST databases on the NCBI FTP web site (accessible at ncbi.nlm.gov/blast). The database at the NCBI GTP site utilizes “gi” numbers assigned by NCBI as a unique identifier for each sequence in the databases, thereby providing a non-redundant database for sequence from various databases, including GenBank, EMBL, DBBJ, (DNA Database of Japan) and PDB (Brookhaven Protein Data Bank).

[0774] Regulatory Sequence: The term “regulatory sequence,” as used in the current invention, refers to any nucleotide sequence that influences transcription or translation initiation and rate, and stability and/or mobility of the transcript or polypeptide product. Regulatory sequences include, but are not limited to, promoters, promoter control elements, protein binding sequences, 5′ and 3′ UTRs, transcriptional start site, termination sequence, polyadenylation sequence, introns, certain sequences within a coding sequence, etc.

[0775] Related Sequences: “Related sequences” refer to either a polypeptide or a nucleotide sequence that exhibits some degree of sequence similarity with a sequence described by The Reference tables and The Sequence tables.

[0776] Scaffold Attachment Region (SAR): As used herein, “scaffold attachment region” is a DNA sequence that anchors chromatin to the nuclear matrix or scaffold to generate loop domains that can have either a transcriptionally active or inactive structure (Spiker and Thompson (1996) Plant Physiol. 110: 15-21).

[0777] Sequence-determined DNA fragments (SDFs): “Sequence-determined DNA fragments” as used in the current invention are isolated sequences of genes, fragments of genes, intergenic regions or contiguous DNA from plant genomic DNA or cDNA or RNA the sequence of which has been determined.

[0778] Signal Peptide: A “signal peptide” as used in the current invention is an amino acid sequence that targets the protein for secretion, for transport to an intracellular compartment or organelle or for incorporation into a membrane. Signal peptides are indicated in the tables and a more detailed description located below.

[0779] Specific Promoter: In the context of the current invention, “specific promoters” refers to a subset of inducible promoters that have a high preference for being induced in a specific tissue or cell and/or at a specific time during development of an organism. By “high preference” is meant at least 3-fold, preferably 5-fold, more preferably at least 10-fold still more preferably at least 20-fold, 50-fold or 100-fold increase in transcription in the desired tissue over the transcription in any other tissue. Typical examples of temporal and/or tissue specific promoters of plant origin that can be used with the polynucleotides of the present invention, are: PTA29, a promoter which is capable of driving gene transcription specifically in tapetum and only during anther development (Koltonow et al., Plant Cell 2:1201 (1990); RCc2 and RCc3, promoters that direct root-specific gene transcription in rice (Xu et al., Plant Mol. Biol. 27:237 (1995); TobRB27, a root-specific promoter from tobacco (Yamamoto et al., Plant Cell 3:371 (1991)). Examples of tissue-specific promoters under developmental control include promoters that initiate transcription only in certain tissues or organs, such as root, ovule, fruit, seeds, or flowers. Other suitable promoters include those from genes encoding storage proteins or the lipid body membrane protein, oleosin. A few root-specific promoters are noted above.

[0780] Stringency: “Stringency” as used herein is a function of probe length, probe composition (G+C content), and salt concentration, organic solvent concentration, and temperature of hybridization or wash conditions. Stringency is typically compared by the parameter Tₘ, which is the temperature at which 50% of the complementary molecules in the hybridization are hybridized, in terms of a temperature differential from Tm. High stringency conditions are those providing a condition of Tₘ−5° C. to Tₘ−10° C. Medium or moderate stringency conditions are those providing Tₘ−20° C. to Tₘ−29° C. Low stringency conditions are those providing a condition of Tₘ−40° C. to Tₘ−48° C. The relationship of hybridization conditions to Tₘ (in ° C.) is expressed in the mathematical equation
Tₘ=81.5−16.6(log₁₀[Na⁺])+0.41(% G+C)−(600/N) (1)
where N is the length of the probe. This equation works well for probes 14 to 70 nucleotides in length that are identical to the target sequence. The equation below for Tₘ of DNA-DNA hybrids is useful for probes in the range of 50 to greater than 500 nucleotides, and for conditions that include an organic solvent (formamide).
Tₘ=81.5+16.6 log {[Na⁺]/(1+0.7[Na⁺])}+0.41(% G+C)−500/L 0.63(% fornanude) (2)
where L is the length of the probe in the hybrid. (P. Tijessen, “Hybridization with Nucleic Acid Probes” in Laboratory Techniques in Biochemistry and Molecular Biology, P. C. vand der Vliet, ed., c. 1993 by Elsevier, Amsterdam.) The Tₘ of equation (2) is affected by the nature of the hybrid; for DNA-RNA hybrids Tₘ is 10-15° C. higher than calculated, for RNA-RNA hybrids Tₘ is 20-25° C. higher. Because the Tm decreases about 1° C. for each 1% decrease in homology when a long probe is used (Bonner et al., J. Mol. Biol. 81:123 (1973)), stringency conditions can be adjusted to favor detection of identical genes or related family members.

[0781] Equation (2) is derived assuming equilibrium and therefore, hybridizations according to the present invention are most preferably performed under conditions of probe excess and for sufficient time to achieve equilibrium. The time required to reach equilibrium can be shortened by inclusion of a hybridization accelerator such as dextran sulfate or another high volume polymer in the hybridization buffer.

[0782] Stringency can be controlled during the hybridization reaction or after hybridization has occurred by altering the salt and temperature conditions of the wash solutions used. The formulas shown above are equally valid when used to compute the stringency of a wash solution. Preferred wash solution stringencies lie within the ranges stated above; high stringency is 5-8° C. below Tₘ, medium or moderate stringency is 26-29° C. below Tₘ and low stringency is 45-48° C. below Tₘ.

[0783] Substantially free of: A composition containing A is “substantially free of” B when at least 85% by weight of the total A+B in the composition is A. Preferably, A comprises at least about 90% by weight of the total of A+B in the composition, more preferably at least about 95% or even 99% by weight. For example, a plant gene or DNA sequence can be considered substantially free of other plant genes or DNA sequences.

[0784] Translational start site: In the context of the current invention, a “translational start site” is usually an ATG in the cDNA transcript, more usually the first ATG. A single cDNA, however, may have multiple translational start sites.

[0785] Transcription start site: “Transcription start site” is used in the current invention to describe the point at which transcription is initiated. This point is typically located about 25 nucleotides downstream from a TFIID binding site, such as a TATA box. Transcription can initiate at one or more sites within the gene, and a single gene may have multiple transcriptional start sites, some of which may be specific for transcription in a particular cell-type or tissue.

[0786] Untranslated region (UTR): A “UTR” is any contiguous series of nucleotide bases that is transcribed, but is not translated. These untranslated regions may be associated with particular functions such as increasing mRNA message stability. Examples of UTRs include, but are not limited to polyadenylation signals, terminations sequences, sequences located between the transcriptional start site and the first exon (5′ UTR) and sequences located between the last exon and the end of the mRNA (3′ UTR).

[0787] Variant: The term “variant” is used herein to denote a polypeptide or protein or polynucleotide molecule that differs from others of its kind in some way. For example, polypeptide and protein variants can consist of changes in amino acid sequence and/or charge and/or post-translational modifications (such as glycosylation, etc).

### X. EXAMPLES

[0788] The invention is illustrated by way of the following examples. The invention is not limited by these examples as the scope of the invention is defined solely by the claims following.

### Example 1

### cDNA Preparation

[0789] A number of the nucleotide sequences disclosed in the Reference and Sequence tables herein as representative of the SDFs of the invention are obtained by sequencing genomic DNA (gDNA) and/or cDNA from corn plants grown from HYBRID SEED # 35A19, purchased from Pioneer Hi-Bred International, Inc., Supply Management, P.O. Box 256, Johnston, Iowa 50131-0256.

[0790] A number of the nucleotide sequences disclosed in the Reference and Sequence tables herein as representative of the SDFs of the invention are also obtained by sequencing genomic DNA from Arabidopsis thaliana, Wassilewskija ecotype or by sequencing cDNA obtained from mRNA from such plants as described below. A. thaliana Wassilewskija is a true breeding strain. Seeds of the plant are available from the Arabidopsis Biological Resource Center at the Ohio State University, under the accession number CS2360. Seeds of this plant were deposited under the terms and conditions of the Budapest Treaty at the American Type Culture Collection, Manassas, Va. on Aug. 31, 1999, and were assigned ATCC No. PTA-595.

[0791] Other methods for cloning full-length cDNA are described, for example, by Seki et al., Plant Journal 15:707-720 (1998) “High-efficiency cloning of Arabidopsis full-length cDNA by biotinylated Cap trapper”; Maruyama et al., Gene 138:171 (1994) “Oligo-capping a simple method to replace the cap structure of eukaryotic mRNAs with oligoribonucleotides”; and WO 96/34981.

[0792] Tissues are, or each organ is, individually pulverized and frozen in liquid nitrogen. Next, the samples are homogenized in the presence of detergents and then centrifuged. The debris and nuclei are removed from the sample and more detergents were added to the sample. The sample is centrifuged and the debris is removed. Then the sample is applied to a 2M sucrose cushion to isolate polysomes. The RNA is isolated by treatment with detergents and proteinase K followed by ethanol precipitation and centrifugation. The polysomal RNA from the different tissues are pooled according to the following mass ratios: 15/15/1 for male inflorescences, female inflorescences and root, respectively. The pooled material is then used for cDNA synthesis by the methods described below.

[0793] Starting material for cDNA synthesis for the exemplary corn cDNA clones with sequences presented in the Reference and Sequence tables is poly(A)-containing polysomal mRNAs from inflorescences and root tissues of corn plants grown from HYBRID SEED # 35A19. Male inflorescences and female (pre-and post-fertilization) inflorescences are isolated at various stages of development. Selection for poly(A) containing polysomal RNA is done using oligo d(T) cellulose columns, as described by Cox and Goldberg, “Plant Molecular Biology: A Practical Approach”, pp. 1-35, Shaw ed., c. 1988 by IRL, Oxford. The quality and the integrity of the polyA+RNAs are evaluated.

[0794] Starting material for cDNA synthesis for the exemplary Arabidopsis cDNA clones with sequences presented in the Reference and Sequence tables is polysomal RNA isolated from the top-most inflorescence tissues of Arabidopsis thaliana Wassilewskija (Ws.) and from roots of Arabidopsis thaliana Landsberg erecta (L. er.), also obtained from the Arabidopsis Biological Resource Center. Nine parts inflorescence to every part root is used, as measured by wet mass. Tissue is pulverized and exposed to liquid nitrogen. Next, the sample is homogenized in the presence of detergents and then centrifuged. The debris and nuclei are removed from the sample and more detergents are added to the sample. The sample is centrifuged and the debris removed and the sample applied to a 2M sucrose cushion to isolate polysomal RNA. Cox et al., “Plant Molecular Biology: A Practical Approach”, pp. 1-35, Shaw ed., c. 1988 by IRL, Oxford. The polysomal RNA is used for cDNA synthesis by the methods described below. Polysomal mRNA is then isolated as described above for corn cDNA. The quality of the RNA is assessed electrophoretically.

[0795] Following preparation of the mRNAs from various tissues as described above, selection of mRNA with intact 5′ ends and specific attachment of an oligonucleotide tag to the 5′ end of such mRNA is performed using either a chemical or enzymatic approach. Both techniques take advantage of the presence of the “cap” structure, which characterizes the 5′ end of most intact mRNAs and which comprises a guanosine generally methylated once, at the 7 position.

[0796] The chemical modification approach involves the optional elimination of the 2′, 3′-cis diol of the 3′ terminal ribose, the oxidation of the 2′, 3′-cis diol of the ribose linked to the cap of the 5′ ends of the mRNAs into a dialdehyde, and the coupling of the such obtained dialdehyde to a derivatized oligonucleotide tag. Further detail regarding the chemical approaches for obtaining mRNAs having intact 5′ ends is disclosed in International Application No. WO96/34981 published Nov. 7, 1996.

[0797] The enzymatic approach for ligating the oligonucleotide tag to the intact 5′ ends of mRNAs involves the removal of the phosphate groups present on the 5′ ends of uncapped incomplete mRNAs, the subsequent decapping of mRNAs having intact 5′ ends and the ligation of the phosphate present at the 5′ end of the decapped mRNA to an oligonucleotide tag. Further detail regarding the enzymatic approaches for obtaining mRNAs having intact 5′ ends is disclosed in Dumas Milne Edwards J. B. (Doctoral Thesis of Paris VI University, Le clonage des ADNc complets: difficultes et perspectives nouvelles. Apports pour le'tude de la regulation de l'expression de la tryptophane hydroxylase de rat, 20 Dec. 1993), EP 0625572 and Kato et al., Gene 150:243-250 (1994).

[0798] In both the chemical and the enzymatic approach, the oligonucleotide tag has a restriction enzyme site (e.g. an EcoRI site) therein to facilitate later cloning prqedures. Following attachment of the oligonucleotide tag to the mRNA, the integrity of the mRNA is examined by performing a Northern blot using a probe complementary to the oligonucleotide tag.

[0799] For the mRNAs joined to oligonucleotide tags using either the chemical or the enzymatic method, first strand cDNA synthesis is performed using an oligo-dT primer with reverse transcriptase. This oligo-dT primer contains an internal tag of at least 4 nucleotides, which can be different from one mRNA preparation to another. Methylated dCTP is used for cDNA first strand synthesis to protect the internal EcoRi sites from digestion during subsequent steps. The first strand cDNA is precipitated using isopropanol after removal of RNA by alkaline hydrolysis to eliminate residual primers.

[0800] Second strand cDNA synthesis is conducted using a DNA polymerase, such as Klenow fragment and a primer corresponding to the 5′ end of the ligated oligonucleotide. The primer is typically 20-25 bases in length. Methylated dCTP is used for second strand synthesis in order to protect internal EcoRI sites in the cDNA from digestion during the cloning process.

[0801] Following second strand synthesis, the full-length cDNAs are cloned into a phagemid vector, such as pBlueScript™ (Stratagene). The ends of the full-length cDNAs are blunted with T4 DNA polymerase (Biolabs) and the cDNA is digested with EcoRI. Since methylated dCTP is used during cDNA synthesis, the EcoRI site present in the tag is the only hemi-methylated site; hence the only site susceptible to EcoRI digestion. In some instances, to facilitate subcloning, an Hind III adapter is added to the 3′ end of full-length cDNAs.

[0802] The full-length cDNAs are then size fractionated using either exclusion chromatography (AcA, Biosepra) or electrophoretic separation which yields 3 to 6 different fractions. The full-length cDNAs are then directionally cloned either into pBlueScript™ using either the EcoRI and SmaI restriction sites or, when the Hind III adapter is present in the full-length cDNAs, the EcoRI and Hind III restriction sites. The ligation mixture is transformed, preferably by electroporation, into bacteria, which are then propagated under appropriate antibiotic selection.

[0803] Clones containing the oligonucleotide tag attached to full-length cDNAs are selected as follows.

[0804] The plasmid cDNA libraries made as described above are purified (e.g. by a column available from Qiagen). A positive selection of the tagged clones is performed as follows. Briefly, in this selection procedure, the plasmid DNA is converted to single stranded DNA using phage F1 gene II endonuclease in combination with an exonuclease (Chang et al., Gene 127:95 (1993)) such as exonuclease III or T7 gene 6 exonuclease. The resulting single stranded DNA is then purified using paramagnetic beads as described by Fry et al., Biotechniques 13: 124 (1992). Here the single stranded DNA is hybridized with a biotinylated oligonucleotide having a sequence corresponding to the 3′ end of the oligonucleotide tag. Preferably, the primer has a length of 20-25 bases. Clones including a sequence complementary to the biotinylated oligonucleotide are selected by incubation with streptavidin coated magnetic beads followed by magnetic capture. After capture of the positive clones, the plasmid DNA is released from the magnetic beads and converted into double stranded DNA using a DNA polymerase such as ThermoSequenase™ (obtained from Amersham Pharmacia Biotech). Alternatively, protocols such as the Gene Trapper™ kit (Gibco BRL) can be used. The double stranded DNA is then transformed, preferably by electroporation, into bacteria. The percentage of positive clones having the 5′ tag oligonucleotide is typically estimated to be between 90 and 98% from dot blot analysis.

[0805] Following transformation, the libraries are ordered in microtiter plates and sequenced. The Arabidopsis library was deposited at the American Type Culture Collection on Jan. 7, 2000 as “E-coli liba 010600” under the accession number PTA-1161.

### A. Example 2

### Southern Hybridizations

[0806] The SDFs of the invention are used in Southern hybridizations as described above. The following describes extraction of DNA from nuclei of plant cells, digestion of the nuclear DNA and separation by length, transfer of the separated fragments to membranes, preparation of probes for hybridization, hybridization and detection of the hybridized probe.

[0807] The procedures described herein are used to isolate related polynucleotides or for diagnostic purposes. Moderate stringency hybridization conditions, as defined above, are described in the present example. These conditions result in detection of hybridization between sequences having at least 70% sequence identity. As described above, the hybridization and wash conditions can be changed to reflect the desired percenatge of sequence identity between probe and target sequences that can be detected.

[0808] In the following procedure, a probe for hybridization is produced from two PCR reactions using two primers from genomic sequence of Arabidopsis thaliana. As described above, the particular template for generating the probe can be any desired template.

[0809] The first PCR product is assessed to validate the size of the primer to assure it is of the expected size. Then the product of the first PCR is used as a template, with the same pair of primers used in the first PCR, in a second PCR that produces a labeled product used as the probe.

[0810] Fragments detected by hybridization, or other bands of interest, are isolated from gels used to separate genomic DNA fragments by known methods for further purification and/or characterization.

Buffers for nuclear DNA extraction
1. 10X HB

| | 1000 ml | |
|---|---|---|
| 40 mM | 10.2 g | Spermine (Sigma S-2876) and spermidine |
| spermidine | | (Sigma S-2501) |
| 10 mM spermine | 3.5 g | Stabilize chromatin and the nuclear |
| | | membrane |
| 0.1 M EDTA | 37.2 g | EDTA inhibits nuclease |
| (disodium) | | |
| 0.1 M Tris | 12.1 g | Buffer |
| 0.8 M KCl | 59.6 g | Adjusts ionic strength for stability of nuclei |

[0811] Adjust pH to 9.5 with 10 N NaOH. It appears that there is a nuclease present in leaves.

[0812] Use of pH 9.5 appears to inactivate this nuclease.
[0813] 2. 2 M sucrose (684 g per 1000 ml)
   [0814] Heat about half the final volume of water to about 50° C. Add the sucrose slowly then bring the mixture to close to final volume; stir constantly until it has dissolved. Bring the solution to volume.

[0815] 3. Sarkosyl solution (lyses nuclear membranes)

| | 1000 ml |
|---|---|
| N-lauroyl sarcosine (Sarkosyl) | 20.0 g |
| 0.1 M Tris | 12.1 g |
| 0.04 M EDTA (Disodium) | 14.9 g |

[0816] Adjust the pH to 9.5 after all the components are dissolved and bring up to the proper volume.
[0817] 4. 20% Triton X-100
   [0818] 80 ml Triton X-100
   [0819] 320 ml 1×HB (w/o β-ME and PMSF)
   [0820] Prepare in advance; Triton takes some time to dissolve
      A. Procedure

[0821] 1. Prepare 1×“H” buffer (keep ice-cold during use)

| | 1000 ml |
|---|---|
| 10X HB | 100 ml |
| 2 M sucrose | 250 ml a non-ionic osmoticum |
| Water | 634 ml |

[0822] Added just before use:

| | |
|---|---|
| 100 mM PMSF* | 10 ml a protease inhibitor; protects nuclear |
| | membrane proteins |
| β-mercaptoethanol | 1 ml inactivates nuclease by reducing |
| | disulfide bonds |

*100 mM PMSF (phenyl methyl sulfonyl fluoride, Sigma P-7626) (add 0.0875 g to 5 ml 100% ethanol)

[0823] 2. Homogenize the tissue in a blender (use 300-400 ml of 1×HB per blender). Be sure that you use 5-10 ml of HB buffer per gram of tissue. Blenders generate heat so be sure to keep the homogenate cold. It is necessary to put the blenders in ice periodically.
[0824] 3. Add the 20% Triton X-100 (25 ml per liter of homogenate) and gently stir on ice for 20 min. This lyses plastid, but not nuclear, membranes.
[0825] 4. Filter the tissue suspension through several nylon filters into an ice-cold beaker. The first filtration is through a 250-micron membrane; the second is through an 85-micron membrane; the third is through a 50-micron membrane; and the fourth is through a 20-micron membrane. Use a large funnel to hold the filters. Filtration can be sped up by gently squeezing the liquid through the filters.
[0826] 5. Centrifuge the filtrate at 1200×g for 20 min. at 4° C. to pellet the nuclei.
[0827] 6. Discard the dark green supernatant. The pellet will have several layers to it. One is starch; it is white and gritty. The nuclei are gray and soft. In the early steps, there may be a dark green and somewhat viscous layer of chloroplasts.
   [0828] Wash the pellets in about 25 ml cold H buffer (with Triton X-100) and resuspend by swirling gently and pipetting. After the pellets are resuspended pellet the nuclei again at 1200-1300×g. Discard the supernatant.
   [0829] Repeat the wash 3-4 times until the supernatant has changed from a dark green to a pale green. This usually happens after 3 or 4 resuspensions. At this point, the pellet is typically grayish white and very slippery. The Triton X-100 in these repeated steps helps to destroy the chloroplasts and mitochondria that contaminate the prep.
   [0830] Resuspend the nuclei for a final time in a total of 15 ml of H buffer and transfer the suspension to a sterile 125 ml Erlenmeyer flask.
[0831] 7. Add 15 ml, dropwise, cold 2% Sarkosyl, 0.1 M Tris, 0.04 M EDTA solution (pH 9.5) while swirling gently. This lyses the nuclei. The solution will become very viscous.
[0832] 8. Add 30 grams of CsCl and gently swirl at room temperature until the CsCl is in solution. The mixture will be gray, white and viscous.
[0833] 9. Centrifuge the solution at 11,400×g at 4° C. for at least 30 min. The longer this spin is, the firmer the protein pellicle.
[0834] 10. The result is typically a clear green supernatant over a white pellet, and (perhaps) under a protein pellicle. Carefully remove the solution under the protein pellicle and above the pellet. Determine the density of the solution by weighing 1 ml of solution and add CsCl if necessary to bring to 1.57 g/ml. The solution contains dissolved solids (sucrose etc) and the refractive index alone will not be an accurate guide to CsCl concentration.
[0835] 11. Add 20 μl of 10 mg/ml EtBr per ml of solution.
[0836] 12. Centrifuge at 184,000×g for 16 to 20 hours in a fixed-angle rotor.
[0837] 13. Remove the dark red supernatant that is at the top of the tube with a plastic transfer pipette and discard. Carefully remove the DNA band with another transfer pipette. The DNA band is usually visible in room light; otherwise, use a long wave UV light to locate the band.
[0838] 14. Extract the ethidium bromide (EtBr) with isopropanol saturated with water and salt.
   [0839] Once the solution is clear, extract at least two more times to ensure that all of the EtBr is gone. Be very gentle, as it is very easy to shear the DNA at this step. This extraction may take a while because the DNA solution tends to be very viscous. If the solution is too viscous, dilute it with TE.
[0840] 15. Dialyze the DNA for at least two days against several changes (at least three times) of TE (10 mM Tris, 1 mM EDTA, pH 8) to remove the cesium chloride.
[0841] 16. Remove the dialyzed DNA from the tubing. If the dialyzed DNA solution contains a lot of debris, centrifuge the DNA solution at least at 2500×g for 10 min. and carefully transfer the clear supernatant to a new tube. Read the A260 concentration of the DNA.
[0842] 17. Assess the quality of the DNA by agarose gel electrophoresis (1% agarose gel) of the DNA. Load 50 ng and 100 ng (based on the OD reading) and compare it with known and good quality DNA. Undigested lambda DNA and a lambda-HindIII-digested DNA are good molecular weight makers.
   Protocol for Digestion of Genomic DNA
   Protocol:
[0843] 1. The relative amounts of DNA for different crop plants that provide approximately a balanced number of genome equivalent is given in Table 3 below. Note that due to the size of the wheat genome, wheat DNA will be underrepresented. Lambda DNA provides a useful control for complete digestion.
[0844] 2. Precipitate the DNA by adding 3 volumes of 100% ethanol. Incubate at −20° C. for at least two hours. Yeast DNA can be purchased and made up at the necessary concentration, therefore no precipitation is necessary for yeast DNA.
[0845] 3. Centrifuge the solution at 11,400×g for 20 min. Decant the ethanol carefully (be careful not to disturb the pellet). Be sure that the residual ethanol is completely removed either by vacuum desiccation or by carefully wiping the sides of the tubes with a clean tissue.
[0846] 4. Resuspend the pellet in an appropriate volume of water. Be sure the pellet is fully resuspended before proceeding to the next step. This may take about 30 min.
[0847] 5. Add the appropriate volume of 10×reaction buffer provided by the manufacturer of the restriction enzyme to the resuspended DNA followed by the appropriate volume of enzymes. Be sure to mix it properly by slowly swirling the tubes.
[0848] 6. Set-up the lambda digestion-control for each DNA that you are digesting.
[0849] 7. Incubate both the experimental and lambda digests overnight at 37° C. Spin down condensation in a microfuge before proceeding.
[0850] 8. After digestion, add 2 μl of loading dye (typically 0.25% bromophenol blue, 0.25% xylene cyanol in 15% Ficoll or 30% glycerol) to the lambda-control digests and load in 1% TPE-agarose gel (TPE is 90 mM Tris-phosphate, 2 mM EDTA, pH 8). If the lambda DNA in the lambda control digests are completely digested, proceed with the precipitation of the genomic DNA in the digests.
[0851] 9. Precipitate the digested DNA by adding 3 volumes of 100% ethanol and incubating in −20° C. for at least 2 hours (preferably overnight).
   [0852] EXCEPTION: Arabidopsis and yeast DNA are digested in an appropriate volume; they don't have to be precipitated.
[0853] 10. Resuspend the DNA in an appropriate volume of TE (e.g., 22 μl×50 blots=1100 μl) and an appropriate volume of 10×loading dye (e.g., 2.4 μl×50 blots=120 μl). Be careful in pipetting the loading dye—it is viscous. Be sure you are pipetting the correct volume.
   Table 3

[0854] Some guide points in digesting genomic DNA.

| | | | Genome | |
|---|---|---|---|---|
| | | Size | Equivalent | Amount |
| | | Relative to | to 2 μg | of DNA |
| Species | Genome Size | Arabidopsis | Arabidopsis DNA | per blot |
| Arabidopsis | 120 Mb | 1X | 1X | 2 μg |
| Brassica | 1,100 Mb | 9.2X | 0.54X | 10 μg |
| Corn | 2,800 Mb | 23.3X | 0.43X | 20 μg |
| Cotton | 2,300 Mb | 19.2X | 0.52X | 20 μg |
| Oat | 11,300 Mb | 94X | 0.11X | 20 μg |
| Rice | 400 Mb | 3.3X | 0.75X | 5 μg |
| Soybean | 1,100 Mb | 9.2X | 0.54X | 10 μg |
| Sugarbeet | 758 Mb | 6.3X | 0.8X | 10 μg |
| Sweetclover | 1,100 Mb | 9.2X | 0.54X | 10 μg |
| Wheat | 16,000 Mb | 133X | 0.08X | 20 μg |
| Yeast | 15 Mb | 0.12X | 1X | 0.25 μg |

Protocol for Southern Blot Analysis

[0855] The digested DNA samples are electrophoresed in 1% agarose gels in 1× TPE buffer. Low voltage, overnight separations are preferred. The gels are stained with EtBr and photographed.
[0856] 1. For blotting the gels, first incubate the gel in 0.25 N HCl (with gentle shaking) for about 15 min.
[0857] 2. Then briefly rinse with water. The DNA is denatured by 2 incubations. Incubate (with shaking) in 0.5 M NaOH in 1.5 M NaCl for 15 min.
[0858] 3. The gel is then briefly rinsed in water and neutralized by incubating twice (with shaking) in 1.5 M Tris pH 7.5 in 1.5 M NaCl for 15 min.
[0859] 4. A nylon membrane is prepared by soaking it in water for at least 5 min, then in 6×SSC for at least 15 min. before use. (20×SSC is 175.3 g NaCl, 88.2 g sodium citrate per liter, adjusted to pH 7.0.)
[0860] 5. The nylon membrane is placed on top of the gel and all bubbles in between are removed. The DNA is blotted from the gel to the membrane using an absorbent medium, such as paper toweling and 6×SCC buffer. After the transfer, the membrane may be lightly brushed with a gloved hand to remove any agarose sticking to the surface.
[0861] 6. The DNA is then fixed to the membrane by UV crosslinking and baking at 80° C. The membrane is stored at 4° C. until use.

[0862] B. Protocol for PCR Amplification of Genomic Fragments in Arabidopsis

Amplification procedures:
1. Mix the following in a 0.20 ml PCR tube or 96-well PCR plate:

| Volume | Stock | Final Amount or Conc. |
|---|---|---|
| 0.5 μl | ˜10 ng/μl genomic DNA¹ | 5 ng |
| 2.5 μl | 10X PCR buffer | 20 mM Tris, 50 mM KCl |
| 0.75 μl | 50 mM MgCl₂ | 1.5 mM |
| 1 μl | 10 pmol/μl Primer 1 (Forward) | 10 pmol |
| 1 μl | 10 pmol/μl Primer 2 (Reverse) | 10 pmol |
| 0.5 μl | 5 mM dNTPs | 0.1 mM |
| 0.1 μl | 5 units/μl Platinum Taq ™ (Life | 1 units |
| | Technologies, Gaithersburg, MD) | |
| | DNA Polymerase | |
| (to 25 μl) | Water | |

¹Arabidopsis DNA is used in the present experiment, but the procedure is a general one.

[0863] 2. The template DNA is amplified using a Perkin Elmer 9700 PCR machine:

[0864] 1) 94° C. for 10 min. followed by

| 2) | 3) | 4) |
|---|---|---|
| 5 cycles: | 5 cycles: | 25 cycles: |
| 94° C. - 30 sec | 94° C. - 30 sec | 94° C. - 30 sec |
| 62° C. - 30 sec | 58° C. - 30 sec | 53° C. - 30 sec |
| 72° C. - 3 min | 72° C. - 3 min | 72° C. - 3 min |

[0865] 5) 72° C. for 7 min. Then the reactions are stopped by chilling to 4° C.

[0866] The procedure cna be adapted to a multi-well format if necessary.

Quanification and Dilution of PCR Products:

[0867] 1. The product of the PCR is analyzed by electrophoresis in a 1% agarose gel. A linearized plasmide DNA can be used as a quantification standard (usually at 50, 100, 200, and 400 HindIII-digested Lambda DNA is useful as a molecular weight marker. The gel can be run fairly quickly; e.g., at 100 volts. The standard gel is examined to determine that the size of the PCR products is consistent with the expected size and if there are significant extra bands or smeary products in the PCR reactions.
[0868] 2. The amounts of PCR products are estimated on the basis of the plasmid standard.
[0869] 3. For the small number of reactions that produce extraneous bands, a small amount of DNA from bands with the correct size can be isolated by dipping a sterile 10-μl tip into the band while viewing though a UV Transilluminator. The small amount of agarose gel (with the DNA fragment) is used in the labeling reaction.
   C. Protocol for PCR-DIG-Labeling of DNA
   Solutions:
[0870] Reagents in PCR reactions (diluted PCR products, 10 × PCR Buffer, 50 mM MgCl₂, 5 U/μl Platinum Taq Polymerase, and the primers)
[0871] 10 ×dNTP+DIG-11-dUTP [1:5]: (2 mM dATP, 2 mM dCTP, 2 mM dGTP, 1.65 mM dTTP, 0.35 mM DIG-11-dUTP)
[0872] 10 ×dNTP+DIG-11-dUTP [1:10]: (2 mM dATP, 2 mM dCTP, 2 mM dGTP, 1.81 mM dTTP, 0.19 mM DIG-11-dUTP)
[0873] 10×dNTP+DIG-11-dUTP [1:15]: (2 mM dATP, 2 mM dCTP, 2 mM dGTP, 1.875 mM dTTP, 0.125 mM DIG-11-dUTP)
[0874] TE buffer (10 mM Tris, 1 mM EDTA, pH 8)
[0875] Maleate buffer: In 700 ml of deionized distilled water, dissolve 11.61 g maleic acid and 8.77 g NaCl. Add NaOH to adjust the pH to 7.5. Bring the volume to 1 L. Stir for 15 min. and sterilize.
[0876] 10% blocking solution: In 80 ml deionized distilled water, dissolve 1.16g maleic acid. Next, add NaOH to adjust the pH to 7.5. Add 10 g of the blocking reagent powder (Boehringer Mannheim, Indianapolis, Ind., Cat. no. 1096176). Heat to 60° C. while stirring to dissolve the powder. Adjust the volume to 100 ml with water. Stir and sterilize.
[0877] 1% blocking solution: Dilute the 10% stock to 1 % using the maleate buffer.
[0878] Buffer 3 (100 mM Tris, 100 mM NaCl, 50 mM MgCl₂, pH9.5). Prepared from autoclaved solutions of IM Tris pH 9.5, 5 M NaCl, and 1 M MgCl₂ in autoclaved distilled water.
   Procedure:

[0879] 1. PCR reactions are performed in 25 μl volumes containing:

| | |
|---|---|
| PCR buffer | 1X |
| MgCl₂ | 1.5 mM |
| 10X dNTP + DIG-11-dUTP | 1X (please see the note below) |
| Platinum Taq ™ Polymerase | 1 unit |
| 10 pg probe DNA | |
| 10 pmol primer 1 | |

| | |
|---|---|
| Note: | |
| | Use for: |
| 10X dNTP + DIG-11-dUTP (1:5) | <1 kb |
| 10X dNTP + DIG-11-dUTP (1:10) | 1 kb to 1.8 kb |
| 10X dNTP + DIG-11-dUTP (1:15) | >1.8 kb |

[0880] 2. The PCR reaction uses the following amplification cycles:

[0881] 1) 94° C. for 10 min. 2) 3) 4)

| 2) | 3) | 4) |
|---|---|---|
| 5 cycles: | 5 cycles: | 25 cycles: |
| 95° C. - 30 sec | 95° C. - 30 sec | 95° C. - 30 sec |
| 61° C. - 1 min | 59° C. - 1 min | 51° C. - 1 min |
| 73° C. - 5 min | 75° C. - 5 min | 73° C. - 5 min |

[0882] 5) 72° C. for 8 min. The reactions are terminated by chilling to 4° C. (hold).
[0883] 3. The products are analyzed by electrophoresis-in a 1% agarose gel, comparing to an aliquot of the unlabelled probe starting material.
[0884] 4. The amount of DIG-labeled probe is determined as follows:

[0885] Make serial dilutions of the diluted control DNA in dilution buffer (TE: 10 mM Tris and 1 mM EDTA, pH 8) as shown in the following table:

| DIG-labeled control | | Final Conc. (Dilution |
|---|---|---|
| DNA starting conc. | Stepwise Dilution | Name) |
| 5 ng/μl | 1 μl in 49 μl TE | 100 pg/μl (A) |
| 100 pg/μl (A) | 25 μl in 25 μl TE | 50 pg/μl (B) |
| 50 pg/μl (B) | 25 μl in 25 μl TE | 25 pg/μl (C) |
| 25 pg/μl (C) | 20 μl in 30 μl TE | 10 pg/μl (D) |

[0886] a. Serial deletions of a DIG-labeled standard DNA ranging from 100 pg to 10 pg are spotted onto a positively charged nylon membrane, marking the membrane lightly with a pencil to identify each dilution.
[0887] b. Serial dilutions (e.g., 1:50, 1:2500, 1:10,000) of the newly labeled DNA probe are spotted.
[0888] c. The membrane is fixed by UV crosslinking.
[0889] d. The membrane is wetted with a small amount of maleate buffer and then incubated in 1% blocking solution for 15 min at room temp.
[0890] e. The labeled DNA is then detected using alkaline phosphatase conjugated anti-DIG antibody (Boehringer Mannheim, Indianapolis, IN, cat. no. 1093274) and an NBT substrate according to the manufacture's instruction.
[0891] f. Spot intensities of the control and experimental dilutions are then compared to estimate the concentration of the PCR-DIG-labeled probe.
   D. Prehydrization and Hybridization of Southern Blots

[0892] Solutions:

| | |
|---|---|
| 100% Formamide | purchased from Gibco |
| 20X SSC | (1X = 0.15 M NaCl, 0.015 M Na₃citrate) |
| per L: | 175 g NaCl |
| | 87.5 g Na₃citrate.2H₂0 |

[0893] 20% Sarkosyl (N-lauroyl-sarcosine)
[0894] 20% SDS (sodium dodecyl sulphate)
[0895] 10% Blocking Reagent: In 80 ml deionized distilled water, dissolve 1.16 g maleic acid.
   [0896] Next, add NaOH to adjust the pH to 7.5. Add 10 g of the blocking reagent powder.

[0897] Heat to 60° C. while stirring to dissolve the powder. Adjust the volume to 100 ml with water. Stir and sterilize.

Prehybridization Mix:

| Final | | Volume | |
|---|---|---|---|
| Concentration | Components | (per 100 ml) | Stock |
| 50% | Formamide | 50 ml | 100% |
| 5X | SSC | 25 ml | 20X |
| 0.1% | Sarkosyl | 0.5 ml | 20% |
| 0.02% | SDS | 0.1 ml | 20% |
| 2% | Blocking Reagent | 20 ml | 10% |
| | Water | 4.4 ml | |

General Procedures:
[0898] 1. Place the blot in a heat-sealable plastic bag and add an appropriate volume of prehybridization solution (30 ml/100 cm²) at room temperature. Seal the bag with a heat sealer, avoiding bubbles as much as possible. Lay down the bags in a large plastic tray (one tray can accommodate at least 4-5 bags). Ensure that the bags are lying flat in the tray so that the prehybridization solution is evenly distributed throughout the bag. Incubate the blot for at least 2 hours with gentle agitation using a waver shaker.
[0899] 2. Denature DIG-labeled DNA probe by incubating for 10 min. at 98° C. using the PCR machine and immediately cool it to 4° C.
[0900] 3. Add probe to prehybridization solution (25 ng/ml; 30 ml=750 ng total probe) and mix well but avoid foaming. Bubbles may lead to background.
[0901] 4. Pour off the prehybridization solution from the hybridization bags and add new prehybridization and probe solution mixture to the bags containing the membrane.
[0902] 5. Incubate with gentle agitation for at least 16 hours.
[0903] 6. Proceed to medium stringency post-hybridization wash:
   [0904] Three times for 20 min. each with gentle agitation using 1×SSC, 1% SDS at 60° C.
   [0905] All wash solutions must be prewarmed to 60 C. Use about 100 ml of wash solution per membrane.
   [0906] To avoid background keep the membranes fully submerged to avoid drying in spots; agitate sufficiently to avoid having membranes stick to one another.
[0907] 7. After the wash, proceed to immunological detection and CSPD development.
   E. Procedure for Immunological Detection with CSPD
   Solutions:
[0908] Buffer 1: Maleic acid buffer (0.1 M maleic acid, 0.15 M NaCl; adjusted to pH 7.5 with NaoH)
[0909] Washing buffer: Maleic acid buffer with 0.3% (v/v) Tween 20.
[0910] Blocking stock solution 10% blocking reagent in buffer 1. Dissolve (10×concentration): blocking reagent powder (Boehringer Mannheim, Indianapolis, Ind., cat. no. 1096176) by constantly stirring on a 65° C. heating block or heat in a microwave, autoclave and store at 4° C.
[0911] Buffer 2
[0912] (1×blocking solution): Dilute the stock solution 1:10 in Buffer 1.
[0913] Detection buffer: 0.1 M Tris, 0.1 M NaCl, pH 9.5
   Procedure:
[0914] 1. After the post-hybridization wash the blots are briefly rinsed (1-5 min.) in the maleate washing buffer with gentle shaking.
[0915] 2. Then the membranes are incubated for 30 min. in Buffer 2 with gentle shaking.
[0916] 3. Anti-DIG-AP conjugate (Boehringer Mannheim, Indianapolis, Ind., cat. no. 1093274) at 75 mU/ml (1 :10,000) in Buffer 2 is used for detection. 75 ml of solution can be used for 3 blots.
[0917] 4. The membrane is incubated for 30 min. in the antibody solution with gentle shaking.
[0918] 5. The membrane are washed twice in washing buffer with gentle shaking. About 250 mls is used per wash for 3 blots.
[0919] 6. The blots are equilibrated for 2-5 min in 60 ml detection buffer.
[0920] 7. Dilute CSPD (1:200) in detection buffer. (This can be prepared ahead of time and stored in the dark at 4° C.).
   [0921] The following steps must be done individually. Bags (one for detection and one for exposure) are generally cut and ready before doing the following steps.
[0922] 8. The blot is carefully removed from the detection buffer and excess liquid removed without drying the membrane. The blot is immediately placed in a bag and 1.5 ml of CSPD solution is added. The CSPD solution can be spread over the membrane. Bubbles present at the edge and on the surface of the blot are typically removed by gentle rubbing. The membrane is incubated for 5 min. in CSPD solution.
[0923] 9. Excess liquid is removed and the membrane is blotted briefly (DNA side up) on Whatman 3MM paper. Do not let the membrane dry completely.
[0924] 10. Seal the damp membrane in a hybridization bag and incubate for 10 min at 37° C. to enhance the luminescent reaction.
[0925] 11. Expose for 2 hours at room temperature to X-ray film. Multiple exposures can be taken. Luminescence continues for at least 24 hours and signal intensity increases during the first hours.

### Example 3

### Microarray Experiments and Results

1. Sample Tissue Preparation

(a) Abscissic Acid (ABA)

[0926] Seeds of Arabidopsis thaliana (ecotype Wassilewskija) are sown in trays and left at 4° C. for 4 days to vernalize. They are then transferred to a growth chamber having grown 16 hr light/8 hr dark, 13,000 LUX, 70% humidity, and 20° C. and watered twice a week with 1 L of 1×Hoagland's solution. Approximately 1,000 14 day old plants are sprayed with 200-250 mls of 100 μM ABA in a 0.02% solution of the detergent Silwet L-77. Whole seedlings, including roots, are harvested within a 15 to 20 minute time period at 1 hr and 6 hr after treatment, flash-frozen in liquid nitrogen and stored at ⁻80° C.

[0927] Seeds of maize hybrid 35A (Pioneer) are sown in water-moistened sand in flats (10 rows, 5-6 seed/row) and covered with clear, plastic lids before being placed in a growth chamber having 16 hr light (25° C.)/8 hr dark (20° C.), 75% relative humidity and 13,000-14,000 LUX. Covered flats are watered every three days for 7 days. Seedlings are carefully removed from the sand and placed in 1 -liter beakers with 100 μM ABA for treatment. Control plants are treated with water. After 6 hr and 24 hr, aerial and root tissues are separated and flash frozen in liquid nitrogen prior to storage at ⁻80° C.

(b) Ap2

[0928] Seeds of Arabidopsis thaliana (ecotype Landesberg erecta) and floral mutant apetala2 (Jofuku et al., 1994, Plant Cell 6:1211-1225) are sown in pots and left at 4° C. for two to three days to vernalize. They are then transferred to a growth chamber. Plants are grown under long-day (16 hr light, 8 hr dark) conditions 7000-8000 LUX light intensity, 70% humidity and 22° C. temperature. Inflorescences containing immature floral buds (stages 1-7; Bowman, 1994) as wel as the inflorescence meristem are harvested and flashfrozen. Polysomal polyA+RNA is isolated from tissue according to Cox and Goldberg, 1988).

(c) Arabidopsis Endosperm

[0929] mea/mea Fruits 0-10 mm

[0930] Seeds of Arabidopsis thaliana heterozygous for thefertilization—independent endosperml (fie1) [Ohad et al., 1996; ecotype Landsberg erecta (Ler)] are sown in pots and left at 4° C. for two to three days to vernalize. Kiyosue et al. (1999) subsequently determined that fie1 was allelic to the gametophytic maternal effect mutant medea (Grossniklaus et al., 1998). Imbibed seeds are then transferred to a growth chamber. Plants are grown under long-day (16 hr light: 8 hr dark) conditions, 7000-8000 LUX light intensity, 70% humidity, and 22° C. temperature. 1-2 siliques (fruits) bearing developing seeds just prior to dessication [9 days after flowering (DAF)] are selected from each plant and are hand-dissected to identify wild-type, mea/+heterozygotes, and mea/mea homozygous mutant plants. At this stage, homozygous mea/mea plants produce short siliques that contain >70% aborted seed and can be distinguished from those produced by wild-type (100% viable seed) and mea/+heterozygous (50% viable seed) plants (Ohad et al., 1996; Grossniklaus et al., 1998; Kiyosue et al., 1999). Siliques 0-10 mm in length containing developing seeds 0-9 DAF produced by homozygous mea/mea plants are harvested and flash frozen in liquid nitrogen.

Pods 0-10 mm (Control Tissue for Sample 70)

[0931] Seeds of Arabidopsis thaliana heterozygous for thefertilization—independent endosperml (fie1) [Ohad et al., 1996; ecotype Landsberg erecta (Ler)] are sown in pots and left at 4° C. for two to three days to vernalize. Kiyosue et al. (1999) subsequently determined that fie1 was allelic to the gametophytic maternal effect mutant medea (Grossniklaus et al., 1998). Imbibed seeds are then transferred to a growth chamber. Plants are grown under long-day (16 hr light: 8 hr dark) conditions, 7000-8000 LUX light intensity, 70% humidity, and 22° C. temperature. 1-2 siliques (fruits) bearing developing seeds just prior to dessication [9 days after flowering (DAF)] are selected from each plant and are hand-dissected to identify wild-type, mea/+heterozygotes, and mea/mea homozygous mutant plants. At this stage, homozygous mealmea plants produce short siliques that contain >70% aborted seed and can be distinguished from those produced by wild-type (100% viable seed) and mea/+heterozygous (50% viable seed) plants (Ohad et al., 1996; Grossniklaus et al., 1998; Kiyosue et al., 1999). Siliques 0-10 mm in length containing developing seeds 0-9 DAF produced by segregating wild-type plants are opened and the seeds removed. The remaining tissues (pods minus seed) are harvested and flash frozen in liquid nitrogen.

(d) Arabidopsis Seeds

[0932] Fruits (Pod+Seed) 0-5 mm

[0933] Seeds of Arabidopsis thaliana (ecotype Wassilewskija) are sown in pots and left at 4° C. for two to three days to vernalize. They are then transferred to a growth chamber. Plants are grown under long-day (16 hr light: 8 hr dark) conditions, 7000-8000 LUX light intensity, 70% humidity, and 22° C. temperature. 3-4 siliques (fruits) bearing developing seeds are selected from at least 3 plants and are hand-dissected to determine what developmental stage(s) is represented by the enclosed embryos. Description of the stages of Arabidopsis embryogenesis used in this determination were summarized by Bowman (1994). Silique lengths are then determined and used as an approximate determinant for embryonic stage. Siliques 0-5 mm in length containing post fertilization through pre-heart stage [0-72 hours after fertilization (HAF)] embryos are harvested and flash frozen in liquid nitrogen.

[0934] Fruits(Pod+Seed) 5-10 mm

[0935] Seeds of Arabidopsis thaliana (ecotype Wassilewskija) are sown in pots and left at 4° C. for two to three days to vernalize. They are then transferred to a growth chamber. Plants are grown under long-day (16 hr light: 8 hr dark) conditions, 7000-8000 LUX light intensity, 70% humidity, and 22° C. temperature. 3-4 siliques (fruits) bearing developing seeds were selected from at least 3 plants and are hand-dissected to determine what developmental stage(s) are represented by the enclosed embryos. Description of the stages of Arabidopsis embryogenesis used in this determination are summarized by Bowman (1994). Silique lengths are then determined and used as an approximate determinant for embryonic stage. Siliques 5-10 mm in length containing heart- through early upturned-U-stage [72-120 hours after fertilization (HAF)] embryos are harvested and flash frozen in liquid nitrogen.

[0936] Fruits(Pod+Seed) >10 mm

[0937] Seeds of Arabidopsis thaliana (ecotype Wassilewskija) are sown in pots and left at 4° C. for two to three days to vernalize. They are then transferred to a growth chamber. Plants are grown under long-day (16 hr light: 8 hr dark) conditions, 7000-8000 LUX light intensity, 70% humidity, and 22° C. temperature. 3-4 siliques (fruits) bearing developing seeds are selected from at least 3 plants and were hand-dissected to determine what developmental stage(s) are represented by the enclosed embryos. Description of the stages of Arabidopsis embryogenesis used in this determination were summarized by Bowman (1994). Silique lengths are then determined and used as an approximate determinant for embryonic stage. Siliques >10 mm in length containing green, late upturned-U- stage [>120 hours after fertilization (HAF)-9 days after flowering (DAF)] embryos are harvested and flash frozen in liquid nitrogen.

Green Pods 5-10 mm (Control Tissue for Samples 72-74)

[0938] Seeds of Arabidopsis thaliana (ecotype Wassilewskija) are sown in pots and left at 4° C. for two to three days to vernalize. They are then transferred to a growth chamber. Plants are grown under long-day (16 hr light: 8 hr dark) conditions, 7000-8000 LUX light intensity, 70% humidity, and 22° C. temperature. 3-4 siliques (fruits) bearing developing seeds are selected from at least 3 plants and are hand-dissected to determine what developmental stage(s) are represented by the enclosed embryos. Description of the stages of Arabidopsis embryogenesis used in this determination are summarized by Bowman (1994). Silique lengths are then determined and used as an approximate determinant for embryonic stage. Green siliques 5-10 mm in length containing developing seeds 72-120 hours after fertilization (HAF)] are opened and the seeds removed. The remaining tissues (green pods minus seed) were harvested and flash frozen in liquid nitrogen.

Green Seeds from Fruits >10 mm

[0939] Seeds of Arabidopsis thaliana (ecotype Wassilewskija) are sown in pots and left at 4° C. for two to three days to vernalize. They are then transferred to a growth chamber. Plants are grown under long-day (16 hr light: 8 hr dark) conditions, 7000-8000 LUX light intensity, 70% humidity, and 22° C. temperature. 3-4 siliques (fruits) bearing developing seeds are selected from at least 3 plants and are hand-dissected to determine what developmental stage(s) are represented by the enclosed embryos. Description of the stages of Arabidopsis embryogenesis used in this determination were summarized by Bowman (1994). Silique lengths are then determined and used as an approximate determinant for embryonic stage. Green siliques >10 mm in length containing developing seeds up to 9 days after flowering (DAF)] are opened and the seeds removed and harvested and flash frozen in liquid nitrogen.

[0940] Brown Seeds from Fruits >10 mm

[0941] Seeds of Arabidopsis thaliana (ecotype Wassilewskija) are sown in pots and left at 4° C. for two to three days to vernalize. They are then transferred to a growth chamber. Plants are grown under long-day (16 hr light: 8 hr dark) conditions, 7000-8000 LUX light intensity, 70% humidity, and 22° C. temperature. 3-4 siliques (fruits) bearing developing seeds are selected from at least 3 plants and are hand-dissected to determine what developmental stage(s) are represented by the enclosed embryos. Description of the stages of Arabidopsis embryogenesis used in this determination were summarized by Bowman (1994). Silique lengths are then determined and used as an approximate determinant for embryonic stage. Yellowing siliques >10 mm in length containing brown, dessicating seeds >11 days after flowering (DAF)] are opened and the seeds removed and harvested and flash frozen in liquid nitrogen.

[0942] Green/Brown Seeds from Fruits >10 mm

[0943] Seeds of Arabidopsis thaliana (ecotype Wassilewskija) are sown in pots and left at 4° C. for two to three days to vernalize. They were then transferred to a growth chamber. Plants are grown under long-day (16 hr light: 8 hr dark) conditions, 7000-8000 LUX light intensity, 70% humidity, and 22° C. temperature. 3-4 siliques (fruits) bearing developing seeds are selected from at least 3 plants and are hand-dissected to determine what developmental stage(s) are represented by the enclosed embryos. Description of the stages of Arabidopsis embryogenesis used in this determination were summarized by Bowman (1994). Silique lengths are then determined and used as an approximate determinant for embryonic stage. Green siliques >10 mm in length containing both green and brown seeds >9 days after flowering (DAF)] are opened and the seeds removed and harvested and flash frozen in liquid nitrogen.

[0944] Mature Seeds (24 Hours After Imbibition)

[0945] Mature dry seeds of Arabidopsis thaliana (ecotype Wassilewskija) are sown onto moistened filter paper and left at 4° C. for two to three days to vernalize. Imbibed seeds are then transferred to a growth chamber [16 hr light: 8 hr dark conditions, 7000-8000 LUX light intensity, 70% humidity, and 22° C. temperature], the emerging seedlings harvested after 48 hours and flash frozen in liquid nitrogen.

[0946] Mature Seeds (Dry)

[0947] Seeds of Arabidopsis thaliana (ecotype Wassilewskija) are sown in pots and left at 4° C. for two to three days to vernalize. They are then transferred to a growth chamber. Plants are grown under long-day (16 hr light: 8 hr dark) conditions, 7000-8000 LUX light intensity, 70% humidity, and 22° C. temperature and taken to maturity. Mature dry seeds are collected, dried for one week at 28° C., and vernalized for one week at 4° C. before use as a source of RNA.

[0948] Ovules(Ler-pi)

[0949] Seeds of Arabidopsis thaliana heterozygous for pistillata (pi) (ecotype Landsberg erecta (Ler)) are sown in pots and left at 4° C. for two to three days to vernalize. They are then transferred to a growth chamber. Plants are grown under long-day (16 hr light: 8 hr dark) conditions, 7000-8000 LUX light intensity, 76% humidity, and 24° C. temperature. Inflorescences are harvested from seedlings about 40 days old. The inflorescences are cut into small pieces and incubated in the following enzyme solution (pH 5) at room temperature for 0.5-1 hr.: 0.2% pectolyase Y-23, 0.04% pectinase, 5 mM MES, 3% Sucrose and MS salts (1900 mg/l KNO₃, 1650 mg/l NH₄NO₃, 370 mg/l MgSO₄.7 H₂O, 170 mg/l KH₂PO₄,440 mg/l CaCl₂.2 H₂O, 6.2 mg/l H₂BO₃, 15.6 mg/l MnSO₄.4 H₂O, 8.6 mg/l ZnSO₄.7 H₂O, 0.25 mg/l NaMoO₄. 2 H₂O, 0.025 mg/l CuCO₄.5 H₂O, 0.025 mg/l CoCl₂.6 H₂O, 0.83 mg/l KI, 27.8 mg/l FeSO₄. 7 H₂O, 37.3 mg/l Disodium EDTA, pH 5.8). At the end of the incubation the mixture of inflorescence material and enzyme solution is passed through a size 60 sieve and then through a sieve with a pore size of 125 μm. Ovules greater than 125 μm in diameter are collected, rinsed twice in B5 liquid medium (2500 mg/l KNO₃, 250 mg/l MgSO₄.7 H₂O, 150 mg/l NaH2PO4. H₂O, 150 mg/l CaCl₂.2 H₂O, 134 mg/l (NH4)2 CaCl₂.SO₄, 3 mg/i H₂BO₃, 10 mg/l MnSO₄. 4 H₂O, 2 ZnSO₄.7 H₂O, 0.25 mg/l NaMoO₄.2 H₂O, 0.025 mg/l CuCO₄.5 H₂O, 0.025 mg/l CoCl₂.6 H₂O, 0.75 mg/l KI, 40 mg/l EDTA sodium ferric salt, 20 g/l sucrose, 10 mg/l Thiamine hydrochloride, 1 mg/l Pyridoxine hydrochloride, 1 mg/l Nicotinic acid, 100 mg/l myo-inositol, pH 5.5)), rinsed once in deionized water and flash frozen in liquid nitrogen. The supernatant from the 125 μm sieving is passed through subsequent sieves of 50 μm and 32 μm. The tissue retained in the 32 μm sieve is collected and mRNA prepared for use as a control.

(e) Auxin Responsive (NAA)

[0950] Seeds of Arabidopsis thaliana (ecotype Wassilewskija) are sown in trays and left at 4° C. for 4 days to vernalize. They are then transferred to a growth chamber having 16 hr light/8 hr dark, 13,000 LUX, 70% humidity, 20° C. and watered twice a week with 1 L of 1×Hoagland's solution (recipe recited in Feldmann et al., (1987) Mol. Gen. Genet. 208: 1-9 and described as complete nutrient solution). Approximately 1,000 14 day old plants are spayed with 200-250 mls of 100 μM NAA in a 0.02% solution of the detergent Silwet L-77. Aerial tissues (everything above the soil line) are harvested within a 15 to 20 minute time period 1 hr and 6 hrs after treatment, flash-frozen in liquid nitrogen and stored at ⁻80° C.

[0951] Seeds of maize hybrid 35A (Pioneer) are sown in water-moistened sand in flats (10 rows, 5-6 seed/row) and covered with clear, plastic lids before being placed in a growth chamber having 16 hr light (25° C.)/8 hr dark (20° C.), 75% relative humidity and 13,000-14,000 LUX. Covered flats are watered every three days for 7 days. Seedlings are carefully removed from the sand and placed in 1 -liter beakers with 100 μM NAA for treatment. Control plants are treated with water. After 6 hr and 24 hr, aerial and root tissues are separated and flash frozen in liquid nitrogen prior to storage at ⁻80° C.

(f) Brassinosteroid Responsive (Br, Bz)

[0952] Two separate experiments are performed, one with epi-brassinolide and one with the brassinosteroid biosynthetic inhibitor brassinazole. In the epi-brassinolide experiments, seeds of wild-type Arabidopsis thaliana (ecotype Wassilewskija) and the brassinosteroid biosynthetic mutant dwf4-1 are sown in trays and left at 4° C. for 4 days to vernalize. They are then transferred to a growth chamber having 16 hr light/8 hr dark, 11,000 LUX, 70% humidity and 22° C. temperature. Four week old plants are spayed with a 1 μM solution of epi-brassinolide and shoot parts (unopened floral primordia and shoot apical meristems) harvested three hours later. Tissue is flash-frozen in liquid nitrogen and stored at ⁻80° C.

[0953] In the brassinazole experiments, seeds of wild-type Arabidopsis thaliana (ecotype Wassilewskija) are grown as described above. Four week old plants are sprayed with a 1 μM solution of brassinazole and shoot parts (unopened floral primordia and shoot apical meristems) harvested three hours later. Tissue is flash-frozen in liquid nitrogen and stored at ⁻80° C.

[0954] In addition to the spray experiments, tissue is prepared from two different mutants; (1) a dwf4-1 knock out mutant and (2) a mutant overexpressing the dwf4-1 gene Seeds of wild-type Arabidopsis thaliana (ecotype Wassilewskija) and of the dwf4-1 knock out and overexpressor mutants are sown in trays and left at 4° C. for 4 days to vernalize. They are then transferred to a growth chamber having 16 hr light/8 hr dark, 11,000 LUX, 70% humidity and 22° C. temperature. Tissue from shoot parts (unopened floral primordia and shoot apical meristems) is flash-frozen in liquid nitrogen and stored at ⁻80° C.

[0955] Another experiment is completed with seeds of Arabidopsis thaliana (ecotype Wassilewskija) that are sown in trays and left at 4° C. for 4 days to vernalize. They are then transferred to a growth chamber. Plants are grown under long-day (16 hr light: 8 hr. dark) conditions, 13,000 LUX light intensity, 70% humidity, 20° C. temperature and watered twice a week with 1 L 1×Hoagland's solution (recipe recited in Feldmann et al., (1987) Mol. Gen. Genet. 208: 1-9 and described as complete nutrient solution). Approximately 1,000 14 day old plants are spayed with 200-250 mls of 0.1 μM Epi-Brassinolite in 0.02% solution of the detergent Silwet L-77. At 1 hr. and 6 hrs. after treatment aerial tissues are harvested within a 15 to 20 minute time period and flash-frozen in liquid nitrogen.

[0956] Seeds of maize hybrid 35A (Pioneer) are sown in water-moistened sand in flats (10 rows, 5-6 seed/row) and covered with clear, plastic lids before being placed in a growth chamber having 16 hr light (25° C.)/8 hr dark (20° C.), 75% relative humidity and 13,000-14,000 LUX. Covered flats are watered every three days for 7 days. Seedlings are carefully removed from the sand and placed in 1 -liter beakers with 0.1 μM epi-brassinolide for treatment. Control plants are treated with distilled deionized water. After 24 hr, aerial and root tissues are separated and flash frozen in liquid nitrogen prior to storage at ⁻80° C.

(g) Cold Shock Treatment

[0957] Seeds of Arabidopsis thaliana (ecotype Wassilewskija) are sown in trays and left at 4° C. for three days to vernalize before being transferred to a growth chamber having 16 hr light/8 hr dark, 12,000-14,000 LUX, 20° C. and 70% humidity. Fourteen day old plants are transferred to a 4° C. dark growth chamber and aerial tissues are harvested 1 hour and 6 hours later. Control plants are maintained at 20° C. and covered with foil to avoid exposure to light. Tissues are flash-frozen in liquid nitrogen and stored at 80° C.

[0958] Seeds of maize hybrid 35A (Pioneer) are sown in water-moistened sand in flats (10 rows, 5-6 seed/row) and covered with clear, plastic lids before being placed in a growth chamber having 16 hr light (25° C.)/8 hr dark (20° C.), 75% relative humidity and 13,000-14,000 LUX. Covered flats are watered every three days for 7 days. Seedlings are carefully removed from the sand and placed in 1-liter beakers containing 4° C. water for treatment. Control plants are treated with water at 25° C. After 1 hr and 6 hr aerial and root tissues are separated and flash frozen in liquid nitrogen prior to storage at −80° C.

(h) Cytokinin (BA)

[0959] Seeds of Arabidopsis thaliana (ecotype Wassilewskija) are sown in trays and left at 4° C. for 4 days to vernalize. They are then transferred to a growth chamber having 16 hr light/8 hr dark, 13,000 LUX, 70% humidity, 20° C. temperature and watered twice a week with 1 L of 1X Hoagland's solution. Approximately 1,000 14 day old plants are spayed with 200-250 mls of 100 μM BA in a 0.02% solution of the detergent Silwet L-77. Aerial tissues (everything above the soil line) are harvested within a 15 to 20 minute time period 1 hr and 6 hrs after treatment, flash-frozen in liquid nitrogen and stored at ⁻80° C.

[0960] Seeds of maize hybrid 35A (Pioneer) are sown in water-moistened sand in flats (10 rows, 5-6 seed/row) and covered with clear, plastic lids before being placed in a growth chamber having 16 hr light (25° C.)/8 hr dark (20° C.), 75% relative humidity and 13,000-14,000 LUX. Covered flats were watered every three days for 7 days. Seedlings are carefully removed from the sand and placed in 1-liter beakers with 100 μM BA for treatment. Control plants are treated with water. After 6 hr, aerial and root tissues are separated and flash frozen in liquid nitrogen prior to storage at ⁻80° C.

(i) Drought Stress

[0961] Seeds of Arabidopsis thaliana (ecotype Wassilewskija) are sown in pots and left at 4° C. for three days to vernalize before being transferred to a growth chamber having 16 hr light/8 hr dark, 150,000-160,000 LUX, 20° C. and 70% humidity. After 14 days, aerial tissues are cut and left to dry on 3MM Whatman paper in a petri-plate for 1 hour and 6 hours. Aerial tissues exposed for 1 hour and 6 hours to 3 MM Whatman paper wetted with IX Hoagland's solution serve as controls. Tissues are harvested, flash-frozen in liquid nitrogen and stored at −80° C.

[0962] Alternatively, Arabidopsis thaliana (ecotype Wassilewskija) seed is vernalized at 4° C. for 3 days before sowing in Metromix soil type 350. Flats are placed in a growth chamber with 23° C., 16 hr light/8 hr. dark, 80% relative humidity, ˜13,000 LUX for germination and growth. Plants are watered with 1 -1.5 L of water every four days. Watering is stopped 16 days after germination for the treated samples, but continues for the control samples. Rosette leaves and stems, flowers and siliques are harvested 2d, 3d, 4d, 5d, 6d and 7d after watering is stopped. Tissue is flash frozen in liquid nitrogen and kept at ⁻80° C. until RNA is isolated. Flowers and siliques are also harvested on day 8 from plants that had undergone a 7 d drought treatment followed by 1 day of watering. Control plants (whole plants) are harvested after 5 weeks, flash frozen in liquid nitrogen and stored as above.

[0963] Seeds of maize hybrid 35A (Pioneer) are sown in water-moistened sand in flats (10 rows, 5-6 seed/row) and covered with clear, plastic lids before being placed in a growth chamber having 16 hr light (25° C.)/8 hr dark (20° C.), 75% relative humidity and 13,000-14,000 LUX. Covered flats are watered every three days for 7 days. Seedlings are carefully removed from the sand and placed in empty 1-liter beakers at room temperature for treatment. Control plants are placed in water. After 1 hr, 6 hr, 12 hr and 24 hr aerial and root tissues are separated and flash frozen in liquid nitrogen prior to storage at -80° C.

(i) Flowers (Green, White or Buds)

[0964] Approximately 10 μl of Arabidopsis thaliana seeds (ecotype Wassilewskija) are sown on 350 soil (containing 0.03% marathon) and vernalized at 4° C. for 3 days. Plants are then grown at room temperature under fluorescent lighting until flowering. Flowers are harvested after 28 days in three different categories. Buds that had not opened at all and are completely green are categorized as “flower buds” (also referred to as green buds by the investigator). Buds that had started to open, with white petals emerging slightly are categorized as “green flowers” (also referred to as white buds by the investigator). Flowers that are mostly opened (with no silique elongation) with white petals completely visible are categorized as “white flowers” (also referred to as open flowers by the investigator). Buds and flowers are harvested with forceps, flash frozen in liquid nitrogen and stored at ⁻80° C. until RNA is isolated.

(k) Germination

[0965] Arabidopsis thaliana seeds (ecotype Wassilewskija) is sterilized in bleach and rinsed with sterile water. The seeds are placed in 100 mm petri plates containing soaked autoclaved filter paper. Plates are foil-wrapped and left at 4° C. for 3 nights to vernalize. After cold treatment, the foil is removed and plates are placed into a growth chamber having 16 hr light/8 hr dark cycles, 23° C., 70% relative humidity and ˜1,000 lux. Seeds are collected 1 d, 2 d, 3 d and 4 d later, flash frozen in liquid nitrogen and stored at −80° C. until RNA is isolated.

(1) Gibberillic Acid (GA)

[0966] Seeds of Arabidopsis thaliana (ecotype Wassilewskija) are sown in trays and left at 4° C. for 4 days to vernalize. They are then transferred to a growth chamber having 16 hr light/8 hr. dark, 13,000 LUX, 70% humidity, 20° C. and watered twice a week with 1 L of IX Hoagland's solution. Approximately 1,000 14 day old plants are sprayed with 200-250 mls of 100 μM gibberillic acid in a 0.02% solution of the detergent Silwet L-77. At 1 hr. and 6 hrs. after treatment, aerial tissues (everything above the soil line) are harvested within a 15 to 20 minute time period, flash-frozen in liquid nitrogen and stored at -80° C.

[0967] Alternatively, seeds of Arabidopsis thaliana (ecotype Ws) are sown in Metro-mix soil type 350 and left at 4° C. for 3 days to vernalize. They are then transferred to a growth chamber having 16 hr light/8 hr dark, 13,000 LUX, 80% humidity, 20° C. temperature and watered every four days with 1.5 L water. Fourteen (14) days after germination, plants are sprayed with 100 μM gibberillic acid or with water. Aerial tissues are harvested 1 hr 6 hrs 12 hrs and 24 hrs post-treatment, flash frozen and stored at -80° C.

[0968] Seeds of maize hybrid 35A (Pioneer) are sown in water-moistened sand in flats (10 rows, 5-6 seed/row) and covered with clear, plastic lids before being placed in a growth chamber having 16 hr light (25° C.)/8 hr dark (20° C.), 75% relative humidity and 13,000-14,000 LUX. Covered flats are watered every three days for 7 days. Seedlings are carefully removed from the sand and placed in 1 -liter beakers with 100 tM gibberillic acid for treatment. Control plants are treated with water. After 1 hr, 6 hr and 12 hr, aerial and root tissues were separated and flash frozen in liquid nitrogen prior to storage at -80° C.

(m) Heat Shock Treatment

[0969] Seeds of Arabidopsis thaliana (ecotype Wassilewskija) are sown in trays and left at 4° C. for three days to vernalize before being transferred to a growth chamber with 16 hr light/8 hr dark, 12,000-14,000 LUX, 70% humidity and 20° C., fourteen day old plants are transferred to a 42° C. growth chamber and aerial tissues are harvested 1 hr and 6 hr after transfer. Control plants are left at 20° c and aerial tissues are harvested. Tissues are flash-frozen in liquid nitrogen and stored at ⁻80° c.

[0970] Seeds of maize hybrid 35A (Pioneer) are sown in water-moistened sand in flats (10 rows, 5-6 seed/row) and covered with clear, plastic lids before being placed in a growth chamber having 16 hr light (25° C.)/8 hr dark (20° C.), 75% relative humidity and 13,000-14,000 LUX. Covered flats are watered every three days for 7 days. Seedlings are carefully removed from the sand and placed in 1-liter beakers containing 42° C. water for treatment. Control plants are treated with water at 25° C. After 1 hr and 6 hr aerial and root tissues are separated and flash frozen in liquid nitrogen prior to storage at -80° C.

(n) Herbicide Treatment

[0971] Arabidopsis thaliana (ecotype Wassilewskija) seeds are sterilized for 5 min. with 30% bleach, 50 μl Triton in a total volume of 50 ml. Seeds are vernalized at 4° C. for 3 days before being plated onto GM agar plates at a density of about 144 seeds per plate. Plates are incubated in a Percival growth chamber having 16 hr light/8 hr dark, 80% relative humidity, 22 ° C. and 11,000 LUX for 14 days.

[0972] Plates are sprayed (˜0.5 mls/plate) with water, Finale (1.128 g/L), Glean (1.88 g/L), RoundUp (0.01 g/L) or Trimec (0.08 g/L). Tissue is collected and flash frozen in liquid nitrogen at the following time points: 0, 1, 2, 4, 8, 12, and 24 hours. Frozen tissue is stored at ⁻80° C. prior to RNA isolation.

(o) Imbibed Seed

[0973] Seeds of maize hybrid 35A (Pioneer) are sown in water-moistened sand in covered flats (10 rows, 5-6 seed/row) and covered with clear, plastic lids before being placed in a growth chamber having 16 hr light (25° C.)/8 hr dark (20° C.), 75% relative humidity and 13,000-14,00 LUX. One day after sowing, whole seeds are flash frozen in liquid nitrogen prior to storage at −80° C. Two days after sowing, embryos and endosperm are isolated and flash frozen in liquid nitrogen prior to storage at −80° C. On days 3-6, aerial tissues, roots and endosperm are isolated and flash frozen in liquid nitrogen prior to storage at ⁻80° C.

(p) Leaf Mutant 3642:

[0974] Mutant 3642 is a recessive mutation that causes abnormal leaf development. The leaves of mutant 3642 plants are characterized by leaf twisting and irregular leaf shape. Mutant 3642 plants also exhibit abnormally shaped floral organs which results in reduced fertility.

[0975] Seed segregating for the mutant phenotype are sown in Metro-mix 350 soil and grown in a Conviron growth chamber with watering by sub-irrigation twice a week. Environmental conditions are set at 20 degrees Celsius, 70% humidity with an 8 hour day, 16 hour night light regime. Plants are harvested after 4 weeks of growth and the entire aerial portion of the plant is harvested and immediately frozen in liquid nitrogen and stored at ⁻80° C. Mutant phenotype plants are harvested separately from normal phenotype plants, which serve as the control tissue.

(g) Methyl Jasmonate (MeJ)

[0976] Seeds of Arabidopsis thaliana (ecotype Wassilewskija) are sown in trays and left at 4° C. for 4 days to vernalize before being transferred to a growth chamber having 16 hr light/8 hr. dark, 13,000 LUX, 70% humidity, 20° C. temperature and watered twice a week with 1 L of a 1X Hoagland's solution. Approximately 1,000 14 day old plants are sprayed with 200-250 mls of 0.001% methyl jasmonate in a 0.02% solution of the detergent Silwet L-77. At 1 hr and 6 hrs after treatment, whole seedlings, including roots, are harvested within a 15 to 20 minute time period, flash-frozen in liquid nitrogen and stored at -80° C.

[0977] Seeds of maize hybrid 35A (Pioneer) are sown in water-moistened sand in flats (10 rows, 5-6 seed/row) and covered with clear, plastic lids before being placed in a growth chamber having 16 hr light (25° C.)/8 hr dark (20° C.), 75% relative humidity and 13,000-14,000 LUX. Covered flats are watered every three days for 7 days. Seedlings are carefully removed from the sand and placed in 1-liter beakers with 0.001% methyl jasmonate for treatment. Control plants are treated with water. After 24 hr, aerial and root tissues are separated and flash frozen in liquid nitrogen prior to storage at ⁻80° C.

(r) Nitric Oxide Treatment (Nanp)

[0978] Seeds of Arabidopsis thaliana (ecotype Wassilewskija) are sown in trays and left at 4° C. for three days to vernalize before being transferred to a growth chamber having 16 hr light/8 hr dark, 12,000-14,000 LUX, 20° C. and 70% humidity. Fourteen day old plants are sprayed with 5 mM sodium nitroprusside in a 0.02% Silwett L-77 solution. Control plants are sprayed with a 0.02% Silwett L-77 solution. Aerial tissues are harvested 1 hour and 6 hours after spraying, flash-frozen in liquid nitrogen and stored at ⁻80° C.

[0979] Seeds of maize hybrid 3 5A (Pioneer) are sown in water-moistened sand in flats (10 rows, 5-6 seed/row) and covered with clear, plastic lids before being placed in a growth chamber having 16 hr light (25° C.)/8 hr dark (20° C.), 75% relative humidity and 13,000-14,000 LUX. Covered flats are watered every three days for 7 days. Seedlings are carefully removed from the sand and placed in 1-liter beakers with 5 mM nitroprusside for treatment. Control plants are treated with water. After 1 hr, 6 hr and 12 hr, aerial and root tissues are separated and flash frozen in liquid nitrogen prior to storage at ⁻80° C.

(s) Nitrogen: Low to High

[0980] Arabidopsis thaliana (ecotype Wassilewskija) seeds are sown on flats containing 4 L of a 1:2 mixture of Grace Zonolite vermiculite and soil. Flats are watered with 3 L of water and vernalized at 4° C. for five days. Flats are placed in a Conviron growth chamber having 16 hr light/8 hr dark at 20° C., 80% humidity and 17,450 LUX. Flats are watered with approximately 1.5 L of water every four days. Mature, bolting plants (24 days after germination) are bottom treated with 2 L of either a control (100 mM mannitol pH 5.5) or an experimental (50 mM ammonium nitrate, pH 5.5) solution. Roots, leaves and siliques are harvested separately 30, 120 and 240 minutes after treatment, flash frozen in liquid nitrogen and stored at ⁻80° C.

[0981] Hybrid maize seed (Pioneer hybrid 35A19) are aerated overnight in deionized water. Thirty seeds are plated in each flat, which contained 4 liters of Grace zonolite vermiculite. Two liters of water are bottom fed and flats were kept in a Conviron growth chamber with 16 hr light/8 hr dark at 20° C. and 80% humidity. Flats are watered with 1 L of tap water every three days. Five day old seedlings are treated as described above with 2 L of either a control (100 mM mannitol pH 6.5) solution or 1 L of an experimental (50 mM ammonium nitrate, pH 6.8) solution. Fifteen shoots per time point per treatment are harvested 10, 90 and 180 minutes after treatment, flash frozen in liquid nitrogen and stored at ⁻80° C.

[0982] Alternatively, seeds of Arabidopsis thaliana (ecotype Wassilewskija) are left at 4° C. for 3 days to vernalize. They are then sown on vermiculite in a growth chamber having 16 hours light/8 hours dark, 12,000-14,000 LUX, 70% humidity, and 20° C. They are bottom-watered with tap water, twice weekly. Twenty-four days old plants are sprayed with either water (control) or 0.6% ammonium nitrate at 4 EL/cm of tray surface. Total shoots and some primary roots are cleaned of vermiculite, flash-frozen in liquid nitrogen and stored at ⁻80° C.

(t) Nitrogen High to Low

[0983] Wild type Arabidopsis thaliana seeds (ecotype Wassilewskija) are surface sterilized with 30% Clorox, 0.1% Triton X-100 for 5 minutes. Seeds are then rinsed with 4-5 exchanges of sterile double distilled deionized water. Seeds are vernalized at 4° C. for 2-4 days in darkness. After cold treatment, seeds are plated on modified 1×MS media (without NH4NO₃ or KNO₃), 0.5% sucrose, 0.5g/L MES pH5.7, 1% phytagar and supplemented with KNO₃ to a final concentration of 60 mM (high nitrate modified 1X MS media). Plates are then grown for 7 days in a Percival growth chamber at 22° C. with 16 hr. light/8 hr dark.

[0984] Germinated seedlings are then transferred to a sterile flask containing 50 mL of high nitrate modified 1×MS liquid media. Seedlings are grown with mild shaking for 3 additional days at 22° C. in 16 hr. light/8 hr dark (in a Percival growth chamber) on the high nitrate modified 1×MS liquid media.

[0985] After three days of growth on high nitrate modified 1×MS liquid media, seedlings are transferred either to a new sterile flask containing 50 mL of high nitrate modified 1×MS liquid media or to low nitrate modified 1×MS liquid media (containing 20 μM KNO₃). Seedlings are grown in these media conditions with mild shaking at 22° C. in 16 hr light/ 8 hr dark for the appropriate time points and whole seedlings harvested for total RNA isolation via the Trizol method (LifeTech.). The time points used for the microarray experiments are 10 min. and 1 hour time points for both the high and low nitrate modified 1×MS media.

[0986] Alternatively, seeds that are surface sterilized in 30% bleach containing 0.1 % Triton X-00 and further rinsed in sterile water, are planted on MS agar, (0.5% sucrose) plates containing 50 mM KNO₃ (potassium nitrate). The seedlings are grown under constant light (3500 LUX) at 22° C. After 12 days, seedlings are transferred to MS agar plates containing either 1 mM KNO₃ or 50 mM KNO3. Seedlings transferred to agar plates containing 50 mM KNO₃ are treated as controls in the experiment. Seedlings transferred to plates with 1mM KNO₃ are rinsed thoroughly with sterile MS solution containing 1 mM KNO₃. There are ten plates per transfer. Root tissue was collected and frozen in 15 mL Falcon tubes at various time points which included 1 hour, 2 hours, 3 hours, 4 hours, 6 hours, 9 hours, 12 hours, 16 hours, and 24 hours.

[0987] Maize 35A19 Pioneer hybrid seeds are sown on flats containing sand and grown in a Conviron growth chamber at 25° C., 16 hr light/8 hr dark, -13,000 LUX and 80% relative humidity. Plants are watered every three days with double distilled deionized water. Germinated seedlings are allowed to grow for 10 days and are watered with high nitrate modified 1×MS liquid media (see above). On day 11, young corn seedlings are removed from the sand (with their roots intact) and rinsed briefly in high nitrate modified I X MS liquid media. The equivalent of half a flat of seedlings is then submerged (up to their roots) in a beaker containing either 500 mL of high or low nitrate modified 1×MS liquid media (see above for details).

[0988] At appropriate time points, seedlings are removed from their respective liquid media, the roots separated from the shoots and each tissue type flash frozen in liquid nitrogen and stored at ⁻80° C. This is repeated for each time point. Total RNA is isolated using the Trizol method (see above) with root tissues only.

[0989] Corn root tissues isolated at the 4 hr and 16 hr time points are used for the microarray experiments. Both the high and low nitrate modified 1×MS media are used.

(u) Osmotic Stress (PEG)

[0990] Seeds of Arabidopsis thaliana (ecotype Wassilewskija) are sown in trays and left at 4° C. for three days to vernalize before being transferred to a growth chamber having 16 hr light/8 hr dark, 12,000-14,000 LUX, 20° C., and 70% humidity. After 14 days, the aerial tissues are cut and placed on 3 MM Whatman paper in a petri-plate wetted with 20% PEG (polyethylene glycol-Mr 8,000) in 1×Hoagland's solution. Aerial tissues on 3 MM Whatman paper containing 1×Hoagland's solution alone serve as the control. Aerial tissues are harvested at 1 hour and 6 hours after treatment, flash-frozen in liquid nitrogen and stored at ⁻80° C.

[0991] Seeds of maize hybrid 35A (Pioneer) are sown in water-moistened sand in flats (10 rows, 5-6 seed/row) and covered with clear, plastic lids before being placed in a growth chamber having 16 hr light (25° C.)/8 hr dark (20° C.), 75% relative humidity and 13,000-14,000 LUX. Covered flats are watered every three days for 7 days. Seedlings are carefully removed from the sand and placed in 1-liter beakers with 20% PEG (polyethylene glycol-Mr 8,000) for treatment. Control plants are treated with water. After 1 hr and 6 hr aerial and root tissues are separated and flash frozen in liquid nitrogen prior to storage at ⁻80° C.

[0992] Seeds of maize hybrid 35A (Pioneer) are sown in water-moistened sand in flats (10 rows, 5-6 seed/row) and covered with clear, plastic lids before being placed in a growth chamber having 16 hr light (25° C.)/8 hr dark (20° C.), 75% relative humidity and 13,000-14,000 LUX. Covered flats are watered every three days for 7 days. Seedlings are carefully removed from the sand and placed in 1 -liter beakers with 15OmM NaCl for treatment. Control plants were treated with water. After 1 hr, 6hr, and 24 hr aerial and root tissues are separated and flash frozen in liquid nitrogen prior to storage at ⁻80° C.

(v) Oxidative Stress-Hydrogen Peroxide Treatment (H₂O₂)

[0993] Seeds of Arabidopsis thaliana (ecotype Wassilewskija) are sown in trays and left at 4° C. for three days to vernalize before being transferred to a growth chamber having 16 hr light/8 hr dark, 12,000-14,000 LUX, 20° C. and 70% humidity. Fourteen day old plants are sprayed with 5 mM H₂O₂ (hydrogen peroxide) in a 0.02% Silwett L-77 solution. Control plants are sprayed with a 0.02% Silwett L-77 solution. Aerial tissues are harvested 1 hour and 6 hours after spraying, flash-frozen in liquid nitrogen and stored at ⁻80° C.

[0994] Seeds of maize hybrid 35A (Pioneer) are sown in water-moistened sand in flats (10 rows, 5-6 seed/row) and covered with clear, plastic lids before being placed in a growth chamber having 16 hr light (25° C.)/8 hr dark (20° C.), 75% relative humidity and 13,000-14,000 LUX. Covered flats are watered every three days for 7 days. Seedlings are carefully removed from the sand and placed in 1-liter beakers with 5 mM H₂O₂ for treatment. Control plants are treated with water. After 1 hr, 6 hr and 24 hr, aerial and root tissues are separated and flash frozen in liquid nitrogen prior to storage at ⁻80° C.

(w) Protein Degradation

[0995] Arabidopsis thaliana (ecotype Wassilewskija) wild-type and 13B12-1 (homozygous) mutant seed are sown in pots containing Metro-mix 350 soil and incubated at 4° C. for four days. Vernalized seeds are germinated in the greenhouse (16 hr light/8 hr dark) over a 7 day period. Mutant seedlings are sprayed with 0.02% (active ingredient) Finale to confirm their transgenic standing. Plants were grown until the mutant phenotype (either multiple pistils in a single flower and/or multiple branching per node) is apparent. Young inflorescences immediately forming from the multiple-branched stems are cut and flash frozen in liquid nitrogen. Young inflorescences from wild-type plants grown in parallel and under identical conditions are collected as controls. All collected tissue is stored at ⁻80° C. until RNA isolation.

(x) Roots

[0996] Seeds of Arabidopsis thaliana (ecotype Wassilewskija) are sterilized in full strength bleach for less than 5 min., washed more than 3 times in sterile distilled deionized water and plated on MS agar plates. The plates are placed at 4° C. for 3 nights and then placed vertically into a growth chamber having 16 hr light/8 hr dark cycles, 23 ° C., 70% relative humidity and ˜11,000 LUX. After 2 weeks, the roots are cut from the agar, flash frozen in liquid nitrogen and stored at ⁻80° C.

(v) Root Hairless Mutants

[0997] Plants mutant at the rhl gene locus lack root hairs. This mutation is maintained as a heterozygote.

[0998] Seeds of Arabidopsis thaliana (ecotype Landsberg erecta) mutated at the rhl gene locus are sterilized using 30% bleach with 1 ul/ml 20% Triton −X 100 and then vernalized at 4° C. for 3 days before being plated onto GM agar plates. Plates are placed in growth chamber with 16 hr light/8 hr. dark, 23° C., 14,500-15,900 LUX, and 70% relative humidity for germination and growth.

[0999] After 7 days, seedlings are inspected for root hairs using a dissecting microscope. Mutants are harvested and the cotyledons removed so that only root tissue remained. Tissue is then flash frozen in liquid nitrogen and stored at ⁻80° C.

[1000] Arabidopsis thaliana (Landsberg erecta) seedlings grown and prepared as above are used as controls.

[1001] Alternatively, seeds of Arabidopsis thaliana (ecotype Landsberg erecta), heterozygous for the rhll (root hairless) mutation, are surface-sterilized in 30% bleach containing 0.1% Triton X-100 and further rinsed in sterile water. They are then vernalized at 4° C. for 4 days before being plated onto MS agar plates. The plates are maintained in a growth chamber at 24° C. with 16 hr light/8 hr dark for germination and growth. After 10 days, seedling roots that expressed the phenotype (i.e. lacking root hairs) are cut below the hypocotyl junction, frozen in liquid nitrogen and stored at −80° C. Those seedlings with the normal root phenotype (heterozygous or wt) are collected as described for the mutant and used as controls.

(z) Root Tips

[1002] Seeds of Arabidopsis thaliana (ecotype Wassilewskija) are placed on MS plates and vernalized at 4° C. for 3 days before being placed in a 25° C. growth chamber having 16 hr light/8 hr dark, 70% relative humidty and about 3 W/m². After 6 days, young seedlings are transferred to flasks containing B5 liquid medium, 1% sucrose and 0.05 mg/l indole-3-butyric acid. Flasks are incubated at room temperature with 100 rpm agitation. Media is replaced weekly. After three weeks, roots are harvested and incubated for 1 hr with 2% pectinase, 0.2% cellulase, pH 7 before straining through a #80 (Sigma) sieve. The root body material remaining on the sieve (used as the control) is flash frozen and stored at −80° C. until use. The material that passes through the #80 sieve is strained through a #200 (Sigma) sieve and the material remaining on the sieve (root tips) is flash frozen and stored at ⁻80° C. until use. Approximately 10 mg of root tips are collected from one flask of root culture.

[1003] Seeds of maize hybrid 35A (Pioneer) are sown in water-moistened sand in flats (10 rows, 5-6 seed/row) and covered with clear, plastic lids before being placed in a growth chamber having 16 hr light (25° C.)/8 hr dark (20° C..), 75% relative humidity and 13,000-14,000 LUX. Covered flats are watered every three days for 8 days. Seedlings are carefully removed from the sand and the root tips (˜2 mm long) are removed and flash frozen in liquid nitrogen prior to storage at -80° C. The tissues above the root tips (˜1 cm long) are cut, treated as above and used as control tissue.

(aa) Rosette Leaves, Stems, and Siliques

[1004] Arabidopsis thaliana (ecotype Wassilewskija) seed was vernalized at 4° C. for 3 days before sowing in Metro-mix soil type 350. Flats are placed in a growth chamber having 16 hr light/8 hr dark, 80% relative humidity, 23° C. and 13,000 LUX for germination and growth. After 3 weeks, rosette leaves, stems, and siliques are harvested, flash frozen in liquid nitrogen and stored at −80° C. until use. After 4 weeks, siliques (<5 mm, 5-10 mm and >10 mm) are harvested, flash frozen in liquid nitrogen and stored at −80° C. until use. Five week old whole plants (used as controls) are harvested, flash frozen in liquid nitrogen and kept at ⁻80° C. until RNA is isolated.

(bb) Rough Sheath2-R (rs2-R) Mutants (1400-6/S-1 7)

[1005] This experiment is conducted to identify abnormally expressed genes in the shoot apex of rough sheath2-R (rs2-R) mutant plants. rs2 encodes a myb domain DNA binding protein that functions in repression of several shoot apical meristem expressed homeobox genes. Two homeobox gene targets are known for rs2 repression, rough sheath], liguleless 3. The recessive loss of function phenotype of rs2-R homozygous plants is described in Schneeberger et al. 1998, Development 125: 2857-2865.

[1006] The seed stock genetically segregates 1:1 for rs2-R/rs2-R : rs2-R/+

[1007] Preparation of tissue samples: 160 seedlings pooled from 2 and 3 week old plants grown in sand. Growth conditions; Conviron #107 at 12 hr days/12 hr night, 25° C., 75% humidity. Shoot apex was dissected to include leaf three and older.

[1008] 1) rough sheath2-R homozygous (mutant) shoot apex

[1009] 2) rough sheath2-R heterozygous (wild-type, control) shoot apex.

(cc) rt1

[1010] The rt1 allele is a variation of rt1 rootless1 and is recessive. Plants displaying the rt1 phenotype have few or no secondary roots.

[1011] Seed from plants segregating for rt1 are sown on sand and placed in a growth chamber having 16 hr light/8 hr dark, 13,000 LUX, 70% humidity and 20° C. temperature. Plants are watered every three days with tap water. Eleven (11) day old seedlings are carefully removed from the sand, keeping the roots intact. rt1-type seedlings are separated from their wild-type counterparts and the root tissue isolated. Root tissue from normal seedlings (control) and rt1 mutants is flash frozen in liquid nitrogen and stored at ⁻80° C. until use.

(dd) S4 Immature Buds, Inflorescence Meristem

[1012] Seeds of Arabidopsis thaliana (ecotype Wassilewskija) are sown in pots and left at 4° C. for two to three days to vernalize. They are then transferred to a growth chamber. Plants are grown under long-day (16 hr light: 8 hr dark) conditions, 7000-8000 LUX light intensity, 70% humidity, and 22° C. temperature. Inflorescences containing immature floral buds [stages 1-12; Smyth et al., 1990] as well as the inflorescence meristem are harvested and flash frozen in liquid nitrogen

(ee) S5 Flowers (Opened)

[1013] Seeds of Arabidopsis thaliana (ecotype Wassilewskija) are sown in pots and left at 4° C. for two to three days to vernalize. They are then transferred to a growth chamber. Plants are grown under long-day (16 hr light: 8 hr dark) conditions, 7000-8000 LUX light intensity, 70% humidity, and 22° C. temperature. Mature, unpollinated flowers [stages 12-14; Smyth et al. 1990] are harvested and flash frozen in liquid nitrogen.

(ff) S6 Siliques (All Stages)

[1014] Seeds of Arabidopsis thaliana (ecotype Wassilewskija) are sown in pots and left at 4° C. for two to three days to vernalize. They are then transferred to a growth chamber. Plants are grown under long-day (16 hr light: 8 hr dark) conditions, 7000-8000 LUX light intensity, 70% humidity, and 22° C. temperature. Siliques bearing developing seeds containing post fertilization through pre-heart stage [0-72 hours after fertilization (HAF)], heart- through early curled cotyledon stage [72-120 HAF] and late-curled cotyledon stage [>120 HAF] embryos are harvested separately and pooled prior to RNA isolation in a mass ratio of 1:1:1. The tissues are then flash frozen in liquid nitrogen. Bowman (1994) reviews and provides a description of the stages of Arabidopsis embryogenesis used.

(gi) Salicylic Acid (Sa)

[1015] Seeds of Arabidopsis thaliana (ecotype Wassilewskija) are sown in trays and left at 4° C. for 4 days to vernalize before being transferred to a growth chamber having 16 hr light/8 hr. dark, 13,000 LUX, 70% humidity, 20° C. temperature and watered twice a week with 1 L of a 1X Hoagland's solution. Approximately 1,000 14 day old plants are sprayed with 200-250 mls of 5 mM salicylic acid (solubilized in 70% ethanol) in a 0.02% solution of the detergent Silwet L-77. At 1 hr and 6 hrs after treatment, whole seedlings, including roots, are harvested within a 15 to 20 minute time period flash-frozen in liquid nitrogen and stored at ⁻80° C.

[1016] Alternatively, seeds of wild-type Arabidopsis thaliana (ecotype Columbia) and mutant CS3726 are sown in soil type 200 mixed with osmocote fertilizer and Marathon insecticide and left at 4° C. for 3 days to vernalize. Flats are incubated at room temperature with continuous light. Sixteen days post germination plants are sprayed with 2 mM SA, 0.02% SilwettL-77 or control solution (0.02% SilwettL-77. Aerial parts or flowers were harvested 1 hr, 4 hr, 6 hr, 24 hr and 3 weeks post-treatment flash frozen and stored at −80° C.

[1017] Seeds of maize hybrid 35A (Pioneer) are sown in water-moistened sand in flats (10 rows, 5-6 seed/row) and covered with clear, plastic lids before being placed in a growth chamber having 16 hr light (25° C.)/8 hr dark (20° C.), 75% relative humidity and 13,000-14,000 LUX. Covered flats are watered every three days for 7 days. Seedlings are carefully removed from the sand and placed in 1-liter beakers with 2 mM SA for treatment. Control plants are treated with water. After 12 hr and 24 hr, aerial and root tissues are separated and flash frozen in liquid nitrogen prior to storage at ⁻80° C.

(hh) Shoot Apical Meristem (stm)

[1018] Arabidopsis thaliana (ecotype Landsberg erecta) plants mutant at the stm gene locus lack shoot meristems, produce aerial rosettes, have a reduced number of flowers per inflorescence, as well as a reduced number of petals, stamens and carpels, and is female sterile. This mutation is maintained as a heterozygote.

[1019] Seeds of Arabidopsis thaliana (ecotype Landsberg erecta) mutated at the stm locus are sterilized using 30% bleach with 1 ul/ml 20% Triton -XI 00. The seeds are vernalized at 4° C. for 3 days before being plated onto GM agar plates. Half are then put into a 22° C., 24 hr light growth chamber and half in a 24° C. 16 hr light/8 hr dark growth chamber having 14,500-15,900 LUX, and 70% relative humidity for germination and growth.

[1020] After 7 days, seedlings are examined for leaf primordia using a dissecting microscope. Presence of leaf primordia indicated a wild type phenotype. Mutants are selected based on lack of leaf primordia. Mutants are then harvested and hypocotyls removed leaving only tissue in the shoot region. Tissue is then flash frozen in liquid nitrogen and stored at -80° C.

[1021] Control tissue is isolated from 5 day old Landsberg erecta seedlings grown in the same manner as above. Tissue from the shoot region is harvested in the same manner as the stm tissue, but only contains material from the 24° C., 16 hr light/8 hr dark long day cycle growth chamber.

[1022] Seeds of maize hybrid 35A (Pioneer) are sown in water-moistened sand in flats (10 rows, 5-6 seed/row) and covered with clear, plastic lids before being placed in a growth chamber having 16 hr light (25° C.)/8 hr dark (20° C.), 75% relative humidity and 13,000-14,000 LUX. Covered flats are watered every three days for 8 days. Seedlings are carefully removed from the sand and the outer layers of leaf shealth removed. About 2 mm sections are cut and flash frozen in liquid nitrogen prior to storage at ⁻80° C. The tissues above the shoot apices (˜1 cm long) are cut, treated as above and used as control tissue.

(ii) Trichomes

[1023] Arabidopsis thaliana (Colombia glabrous) inflorescences are used as a control and CS8143 (hairy inflorescence ecotype) inflorescences, having increased trichomes, are used as the experimental sample.

[1024] Approximately 10 μl of each type of seed is sown on a flat of 350 soil (containing 0.03% marathon) and vernalized at 40° C. for 3 days. Plants are then grown at room temperature under florescent lighting. Young inflorescences are collected at 30 days for the control plants and 37 days for the experimental plants. Each inflorescence is cut into one-half inch (½″) pieces, flash frozen in liquid nitrogen and stored at −80° C. until RNA is isolated.

(ii) Wounding

[1025] Seeds of Arabidopsis thaliana (Wassilewskija) are sown in trays and left at 4° C. for three days to vernalize before being transferred to a growth chamber having 16 hr light/8 hr dark, 12,000-14,000 LUX, 70% humidity and 20° C. After 14 days, the leaves are wounded with forceps. Aerial tissues are harvested 1 hour and 6 hours after wounding. Aerial tissues from unwounded plants serve as controls. Tissues are flash-frozen in liquid nitrogen and stored at ⁻80° C.

[1026] Seeds of maize hybrid 35A (Pioneer) are sown in water-moistened sand in flats (10 rows, 5-6 seed/row) and covered with clear, plastic lids before being placed in a growth chamber having 16 hr light (25° C.)/8 hr dark (20° C.), 75% relative humidity and 13,000-14,000 LUX. Covered flats are watered every three days for 7 days. Seedlings are wounded (one leaf nicked by scissors) and placed in 1-liter beakers of water for treatment. Control plants are treated not wounded. After 1 hr and 6 hr aerial and root tissues are separated and flash frozen in liquid nitrogen prior to storage at ⁻80° C.

2. Microarray Hybridization Procedures

[1027] Microarray technology provides the ability to monitor mRNA transcript levels of thousands of genes in a single experiment. These experiments simultaneously hybridize two differentially labeled fluorescent cDNA pools to glass slides that have been previously spotted with cDNA clones of the same species. Each arrayed cDNA spot will have a corresponding ratio of fluorescence that represents the level of disparity between the respective mRNA species in the two sample pools. Thousands of polynucleotides can be spotted on one slide, and each experiment generates a global expression pattern.

[1028] The microarray consists of a chemically coated microscope slide, referred herein as a “chip” with numerous polynucleotide samples arrayed at a high density. The poly-L-lysine coating allows for this spotting at high density by providing a hydrophobic surface, reducing the spreading of spots of DNA solution arrayed on the slides. Glass microscope slides (Gold Seal #3010 manufactured by Gold Seal Products, Portsmouth, N.H., USA) are coated with a 0.1 %WNV solution of Poly-L-lysine (Sigma, St. Louis, Mo.).

[1029] Polynucleotides are amplified from Arabidopsis cDNA clones using insert specific probes. The resulting 100 uL PCR reactions are purified and PCR products from cDNA clones are spotted onto the poly-L-Lysine coated glass slides using an arrangement of quill-tip pins (ChipMaker 3 spotting pins; Telechem, International, Inc., Sunnyvale, Calif., USA) and a robotic arrayer (PixSys 3500, Cartesian Technologies, Irvine, Calif., USA). Slides containing maize sequences are purchased from Agilent Technology (Palo Alto, Calif. 94304).

[1030] After arraying, slides are processed through a series of steps—rehydration, UV cross-linking, blocking and denaturation—required prior to hybridization. Slides are rehydrated by placing them over a beaker of warm water (DNA face down), for 2-3 sec, to distribute the DNA more evenly within the spots, and then snap dried on a hot plate (DNA side, face up). The DNA is then cross-linked to the slides by UV irradiation (60-65mJ; 2400 Stratalinker, Stratagene, La Jolla, Calif., USA).

[1031] The Hybridization process begins with the isolation of mRNA from the two tissues (see “Isolation of total RNA” and “Isolation of mRNA”, below) in question followed by their conversion to single stranded cDNA (see “Generation of probes for hybridization”, below). The cDNA from each tissue is independently labeled with a different fluorescent dye and then both samples are pooled together. This final differentially labeled cDNA pool is then placed on a processed microarray and allowed to hybridize (see “Hybridization and ish conditions”, below).

[1032] mRNA is isolated using the Qiagen Oligotex mRNA Spin-Column protocol (Qiagen, Valencia, Calif.) or using the Stratagene Poly(A) Quik mRNA Isolation Kit (Startagene, La Jolla, Calif.).

[1033] Plasmid DNA is isolated from the following yeast clones using Qiagen filtered maxiprep kits (Qiagen, Valencia, Calif.): YAL022c(Fun26), YAL031c(Fun21), YBR032w, YDL131w, YDL182w, YDL194w, YDL196w, YDR050c and YDR116c. Plasmid DNA is linearized with either BsrBI (YAL022c(Fun26), YAL031c(Fun21), YDL131w, YDL182w, YDL194w, YDL196w, YDR050c) or AflIII (YBR032w, YDR116c) and isolated.

Generation of Probes for Hybridization

Generation of Labeled Probes for Hybridization from First-Strand cDNA

[1034] Hybridization probes are generated from isolated mRNA using an AtlasTM Glass Fluorescent Labeling Kit (Clontech Laboratories, Inc., Palo Alto, Calif., USA). This entails a two step labeling procedure that first incorporates primary aliphatic amino groups during cDNA synthesis and then couples fluorescent dye to the cDNA by reaction with the amino functional groups.

[1035] The probe is purified using a Qiagen PCR cleanup kit (Qiagen, Valencia, Calif., USA), and eluted with 100 ul EB (kit provided). The sample is loaded on a Microcon YM-30 (Millipore, Bedford, Mass., USA) spin column and concentrated to 4-5 ul in volume.

[1036] Probes for the maize microarrays are generated using the Fluorescent Linear Amplification Kit (cat. No. G2556A) from Agilent Technologies (Palo Alto, Calif.).

[1037] Maize microarrays are hybridized according to the instructions included Fluorescent Linear Amplification Kit (cat. No. G2556A) from Agilent Technologies (Palo Alto, Calif.).

[1038] The chips are scanned using a ScanArray 3000 or 5000 (General Scanning, Watertown, Mass., USA). The chips are scanned at 543 and 633nm, at 10 um resolution to measure the intensity of the two fluorescent dyes incorporated into the samples hybridized to the chips.

[1039] The images generated by scanning slides consisted of two 16-bit TIFF images representing the fluorescent emissions of the two samples at each arrayed spot. These images are then quantified and processed for expression analysis using the data extraction software Imagene ™ (Biodiscovery, Los Angeles, Calif., USA). Imagene output is subsequently analyzed using the analysis program Genespring™ (Silicon Genetics, San Carlos, Calif., USA). In Genespring, the data is imported using median pixel intensity measurements derived from Imagene output. Background subtraction, ratio calculation and normalization are all conducted in Genespring. Normalization is achieved by breaking the data in to 32 groups, each of which represented one of the 32 pin printing regions on the microarray. Groups consist of 360 to 550 spots. Each group is independently normalized by setting the median of ratios to one and multiplying ratios by the appropriate factor.

### Example 4

### AFLP Experiments and Results

Production of Samples

[1040] mRNA is prepared from 27 plant tissues. Based on preliminary cDNA-AFLP analysis with a few primer combinations, 11 plant tissues and/or pooled samples are selected. Samples are selected to give the greatest representation of unique band upon electrophoresis. The final 11 samples or pooled samples are used in the cDNA-AFLP analysis were:

| | |
|---|---|
| S1 | Dark adapted seedlings |
| S2 | Roots/Etiolated Seedlings |
| S3 | Mature leaves, soil grown |
| S4 | Immature buds, inflorescence meristem |
| S5 | Flowers opened |
| S6 | Siliques, all stages |
| S7 | Senescing leaves (just beginning to yellow) |
| S8 | Callus Inducing medium |
| | Callus shoot induction |
| | Callus root induction |
| S9 | Wounding |
| | Methyl-jasmonate-treated |
| S10 | Oxidative stress |
| | Drought stress |
| | Oxygen Stress-flooding |
| S11 | Heat treated light grown seedling |
| | Cold treated light grown seedlings |

[1041] cDNA from each of the 11 samples is digested with two restriction endonucleases, namely TaqI and MseI. TaqI and MseI adapters are then ligated to the restriction enzyme fragments. Using primers to these adapters that are specific in sequence (i.e. without extensions), the restriction fragments are subjected to cycles of non-radioactive pre-amplification.

Selective PCR

[1042] In order to limit the number of fragments or bands on each lane of the AFLP gel, fragments are subjected to another round of selective radioactive polymerase chain amplification. The TaqI primers used in this amplification are 5′-labelled with P³³. For these amplifications, the TaqI primers have two extra nucleotides at their 3′ end and the MseI primers have three extra nucleotides at their 3′ end. This results in 16 primer designs for the TaqI primer and 64 primer designs for the MseI primer. Altogether, this gives rise to a total of 1024 primer designs. Fragments generated in this selective amplification protocol are run with labeled molecular weight markers on polyacrylamide gels to separate fragments in the size range of 100-600 nucleotides.

[1043] Following gel electrophoresis, profiles are analyzed with a phosphoimager. From these images, electronic files, giving the mobilities of all bands on the gels and their intensities in each of the samples, are compiled.

[1044] All unique bands are cut out of the gels. The gel pieces are placed in 96 well plates for elution and their plate designation linked to their electrophoretic mobilities recorded in the electronic files. The eluted fragments are then subjected to another round of amplification, this time using reamplification primers (see below). After amplification, DNA fragments are sequenced.

[1045] A computer database is established linking the mobilities of all the bands observed on the cDNA-AFLP gels with the sequence of the correspondingly isolated fragment. The sequence allows for identification of the gene from which the cDNA-AFLP fragment is derived, allowing for a linkage of band mobility with the transcript of a specific gene. Also linked to the band mobilities are their intensities recorded for each of the eleven samples used in constructing the database.

[1046] This cDNA-AFLP analysis with TaqllMseI and 1024 primer combinations is repeated using the enzymes NlalIl in place of TaqI, and Csp6I in place of MseI.

Using the Database for the Transcript Profiling of Experimental Samples

[1047] Experimental Samples are subjected to cDNA-AFLP as described above, resulting in electronic files recording band mobilities and intensities. Through use of the database established above, band mobilities are linked to specific cDNAs, and therefore genes. Furthermore, the linkage with the intensities in the respective samples allows for the quantification of specific cDNAs in these samples, and thus the relative concentration of specific transcripts in the samples, indicating the level to which specific genes are expressed.

[1048] Reamplification primers 99G24

CGCCAGGGTTTTCCCAGTCACGAC|ACGACTCACT|
gatgagtcctgagtaa|

M13 forward+10 MseI+0

[1049] 99G20

AGCGGATAACAATTTCACACAGGA|CACACTGGTA|
tagactgcgtaccga|

M13 reverse+10 TaqI+0

[1050] Purification of the Reamplifiction reaction before sequencing

[1051] 5 μl reamplification reaction

[1052] 0,25 μl 10 × PCR buffer

[1053] 0,33 μl Shrimp Alkaline Phosphatase (Amersham Life Science)

[1054] 0,033 μl Exonuclease I (USB)

[1055] 0,297 μl SAP dilution buffer

[1056] 1,59 μl MQ

[1057] 7.5 μl total

[1058] 30′ 37° C.

[1059] 10′ 80° C.

[1060] 4° C.

Sample Preparation

[1061] S1: Dark adapted seedlings: Seeds of Arabidopsis thaliana (wassilewskija) are sown in pots and left at 4° C. for two to three days to vernalize. They are transferred to a growth chamber after three days. The intensity of light in the growth chamber is 7000-8000 LUX, temperature is 22° C., with 16 h light and 8 h dark. After 8 days, the seedlings are foil-wrapped and harvested after two days.

[1062] S2: Roots/Etiolated seedlings: Seeds of Arabidopsis thaliana (wassilewskija) are germinated on solid germination media (1×MS salts, 1×MS vitamins, 20g/L sucrose, 50 mg/L MES pH 5.8) in the dark. Tissues are harvested 14 days later.

[1063] S3: Mature leaves, soil grown: Seeds of Arabidopsis thaliana (wassilewskija) are sown in pots and left at 4° C. for two to three days to vernalize. They are transferred to a growth chamber after three days. The intensity of light in the growth chamber is 7000-8000 LUX, temperature is 22° C., with 16 h light and 8 h dark. Leaves are harvested 17 days later from plants that have not yet bolted.

[1064] S4:l Immature buds, inflorescence meristem: Seeds of Arabidopsis thaliana (wassilewskija) are sown in pots and left at 4° C. for two to three days to vernalize. They are transferred to a growth chamber after three days. The intensity of light in the growth chamber is 7000-8000 LUX, temperature is 22° C., with 16 h light and 8 h dark.

[1065] S5: Flowers opened: Seeds of Arabidopsis thaliana (wassilewskija) are sown in pots and left at 4° C. for two to three days to vernalize. They are transferred to a growth chamber after three days. The intensity of light in the growth chamber is 7000-8000 LUX, temperature is 22° C., with 16 h light and 8 h dark.

[1066] S6: Siliques, all stages: Seeds of Arabidopsis thaliana (wassilewskija) are sown in pots and left at 4° C. for two to three days to vernalize. They are transferred to a growth chamber after three days. The intensity of light in the growth chamber is 7000-8000 LUX, temperature is 22° C., with 16 h light and 8 h dark.

[1067] S7: Senescing leaves (just beginning to yellow): Seeds of Arabidopsis thaliana (wassilewskija) are sown in pots and left at 4° C. for two to three days to vernalize. They are transferred to a growth chamber after three days. The intensity of light in the growth chamber is 7000-8000 LUX, temperature is 22° C., with 16 h light and 8 h dark. When the plant has leaves that are less than 50% yellow, the leaves that are just beginning to yellow are harvested.

[1068] S8:

[1069] Callus Inducing Medium: Seeds of Arabidopsis thaliana (wassilewskija) are surface sterilized (1 min-75% Ethanol, 6 min-bleach 100%+Tween 20, rinse) and incubated on MS medium containing 2,4-Dichlorophenoxyacetic acid (2,4-D) 1 mg/l and Kinetin 1 mg/l in the dark for 3 weeks to generate primary callus.

[1070] Hypocotyls and roots of the seedling are swollen after a week after incubation in this callus induction medium and subsequently callus is initiated from these swollen areas.

[1071] Callus shoot induction: Primary calluses are transferred to the fresh callus induction medium for another 2 weeks growth to generate secondary callus. Secondary callus is transferred to shoot induction medium containing MS basal medium and Benzyladenine (BA) 2 mg/l and Naphthaleneacetic acid (NAA) ).1 mg/l for 2 weeks growth in the light before it is harvested and frozen and sent to Keygene. Many shoot meristems are observed under the microscope.

[1072] Callus root induction: Secondary calluses is transferred to root induction medium containing MS basal medium, sucrose 1% and Indolebutyric acid (IBA) 0.05 mg/l in the dark. Many root primordia are observed under microscope after 10 days in the root induction medium. Those callus tissue are harvested and frozen and sent to Keygene.

[1073] S9:

[1074] Wounding: Seeds of Arabidopsis thaliana (wassilewskija) are sown in pots and left at 4° C. for two to three days to vernalize. They are transferred to a growth chamber after three days. The intensity of light in the growth chamber is 7000-8000 LUX, temperature is 22° C., with 16 h light and 8 h dark. After 20 days, leaves of plants are wounded with pliers. Wounded leaves are harvested 1 hour and 4 hours after wounding.

[1075] Methyl jasmonate treatment: Seeds of Arabidopsis thaliana (wassilewskija) are sown in pots and left at 4° C. for two to three days to vernalize. They are transferred to a growth chamber after three days. The intensity of light in the growth chamber is 7000-8000 LUX, temperature is 22° C., with 16 h light and 8 h dark. After 13 days, plants are sprayed with 0.001% methyl jasmonate. Leaves are harvested 1.5 hours and 6 hours after spraying

[1076] S10:

[1077] Oxidative stress: Seeds of Arabidopsis thaliana (wassilewskija) are sown in pots and left at 4° C. for two to three days to vernalize. They are transferred to a growth chamber after three days. The intensity of light in the growth chamber is 7000-8000 LUX, temperature is 22° C., with 16 h light and 8 h dark. After 24 days, a few leaves are inoculated with a mixture of 2.5 mM D-glucose, 2.5 U/mL glucose oxidase in 20 mM sodium phosphate buffer pH 6.5. After an hour, 3 hours, or 5 hours after inoculation, whole plant, except for the inoculated leaves, is harvested. This sample is mixed with sample from plants that are sitting in full sun (152,000 LUX) for 2 hours or four hours.

[1078] Drought stress: Seeds of Arabidopsis thaliana (wassilewskija) are sown in pots and left at 4° C. for two to three days to vernalize. They are transferred to a growth chamber after three days. The intensity of light in the growth chamber is 7000-8000 LUX, temperature is 22° C., with 16 h light and 8 h dark. After 20 days, aerial tissues are harvested and left to dry in 3MM Whatman paper for I hour or 4 hours.

[1079] Oxygen stress: Seeds of Arabidopsis thaliana (wassilewskija) are sown in pots and left at 4° C. for two to three days to vernalize. They are transferred to a growth chamber after three days. The intensity of light in the growth chamber is 7000-8000 LUX, temperature is 22° C., with 16 h light and 8 h dark. After 21 days, the plant is flooded by immersing its pot in a beaker of tap water. After 6 days, the upper tissues are harvested.

[1080] S11: Heat-treated light grown seedlings: Seeds of Arabidopsis thaliana (wassilewskija) are sown in pots and left at 4° C. for two to three days to vernalize. They are transferred to a growth chamber after three days. The intensity of light in the growth chamber is 7000-8000 LUX, temperature is 22° C., with 16 h light and 8 h dark. Over a 5 hour period, the temperature is raised to 42° C. at the rate of approximately 4° C. per hour. After 1 hour at 42° C., the aerial tissues re collected. This sample is mixed with an equal volume of sample that has gone through a heat-recovery treatment namely bringing down the temperature to 22° C. from 42° C. over a 5 hour period at the rate of 4° C. per hour.

[1081] Cold-treated light grown seedlings: Seeds of Arabidopsis thaliana (wassilewskija) are sown in pots and left at 4° C. for two to three days to vernalize. They are transferred to a growth chamber after three days. The intensity of light in the growth chamber is 7000-8000 LUX, temperature is 22° C., with 16 h light and 8 h dark. After 18 days, the plant is transferred to 4° C. for an hour before the aerial tissues are harvested. This sample is mixed with aerial tissues from another plant that is transferred to 4° C. for 27 hours before being harvested.

Analysis of Data:

[1082] Intensity: The intensity of the band corresponds to the value in each lane marked S1, S2 etc. P-values: The data shows P- values of each of the samples 1-11. P-values are calculated using the following formula 2* (1 -NORMDIST(ABS(Sx-AVERAGE(of S1 to S11, not including Sx))/STDEV(of S1 to S11 not including Sx),0, 1, TRUE)) using Excel functions.

[1083] The equivalent mathematical formula of P-value is as follows:

$$\int φ ( x ) ⅆ x , intergrated from a to ∞ , \\ where φ ( x ) is a normal distribution \text{:}$$

$$where a = \vert \underline{Sx - μ} \vert σ ( S 1 … S 11 , not including Sx ) ;$$

$$where$$

$$\begin{matrix}μ = is the average of the intensities of all samples except Sx , \\ = \frac{( \sum S 1 … Sn ) - Sx}{n - 1}\end{matrix}$$

[1084] where σ(S1 . . . S11, not including Sx)=the standard deviation of all sample intensities except Sx.

Results:

[1085] The results are shown in the MA tables.

### Example 5

### Transformation of Carrot Cells

[1086] Transformation of plant cells can be accomplished by a number of methods, as described above. Similarly, a number of plant genera can be regenerated from tissue culture following transformation. Transformation and regeneration of carrot cells as described herein is illustrative.

[1087] Single cell suspension cultures of carrot (Daucus carota) cells are established from hypocotyls of cultivar Early Nantes in B₅ growth medium (O. L. Gamborg et al., Plant Physiol. 45:372 (1970)) plus 2,4-D and 15 mM CaCl₂ (B₅-44 medium) by methods known in the art. The suspension cultures are subcultured by adding 10 ml of the suspension culture to 40 ml of B₅-44 medium in 250 ml flasks every 7 days and are maintained in a shaker at 150 rpm at 27 ° C. in the dark.

[1088] The suspension culture cells are transformed with exogenous DNA as described by Z. Chen et al. Plant Mol. Bio. 36:163 (1998). Briefly, 4-days post-subculture cells are incubated with cell wall digestion solution containing 0.4 M sorbitol, 2% driselase, 5mM MES (2-[N-Morpholino] ethanesulfonic acid) pH 5.0 for 5 hours. The digested cells are pelleted gently at 60 xg for 5 min. and washed twice in W5 solution containing 154 mM NaCl, 5 mM KCl, 125 mM CaCl₂ and 5 mM glucose, pH 6.0. The protoplasts are suspended in MC solution containing 5 mM MES, 20 mM CaCl₂, 0.5 M mannitol, pH 5.7 and the protoplast density is adjusted to about 4×10⁶ protoplasts per ml.

[1089] 15-60 μg of plasmid DNA is mixed with 0.9 ml of protoplasts. The resulting suspension is mixed with 40% polyethylene glycol (MW 8000, PEG 8000), by gentle inversion a few times at room temperature for 5 to 25 min. Protoplast culture medium known in the art is added into the PEG-DNA-protoplast mixture. Protoplasts are incubated in the culture medium for 24 hour to 5 days and cell extracts can be used for assay of transient expression of the introduced gene. Alternatively, transformed cells can be used to produce transgenic callus, which in turn can be used to produce transgenic plants, by methods known in the art. See, for example, Nomura and Komamine, Plt. Phys. 79:988-991 (1985), Identification and Isolation of Single Cells that Produce Somatic Embryos in Carrot Suspension Cultures.

### Example 6

### Phenotype Screens and Results

A: Triparental Mating and Vacuum Infiltration Transformation of Plants

[1090] Standard laboratory techniques are as described in Sambrook et al. (1989) unless otherwise stated. Single colonies of Agrobacterium C58C1Rif, E. coli helper strain HB101 and the E. coli strain containing the transformation construct to be mobilized into Agrobacterium areseparately inoculated into appropriate growth media and stationary cultures produced. 100 μl of each of the three cultures are mixed gently, plated on YEB (5 g Gibco beef extract, 1 g Bacto yeast extract, 1 g Bacto peptone, 5 g sucrose, pH 7.4) solid growth media and incubated overnight at 28° C. The bacteria from the triparental mating are collected in 2 ml of lambda buffer (20 mM Tris (pH 7.5), 100 mM NaCl, 10 mM MgCl₂) and serial dilutions made. An aliquot of the each dilution is then plated and incubated for 2 days at 28° C. on YEB plates supplemented with 100 μg/ml rifampicin and 100 μg/ml carbenicillin for calculation of the number of acceptor cells and on YEB plates supplemented with 100 μg/ml rifampicin, 100 μg/ml carbenicillin and 100 jig/ml spectinomycin for selection of transconjugant cells. The cointegrate structure of purified transconjugants is verified via Southern blot hybridization.

[1091] A transconjugant culture is prepared for vacuum infiltration by innoculating 1 ml of a stationary culture arising from a single colony into liquid YEB media and incubating at 28° C. for approximately 20 hours with shaking (220 rpm) until the OD taken at 600 nm was 0.8-1.0. The culture is then pelleted (8000 rpm, 10 min, 4° C. in a Sorvall SLA 3000 rotor) and the bacteria resuspended in infiltration medium (0.5×MS salts, 5% w/v sucrose, 10 gg/l BAP, 200 μl/l Silwet L-77, pH 5.8) to a final OD₆₀₀ of 1.0. This prepared transconjugant culture is used within 20 minutes of preparation.

[1092] Wild-type plants for vacuum infiltration are grown in 4-inch pots containing Metromix 200 and Osmocote. Briefly, seeds of Arabidopsis thaliana (ecotype Wassilewskija) are sown in pots and left at 4° C. for two to four days to vernalize. They are then transferred to 22-25° C. and grown under long-day (16 hr light: 8 hr dark) conditions, sub-irrigated with water. After bolting, the primary inflorescence is removed and, after four to eight days, the pots containing the plants are inverted in the vacuum chamber to submerge all of the plants in the prepared transconjugant culture. Vacuum is drawn for two minutes before pots are removed, covered with plastic wrap and incubated in a cool room under darkness or very low light for one to two days. The plastic wrap is then removed, the plants returned to their previous growing conditions and subsequently produced (Tl) seed collected.

B: Selection of T-DNA Insertion Lines

[1093] Approximately 10,750 seeds from the initial vacuum infiltrated plants are sown per flat of Metromix 350 soil. Flats are vernalized for four to five days at 4° C. before being transferred to 22-25° C. and grown under long-day (16 hr light: 8 hr dark) conditions, sub-irrigated with water. Approximately seven to ten days after germination, the (Tl) seedlings are sprayed with 0.02% Finale herbicide (AgrEvo). After another five to seven days, herbicide treatment is repeated. Herbicide resistant Ti plants are allowed to self-pollinate and T2 seed are collected from each individual. In the few cases where the T1 plant produced few seed, the T2 seed is planted in bulk, the T2 plants allowed to self-pollinate and T3 seed collected.

C: Phenotype Screening

[1094] Approximately 40 seed from each T2 (or T3) line are planted in a 4-inch pot containing either Sunshine mix or Metromix 350 soil. Pots are vernalized for four to five days at 4° C. before being transferred to 22-25° C. and grown under long-day (16 hr light: 8 hr dark) conditions, sub-irrigated with water. A first phenotype screen is conducted by visually inspecting the seedlings five to seven days after germination and aberrant phenotypes noted. Plants are then sprayed with Finale herbicide within four days (i.e. about seven to nine days after germination). The second visual screen is conducted on surviving T2 (or T3) plants about sixteen to seventeen days after germination and the final screen was conducted after the plants have bolted and formed siliques. Here, the third and fourth green siliques are collected and aberrant phenotypes noted. The Knock-in Table contains descriptions of identified phenotypes.

[1095] Alternatively, seed are surface sterilized and transferred to agar solidified medium containing Murashige and Skoog salts (1×), 1% sucrose (wt/v) pH 5.7 before autoclaving. Seed re cold treated for 48 hours and transferred to long days [16 hours light and 8 hours dark], 25° C. Plants are screened at 5 and 10 days.

[1096] In another screen, seed are surface sterilized and transferred to agar solidified medium containing Murashige and Skoog salts (1×), and combinations of various nitrogen and sucrose amounts as specified below::

[1097] Medium 1: no sucrose, 20.6 mM NH₄NO₃, 18.8 mM KNO₃;

[1098] Medium 2: 0.5% sucrose, 20.6 mM NH₄NO3, 18.8 mM KNO₃;

[1099] Medium 3: 3% sucrose, 20.6 mM NH₄NO₃, 18.8 mM KNO₃;

[1100] Medium 4: no sucrose, 20.6 μM NH₄NO₃, 18.8 μM KNO₃;

[1101] Medium 5: 0.5% sucrose, 20.6 μM NH₄NO₃, 18.8 μM KNO₃; and

[1102] Medium 6: 3% sucrose, 20.6 μM NH₄NO₃, 18.8 μM KNO₃.

[1103] The 0.5% sucrose is the control concentration for the sucrose. The low nitrogene, 20.6 μM NH₄NO₃, 18.8 tM KNO₃, is the control for the nitrogen. Seed are cold treated for 48 hours and transferred to long days [16 hours light and 8 hours dark], 25° C. Plants are screened at 2, 5, and 10 days.

D: Tail-PCR and Fragment Sequencing

[1104] Rosette leaves are collected from each putative mutant and crushed between parafilm and FTA paper (Life Technologies). Two 2 mm² hole punches are isolated from each FTA sample and washed according to the manufacturer's instructions by vortexing with 200 ul of the provided FTA purification reagent. The FTA reagent is removed and the washing procedure repeated two more times. The sample is then washed twice with 200 ul of FTA TE (10 mM Tris, 0.1 mM EDTA, pH 8.0) and vortexing prior to PCR.

[1105] Primers used for TAIL-PCR are as follows:

AD2: 5′ NGTCGASWGANAWGAA 3′

[1106] (128-fold degeneracy) S=G or C, W=A or T, and N=A, G, C, or T

LB1: 5′ GTTTAACTGCGGCTCAACTGTCT 3′
LB2: 5′ CCCATAGACCCTTACCGCTTTAGTT 3′
LB3: 5′ GAAAGAAAAAGAGGTATAACTGGTA 3′

[1107] The extent to which the left and right borders of the T-DNA insert are intact is measured for each line by PCR. The following components are mixed for PCR: 12 mm² FTA sample, 38.75 μl distilled water, 5 μl 10× Platinum PCR buffer (Life Technologies), 2 μl 50 mM MgCl₂, 1 μl 10 mM dNTPs, 1 μl 10 μM primer LB1 (or RB1 for analysis of the right border), 1 μl 10 μM primer LB3R (or RB3R for analysis of the right border) and 1.25 U Platinum Taq (Life Technologies). Cycling conditions are: 94° C., 10 sec.; thirty cycles of 94° C., 1 sec. −54° C., 72° C., 1 sec.; 72° C., 4 sec. The expected band size for an intact left border is bp, while an intact right border generates a bp band.

[1108] Fragments containing left or right border T-DNA sequence and adjacent genomic DNA sequence are obtained via PCR. First product PCR reactions use the following reaction mixture: 1 2 mm² FTA sample, 12.44 μl distilled water, 2 μl 10×Platinum PCR buffer (Life Technologies), 0.6 μl 50 mM MgCl₂, 0.4 μl 10 mM dNTPs, 0.4 μl 10 [M primer LB1 (or RB1 for analysis of the right border), 3 μl 20 μM primer AD2 and 0.8 U Platinum Taq (Life Technologies). Cycling conditions for these reactions are: 93° C., 1 min.; 95° C., 1 min.; three cycles of 94° C., 45 sec. −62° C., 1 min. −72° C., 2.5 min.; 94° C., 45 sec.; 25° C., 3 min.; ramp to 72° C. in 3 min.; 72° C., 2.5 min.; fourteen cycles of 94° C., 20 sec. −68° C., 1 min. −72° C., 2.5 min. −94° C., 20 sec.; −68° C., 1 min. −72° C., 2.5 min. −94° C., 20 sec. −44° C., 1 min. −72° C., 2.5 min,; 72° C., 5 min.; end; ˜4.5 hrs. For second product PCR reactions 1 μl of a 1:50 dilution of the first PCR product reaction is mixed with 13.44 μl distilled water, 2 μl 10×Platinum PCR buffer (Life Technologies), 0.6 μl 50 mM MgCl₂, 0.4 μl 10 mM dNTPs, 0.4 μl 10 μM primer LB2 (or RB2 for analysis of the right border), 2 μl 20 μM primer AD2 and 0.8 U Platinum Taq (Life Technologies). Second product cycling conditions are: eleven cycles of 94° C., 20 sec. −64° C., 1 min. −72° C., 2.5 min. −94° C., 20 sec. −64° C., 1 min. −72° C., 2.5 min. −94° C., 20 sec. −44° c., 1 min.; 72° C., 5 min.; end; 3 hrs. Third product PCR reactions were prepared by first diluting 2 μl of the second PCR product with 98 μl of distilled water and then adding 1 μl of the dilution to 13.44 μl distilled water, 2 μl 10×Platinum PCR buffer (Life Technologies), 0.6 μl 50 mM MgCl₂, 0.4 μl 10 mM dNTPs, 0.4 μl 10 μM primer LB3 (or RB3 for analysis of the right border), 2 μl 20 μM primer AD2 and 0.8 U Platinum Taq (Life Technologies). Third product cycling conditions are: twenty cycles of 94° C., 38 sec. −44° C., 1 min. −72° C., 2.5 min.; 72° C., 5 min.; end; ˜2 hrs. Aliquots of the first, second and third PCR products are electrophoresed on 1% TAE (40 mM Tris-acetate, 1 mM EDTA) to determine their size.

[1109] Reactions are purified prior to sequencing by conducting a final PCR reaction. Here, 0.25 μI Platinum PCR Buffer (Life Technologies), 0.1 μl 50 mM MgCl₂, 3.3 U SAP shrimp alkaline phosphatase, 0.33 U Exonuclease and 1.781 μl distilled water are added to a 5 μl third product and the reaction cycled at 37° C., 30 min.; 80° C., 10 min.; 4° C. indefinitely.

[1110] Di-deoxy “Big Dye” sequencing is conducted on Perkin-Elmer 3700 or 377 machines.

Knock-in Experiments

[1111] For the following examples, a two-component system is constructed in a plant to ectopically express the desired cDNA.

[1112] First, a plant is generated by inserting a sequence encoding a transcriptional activator downstream of a desired promoter, thereby creating a first component where the desired promoter facilitates expression of the activator generated a plant. The first component is also referred to as the activator line.

[1113] Next, the second component is constructed by linking a desired cDNA to a sequence that the transcriptional activator binds to and facilitate expression of the desired cDNA. The second component is inserted into the activator line by transformation. Alternatively, the second component is inserted into a separate plant, also referred to as the target line. Then, the target and activator lines are crossed to generate progeny that have both components.

[1114] Two component lines are generated by both means.

Part I—From Crosses

[1115] Target lines containing cDNA constructs are generated using the Agrobacterium-mediated transformation. Selected target lines are genetically crossed to activation lines (or promoter lines). Generally, the promoter lines used are as described above. Evaluation of phenotypes is done on the resulting F1 progenies.

Part II—From Type I Supertransformation

[1116] Promoter activation lines (generally Vascular/Ovule/Young Seed/Embryo line, Seed/Epidermis/Ovary/Fruit line, Roots/Shoots/Ovule line, and Vasculature/Meristem are transformed with cDNA constructs using the Agrobacterium mediated transformation. Selected transformants (and their progenies) are evaluated for changes in phenotypes. The table for the knock-in of the Type I supertransformation comprises the following information

[1117] Clone ID,

[1118] Pfam,

[1119] Gemini ID

[1120] Trans. Unique ID (which indicates what promoter activation line was transformed

[1121] S Ratio: segregation ratio after the transformed plants are selected for the marker.

[1122] Assay

[1123] Stage: phenotype was observed

[1124] Feature: Where the phenotype was observed

[1125] Phenotype

[1126] P Ratio: phenotype ratio

[1127] Comments

Part III—From Type II Supertransformation

[1128] Target lines generated using the procedure mentioned in Part I are transformed with T-DNA construct containing constitutive promoter. Selected transformants (and their progenies) are evaluated for changes in phenotypes.

[1129] An additional deposit of an E. coli Library, E. coli LibA021800, was made at the American Type Culture Collection in Manassas, Va., USA on Feb. 22, 2000 to meet the requirements of Budapest Treaty for the international recognition of the deposit of microorganisms. This deposit was assigned ATCC accession no. PTA-1411. Additionaly, ATCC Library deposits; PTA-1161, PTA-1411 and PTA-2007 were made at the American Type Culture Collection in Manassas, Va., USA on; Jan. 7, 2000, Feb. 23, 2000 and Jun. 8, 2000 respectively, to meet the requirements of Budapest Treaty for the international recognition of the deposit of microorganisms.

[1130] The invention being thus described, it will be apparent to one of ordinary skill in the art that various modifications of the materials and methods for practicing the invention can be made. Such modifications are to be considered within the scope of the invention as defined by the following claims.

[1131] The scientific periodical and patent publications that follow are discussed in the Specification and are hereby incorporated by reference in their entirety:
[1132] Ahn et al. (1993) Molecular and General Genetics 241: 483-90
[1133] Albert et al. (1995) Plant J. 7:649
[1134] Alonso-Blanco et al. (c. 1998 ) Methods in Molecular Biology, vol.82, “Arabidopsis Protocols”, pp. 137-146, J. M. Martinez-Zapater and J. Salinas, eds., Humana Press, Totowa, N.J.
[1135] Armaleo et al. (1990) Current Genetics 17:97
[1136] Ausubel et al. (1992) Current Protocols in Molecular Biology, Greene Publishing, New York). Azpiroz-Leehan et al. (1997) Trends in Genetics 13:152
[1137] Binding (1988) Regeneration of Plants, Plant Protoplasts, pp. 21-73, CRC Press, Boca Raton,
[1138] Bonneretal. (1973) J. Mol. Biol. 81:123
[1139] Bradshaw et al. (1995) Nucl Acids Res 23: 4850-4856
[1140] Buchanan, Gruissem, and Russel (eds) 2000, Biochemistry and Molecular Biology of Plants,, Amer. Soc. of Plant Physiologists, Rockville, Md.
[1141] Burke et al. (1987) Science 236:806-812
[1142] Burr (c. 1994 ) “Mapping Genes with Recombinant Inbreds”, pp. 249-254. In Freeling, M. and V. Walbot (Ed.), The Maize Handbook Springer-Verlag New York, Inc.: New York, N.Y., USA; Berlin Germany
[1143] Burr et al. (1998) Genetics 118: 519
[1144] Carels et al. (1998) J. Mol. Evol. 46: 45
[1145] Chang et al. (1993) Gene 127:95
[1146] Christou, (1995) Euphytica 85 (1-3):13-27
[1147] Chusacultanachai et al. (1999) J. Biol. Chem. 274:23591
[1148] Cox and Goldberg (c. 1988 ) “Plant Molecular Biology: A Practical Approach”, pp. 1-35, Shaw ed., IRL, Oxford
[1149] De Martinis et al. (1999) Plant Cell 11:1061
[1150] de Vicente and Tanksley (1993) Genetics 134:585
[1151] Dumas Milne Edwards J. B. (20 Dec. 1993) Doctoral Thesis of Paris VI University, Le clonage des ADNc complets: difficultés et perspectives nouvelles. Apports pour l'étude de la régulation de l'expression de la tryptophane hydroxylase de rat.
[1152] Escudero et al. (1996) Plant J. 10:355
[1153] Evans et al., (1983)Protoplasts Isolation and Culture in “Handbook of Plant Cell Culture,” pp. 124-176, MacMillan Publishing Company, New York
[1154] Fennoy et al. (1993) Nuc. Acids Res. 21(23): 5294 (scientific periodical and patent publications incorporated by reference continued)
[1155] Frischaufet al. (1983) J. Mol Biol 170: 827-842
[1156] Fromm et al. (1985) Proc. Natl Acad. Sci. USA 82:5824
[1157] Fry et al. (1992) Biotechniques 13: 124
[1158] Gardiner, J. et al. (1993) Genetics 134: 917
[1159] Ghosh et al. (1994) J. Biotechnol. 32:1
[1160] Gleave (1992) Plant Mol. Biol. 20:1203
[1161] Golovkin et al. (1999) J. Biol. Chem. 274:36428
[1162] Gould et al. (1991) Plant Physiology 95:426
[1163] Graves and Goldman (1986) Plant Mol. Biol. 7:34
[1164] Hamilton et al (1990) Nature 346:284-287
[1165] Hamilton et al. (1996) Proc. Natl. Acad. Sci. USA 93: 9975-9979
[1166] Hamilton (1997) Gene 200:107
[1167] Haseloff et al. (1988) Nature, 334:585
[1168] Herrera-Estrella et al. (1983) EMBO J. 2:987
[1169] Hochstrasser (2000) Science 289: 563
[1170] Hosoyama et al. (1994) Biosci. Biotechnol. Biochem. 58:1500
[1171] Hu et al. (2000) Methods 20:80
[1172] Huynh et al., In: Glover N. Mex. (ed) DNA Cloning: A practical Approach, Vol.1 Oxford: IRL Press (1985
[1173] Ichimura et al. (1998) Biochem. Biophys. Res. Comm. 253:532
[1174] Ishida et al. (1996) Nature Biotechnology 14:745
[1175] Joazeiro and Hunter (2001) Science 289: 2061;
[1176] Kaczor et al. (1994) Plant Physiol. 1-4: 1411-7
[1177] Kato et al. (1994) Gene 150:243-250
[1178] Keegstra and Cline (1999) The Plant Cell 11: 557-570
[1179] Keller and M. M. Manak (c. 1993 )“DNA Probes”, 2^{nd} Ed. pp. 1-25, by Stockton Press, New York, N.Y.
[1180] Klee et al. (1987) Ann. Rev. ofPlant Phys. 38:467
[1181] Klein et al. (1987) Nature 327:773
[1182] Kohler and Milstein (1975) Nature 256: 495
[1183] Koltonow et al. (1990) Plant Cell 2:1201
[1184] Komari et al. (1996) Plant J. 10:165
[1185] Liljegren (1999) Plant Cell 11:1007
[1186] Lin et al. (1997) J. Biol. Chem. 272:27274
[1187] Luo et al. (1997) J. Mol. Biol. 266:479
[1188] Marra et al. (1997) Genomic Research 7:1072-1084
[1189] Mariani et al. (1992) Nature 357: 384-387
[1190] Martinez et al. (1999) Mol. Gen. Genet. 261:546
[1191] Maruyama et al. (1994) Gene 138:171
[1192] Marty (1999) The Plant Cell 11: 587-599
[1193] Matteucci et al. ( 1981) J. Am. Chem. Soc. 103:3185
[1194] May et al. (1995) Bio/Technology 13:486
[1195] McAlister-Henn et al. (1999) Methods 19:330
[1196] McCormac et al. (1997) Mol. Biotechnol. 8:199 (scientific periodical and patent publications incorporated by reference continued)
[1197] Michaels et al. (1999) Plant Cell 11:949
[1198] Morgante et al. (1993) The Plant Journal 3: 165
[1199] Müiller et al. (1987) Mol. Gen. Genet. 207:171
[1200] Napoli et al. (1990) The Plant Cell 2:279
[1201] Oeller, et al (1991) Science 254:437-439
[1202] Panaud et al. (1995) Genome 38: 1170
[1203] Paszkowski et al. (1984)EMBO J. 3:2717
[1204] Pearson and Lipman (1988) Proc. Natl. Acad Sci. (USA) 85: 2444
[1205] Pierrou et al., (1995) Anal. Biochem. 229:99
[1206] Refseth et al. (1997) Electrophoresis 18: 1519
[1207] Sakamoto et al. (2001) PNAS Online 141230798
[1208] Salomon et al. (1984) EMBO J. 3:141
[1209] Sambrook et al. (1989) Molecular Cloning: A Laboratory Manual, 2^{nd} ed. Cold Spring Harbor Laboratory Press, New York)
[1210] Schneider (1976) Z. naturforsch. [C] 31: 55-63
[1211] Schwarz et al. (1992) Mol. Cell. Biol. 12:266
[1212] Seki et al. (1998) Plant Journal 15:707-720
[1213] Senior et al. (1996) Crop Science 36: 1676
[1214] Sheehy et al. (1988) Proc. Nat. Acad. Sci. USA, 85:8805
[1215] Shizuya et al. (1992) Proc. Natl. Acad. Sci. USA 89: 8794-8797
[1216] Smith (1988) Biochem. J. 249: 423-8
[1217] Smith and Waterman (1981) Add. APL. Math. 2:482
[1218] Spiker and Thompson (1996) Plant Physiol. 110: 15-21
[1219] Stemberg N. et al. (1990) Proc Natl Acad Sci US A. 87(1):103-7
[1220] Tanksley et al. (1997) Science 277:1063
[1221] Tanksley and McCouch (1997) Science 277:1063
[1222] Taramino et al. (1996) Genome 39: 277
[1223] Tijessen (c. 1993) “Hybridization with Nucleic Acid Probes” in Laboratory Techniques in Biochemistry and Molecular Biology, P. C. vand der Vliet, ed., Elsevier, Amsterdam.
[1224] Urdea et al. (1981) Proc. Natl. Acad. 80:7461
[1225] van der Krol et al. (1990) Plant Cell 2:291
[1226] Venkateswarlu et al. (1991) Biotechnology 9:1103
[1227] Vergunst et al. (1998) Nucleic Acids Res. 26:2729
[1228] Vergunst et al. (1998) Plant Mol. Biol. 38:393
[1229] Vitale and Denecke (1999) The Plant Cell 11: 615-628
[1230] Walden et al. (1990) Mol Cell Biol 1: 175-194
[1231] Weigel and Meyerowitz, (1993) In Molecular Basis of Morphogenesis (ed. M. Bemfield). 51st Annual Symposium of the Society for Developmental Biology, pp. 93-107, New York
[1232] Weising et al. (1988) Ann. Rev. Genet. 22:421
[1233] Wunsch (1970) J. Mol. Biol. 48:443
[1234] Xu et al. (1995) Plant Mol. Biol. 27:237
[1235] Yamamoto et al. (1991) Plant Cell 3:371 (scientific periodical and patent publications incorporated by reference continued)
[1236] Bouckaert et al., U.S. Ser. No. 60/121,700 Atty. Dkt. No. 2750-117P, Client Dkt. No. 00010.001
[1237] EPO 625572
[1238] U.S. Pat. No. 4,801,340
[1239] U.S. Pat. No. 5,034,323
[1240] U.S. Pat. No. 5,231,020
[1241] U.S. Pat. No. 5,283,184
[1242] U.S. Pat. No. 5,410,270
[1243] U.S. Pat. No. 5,445,943
[1244] U.S. Pat. No. 5,766,847
[1245] U.S. Pat. No. 5,945,306
[1246] U.S. Pat. No. 5,945,287

[image]

1. An isolated nucleic acid molecule comprising:
a) a full length cDNA nucleic acid having a nucleotide sequence which encodes an amino acid sequence exhibiting at least 40% sequence identity to an amino acid sequence encoded by
(1) a full length cDNA nucleotide sequence described in the Seqeuence Listing or the Sequence Listing-Miscellaneous Feature documents, or a fragment thereof; or
(2) a complement of a full-length cDNA nucleotide sequence shown in the Seqeuence Listing or the Sequence Listing-Miscellaneous Feature documents, or a fragment thereof;
b) a nucleic acid which is the reverse of the nucleotide sequence according to subparagraph (a), such that the reverse nucleotide sequence has a sequence order which is the reverse of the sequence order of the nucleotide sequence according to subparagraph (a);
c) a nucleic acid capable of hybridizing to a nucleic acid having a sequence selected from the group consisting of: a full-length cDNA nucleotide sequence which is shown in the Seqeuence Listing or the Sequence Listing-Miscellaneous Feature documents; and a nucleotide sequence which is complementary to a full-length cDNA nucleotide sequence shown in the Seqeuence Listing or the Sequence Listing-Miscellaneous Feature documents, under conditions that permit formation of a nucleic acid duplex at a temperature from about 40° C. and 48° C. below the melting temperature of the nucleic acid duplex, with the proviso that said nucleotide sequence is not any of the sequences described in the Tables of any of Patent Publication Nos. WO 200040695, CA 2300692 A1, EP 1033405 A2, CA 2302828 A1 and EP 1059354 A2 and any proteins listed in the application that are identified by gi number or otherwise as being from the non-redundant GenBank CDS translations or Protein Database (PDB), available via the internet, or (PIR-International) Database (PIR), available via the internet.

2. An isolated nucleic acid molecule comprising a nucleic acid having a nucleotide sequence which exhibits at least 65% sequence identity to
a) a full-length cDNA nucleotide sequence shown in the Seqeuence Listing or the Sequence Listing-Miscellaneous Feature documents, or a fragment thereof; or
b) a complement of a full-length cDNA nucleotide sequence described in the Seqeuence Listing or the Sequence Listing-Miscellaneous Feature documents, or a fragment thereof, with the proviso that said nucleotide sequence is not any of the sequences described in the Tables of any of Patent Publication Nos. WO 200040695, CA 2300692 A1, EP 1033405 A2, CA 2302828 A1 and EP 1059354 A2 and any proteins listed in the application that are identified by gi number or otherwise as being from the non-redundant GenBank CDS translations or Protein Database (PDB), or (PIR-International) Database (PIR).

3. The nucleic acid molecule according to claim 1, wherein said nucleic acid comprises an open reading frame.

4. (canceled)

5. (canceled)

6. A vector construct comprising:
a) a first nucleic acid having a regulatory sequence capable of causing transcription and/or translation; and
b) a second nucleic acid having the sequence of the isolated nucleic acid molecule according to claim 1;
wherein said first and second nucleic acids are operably linked and wherein said second nucleic acid is heterologous to any element in said vector construct.

7. The vector construct according to claim 6, wherein said first nucleic acid is native to said second nucleic acid.

8. The vector construct according to claim 6, wherein said first nucleic acid is heterologous to said second nucleic acid.

9. A host cell comprising an isolated nucleic acid molecule according to claim 1, wherein said nucleic acid molecule is flanked by exogenous sequence

10. A host cell comprising a vector construct of claim 6.

11. An isolated polypeptide comprising an amino acid sequence
a) exhibiting at least 40%, or 75%, or 85%, or 90% sequence identity of an amino acid sequence encoded by a sequence shown in the Seqeuence Listing or the Sequence Listing-Miscellaneous Feature documents, or a fragment thereof; and
b) capable of exhibiting at least one of the biological activities of the polypeptide encoded by said nucleotide sequence shown in the Seqeuence Listing or the Sequence Listing-Miscellaneous Feature documents, or a fragment thereof, with the proviso that said nucleotide sequence is not any of the sequences described in the Tables of any of Patent Publication Nos. WO 200040695, CA 2300692 A1, EP 1033405 A2, CA 2302828 A1 and EP 1059354 A2 and any proteins listed in the application that are identified by gi number or otherwise as being from the non-redundant GenBank CDS translations or Protein Database (PDB), or (PIR-International) Database (PIR),.

12. An antibody capable of binding the isolated polypeptide of claim 11.

13. A method of introducing an isolated nucleic acid into a host cell comprising:
a) providing an isolated nucleic acid molecule according to claim 1; and
b) contacting said isolated nucleic with said host cell under conditions that permit insertion of said nucleic acid into said host cell.
c) A method of transforming a host cell which comprises contacting a host cell with a vector construct according to claim 6.
d) A method of modulating transcription and/or translation of a nucleic acid in a host cell comprising:
e) providing the host cell of claim 9; and
f) culturing said host cell under conditions that permit transcription or translation.

14. A method for detecting a nucleic acid in a sample which comprises:
a) providing an isolated nucleic acid molecule according to claim 1;
b) contacting said isolated nucleic acid molecule with a sample under conditions which permit a comparison of the sequence of said isolated nucleic acid molecule with the sequence of DNA in said sample; and
c) analyzing the result of said comparison.

15. A plant or cell of a plant which comprises a nucleic acid molecule according to claim 1 which is exogenous or heterologous to said plant or plant cell.

16. A plant or cell of a plant which comprises a vector construct according to claim 6.

17. A plant which has been regenerated from a plant cell according to claim 17.

18. A plant which has been regenerated from a plant cell according to claim

The application's sequence listing, which the Patent Office published only in electronic form, follows.

SEQUENCE LISTING (119966 sequences)

SEQ ID NO: 1 - DNA, 460 bp, Brassica napus
  misc_feature (1)..(460): Ceres Seq. ID no. 12556855
  misc_feature (266)..(266): n is a, c, t, g, unknown, or other
accgacaaaactccaaggtgccatataatctcaagtcaaatccagtctcgattccagttttgtttccactgcagtcccagctcaaatctcgaatctttgtaagaagcccagatctactcgtatggcgaagcacacggcggcgttgaaagccggactgactttgctggcgctgagcatgatcggttacatactcggtcctcctctctactggcacctcaccgaggcactggtcgcttccgcctcttcttgctctccttgcgtctgcnactgctcttccctgcctctcctcaccatccccaaaggactcagcaatggatcttttggagattgtgcaaagcatgacccagaggtgaacgaagacacagagaagaactatgctgagctcttaacagaggaactgaagcaacgcgaagcagcatcgatggagaaacacaaacgagtagacactggtctgctcgag

SEQ ID NO: 2 - protein, 113 aa, Brassica napus
  peptide (1)..(113): Ceres Seq. ID no. 12556856
  misc_feature (49)..(49): Xaa is any aa, unknown or other
MAKHTAALKAGLTLLALSMIGYILGPPLYWHLTEALVASASSCSPCVCXCSSLPLLTIPKGLSNGSFGDCAKHDPEVNEDTEKNYAELLTEELKQREAASMEKHKRVDTGLLE

SEQ ID NO: 3 - protein, 95 aa, Brassica napus
  peptide (1)..(95): Ceres Seq. ID no. 12556857
  misc_feature (31)..(31): Xaa is any aa, unknown or other
MIGYILGPPLYWHLTEALVASASSCSPCVCXCSSLPLLTIPKGLSNGSFGDCAKHDPEVNEDTEKNYAELLTEELKQREAASMEKHKRVDTGLLE

SEQ ID NO: 4 - DNA, 734 bp, Brassica napus
  misc_feature (1)..(734): Ceres Seq. ID no. 12557512
  misc_feature (484)..(484): n is a, c, t, g, unknown, or other
atacacaaaaaaatcatctcacagactcactcttcaagtctctccctctctccgatcatcaatggcggcgactatggcgacatcaaccagatgcatgtccctgaacccatctcctcctaaacccctaaaccaaaccaaacccatctcctcctcaaaacacttcatcaccctcccaactccaccaaaacccaccgtctctctcgccgtcacaagcaccgccctagccggagccgtcttctccgccctcagctactccgaacccgctctcgccgctcaccagatctcccagctcgccgccgccgccgtgtcggaaggcagcgacaaccgcggcctagctcttctcctcccgatcgtcccggccatcgggtgggtcctcttcaacatcctccagccagctctcaaccagatcaacaagatgcgcgcaagcaaaggagtcgtcgtgggtctcggcggcatcggtgatggtctcgccgcgtcagggctnttgacgccgccgccggaggcagtagctgcggcggaggcggcggagagagctggagataacaggggacagttgttgttgttcgtggttgcaccggcgctgctttgggttctttacaatatattgcagccggctttgaaccaactcaacaaaatgaggtctcagtgaaaactctttacaatatataaatattaatcatcgttcgtcctttgtttaagttttggacaattatccattgttatatatttcgctc

SEQ ID NO: 5 - protein, 215 aa, Brassica napus
  peptide (1)..(215): Ceres Seq. ID no. 12557513
  misc_feature (161)..(161): Xaa is any aa, unknown or other
YTKKSSHRLTLQVSPSLRSSMAATMATSTRCMSLNPSPPKPLNQTKPISSSKHFITLPTPPKPTVSLAVTSTALAGAVFSALSYSEPALAAHQISQLAAAAVSEGSDNRGLALLLPIVPAIGWVLFNILQPALNQINKMRASKGVVVGLGGIGDGLAASGXLTPPPEAVAAAEAAERAGDNRGQLLLFVVAPALLWVLYNILQPALNQLNKMRSQ

SEQ ID NO: 6 - protein, 195 aa, Brassica napus
  peptide (1)..(195): Ceres Seq. ID no. 12557514
  misc_feature (141)..(141): Xaa is any aa, unknown or other
MAATMATSTRCMSLNPSPPKPLNQTKPISSSKHFITLPTPPKPTVSLAVTSTALAGAVFSALSYSEPALAAHQISQLAAAAVSEGSDNRGLALLLPIVPAIGWVLFNILQPALNQINKMRASKGVVVGLGGIGDGLAASGXLTPPPEAVAAAEAAERAGDNRGQLLLFVVAPALLWVLYNILQPALNQLNKMRSQ

SEQ ID NO: 7 - protein, 191 aa, Brassica napus
  peptide (1)..(191): Ceres Seq. ID no. 12557515
  misc_feature (137)..(137): Xaa is any aa, unknown or other
MATSTRCMSLNPSPPKPLNQTKPISSSKHFITLPTPPKPTVSLAVTSTALAGAVFSALSYSEPALAAHQISQLAAAAVSEGSDNRGLALLLPIVPAIGWVLFNILQPALNQINKMRASKGVVVGLGGIGDGLAASGXLTPPPEAVAAAEAAERAGDNRGQLLLFVVAPALLWVLYNILQPALNQLNKMRSQ

SEQ ID NO: 8 - DNA, 767 bp, Brassica napus
  misc_feature (1)..(767): Ceres Seq. ID no. 12557607
  misc_feature (700)..(700): n is a, c, t, g, unknown, or other
atcatcatcatccactttcatctgtaatactaatatctaaatctcttccttcttcaccacccaaccaatcaagacctgactactcttgaagtttctgaaacaacagggcattttaatggcggccatgaactcgagtgttctcacctgcagctacgctatctctggtgctggctcagcagaactgaaccagaaagtgggtttggtcaattcatcagttggttttggtcaaaagaaacaaacgcttccagtgatcaaagcagctcaaagagttggtggtgatgatgttaatgaaagaagatccgcaatggtgttcttagctgctacactcttctcctctgctgctgtatctgcttccgctaatgctagcgtcttcgatgaatacctcgagaagagcaaagccaacaaagagctgaatgataagaagagattggcaacaagtggagcaaactttgcgagagcgtttactgtccagttcggaagctgcaagttccctgagaatttcactggctgccaagatcttgccaagcaaaagaaagttccatttatctcagaagatttggcgttggaatgtgaaggcaaagacaagttcaagtgtggttccaatgttttctggaaatggtgatcatcttttgtttctgttttaatccattcttgtataaactcaacaatgtatcaatccatctctctgttcatcaaagtntcatatccatttgaatttaaaagaaaccgaagaaactctgagtgtgtaatgaaacattattattcct

SEQ ID NO: 9 - protein, 168 aa, Brassica napus
  peptide (1)..(168): Ceres Seq. ID no. 12557608
MAAMNSSVLTCSYAISGAGSAELNQKVGLVNSSVGFGQKKQTLPVIKAAQRVGGDDVNERRSAMVFLAATLFSSAAVSASANASVFDEYLEKSKANKELNDKKRLATSGANFARAFTVQFGSCKFPENFTGCQDLAKQKKVPFISEDLALECEGKDKFKCGSNVFWKW

SEQ ID NO: 10 - protein, 165 aa, Brassica napus
  peptide (1)..(165): Ceres Seq. ID no. 12557609
MNSSVLTCSYAISGAGSAELNQKVGLVNSSVGFGQKKQTLPVIKAAQRVGGDDVNERRSAMVFLAATLFSSAAVSASANASVFDEYLEKSKANKELNDKKRLATSGANFARAFTVQFGSCKFPENFTGCQDLAKQKKVPFISEDLALECEGKDKFKCGSNVFWKW

SEQ ID NO: 11 - protein, 105 aa, Brassica napus
  peptide (1)..(105): Ceres Seq. ID no. 12557610
MVFLAATLFSSAAVSASANASVFDEYLEKSKANKELNDKKRLATSGANFARAFTVQFGSCKFPENFTGCQDLAKQKKVPFISEDLALECEGKDKFKCGSNVFWKW

SEQ ID NO: 12 - DNA, 763 bp, Brassica napus
  misc_feature (1)..(763): Ceres Seq. ID no. 12557654
cacttctttcctctctatcaccgaaccaacaaaagaaatctctgaaaattatctcagaatccctaaaattcactttgaaaaaatggcagaaaccgccgaaacaatcaacaccaccgtctcgcatccgcagcctgaatcagaagactccaacacattgtccgcgacggaagatcagacatcggatgaaacctcaaaagccgcagatctgaagaaggaagaatcagtggcggagacgaagccaggatccatctcgctccgcatctggccgccgacgcagaaaactcgcgacgccgtcttgaaccgcctgatcgagacgttatccaccgaatccatcctctccaagagatacggaacgctcaactccgacgaagcctccgccgtcgcgaaatccatcgaggaggaagcgttcggcgtcgcatcgagcgctgtgtccgatgacgacgatgggatcaagatccttgaggtttattccaaggagattagcaaaaggatgcttgagactgtgaaagatcgatntgcagccnccgccggaaacgggaacgacgaagcgacggacgctacgaaagacgacccggctcctgaggcggaaaagagtgaggcttgaggtctggcttactctgtctgattccgttatctattagcgttcgctttgattttgccagattcatatgaggttntgagaaatttatgacgacatctgttattgtaatgacttggttgtggattttggtatttgcttgtctgaagatggttccttcttcct

SEQ ID NO: 13 - protein, 200 aa, Brassica napus
  peptide (1)..(200): Ceres Seq. ID no. 12557655
  misc_feature (172)..(172): Xaa is any aa, unknown or other
  misc_feature (175)..(175): Xaa is any aa, unknown or other
TSFLSITEPTKEISENYLRIPKIHFEKMAETAETINTTVSHPQPESEDSNTLSATEDQTSDETSKAADLKKEESVAETKPGSISLRIWPPTQKTRDAVLNRLIETLSTESILSKRYGTLNSDEASAVAKSIEEEAFGVASSAVSDDDDGIKILEVYSKEISKRMLETVKDRXAAXAGNGNDEATDATKDDPAPEAEKSEA

SEQ ID NO: 14 - protein, 173 aa, Brassica napus
  peptide (1)..(173): Ceres Seq. ID no. 12557656
  misc_feature (145)..(145): Xaa is any aa, unknown or other
  misc_feature (148)..(148): Xaa is any aa, unknown or other
MAETAETINTTVSHPQPESEDSNTLSATEDQTSDETSKAADLKKEESVAETKPGSISLRIWPPTQKTRDAVLNRLIETLSTESILSKRYGTLNSDEASAVAKSIEEEAFGVASSAVSDDDDGIKILEVYSKEISKRMLETVKDRXAAXAGNGNDEATDATKDDPAPEAEKSEA

SEQ ID NO: 15 - DNA, 660 bp, Brassica napus
  misc_feature (1)..(660): Ceres Seq. ID no. 12557420
atctttttcttcagccgccgcttgtgtttctcctctctacgatcatggtggggtttaagaacaggttcatgttgatggaggtttatctcgacccagacaaggatctcttaggagaagggactcctgttatcctcacgaaactcaacctctccgaagcgatcaaagacagcatcctcgtcaatttcggcgagtgcggtctcgcctcttgtctcggatccttccacgtcgcgtatgtgaacccggtcacgaagctatgcattgtaagatcgtcgagagaggaacacagacgagtttggtcggcgatgacgctggtcagaagcgtcgggaactgtcccgtggtgtttaacttgctcgataacagcggttgcatcagagcgtgtcgagacgcggccttgaagtgcgagacggagaagtttaatcagtgtggaaaaggattgtctgaagaggagatccgagagatgaataggtgtttagataaactcaaactgttgtaataactcgattttttcgaatttgacccctaagttttcaaaatgtgcaatcctccccttgtcttatatactgttgcgatttgatctggatatttatggcttttttcgtgagactcggaaactcaaggggcacaagtgcaaagtcgtnttaattaataaactcaaaatt

SEQ ID NO: 16 - protein, 163 aa, Brassica napus
  peptide (1)..(163): Ceres Seq. ID no. 12557421
LFLQPPLVFLLSTIMVGFKNRFMLMEVYLDPDKDLLGEGTPVILTKLNLSEAIKDSILVNFGECGLASCLGSFHVAYVNPVTKLCIVRSSREEHRRVWSAMTLVRSVGNCPVVFNLLDNSGCIRACRDAALKCETEKFNQCGKGLSEEEIREMNRCLDKLKLL

SEQ ID NO: 17 - protein, 149 aa, Brassica napus
  peptide (1)..(149): Ceres Seq. ID no. 12557422
MVGFKNRFMLMEVYLDPDKDLLGEGTPVILTKLNLSEAIKDSILVNFGECGLASCLGSFHVAYVNPVTKLCIVRSSREEHRRVWSAMTLVRSVGNCPVVFNLLDNSGCIRACRDAALKCETEKFNQCGKGLSEEEIREMNRCLDKLKLL

SEQ ID NO: 18 - protein, 141 aa, Brassica napus
  peptide (1)..(141): Ceres Seq. ID no. 12557423
MLMEVYLDPDKDLLGEGTPVILTKLNLSEAIKDSILVNFGECGLASCLGSFHVAYVNPVTKLCIVRSSREEHRRVWSAMTLVRSVGNCPVVFNLLDNSGCIRACRDAALKCETEKFNQCGKGLSEEEIREMNRCLDKLKLL

SEQ ID NO: 19 - DNA, 887 bp, Brassica napus
  misc_feature (1)..(887): Ceres Seq. ID no. 13574681
  misc_feature (728)..(728): n is a, c, t, g, unknown, or other
  misc_feature (740)..(740): n is a, c, t, g, unknown, or other
  misc_feature (761)..(761): n is a, c, t, g, unknown, or other
  misc_feature (795)..(795): n is a, c, t, g, unknown, or other
gatttcaatctgcgaatttctctttaaaccctacaaacccttttcccgatcaaacaatgacgctccacgccgcagtgatccagaagcttctcaacaccggctcccatctcggccgccgcgccgccgagcaccnnttcaaacagtacgcctacggaacccgcaacgggatgaccatcatcgactccgacaaaaccctgatctgcctccgcagcgccgccagcttcgtcgccaacctcgcgcacatgagggggaacatctacttcgtcaacacgaaccctctcttcgacgagatcgtcgagctcacttcccgccgcatccagggcgacgcgtacaaccacaaccgctcgatgaatctgtggaatatgggaggttttttgacgaacagttacagtcctaagaagtttcggtcgaggcncaagaagctttgctttggtccgacgacgatgcctgattgtgtcgttgtgtttgataccgagaggaagagctcggtgatactcgaggccgcgaagcttcagattcctgttgtggcgattgtggatccgaatgtgccgttggagttctttgagaagattacttatcctgtgccggcacgtgactcggttaagtttgtttatttgttttgtaatgtgatcactaagtgctttgtggctgagcagatgaagatggggatcaaagatgggggcaaggatgatgtgatgaaggatttagctgcatgatttggatattcncagcacacgttnttagtctcgaatcattgtttnttcagcattgtggtttttctctactttgaaattntgagtcttctttattacatttgggtgattttgttcatgtgattgttataaagcaacagcttttttcaaaggtagatacatcagagccaattt

SEQ ID NO: 20 - protein, 237 aa, Brassica napus
  peptide (1)..(237): Ceres Seq. ID no. 13574682
  misc_feature (44)..(44): Xaa is any aa, unknown or other
  misc_feature (138)..(138): Xaa is any aa, unknown or other
FQSANFSLNPTNPFPDQTMTLHAAVIQKLLNTGSHLGRRAAEHXFKQYAYGTRNGMTIIDSDKTLICLRSAASFVANLAHMRGNIYFVNTNPLFDEIVELTSRRIQGDAYNHNRSMNLWNMGGFLTNSYSPKKFRSRXKKLCFGPTTMPDCVVVFDTERKSSVILEAAKLQIPVVAIVDPNVPLEFFEKITYPVPARDSVKFVYLFCNVITKCFVAEQMKMGIKDGGKDDVMKDLAA

SEQ ID NO: 21 - protein, 219 aa, Brassica napus
  peptide (1)..(219): Ceres Seq. ID no. 13574683
  misc_feature (26)..(26): Xaa is any aa, unknown or other
  misc_feature (120)..(120): Xaa is any aa, unknown or other
MTLHAAVIQKLLNTGSHLGRRAAEHXFKQYAYGTRNGMTIIDSDKTLICLRSAASFVANLAHMRGNIYFVNTNPLFDEIVELTSRRIQGDAYNHNRSMNLWNMGGFLTNSYSPKKFRSRXKKLCFGPTTMPDCVVVFDTERKSSVILEAAKLQIPVVAIVDPNVPLEFFEKITYPVPARDSVKFVYLFCNVITKCFVAEQMKMGIKDGGKDDVMKDLAA

SEQ ID NO: 22 - protein, 182 aa, Brassica napus
  peptide (1)..(182): Ceres Seq. ID no. 13574684
  misc_feature (83)..(83): Xaa is any aa, unknown or other
MTIIDSDKTLICLRSAASFVANLAHMRGNIYFVNTNPLFDEIVELTSRRIQGDAYNHNRSMNLWNMGGFLTNSYSPKKFRSRXKKLCFGPTTMPDCVVVFDTERKSSVILEAAKLQIPVVAIVDPNVPLEFFEKITYPVPARDSVKFVYLFCNVITKCFVAEQMKMGIKDGGKDDVMKDLAA

SEQ ID NO: 23 - DNA, 420 bp, Brassica napus
  misc_feature (1)..(420): Ceres Seq. ID no. 12556794
acacaaacacaagaccagaaaaaaaaaacagaaagtaaacatgagatctctcttcttactagccttgttcctagttcttgcttttcaccatggtgaagcagccgtgacttgcaacaacgtggttggtgatctttacccttgcctctcctacgtgatgcaaggcggaaactccccatcaactaactgctgcagcggtgtcagaacgctcaacagtcaggctcaaaccactgcggatcgtcagagcgtctgccgttgcatcaaaaatgctattggaggagcctcttactcttcaagcaaccttaaaaatgctctgtctttgcctgctaagtgtggtgttaatctccctttcagtatcagcccttccaccaactgcaacagtatccactgaaataagcagaagatcctaaaggaagctactac

SEQ ID NO: 24 - protein, 128 aa, Brassica napus
  peptide (1)..(128): Ceres Seq. ID no. 12556795
HKHKTRKKKQKVNMRSLFLLALFLVLAFHHGEAAVTCNNVVGDLYPCLSYVMQGGNSPSTNCCSGVRTLNSQAQTTADRQSVCRCIKNAIGGASYSSSNLKNALSLPAKCGVNLPFSISPSTNCNSIH

SEQ ID NO: 25 - protein, 115 aa, Brassica napus
  peptide (1)..(115): Ceres Seq. ID no. 12556796
MRSLFLLALFLVLAFHHGEAAVTCNNVVGDLYPCLSYVMQGGNSPSTNCCSGVRTLNSQAQTTADRQSVCRCIKNAIGGASYSSSNLKNALSLPAKCGVNLPFSISPSTNCNSIH

SEQ ID NO: 26 - protein, 77 aa, Brassica napus
  peptide (1)..(77): Ceres Seq. ID no. 12556797
MQGGNSPSTNCCSGVRTLNSQAQTTADRQSVCRCIKNAIGGASYSSSNLKNALSLPAKCGVNLPFSISPSTNCNSIH

SEQ ID NO: 27 - DNA, 792 bp, Brassica napus
  misc_feature (1)..(792): Ceres Seq. ID no. 12578688
aaatcctctggttatggcgtctccgacttctctaaactcaacccctacagatctcgttcgaagaaagaagagacaatccgcttcctcctccgccgcatcgcctcggagaaacaacgcagcttccgcaaccgccggagacggcgagagccacgcgcgatggagatcggagaagcagcagcgtaactactccgcaaagctggtccaggcgctgcaacaggtccgcctcagctcctccgccgccgaaacaccatctccgacggcgaagaagcgagggaaagccgtccgggaagccgccgaccgcgctctcgccgtctccgctcgcgggaggacgctctggagcagagcgatcctcgctaaccggatcaagctcaaattccggaaacagaaacggccgcgaccggcggcgatcccggccgtgatcacgacgggaagtagcagcagcagcaatagcggaagatggaagaaacggagagtgacggttgtgaaactgaataagaagagtataccgacggttaaccggaaagtacgtgtactcggccggttagttccgggttgcaagaaagaatcagtaccggttattntagaagaagcgaccgattacatccaggctttggagatgcaagtcagagccatgaagtctctagctgagcttctctccggctcaaactcagctcctccgccgatttgatgaggttaaaatcgtcattttaagttctgccaatctctgtgtctctctgtgtacaccaaaacacttttcatattaatatatgtaaacataatacgtttgagtgt

SEQ ID NO: 28 - protein, 228 aa, Brassica napus
  peptide (1)..(228): Ceres Seq. ID no. 12578689
  misc_feature (194)..(194): Xaa is any aa, unknown or other
NPLVMASPTSLNSTPTDLVRRKKRQSASSSAASPRRNNAASATAGDGESHARWRSEKQQRNYSAKLVQALQQVRLSSSAAETPSPTAKKRGKAVREAADRALAVSARGRTLWSRAILANRIKLKFRKQKRPRPAAIPAVITTGSSSSSNSGRWKKRRVTVVKLNKKSIPTVNRKVRVLGRLVPGCKKESVPVIXEEATDYIQALEMQVRAMKSLAELLSGSNSAPPPI

SEQ ID NO: 29 - protein, 224 aa, Brassica napus
  peptide (1)..(224): Ceres Seq. ID no. 12578690
  misc_feature (190)..(190): Xaa is any aa, unknown or other
MASPTSLNSTPTDLVRRKKRQSASSSAASPRRNNAASATAGDGESHARWRSEKQQRNYSAKLVQALQQVRLSSSAAETPSPTAKKRGKAVREAADRALAVSARGRTLWSRAILANRIKLKFRKQKRPRPAAIPAVITTGSSSSSNSGRWKKRRVTVVKLNKKSIPTVNRKVRVLGRLVPGCKKESVPVIXEEATDYIQALEMQVRAMKSLAELLSGSNSAPPPI

SEQ ID NO: 30 - DNA, 809 bp, Brassica napus
  misc_feature (1)..(809): Ceres Seq. ID no. 12556893
acacttcggtatatccgccttcttcttcttcaacaacaattctctctcagagcctatactaaatctcccggagctctacttctccggccgaaactatgtctcagtctatccaattctcaactccttcacgcactcctcaccttctccacctccctaactcacgcttccaccgtcctctcacttccttatccttccgccaattccctctcaagtacacctcaatcagagcctcctcctctccagatctcggctcctcctcatcctcccaggtccttcactctcctaacggcactggcgctgccaaaccggaagagcgatccgtcgtagccaccgcggtctccacggatacggcagcgatagacgtagataccgtgacggaagcggagctgaaggagaatggattcaggagcacgaggaggacgaagctgatctgcacgatcgggcctgccacgtgcgggttcgagcaactggaagcgctcgcggagggaggcatgaacgtggcgaggctcaacatgtgccncggcacgcgcgagtggcnccgcgatgtgatacgcagcgttagaaagcttaacgaggagaaaggattcgcggttgctatcatgatggacnctgaaggcagtgagattcacatgggagatcttggcggtgaatcttntgctaaatctgaggttttgtcttctcttttctccatctcaatcagagcttgagcttgacattattgctctgtataattagatgattggtaggcctgagcattgtaactgaatcggtcagtgttntaataattggtatagcctgcgcttactcgg

SEQ ID NO: 31 - protein, 203 aa, Brassica napus
  peptide (1)..(203): Ceres Seq. ID no. 12556894
  misc_feature (142)..(142): Xaa is any aa, unknown or other
  misc_feature (148)..(148): Xaa is any aa, unknown or other
  misc_feature (172)..(172): Xaa is any aa, unknown or other
  misc_feature (187)..(187): Xaa is any aa, unknown or other
MSQSIQFSTPSRTPHLLHLPNSRFHRPLTSLSFRQFPLKYTSIRASSSPDLGSSSSSQVLHSPNGTGAAKPEERSVVATAVSTDTAAIDVDTVTEAELKENGFRSTRRTKLICTIGPATCGFEQLEALAEGGMNVARLNMCXGTREWXRDVIRSVRKLNEEKGFAVAIMMDXEGSEIHMGDLGGESXAKSEVLSSLFSISIRA

SEQ ID NO: 32 - protein, 108 aa, Brassica napus
  peptide (1)..(108): Ceres Seq. ID no. 12556895
TLRYIRLLLLQQQFSLRAYTKSPGALLLRPKLCLSLSNSQLLHALLTFSTSLTHASTVLSLPYPSANSLSSTPQSEPPPLQISAPPHPPRSFTLLTALALPNRKSDPS

SEQ ID NO: 33 - DNA, 935 bp, Brassica napus
  misc_feature (1)..(935): Ceres Seq. ID no. 13574766
  misc_feature (817)..(817): n is a, c, t, g, unknown, or other
atagatttgatttcttctacaaacatcgatcgaaagagagacgatcctttaagatggcgaccgtagacnagagttcttcagctaagagatggcttccacttgaagctaacccagatgttatgaatcagtttctgtgggggcttggacttgccccagatgcagctgagtgtaatgatgtgtttggtttagatgacgagcttcttgagatggttccaaagcctgtccttgctgttctcttcctttaccctatcaccaaaaagagtgaagaagagagaattgagcaagacaaggagatcaaggagaaggtgcatattgataaagtttactttatgaaacaaactgttggtaatgcttgtggaaccattggtcttcttcatgctattggcaacattacctctgaaatcaagctttctgagggatccttcttagataagtttttcaaaaccaccagcaatatgactcctatggagcgtggaaggtttntagagaatgatagtcaaatagaagatgctcattctgcagctgttacagctggtgaaacnccggcttntgatgacgtgaacacgcatttcatctgtctagcttgtgtagatggtgagctctatgaacttgatggaaggaaagcaggaccaatttcacatggngcttcctctccagctaccctgttgaaggattcgacgaaagtgataaagaagattatcgaaaagaatccggacacgctcaacttcaatgttatggccatctntaagagaacctgaggatgttnttaagaagcgaagctcatttcatttagtcttgcgtttttgagtttgtgacncaatgaaccaaccacacagattgtttatctaggtggattctgttttactgctttctgaatcttctttttcttgtttctgaaacttttaagagtttatgatctcaaggttttttttttt

SEQ ID NO: 34 - protein, 251 aa, Brassica napus
  peptide (1)..(251): Ceres Seq. ID no. 13574767
  misc_feature (23)..(23): Xaa is any aa, unknown or other
  misc_feature (161)..(161): Xaa is any aa, unknown or other
  misc_feature (180)..(180): Xaa is any aa, unknown or other
  misc_feature (183)..(183): Xaa is any aa, unknown or other
  misc_feature (214)..(214): Xaa is any aa, unknown or other
  misc_feature (248)..(248): Xaa is any aa, unknown or other
RFDFFYKHRSKERRSFKMATVDXSSSAKRWLPLEANPDVMNQFLWGLGLAPDAAECNDVFGLDDELLEMVPKPVLAVLFLYPITKKSEEERIEQDKEIKEKVHIDKVYFMKQTVGNACGTIGLLHAIGNITSEIKLSEGSFLDKFFKTTSNMTPMERGRFXENDSQIEDAHSAAVTAGEXPAXDDVNTHFICLACVDGELYELDGRKAGPISHXASSPATLLKDSTKVIKKIIEKNPDTLNFNVMAIXKRT

SEQ ID NO: 35 - protein, 234 aa, Brassica napus
  peptide (1)..(234): Ceres Seq. ID no. 13574768
  misc_feature (6)..(6): Xaa is any aa, unknown or other
  misc_feature (144)..(144): Xaa is any aa, unknown or other
  misc_feature (163)..(163): Xaa is any aa, unknown or other
  misc_feature (166)..(166): Xaa is any aa, unknown or other
  misc_feature (197)..(197): Xaa is any aa, unknown or other
  misc_feature (231)..(231): Xaa is any aa, unknown or other
MATVDXSSSAKRWLPLEANPDVMNQFLWGLGLAPDAAECNDVFGLDDELLEMVPKPVLAVLFLYPITKKSEEERIEQDKEIKEKVHIDKVYFMKQTVGNACGTIGLLHAIGNITSEIKLSEGSFLDKFFKTTSNMTPMERGRFXENDSQIEDAHSAAVTAGEXPAXDDVNTHFICLACVDGELYELDGRKAGPISHXASSPATLLKDSTKVIKKIIEKNPDTLNFNVMAIXKRT

SEQ ID NO: 36 - protein, 212 aa, Brassica napus
  peptide (1)..(212): Ceres Seq. ID no. 13574769
  misc_feature (122)..(122): Xaa is any aa, unknown or other
  misc_feature (141)..(141): Xaa is any aa, unknown or other
  misc_feature (144)..(144): Xaa is any aa, unknown or other
  misc_feature (175)..(175): Xaa is any aa, unknown or other
  misc_feature (209)..(209): Xaa is any aa, unknown or other
MNQFLWGLGLAPDAAECNDVFGLDDELLEMVPKPVLAVLFLYPITKKSEEERIEQDKEIKEKVHIDKVYFMKQTVGNACGTIGLLHAIGNITSEIKLSEGSFLDKFFKTTSNMTPMERGRFXENDSQIEDAHSAAVTAGEXPAXDDVNTHFICLACVDGELYELDGRKAGPISHXASSPATLLKDSTKVIKKIIEKNPDTLNFNVMAIXKRT

SEQ ID NO: 37 - DNA, 570 bp, Brassica napus
  misc_feature (1)..(570): Ceres Seq. ID no. 12556792
gggcctgttgttagtctcgtttatccactacatgcctcagtcagagcaattgaaactcaatctcacgctgatgacaaacaatggctcacttactgggtcctttactccttacttacactcttcgagctcacattcgccaaactcatcgaatgggtaccaatatggtcgtacttgaagctgatcttgacttgctggcttgtgattccttacttcagcggcgctgcttatgtctacgaacattttgtgagacctgtgtttgttaacccacagagcattaacatttggtatgtgccaaagaagatggatatnttcagaaagccagatgatgtgttaacagctgctgagaagtacattgcagagaatggacctgatgctttccagaagatcttaagccgatctgataaatcaagaagatatgagcagcgtgagaccatgtatggtgaagagtatcagtaccaagggcactacaaaagcttttagtactagacttgtgaagcaagcttcatgttgtttgttttgcttctttgtaaaagaagtttataaataaactttattgaaacttgttcagct

SEQ ID NO: 38 - protein, 159 aa, Brassica napus
  peptide (1)..(159): Ceres Seq. ID no. 12556793
  misc_feature (103)..(103): Xaa is any aa, unknown or other
GPVVSLVYPLHASVRAIETQSHADDKQWLTYWVLYSLLTLFELTFAKLIEWVPIWSYLKLILTCWLVIPYFSGAAYVYEHFVRPVFVNPQSINIWYVPKKMDXFRKPDDVLTAAEKYIAENGPDAFQKILSRSDKSRRYEQRETMYGEEYQYQGHYKSF

SEQ ID NO: 39 - DNA, 762 bp, Brassica napus
  misc_feature (1)..(762): Ceres Seq. ID no. 12556910
atacgaaaccttgtctagtcaaaaagcgcagctgaaaagaaaaacgagtgtggagaaattaaagaagaagaagaagaagaagaagaatagattatctggtgtgtttcgatggcgatgacagtagcagcttcgtcctctgtggcagtgatgattccacgtgttacctccgtctccgccagcttctccgccgttccttaccttcctccgctgcctcctcgctcatttggccgatcctctttcactgttccgccgaagctagtttcaggtaatggttcgcagaagggtgaattgatgaagatgagagcttcttcatcagatgagacctcaacgtccattgacaccaacgaactcttcacagacttgaaggaaaagtgggatggtnttgagaacaagtcgactgtaataatatattgaggaggagccattgttgctgtttggttatcttccattgttgttggtgccatcaactctgttcctctgcttcccaaagttatggaacttattggtntcggctacacaggatggttcgtctaccgatacctcctcttcaagtcaagcagaaaggaactggctgaggatattgattccttgaagaagaagatcgctgggaccgaatagattctttttaaaataataaaataaaccatctttatatctggaattttcttgtaatgtgattattgtacaatctccctgtttcaacaatgtatcttgtgtagtctgaaactattatcttagatccactggcaatgaaatctattt

SEQ ID NO: 40 - protein, 101 aa, Brassica napus
  peptide (1)..(101): Ceres Seq. ID no. 12556911
  misc_feature (92)..(92): Xaa is any aa, unknown or other
MAMTVAASSSVAVMIPRVTSVSASFSAVPYLPPLPPRSFGRSSFTVPPKLVSGNGSQKGELMKMRASSSDETSTSIDTNELFTDLKEKWDGXENKSTVIIY

SEQ ID NO: 41 - protein, 99 aa, Brassica napus
  peptide (1)..(99): Ceres Seq. ID no. 12556912
  misc_feature (90)..(90): Xaa is any aa, unknown or other
MTVAASSSVAVMIPRVTSVSASFSAVPYLPPLPPRSFGRSSFTVPPKLVSGNGSQKGELMKMRASSSDETSTSIDTNELFTDLKEKWDGXENKSTVIIY

SEQ ID NO: 42 - protein, 88 aa, Brassica napus
  peptide (1)..(88): Ceres Seq. ID no. 12556913
  misc_feature (79)..(79): Xaa is any aa, unknown or other
MIPRVTSVSASFSAVPYLPPLPPRSFGRSSFTVPPKLVSGNGSQKGELMKMRASSSDETSTSIDTNELFTDLKEKWDGXENKSTVIIY

SEQ ID NO: 43 - DNA, 879 bp, Brassica napus
  misc_feature (1)..(879): Ceres Seq. ID no. 12557497
  misc_feature (856)..(856): n is a, c, t, g, unknown, or other
  misc_feature (872)..(872): n is a, c, t, g, unknown, or other
aaaaacacctctctctcgttcacatctttcttctttgtggtaaacagaaagggagttagagagagagagagaaaacaatggcgtctaactcgctcatgagctgcggcatcgccgccgtctacccttctcttctctcttcttcaaagtctaagttcgtctccgccggagttcctctccccaacgccgggaacgttggccgtgtcagaatggctgctcactggatgcccggcgagccacgaccagcttacctcgacggttctgctcctggggactttgggtttgacccacttggacttggagaggttccagagaaccttgagaggtacaaagaatcagagctcattcactgtagatgggctatgctcgctgttccagggattttggtaccagaggctttgggatatggaaactgggttaaggcacaagaatgggcagcagtacctggaggacaagccacttacttggggacctcagtcccttggggtactttgcccncaatnttggctatagagttnttagctattgcctttgttgagcnccaaaggagtatggagaaggaccctgagaaaaanaagtacccgggaggngcatttgaccctntcggatactccaaagacccaaanaagttcgaggagttgaaagttaaagagatcaagaacgggcggcttgcactgttggcgtttgtaggcttntgtgtgcaacaatcggcctacccaggcacaggaccattggagaacttggctactcacttggccgatccatggcacaaaaacattggcgatattgttatccctttgaactgatgacttgtaaaaaagatagtaatatatcctatgagctttgtgtatcaaaactntgtgttatgaaagacncattgtg

SEQ ID NO: 44 - protein, 241 aa, Brassica napus
  peptide (1)..(241): Ceres Seq. ID no. 12557498
  misc_feature (140)..(140): Xaa is any aa, unknown or other
  misc_feature (141)..(141): Xaa is any aa, unknown or other
  misc_feature (146)..(146): Xaa is any aa, unknown or other
  misc_feature (154)..(154): Xaa is any aa, unknown or other
  misc_feature (165)..(165): Xaa is any aa, unknown or other
  misc_feature (170)..(170): Xaa is any aa, unknown or other
  misc_feature (175)..(175): Xaa is any aa, unknown or other
  misc_feature (182)..(182): Xaa is any aa, unknown or other
  misc_feature (205)..(205): Xaa is any aa, unknown or other
MASNSLMSCGIAAVYPSLLSSSKSKFVSAGVPLPNAGNVGRVRMAAHWMPGEPRPAYLDGSAPGDFGFDPLGLGEVPENLERYKESELIHCRWAMLAVPGILVPEALGYGNWVKAQEWAAVPGGQATYLGTSVPWGTLPXXLAIEXLAIAFVEXQRSMEKDPEKXKYPGXAFDPXGYSKDPXKFEELKVKEIKNGRLALLAFVGXCVQQSAYPGTGPLENLATHLADPWHKNIGDIVIPLN

SEQ ID NO: 45 - protein, 235 aa, Brassica napus
  peptide (1)..(235): Ceres Seq. ID no. 12557499
  misc_feature (134)..(134): Xaa is any aa, unknown or other
  misc_feature (135)..(135): Xaa is any aa, unknown or other
  misc_feature (140)..(140): Xaa is any aa, unknown or other
  misc_feature (148)..(148): Xaa is any aa, unknown or other
  misc_feature (159)..(159): Xaa is any aa, unknown or other
  misc_feature (164)..(164): Xaa is any aa, unknown or other
  misc_feature (169)..(169): Xaa is any aa, unknown or other
  misc_feature (176)..(176): Xaa is any aa, unknown or other
  misc_feature (199)..(199): Xaa is any aa, unknown or other
MSCGIAAVYPSLLSSSKSKFVSAGVPLPNAGNVGRVRMAAHWMPGEPRPAYLDGSAPGDFGFDPLGLGEVPENLERYKESELIHCRWAMLAVPGILVPEALGYGNWVKAQEWAAVPGGQATYLGTSVPWGTLPXXLAIEXLAIAFVEXQRSMEKDPEKXKYPGXAFDPXGYSKDPXKFEELKVKEIKNGRLALLAFVGXCVQQSAYPGTGPLENLATHLADPWHKNIGDIVIPLN

SEQ ID NO: 46 - protein, 198 aa, Brassica napus
  peptide (1)..(198): Ceres Seq. ID no. 12557500
  misc_feature (97)..(97): Xaa is any aa, unknown or other
  misc_feature (98)..(98): Xaa is any aa, unknown or other
  misc_feature (103)..(103): Xaa is any aa, unknown or other
  misc_feature (111)..(111): Xaa is any aa, unknown or other
  misc_feature (122)..(122): Xaa is any aa, unknown or other
  misc_feature (127)..(127): Xaa is any aa, unknown or other
  misc_feature (132)..(132): Xaa is any aa, unknown or other
  misc_feature (139)..(139): Xaa is any aa, unknown or other
  misc_feature (162)..(162): Xaa is any aa, unknown or other
MAAHWMPGEPRPAYLDGSAPGDFGFDPLGLGEVPENLERYKESELIHCRWAMLAVPGILVPEALGYGNWVKAQEWAAVPGGQATYLGTSVPWGTLPXXLAIEXLAIAFVEXQRSMEKDPEKXKYPGXAFDPXGYSKDPXKFEELKVKEIKNGRLALLAFVGXCVQQSAYPGTGPLENLATHLADPWHKNIGDIVIPLN

SEQ ID NO: 47 - DNA, 1081 bp, Brassica napus
  misc_feature (1)..(1081): Ceres Seq. ID no. 13574576
acctcacattcaacatcacagcaggaggagagagagaaagagagagagagagagcagagttcttcagtccatggcttccttagcttcatccaccacacttatctcttcatccaccgttcttcttccctcaaagccttctcctttttctcccgccgcctccttcctccgaactcttccttctaccgctgcatcaccgtcttctctccgttccggtttctccagcattggctccctcacctgcatcccctcttcctctcgccgtagcttcgccgtcaaggcccaggccgatgatttgccactggttggtaacaaagcgcctgattttgaggcagaggctgtttttgatcaagagttcatcaaggtgaagctctcagagtacattggtaaaaagtatgtgattctctttttctaccctttggacttcacttttgtctgccctacagagattactgcctttagtgaccgttatgaagwatttgagaagctaaacacggaagtgttaggtgtctcagtggacagtgtgttctcgcatcttgsgtgggtccaaacagagagaaagtcaggagggctcggtgatytgaactacccacttgtctctgatatcactaaatccatttcaaaatcttttggtgtgctcatccctgatcagggcattgcactgagagggcttttcatcattgacaaggaaggagtcatccagcattccaccatcaacaacctcggtattggccgaagcgttgatgagacaatgagaaccctccaggcattacagtatgttcaagaaaaccctgatgaggtytgccccgcgggatggaagcctggggagaaatcgatgaagcctgaccccaagctgagcaaagagtatttttcagctatttaaaggcttttttaaaacaaatgattggtgaaaagcagaggcatttttttttttcctatgttggagtctttgagtgctgagtttaatatgttttttgccaaattaacatttgcttgaatatctttgctttgtcttcattagttatgtttytgctgtgtgtgttttcctcaaaatttaataaaaaacaatggaatttatgtgttt

SEQ ID NO: 48 - protein, 292 aa, Brassica napus
  peptide (1)..(292): Ceres Seq. ID no. 15222598
  misc_feature (158)..(158): Xaa is any aa, unknown or other
  misc_feature (179)..(179): Xaa is any aa, unknown or other
  misc_feature (193)..(193): Xaa is any aa, unknown or other
  misc_feature (266)..(266): Xaa is any aa, unknown or other
PHIQHHSRRRERKRERESRVLQSMASLASSTTLISSSTVLLPSKPSPFSPAASFLRTLPSTAASPSSLRSGFSSIGSLTCIPSSSRRSFAVKAQADDLPLVGNKAPDFEAEAVFDQEFIKVKLSEYIGKKYVILFFYPLDFTFVCPTEITAFSDRYEXFEKLNTEVLGVSVDSVFSHLXWVQTERKSGGLGDXNYPLVSDITKSISKSFGVLIPDQGIALRGLFIIDKEGVIQHSTINNLGIGRSVDETMRTLQALQYVQENPDEXCPAGWKPGEKSMKPDPKLSKEYFSAI

SEQ ID NO: 49 - protein, 269 aa, Brassica napus
  peptide (1)..(269): Ceres Seq. ID no. 15222599
  misc_feature (135)..(135): Xaa is any aa, unknown or other
  misc_feature (156)..(156): Xaa is any aa, unknown or other
  misc_feature (170)..(170): Xaa is any aa, unknown or other
  misc_feature (243)..(243): Xaa is any aa, unknown or other
MASLASSTTLISSSTVLLPSKPSPFSPAASFLRTLPSTAASPSSLRSGFSSIGSLTCIPSSSRRSFAVKAQADDLPLVGNKAPDFEAEAVFDQEFIKVKLSEYIGKKYVILFFYPLDFTFVCPTEITAFSDRYEXFEKLNTEVLGVSVDSVFSHLXWVQTERKSGGLGDXNYPLVSDITKSISKSFGVLIPDQGIALRGLFIIDKEGVIQHSTINNLGIGRSVDETMRTLQALQYVQENPDEXCPAGWKPGEKSMKPDPKLSKEYFSAI

SEQ ID NO: 50 - DNA, 491 bp, Brassica napus
  misc_feature (1)..(491): Ceres Seq. ID no. 12557827
aatctgcagcgactctctcagacaactttcgatcttcttcttcatctcaatctcgtcgtttcgatcgatcaaaagaatcggagatggcatcgacagcggcggttccgttntggagagcggcggggatgacgtatataacgtactcaaacatctgcgcgaatctggtcaggaactgtctgaaagaaccattcaaggctgaatccatgagccgcgagaaggttcacttctccctctccaaatgggccgatggaaagccccagaaaccagttttgcggtcagacgcacctcaagtttgaggcttttgatcaagatatggttttctgaatgggataaaagggatgctgtaacgtctctctctctttggatattttgtttcctttttgttgtattcgatgaaagattgatactttgccnatcaataatgcaaaaacatggagcttnttctgtttctttnttaagacgaattagttttttgtggatttnttgagttg

SEQ ID NO: 51 - protein, 97 aa, Brassica napus
  peptide (1)..(97): Ceres Seq. ID no. 12557828
  misc_feature (36)..(36): Xaa is any aa, unknown or other
SAATLSDNFRSSSSSQSRRFDRSKESEMASTAAVPXWRAAGMTYITYSNICANLVRNCLKEPFKAESMSREKVHFSLSKWADGKPQKPVLRSDAPQV

SEQ ID NO: 52 - protein, 82 aa, Brassica napus
  peptide (1)..(82): Ceres Seq. ID no. 12557829
  misc_feature (59)..(59): Xaa is any aa, unknown or other
  misc_feature (68)..(68): Xaa is any aa, unknown or other
  misc_feature (72)..(72): Xaa is any aa, unknown or other
  misc_feature (82)..(82): Xaa is any aa, unknown or other
MGRWKAPETSFAVRRTSSLRLLIKIWFSEWDKRDAVTSLSLWIFCFLFVVFDERLILCXSIMQKHGAXSVSXLRRISFLWIX

SEQ ID NO: 53 - protein, 70 aa, Brassica napus
  peptide (1)..(70): Ceres Seq. ID no. 12557830
  misc_feature (9)..(9): Xaa is any aa, unknown or other
MASTAAVPXWRAAGMTYITYSNICANLVRNCLKEPFKAESMSREKVHFSLSKWADGKPQKPVLRSDAPQV

SEQ ID NO: 54 - DNA, 646 bp, Brassica napus
  misc_feature (1)..(646): Ceres Seq. ID no. 12556948
agagttaaattctatcaatctctaaaccaactggtttaacatgcaagaactagcaacttgggagttgtaaagcagagatcaccacatctacaaaaaatctcccacaccgacatgtcgagatccttagctttcgtttacttatccatacttttccttcagacccatctctcgatctccgtcgaggttccggtttcgtcggtgaacggagaaatagacgcaatgcttgaccggaaaggcgtagtcggggaagaaggagaagagatgatgccgtcggatataagccggagagtgatgatgatgcggaaacagtacataagctacgcaacgctaaggagagacatggttccttgtcagaggccaggcgcttcctactacgcttgtcgctcaggacaggccaattcttacagcagaggatgcaacatcattactaggtgtgctcgagacactagcgacatcaagacctgaaacatttttatccggttttnttttaaatgcggatnttgataatgcgattaaaatgctctctntccaaggatgaggcaagtaaaatctttaattcattttgtaatgttgttgtttacattagaataaggcttatgtagtttatatgtaatcaatattgatataattgatatntgtattgttg

SEQ ID NO: 55 - protein, 117 aa, Brassica napus
  peptide (1)..(117): Ceres Seq. ID no. 12556949
MSRSLAFVYLSILFLQTHLSISVEVPVSSVNGEIDAMLDRKGVVGEEGEEMMPSDISRRVMMMRKQYISYATLRRDMVPCQRPGASYYACRSGQANSYSRGCNIITRCARDTSDIKT

SEQ ID NO: 56 - protein, 81 aa, Brassica napus
  peptide (1)..(81): Ceres Seq. ID no. 12556950
MLDRKGVVGEEGEEMMPSDISRRVMMMRKQYISYATLRRDMVPCQRPGASYYACRSGQANSYSRGCNIITRCARDTSDIKT

SEQ ID NO: 57 - protein, 67 aa, Brassica napus
  peptide (1)..(67): Ceres Seq. ID no. 12556951
MMPSDISRRVMMMRKQYISYATLRRDMVPCQRPGASYYACRSGQANSYSRGCNIITRCARDTSDIKT

SEQ ID NO: 58 - DNA, 782 bp, Brassica napus
  misc_feature (1)..(782): Ceres Seq. ID no. 12557831
atcaaacaaaatccttggctccccccgaatctagctttctccctctctctctcgatggagaagaatcaagcaagccttcttctccagcaacagctcaaacatctgtgcaagaacccggttgatggtttctctgctggtntcgtcgacgagagtaacgtctttcagtggagcgtctcgatcatgggtcctcccgatactttgtatgaagggggattctttaatgcaattatgacatttccagagcaatatcctaacctcccaccaactgtgaggttcacctcggagatgtggcatcccaatgtttattctgatgggaaagtttgcatatcgattcttcatcatcctggcgatgatcctaatggatacgagcttgcctctgaacgttggacacctgtccatacggtagaaaccattatgttgagtatcatatccatgctctcgagtccaaacgatgagtcaccagcgaacgtggaagctgcaaaagagtggagagagaacagagcagggtttaggaagaaagtgagtcgctgtgttagaaaatcgcaagagatgctatgagccatctcttcttggcgtttttatgtgttgtagaaatttcgatcctaagctaagagagagagaacgtaagtagcatcaatcatcaagtagcaggcggatgaatctgtgtgctcaaaagcttgttttctttttatggttttggagatggctttaaggtttggaatattgtggtggaatcaaatcaactccnccttttaggattataatcttactctcgttaatgg

SEQ ID NO: 59 - protein, 185 aa, Brassica napus
  peptide (1)..(185): Ceres Seq. ID no. 12557832
  misc_feature (47)..(47): Xaa is any aa, unknown or other
IKQNPWLPPNLAFSLSLSMEKNQASLLLQQQLKHLCKNPVDGFSAGXVDESNVFQWSVSIMGPPDTLYEGGFFNAIMTFPEQYPNLPPTVRFTSEMWHPNVYSDGKVCISILHHPGDDPNGYELASERWTPVHTVETIMLSIISMLSSPNDESPANVEAAKEWRENRAGFRKKVSRCVRKSQEML

SEQ ID NO: 60 - protein, 167 aa, Brassica napus
  peptide (1)..(167): Ceres Seq. ID no. 12557833
  misc_feature (29)..(29): Xaa is any aa, unknown or other
MEKNQASLLLQQQLKHLCKNPVDGFSAGXVDESNVFQWSVSIMGPPDTLYEGGFFNAIMTFPEQYPNLPPTVRFTSEMWHPNVYSDGKVCISILHHPGDDPNGYELASERWTPVHTVETIMLSIISMLSSPNDESPANVEAAKEWRENRAGFRKKVSRCVRKSQEML

SEQ ID NO: 61 - protein, 125 aa, Brassica napus
  peptide (1)..(125): Ceres Seq. ID no. 12557834
MGPPDTLYEGGFFNAIMTFPEQYPNLPPTVRFTSEMWHPNVYSDGKVCISILHHPGDDPNGYELASERWTPVHTVETIMLSIISMLSSPNDESPANVEAAKEWRENRAGFRKKVSRCVRKSQEML

SEQ ID NO: 62 - DNA, 577 bp, Brassica napus
  misc_feature (1)..(577): Ceres Seq. ID no. 12557915
ggggagcctcccttcgcaaagcctataccttcgacaccgtccaaaacttctggggtttgcacgagactatattcatccctagcaaactgacgccgaatgctgaaattcacatgttcaaagctggtgttgagcctaagtgggaagatcctgagtgtgctaatggcggaaagtggacttttgttgttacctccaaccgcaagcctgctttagacaaggcttggcttgaaactatgggtattgggaagaagtggaaggagatacttgatgtcaccgacaagataactttcactaaccatgatgattctagaagaactcggttcactgtctgaagagaagacacaagtgtggtgagacctgaggaagatgcaatctagctttgtcttgcattattctgtcggtttactcatagctgagagagcctgagacctttagggacactcactttgaggtgtaactctacaaagttttatttttcactggaaagaagttatttaatattaagttcggttatatctttttggaagcatcaaattttggacacactttctcttaaatcaaatgtctgatttttaatgct

SEQ ID NO: 63 - protein, 108 aa, Brassica napus
  peptide (1)..(108): Ceres Seq. ID no. 12557916
GASLRKAYTFDTVQNFWGLHETIFIPSKLTPNAEIHMFKAGVEPKWEDPECANGGKWTFVVTSNRKPALDKAWLETMGIGKKWKEILDVTDKITFTNHDDSRRTRFTV

SEQ ID NO: 64 - protein, 72 aa, Brassica napus
  peptide (1)..(72): Ceres Seq. ID no. 12557917
MFKAGVEPKWEDPECANGGKWTFVVTSNRKPALDKAWLETMGIGKKWKEILDVTDKITFTNHDDSRRTRFTV

SEQ ID NO: 65 - DNA, 811 bp, Brassica napus
  misc_feature (1)..(811): Ceres Seq. ID no. 12557850
aaaaacctgattttaccactaaactgctgtcttgtaagaagaagccgcaaaactcttaggactcttcttcgtggtacgttcaaaaggtttctccttcggtttcaaagattctgtgaagatgttctccgctcagaacaagatcaagaaggacaagaatgccgagccgacagaatgcgacgtgcaagttgctcaggctttgtttgatttggagaacactaaccaggagctgaaaagcgagctgaaagatctctacatcaaccaagctgttaacatggacatctgtggaaaccgcaaggctattgtgatttacgtcccattcagattgaggaaagctttccgcaagatccacccccgtctcgttagagagctcgagaagaagttcagtggaaaggatgttatctttgttgccacaagaaggatcatgcgtcctcccaagaagggtgcagctgttcagaggccacgcaacagaactntaacctctgttcacgaagcaatgctcgaggacgtcgcttaccccgctgagatcgttggaaaacgtactcgataccgtcttgatggatccaaagtcatgaaggtgtatttggaggccaaggaaaggaacaacncagagtacaagctcgagactatggttggtgtgtaccgtaaacttactggaaaggatgtcacttttgagtacccggtcgaagcttgaaagtaagacgatgctgaagaatcatcaggatagaggagagattttcaattatgtattttggtatttgatgtaatgaataccctttgtgcttttcaattttgaaacctatgttataatttc

SEQ ID NO: 66 - protein, 190 aa, Brassica napus
  peptide (1)..(190): Ceres Seq. ID no. 12557851
  misc_feature (119)..(119): Xaa is any aa, unknown or other
  misc_feature (163)..(163): Xaa is any aa, unknown or other
MFSAQNKIKKDKNAEPTECDVQVAQALFDLENTNQELKSELKDLYINQAVNMDICGNRKAIVIYVPFRLRKAFRKIHPRLVRELEKKFSGKDVIFVATRRIMRPPKKGAAVQRPRNRTXTSVHEAMLEDVAYPAEIVGKRTRYRLDGSKVMKVYLEAKERNNXEYKLETMVGVYRKLTGKDVTFEYPVEA

SEQ ID NO: 67 - protein, 139 aa, Brassica napus
  peptide (1)..(139): Ceres Seq. ID no. 12557852
  misc_feature (68)..(68): Xaa is any aa, unknown or other
  misc_feature (112)..(112): Xaa is any aa, unknown or other
MDICGNRKAIVIYVPFRLRKAFRKIHPRLVRELEKKFSGKDVIFVATRRIMRPPKKGAAVQRPRNRTXTSVHEAMLEDVAYPAEIVGKRTRYRLDGSKVMKVYLEAKERNNXEYKLETMVGVYRKLTGKDVTFEYPVEA

SEQ ID NO: 68 - DNA, 834 bp, Brassica napus
  misc_feature (1)..(834): Ceres Seq. ID no. 13574788
ataatttctgcaagatcatcaaaagctgatacaccaagctggttataaactctactttctcagtttcagacatacaaaaacaacagaaaaatgggaacagagatggtcatggttcacgaggttccttttcctccacagatcatcacttccaagcccctctctcttcttggccaaggcatcactgacatagagatccatttccttcaagtgaagttcacggccataggagtttacttagatccttcagatgttaaaacccatcttgacaaatggaaaggcaagaccggaaaggatcttgccggcgatgacgacttcttcgacgccctggcctccggggagattgagaaagttataagggtggtggttataaaggaaataaaaggagctcagtacggagtgcagctagagaattcggtgagagatcgtttggctgctgaggataagtacgaggaggaagaagaaaccgagctcgagaaagttgtgggattttttcagtytaagtacttcaaaactcattccatcatcacttaccgtttytcagccaaagatggaatttgcgagatcggatttgagacggaaggtaaagaagaggagaaactgaaggtagagaatgcgaatgtggtcggtatgatgcagaagtggtacttgtytggaagtcgaggagtttcmccgtccaccatcgtctccctcgccgattctctgtcggcagttttaacctaaaactccttatatagccatctatcatctatggtgtgttttatgttgttgtattatgtcgttcttaagtgagacatcgtgtttggttatctttataaaatctttaatggttgtctt

SEQ ID NO: 69 - protein, 209 aa, Brassica napus
  peptide (1)..(209): Ceres Seq. ID no. 15222606
  misc_feature (136)..(136): Xaa is any aa, unknown or other
  misc_feature (149)..(149): Xaa is any aa, unknown or other
  misc_feature (187)..(187): Xaa is any aa, unknown or other
  misc_feature (193)..(193): Xaa is any aa, unknown or other
MGTEMVMVHEVPFPPQIITSKPLSLLGQGITDIEIHFLQVKFTAIGVYLDPSDVKTHLDKWKGKTGKDLAGDDDFFDALASGEIEKVIRVVVIKEIKGAQYGVQLENSVRDRLAAEDKYEEEEETELEKVVGFFQXKYFKTHSIITYRXSAKDGICEIGFETEGKEEEKLKVENANVVGMMQKWYLXGSRGVXPSTIVSLADSLSAVLT

SEQ ID NO: 70 - protein, 205 aa, Brassica napus
  peptide (1)..(205): Ceres Seq. ID no. 15222607
  misc_feature (132)..(132): Xaa is any aa, unknown or other
  misc_feature (145)..(145): Xaa is any aa, unknown or other
  misc_feature (183)..(183): Xaa is any aa, unknown or other
  misc_feature (189)..(189): Xaa is any aa, unknown or other
MVMVHEVPFPPQIITSKPLSLLGQGITDIEIHFLQVKFTAIGVYLDPSDVKTHLDKWKGKTGKDLAGDDDFFDALASGEIEKVIRVVVIKEIKGAQYGVQLENSVRDRLAAEDKYEEEEETELEKVVGFFQXKYFKTHSIITYRXSAKDGICEIGFETEGKEEEKLKVENANVVGMMQKWYLXGSRGVXPSTIVSLADSLSAVLT

SEQ ID NO: 71 - protein, 203 aa, Brassica napus
  peptide (1)..(203): Ceres Seq. ID no. 15222608
  misc_feature (130)..(130): Xaa is any aa, unknown or other
  misc_feature (143)..(143): Xaa is any aa, unknown or other
  misc_feature (181)..(181): Xaa is any aa, unknown or other
  misc_feature (187)..(187): Xaa is any aa, unknown or other
MVHEVPFPPQIITSKPLSLLGQGITDIEIHFLQVKFTAIGVYLDPSDVKTHLDKWKGKTGKDLAGDDDFFDALASGEIEKVIRVVVIKEIKGAQYGVQLENSVRDRLAAEDKYEEEEETELEKVVGFFQXKYFKTHSIITYRXSAKDGICEIGFETEGKEEEKLKVENANVVGMMQKWYLXGSRGVXPSTIVSLADSLSAVLT

SEQ ID NO: 72 - DNA, 880 bp, Brassica napus
  misc_feature (1)..(880): Ceres Seq. ID no. 12557361
gatcggatctgaaaccgacgaagatcggagatgacggaatcgagcctggatctgcaggaatccggctgggaggagctccggagagaagctcgcaaaatcgaaggcgatctcgacgtcaagctctcctcttacgccaagctcggcgccagattcaatcaaggcggttatggtgttgatggtggatcacctggaggatcatggaagtcgatggagattgagattcagtcttcgcttgagaagctgttggatattaatgattccatgagtagatgtgctgcctctgctgcacctacaacctctgttactcagaagcttgctaggcacagagacattcttcatgaatacactcaggagtttcggaggataaaaggaaacataagctcgatgagggaacatgctgagctcttgagttctgtcagggatgacataagtgaatataaggcttctggtagtatgtcaccaggtgtgcaagtgttaagggagagagcttcaatccatggaagtatatcccatattgatgaagtcattggccaagctcaagcgacaagagcagttcttggctctcaacggtctctgttttctgatgttcaagggaaagtgaaaattctcggagacaagttcccagtgattcgtggcttacttggctcaattagaagaagacgttctcgggacacacttatcctctccgctgtcatcgctgcttgtaccttgtttataatcatctactggctctcgaaataaacagtatgttcatacgcctcaagcccattaagacgatcctctatccgaattttccaagtttaatttttgtattttgccattttgttgagttgtgtttgtagtaatgttacactcttaatcataaaaatcttaaaattcc

SEQ ID NO: 73 - protein, 236 aa, Brassica napus
  peptide (1)..(236): Ceres Seq. ID no. 12557362
MTESSLDLQESGWEELRREARKIEGDLDVKLSSYAKLGARFNQGGYGVDGGSPGGSWKSMEIEIQSSLEKLLDINDSMSRCAASAAPTTSVTQKLARHRDILHEYTQEFRRIKGNISSMREHAELLSSVRDDISEYKASGSMSPGVQVLRERASIHGSISHIDEVIGQAQATRAVLGSQRSLFSDVQGKVKILGDKFPVIRGLLGSIRRRRSRDTLILSAVIAACTLFIIIYWLSK

SEQ ID NO: 74 - protein, 177 aa, Brassica napus
  peptide (1)..(177): Ceres Seq. ID no. 12557363
MEIEIQSSLEKLLDINDSMSRCAASAAPTTSVTQKLARHRDILHEYTQEFRRIKGNISSMREHAELLSSVRDDISEYKASGSMSPGVQVLRERASIHGSISHIDEVIGQAQATRAVLGSQRSLFSDVQGKVKILGDKFPVIRGLLGSIRRRRSRDTLILSAVIAACTLFIIIYWLSK

SEQ ID NO: 75 - protein, 159 aa, Brassica napus
  peptide (1)..(159): Ceres Seq. ID no. 12557364
MSRCAASAAPTTSVTQKLARHRDILHEYTQEFRRIKGNISSMREHAELLSSVRDDISEYKASGSMSPGVQVLRERASIHGSISHIDEVIGQAQATRAVLGSQRSLFSDVQGKVKILGDKFPVIRGLLGSIRRRRSRDTLILSAVIAACTLFIIIYWLSK

SEQ ID NO: 76 - DNA, 731 bp, Brassica napus
  misc_feature (1)..(731): Ceres Seq. ID no. 12557888
agttgtcctcttctctaaaacattttcaacaaagaaaacggtaataagagagaagaggtggtagtaaacaagatcagaatctttaacattttcaaaacaaatggcgaccaaagccatcttcttcttctttgtctcggccgtgtgcctgtcctctctcgccggcgttgccaacgctgacgccgacgactttgacagtttccaaatccagggatcggtttactgtgacacttgccgtgtccaattcgttacccgcctcagccaattccttgaaggtgcgaaagtgaagctagagtgcaggagtagaacaaacggaactgtaacgttgactaaagaagccgtgacggacaaatcaggaagctacaaaatggaagtcaccggtgaccacgaggaggaagtctgcgagctcgttctcctccaatcaccagacagtggttgcagcgacgtcagcacagaggcttacctacgtaacgccgctaaggttagtctgaccgcgaatgacggtatcgtntcacacgagacacgtatcgttaacccccttggtttcatggttaagacgccgttagctgattgtcccgccgcatttaaggagcttggaatcgtccctgacgtcatcttctaaatatgatgacgacttgtaccaattcaagatcgttatttaactgtcatctattatttgctttcttgtatacagaaaacgtaatttgataaaaatacaaaaaagcggcaattct

SEQ ID NO: 77 - protein, 172 aa, Brassica napus
  peptide (1)..(172): Ceres Seq. ID no. 12557889
  misc_feature (136)..(136): Xaa is any aa, unknown or other
MATKAIFFFFVSAVCLSSLAGVANADADDFDSFQIQGSVYCDTCRVQFVTRLSQFLEGAKVKLECRSRTNGTVTLTKEAVTDKSGSYKMEVTGDHEEEVCELVLLQSPDSGCSDVSTEAYLRNAAKVSLTANDGIXSHETRIVNPLGFMVKTPLADCPAAFKELGIVPDVIF

SEQ ID NO: 78 - DNA, 551 bp, Brassica napus
  misc_feature (1)..(551): Ceres Seq. ID no. 12556956
aataatcgtatccggacttcgccgtactccgacactgaaatcgccggcggtaaatcctccgacgctcttcacctccgtgcctagattcttccactcaagctcccctcgtttcagcgacagtagaatcgcgatgaacagcgttgagaaaaccggatcgaacacgggggcgatcgagaatcgggcgagcaggattaaggagaagctggagaaggagctggagccggtggagctagtgatcgaggacgtctcgtaccagcacgcgggtcacgcggggatgaaaggtagaggaaccgacgaagagacgcatttcaatgtgaagatcgtatcgaaaggattcgaagggatgaatctggtgaagaggcacaggctattgtacgatctgctcagggaggagcttgatagtggattgcacgcgctttccatcgtctccaagactccctccgagtccactcgctagatctgttttatgtttctcttatgagagagtttgttttttgatttggaacaaaatgccaacctgctttttaaattaattcgagttctggttttct

SEQ ID NO: 79 - protein, 151 aa, Brassica napus
  peptide (1)..(151): Ceres Seq. ID no. 12556957
IIVSGLRRTPTLKSPAVNPPTLFTSVPRFFHSSSPRFSDSRIAMNSVEKTGSNTGAIENRASRIKEKLEKELEPVELVIEDVSYQHAGHAGMKGRGTDEETHFNVKIVSKGFEGMNLVKRHRLLYDLLREELDSGLHALSIVSKTPSESTR

SEQ ID NO: 80 - protein, 108 aa, Brassica napus
  peptide (1)..(108): Ceres Seq. ID no. 12556958
MNSVEKTGSNTGAIENRASRIKEKLEKELEPVELVIEDVSYQHAGHAGMKGRGTDEETHFNVKIVSKGFEGMNLVKRHRLLYDLLREELDSGLHALSIVSKTPSESTR

SEQ ID NO: 81 - DNA, 663 bp, Brassica napus
  misc_feature (1)..(663): Ceres Seq. ID no. 12557737
caaaaaattttttgcattagggttttcacttcggctgctgctagtgagtgagcaacgaatctttaaccccaaccatggcgacgaaacaagccaaagcgtccgtgcaatgcttcggaaggaagaagacggccgtcgccgtcacccactgcaagcccggctgcggtctgatcaagctcaacggctccccgatcgagctgttcaacccagagatcctccggttcaagatcttcgagccggtgctcctcctcggaaagcaccgtttcgccggcgtcgacatgaggatccgcgtcaacggcggtggtcacacttctcaggtctacgcgattcgtcagagcatagccaaggcgctcgtggctttctaccagaagtatgttgatgagcagtcgaagaaggaggtgaaggatattttgataaggtacgataggactctgctcgtggcggatccgaggaggtgcgagccgaanaagtttggtgggcgtggtgctcgttctcgtttccagaagagttaccgttaaaaacataatctggtttgtgttttttttttctgatctcaaccgttttgagacattatttatctttttgagttttgtctttttggttattggataatgttttgacaatgtcttgatcgtttattgttgaagaacttntcaagttttagtt

SEQ ID NO: 82 - protein, 146 aa, Brassica napus
  peptide (1)..(146): Ceres Seq. ID no. 12557738
  misc_feature (130)..(130): Xaa is any aa, unknown or other
MATKQAKASVQCFGRKKTAVAVTHCKPGCGLIKLNGSPIELFNPEILRFKIFEPVLLLGKHRFAGVDMRIRVNGGGHTSQVYAIRQSIAKALVAFYQKYVDEQSKKEVKDILIRYDRTLLVADPRRCEPXKFGGRGARSRFQKSYR

SEQ ID NO: 83 - protein, 124 aa, Brassica napus
  peptide (1)..(124): Ceres Seq. ID no. 12557739
KKFFALGFSLRLLLVSEQRIFNPNHGDETSQSVRAMLRKEEDGRRRHPLQARLRSDQAQRLPDRAVQPRDPPVQDLRAGAPPRKAPFRRRRHEDPRQRRWSHFSGLRDSSEHSQGARGFLPEVC

SEQ ID NO: 84 - protein, 89 aa, Brassica napus
  peptide (1)..(89): Ceres Seq. ID no. 12557740
MLRKEEDGRRRHPLQARLRSDQAQRLPDRAVQPRDPPVQDLRAGAPPRKAPFRRRRHEDPRQRRWSHFSGLRDSSEHSQGARGFLPEVC

SEQ ID NO: 85 - DNA, 852 bp, Brassica napus
  misc_feature (1)..(852): Ceres Seq. ID no. 13504265
atcatcatctctctatcaacaatagcgattcgttccgtagccagcagaaaaaccctagcgggcctaaaggagacatcttcgaggcttcttggtctccgatcaatccagaccttcacgcttcctgatctcccctatgattacagcgccttggagccggcgatcagcggcgagatcatgcagatccatcaccagaagcatcaccaggcgtacgtcactaattacaacaatgccctcgagcagctggatcaggccgtcaacaagggagacgcttccggcgtcgttaagttgcagagcgccatcaagttcaacggcggaggtcatgtgaaccactctattttctggaagaatcttgctcctgtcaaggaaggtgggggagagccaccaaagggagctcttggctacgccattgacactcattttggctcccttgaaggtttggtgaagaagatgagtgctgaaggtgctgctctgcaagggtcaggatgggtgtggctcggtttagacaaagagcttaagaagcttgtggttgacacaaccgccaatcaggatccacttgtgacaaaaggaggaagcttggttcctctggtgggtattgatgtttgggagcacgcctactatttacagtacaagaatgtgaggccggagtatttgaagaacgtgtggaaagtggtcaactggaaatatgcaagcgaagtttataaggagtgcaagtgagttcgttacataaagagaggaaccagttcccagctcggctttgtttttataagtttgtttgaaacaaacgtataatgtctctttggtctttgagttagctcgaaatgaccatgtggttgcaataatacacgttgtttt

SEQ ID NO: 86 - protein, 237 aa, Brassica napus
  peptide (1)..(237): Ceres Seq. ID no. 13504266
IIISLSTIAIRSVASRKTLAGLKETSSRLLGLRSIQTFTLPDLPYDYSALEPAISGEIMQIHHQKHHQAYVTNYNNALEQLDQAVNKGDASGVVKLQSAIKFNGGGHVNHSIFWKNLAPVKEGGGEPPKGALGYAIDTHFGSLEGLVKKMSAEGAALQGSGWVWLGLDKELKKLVVDTTANQDPLVTKGGSLVPLVGIDVWEHAYYLQYKNVRPEYLKNVWKVVNWKYASEVYKECK

SEQ ID NO: 87 - protein, 179 aa, Brassica napus
  peptide (1)..(179): Ceres Seq. ID no. 13504267
MQIHHQKHHQAYVTNYNNALEQLDQAVNKGDASGVVKLQSAIKFNGGGHVNHSIFWKNLAPVKEGGGEPPKGALGYAIDTHFGSLEGLVKKMSAEGAALQGSGWVWLGLDKELKKLVVDTTANQDPLVTKGGSLVPLVGIDVWEHAYYLQYKNVRPEYLKNVWKVVNWKYASEVYKECK

SEQ ID NO: 88 - DNA, 1091 bp, Brassica napus
  misc_feature (1)..(1091): Ceres Seq. ID no. 12474685
gcacttgaaccgacactatacaagcgatcttaatctgaagcctctctaataatggccgaacgcactcagatacttcgagctcaacaccggcgctaagatcccatcggtgggtctcggaacatggcaagcctctccaggacttgtaggtgatgctgtcgccgccgctgttaagatcggatatcgtcatattgattgtgctcagatctacggcaacgagaaagagatagggacagttttgaaaaaattgtttgaagacaatgtagtgaaacgcgaggagttgttcatcacttccaaactatggtgtactgatcatgaccctcaggatgtgccagaggcactaaagagaaccctacaggatctacagcttgactatgtcgatctctatttgatgcactgacctgtaaggatgaagaaaggttctgttggagctaagccagagaaccttttacctgtagatattcctagcacatggaaagcaatggaagcactccatgattcgggcaaggcacgagccataggtgtaagcaatttctcaaccaagaagctagctgatcttatggagttagctcgtgttcctcctgccgttgttcaggtcgaatgtcatccttcttggcgacagantaagctacgagagttctgtaagtccaaaggacttcacctcaccgcatactcgcctttgggttctccaggaacaacgtggctaaagagtgatgttttgaagaaccctatactaaatactgttgctaagaaactcgggaagtntgctgcgcaagttgcgcttcgctggggactccaaatgggtaacagtgtacttcccaagagtactaatgaaggaagaattagagagaactttgaagttttcgactggtcaatacccgatgacttgttttccaagtttcctgagattgaacaggctaggttattgactgctcccttctttgttcatgagacattgagcccttacaagtctctcgaagagttgtgggatggcgaaatatgatatttcaactgatccaattgttttgtcaataataggaggttactctctgcctgttgaacttgacattttatctataaaaatgatgcctctc

SEQ ID NO: 89 - protein, 197 aa, Brassica napus
  peptide (1)..(197): Ceres Seq. ID no. 12474686
  misc_feature (72)..(72): Xaa is any aa, unknown or other
  misc_feature (119)..(119): Xaa is any aa, unknown or other
MKKGSVGAKPENLLPVDIPSTWKAMEALHDSGKARAIGVSNFSTKKLADLMELARVPPAVVQVECHPSWRQXKLREFCKSKGLHLTAYSPLGSPGTTWLKSDVLKNPILNTVAKKLGKXAAQVALRWGLQMGNSVLPKSTNEGRIRENFEVFDWSIPDDLFSKFPEIEQARLLTAPFFVHETLSPYKSLEELWDGEI

SEQ ID NO: 90 - protein, 173 aa, Brassica napus
  peptide (1)..(173): Ceres Seq. ID no. 12474687
  misc_feature (48)..(48): Xaa is any aa, unknown or other
  misc_feature (95)..(95): Xaa is any aa, unknown or other
MEALHDSGKARAIGVSNFSTKKLADLMELARVPPAVVQVECHPSWRQXKLREFCKSKGLHLTAYSPLGSPGTTWLKSDVLKNPILNTVAKKLGKXAAQVALRWGLQMGNSVLPKSTNEGRIRENFEVFDWSIPDDLFSKFPEIEQARLLTAPFFVHETLSPYKSLEELWDGEI

SEQ ID NO: 91 - protein, 147 aa, Brassica napus
  peptide (1)..(147): Ceres Seq. ID no. 12474688
  misc_feature (22)..(22): Xaa is any aa, unknown or other
  misc_feature (69)..(69): Xaa is any aa, unknown or other
MELARVPPAVVQVECHPSWRQXKLREFCKSKGLHLTAYSPLGSPGTTWLKSDVLKNPILNTVAKKLGKXAAQVALRWGLQMGNSVLPKSTNEGRIRENFEVFDWSIPDDLFSKFPEIEQARLLTAPFFVHETLSPYKSLEELWDGEI

SEQ ID NO: 92 - DNA, 1008 bp, Brassica napus
  misc_feature (1)..(1008): Ceres Seq. ID no. 12557432
aagcaaaagaaaagtttctgagctgctctcctctgtataaacccttttccaaacaagagcagcagagaagaagaagaagaaagctaaaatgttcaggaatcagtacgacacagatgtgacgacatggagcccaacaggccgtctcttccaagtggagtacgccatggaagcagtcaagcaaggctccgccgcaatcgggctcagatctcgctcccatgtcgtcctcgcctgcgtcaacaaggcccaatccgagctctcctctcaccagaagaagatcttcaaagtcgatgaccatataggcgtcgcgatcgctgggctcaccgccgatggccgtgtcctctctcgttatatgagatcggaggctatcaaccactccttcacctatgagtctccgctccccgttggacgcctcgtcgttcacctcgctgataaggcccaggtctgtacccaacgatcatggaagcggccatatggcgtgggtcttttggtaggtggactggatgagtctggagcccatctttactncaactgcccaagcggaaactactttgagtatcaagctttcgctattgggtcccgttcacaagccgcaaagacctatntggagcgtaggtttgagagctttggggattcttccagagaagatntgataaaagatgctattctggctgtgagggagacactgcaaggagaaacacttaagagttctctctgcacggtctctgttctaggtgtcggtgagccgttccacttcttggaccaggaaactatacagaaagtgattgacacatttgagaaagtaccagaggatgaggctggtgaggctggtgaggctggtgagggtgaggctgaagctgctgctgctgctgcaccagcagaacagggtggtggtggtgcaggtgaccaagacgtggctccgatggaaatgtaaggcgtgtgcaacgctagaactgttttaattgaatgtttgttggatttactttggataatttcatatgaatcatttgc

SEQ ID NO: 93 - protein, 280 aa, Brassica napus
  peptide (1)..(280): Ceres Seq. ID no. 12557433
  misc_feature (146)..(146): Xaa is any aa, unknown or other
  misc_feature (172)..(172): Xaa is any aa, unknown or other
  misc_feature (187)..(187): Xaa is any aa, unknown or other
MFRNQYDTDVTTWSPTGRLFQVEYAMEAVKQGSAAIGLRSRSHVVLACVNKAQSELSSHQKKIFKVDDHIGVAIAGLTADGRVLSRYMRSEAINHSFTYESPLPVGRLVVHLADKAQVCTQRSWKRPYGVGLLVGGLDESGAHLYXNCPSGNYFEYQAFAIGSRSQAAKTYXERRFESFGDSSREDXIKDAILAVRETLQGETLKSSLCTVSVLGVGEPFHFLDQETIQKVIDTFEKVPEDEAGEAGEAGEGEAEAAAAAAPAEQGGGGAGDQDVAPMEM

SEQ ID NO: 94 - protein, 255 aa, Brassica napus
  peptide (1)..(255): Ceres Seq. ID no. 12557434
  misc_feature (121)..(121): Xaa is any aa, unknown or other
  misc_feature (147)..(147): Xaa is any aa, unknown or other
  misc_feature (162)..(162): Xaa is any aa, unknown or other
MEAVKQGSAAIGLRSRSHVVLACVNKAQSELSSHQKKIFKVDDHIGVAIAGLTADGRVLSRYMRSEAINHSFTYESPLPVGRLVVHLADKAQVCTQRSWKRPYGVGLLVGGLDESGAHLYXNCPSGNYFEYQAFAIGSRSQAAKTYXERRFESFGDSSREDXIKDAILAVRETLQGETLKSSLCTVSVLGVGEPFHFLDQETIQKVIDTFEKVPEDEAGEAGEAGEGEAEAAAAAAPAEQGGGGAGDQDVAPMEM

SEQ ID NO: 95 - protein, 193 aa, Brassica napus
  peptide (1)..(193): Ceres Seq. ID no. 12557435
  misc_feature (59)..(59): Xaa is any aa, unknown or other
  misc_feature (85)..(85): Xaa is any aa, unknown or other
  misc_feature (100)..(100): Xaa is any aa, unknown or other
MRSEAINHSFTYESPLPVGRLVVHLADKAQVCTQRSWKRPYGVGLLVGGLDESGAHLYXNCPSGNYFEYQAFAIGSRSQAAKTYXERRFESFGDSSREDXIKDAILAVRETLQGETLKSSLCTVSVLGVGEPFHFLDQETIQKVIDTFEKVPEDEAGEAGEAGEGEAEAAAAAAPAEQGGGGAGDQDVAPMEM

SEQ ID NO: 96 - DNA, 960 bp, Brassica napus
  misc_feature (1)..(960): Ceres Seq. ID no. 12474478
  misc_feature (887)..(887): n is a, c, t, g, unknown, or other
attaacttttcaactaactccagcttttgctctagattttttttttatgtatctggaacattccttaatcctccctctctataaatccctgaacccttttgctgctactctcactcatagctgttaaaggaacctaaaatggcgaaagttttagatctttctctggttctctttgttctgtgtgtgtccactgcagcaatagccatggcaagaaaccttggagaggaatctagtgatgatactgagttcatcaaatcctcttgtgagatagcaacgtacccggaactatgttttcagtctctgtcttcttacgcaagcgagatcaagaagcggccacttcagctcgccgagacagcgcttgccgttagcatggcccgaacgaagtcagccaaaacatatatctcggacatgactgactacaaaggaatcncaaagaggcagcacgaggccgtgttggactgtgttgaanagatgggagatactgttgataggttgagcaagtcgctgaaggagttgaagaatctggaggaaggagagagcaaagaagacttctggttctgtttgagcaatgtccggacgtggacaagcgcggcgctgacagatgagaccacgtgtcttgatgggtttggagggaaaggcatggatggggagctgaaaagcttagtcaaagcacacattgtgcgtgtggcgcaanatacgagtaatgccttggctttgatcaatgtctatgcttccaagcattgaatatattgcaacggtttggtcatgaggacttgagctttttatacttttggatttggtttgtattgtgttttcaagaaatgtgttttggtttggttntgagtcatatcagtttctcttgccacattgttatatcatctacggtntatatagtttgaagcttttcattttgatgtttgattagtgatatagttttgtaagccatgaagagtattttgc

SEQ ID NO: 97 - protein, 201 aa, Brassica napus
  peptide (1)..(201): Ceres Seq. ID no. 12474479
  misc_feature (98)..(98): Xaa is any aa, unknown or other
  misc_feature (111)..(111): Xaa is any aa, unknown or other
  misc_feature (186)..(186): Xaa is any aa, unknown or other
MAKVLDLSLVLFVLCVSTAAIAMARNLGEESSDDTEFIKSSCEIATYPELCFQSLSSYASEIKKRPLQLAETALAVSMARTKSAKTYISDMTDYKGIXKRQHEAVLDCVEXMGDTVDRLSKSLKELKNLEEGESKEDFWFCLSNVRTWTSAALTDETTCLDGFGGKGMDGELKSLVKAHIVRVAQXTSNALALINVYASKH

SEQ ID NO: 98 - protein, 179 aa, Brassica napus
  peptide (1)..(179): Ceres Seq. ID no. 12474480
  misc_feature (76)..(76): Xaa is any aa, unknown or other
  misc_feature (89)..(89): Xaa is any aa, unknown or other
  misc_feature (164)..(164): Xaa is any aa, unknown or other
MARNLGEESSDDTEFIKSSCEIATYPELCFQSLSSYASEIKKRPLQLAETALAVSMARTKSAKTYISDMTDYKGIXKRQHEAVLDCVEXMGDTVDRLSKSLKELKNLEEGESKEDFWFCLSNVRTWTSAALTDETTCLDGFGGKGMDGELKSLVKAHIVRVAQXTSNALALINVYASKH

SEQ ID NO: 99 - protein, 124 aa, Brassica napus
  peptide (1)..(124): Ceres Seq. ID no. 12474481
  misc_feature (21)..(21): Xaa is any aa, unknown or other
  misc_feature (34)..(34): Xaa is any aa, unknown or other
  misc_feature (109)..(109): Xaa is any aa, unknown or other
MARTKSAKTYISDMTDYKGIXKRQHEAVLDCVEXMGDTVDRLSKSLKELKNLEEGESKEDFWFCLSNVRTWTSAALTDETTCLDGFGGKGMDGELKSLVKAHIVRVAQXTSNALALINVYASKH

SEQ ID NO: 100 - DNA, 814 bp, Brassica napus
  misc_feature (1)..(814): Ceres Seq. ID no. 13504237
gaagcttttttttatctctctctccgccgtcactctcacctgcggcgaggcttaacgatctcagccatggccgccgccgtagaaatcgacgcagagatccagcagcagcttaccaacgaggtcaagctcttcaaccgctggacctacgatgacgtctcggttgcagatatcagtcttgttgactacattggagttcaagcagccaaacacgccacctttgtcccccacactgcaggaagatactctgtgaagagattcaggaaggctcagtgcccaattgttgagaggctcacaaactctctcatgatgcacggaagaaacaatggaaagaagttgatggcggtgaggatcatcaagcacgccatggagatcatccacctcttgactgacgccaacccgattcagatcatcatcgatgccattgtcaacagtggtccacgtgaagatgccaccagaattggatctgctggtgtcgttaggagacaagctgttgatatctctcctttgagacgtgttaaccaggcgatcttcttgctcacaaccggtgctcgtgaggctgctttcagaaacattaagactattgctgagtgccttgctgatgagttaatcaacgcagccaagggctcgtccaacagctatgccatcaaaaagaaggatgagattgagagagttgccaaggctaatcgttaagggaaagtcttcttttaccctgatggttgttacaatcttatcaatgaaatttatgttttgtttcgactaagattgggaatatgtaacagatgttttgctcttttcgtcttangaaagnttattt

SEQ ID NO: 101 - protein, 229 aa, Brassica napus
  peptide (1)..(229): Ceres Seq. ID no. 13504238
EAFFYLSLRRHSHLRRGLTISAMAAAVEIDAEIQQQLTNEVKLFNRWTYDDVSVADISLVDYIGVQAAKHATFVPHTAGRYSVKRFRKAQCPIVERLTNSLMMHGRNNGKKLMAVRIIKHAMEIIHLLTDANPIQIIIDAIVNSGPREDATRIGSAGVVRRQAVDISPLRRVNQAIFLLTTGAREAAFRNIKTIAECLADELINAAKGSSNSYAIKKKDEIERVAKANR

SEQ ID NO: 102 - protein, 207 aa, Brassica napus
  peptide (1)..(207): Ceres Seq. ID no. 13504239
MAAAVEIDAEIQQQLTNEVKLFNRWTYDDVSVADISLVDYIGVQAAKHATFVPHTAGRYSVKRFRKAQCPIVERLTNSLMMHGRNNGKKLMAVRIIKHAMEIIHLLTDANPIQIIIDAIVNSGPREDATRIGSAGVVRRQAVDISPLRRVNQAIFLLTTGAREAAFRNIKTIAECLADELINAAKGSSNSYAIKKKDEIERVAKANR

SEQ ID NO: 103 - protein, 128 aa, Brassica napus
  peptide (1)..(128): Ceres Seq. ID no. 13504240
MMHGRNNGKKLMAVRIIKHAMEIIHLLTDANPIQIIIDAIVNSGPREDATRIGSAGVVRRQAVDISPLRRVNQAIFLLTTGAREAAFRNIKTIAECLADELINAAKGSSNSYAIKKKDEIERVAKANR

SEQ ID NO: 104 - DNA, 804 bp, Brassica napus
  misc_feature (1)..(804): Ceres Seq. ID no. 12473409
caccacactctctcttccacagtttcgttatctagatattattttaggaggatctctctctgcttctctccatctctctcttagccatggctgctttcacttgtacctctcgtcctcctgttcccctccgttcggagtcgagaatcgcatcctctccatccgcttcactctctgctcggcggatgttcgccgtctcgcctgactcagcaggattgagaatccgtctttcccagtcttcgtccttgttgacctcgaaggttcctcgaccacgaagaggcatcgtctgtgaggctcaggaaaccactacagatatagtttcaatagtcaacgacacaacatgggactctctagttctcaaggcggacgggcctgttcttgtcgacttttgggctccatggtgtggactttgcaaaatgattgacccgctcgtgaatgaactagcaaaagagtaccccgggaaggtcaagttntacaaactgaacacggacgactntccttcaaccccaagcaagtacaatgttagaagcattccaacgatcatgatctttgtcaatggggagaagaaggatgcaatcataggtgcagtgcccagatntacgctcgcgtctagcattgataaattcttgcaatgagattagactggtgagtctgtgagatctgtttctccccccccctctgtcttgtgttctcattctctcttgtaatttgtgcttctttgtagctatctgcttcttctattgtatcttttcttcatcactgaacatctagacatggataaataagatgatgtcatgtttttatgtt

SEQ ID NO: 105 - protein, 181 aa, Brassica napus
  peptide (1)..(181): Ceres Seq. ID no. 12473410
  misc_feature (128)..(128): Xaa is any aa, unknown or other
  misc_feature (136)..(136): Xaa is any aa, unknown or other
  misc_feature (170)..(170): Xaa is any aa, unknown or other
MAAFTCTSRPPVPLRSESRIASSPSASLSARRMFAVSPDSAGLRIRLSQSSSLLTSKVPRPRRGIVCEAQETTTDIVSIVNDTTWDSLVLKADGPVLVDFWAPWCGLCKMIDPLVNELAKEYPGKVKXYKLNTDDXPSTPSKYNVRSIPTIMIFVNGEKKDAIIGAVPRXTLASSIDKFLQ

SEQ ID NO: 106 - protein, 149 aa, Brassica napus
  peptide (1)..(149): Ceres Seq. ID no. 12473411
  misc_feature (96)..(96): Xaa is any aa, unknown or other
  misc_feature (104)..(104): Xaa is any aa, unknown or other
  misc_feature (138)..(138): Xaa is any aa, unknown or other
MFAVSPDSAGLRIRLSQSSSLLTSKVPRPRRGIVCEAQETTTDIVSIVNDTTWDSLVLKADGPVLVDFWAPWCGLCKMIDPLVNELAKEYPGKVKXYKLNTDDXPSTPSKYNVRSIPTIMIFVNGEKKDAIIGAVPRXTLASSIDKFLQ

SEQ ID NO: 107 - DNA, 460 bp, Brassica napus
  misc_feature (1)..(460): Ceres Seq. ID no. 12476115
actaaaaacctcgattacgtaataaagtaatcaatattctcgatcgttcttataccgctttatagtcccttttatagtgccaccttcctcattagctcaccacgcacttaacaattgttcccttttccaactctcgctctctcttaaactttcttcccctctttcaaaatgaagctttctttgcgtttgatctcagctgttctcctcatgttcatgatattcgttgcttcagggatgggtccagtcaccgtggaggcacgcacgtgtgagtcgaagagccataagttcaggggtctttgtgtgagcagacacaactgcgcaaatgtgtgccacaacgaaggttttcatggaggcaaatgccgtgggttccgtcgtcgttgctactgcaccagacattgctgatccatccatcgatcgagactcataactcaaaatcttcaatccatcatctcgtctcatg

SEQ ID NO: 108 - protein, 77 aa, Brassica napus
  peptide (1)..(77): Ceres Seq. ID no. 12476116
MKLSLRLISAVLLMFMIFVASGMGPVTVEARTCESKSHKFRGLCVSRHNCANVCHNEGFHGGKCRGFRRRCYCTRHC

SEQ ID NO: 109 - protein, 64 aa, Brassica napus
  peptide (1)..(64): Ceres Seq. ID no. 12476117
MFMIFVASGMGPVTVEARTCESKSHKFRGLCVSRHNCANVCHNEGFHGGKCRGFRRRCYCTRHC

SEQ ID NO: 110 - protein, 62 aa, Brassica napus
  peptide (1)..(62): Ceres Seq. ID no. 12476118
MIFVASGMGPVTVEARTCESKSHKFRGLCVSRHNCANVCHNEGFHGGKCRGFRRRCYCTRHC

SEQ ID NO: 111 - DNA, 765 bp, Brassica napus
  misc_feature (1)..(765): Ceres Seq. ID no. 12557928
aaagagaaagcccctccagagctcataacccaatctcccatcctcctcgattcaatacttatctctcctctcaatcaaaaacttgatctacataatcgattccacatgaaacgcagtgcttcaaactcagttacaaacggtgacgcgagtaacaagaagatgaaaaagaccacagaggaagattcagaaatcggattcgccaacttagacgagaatctactctacgaggtgttgaagcacgtggacgcgaggaccttagcaacgtcttcttgcgtgagcaagatctggcacaggactgcacaagacgagcgtctgtgggagctgatctgcacgcgtcactgggccaacatcggctgcagccaacaccagctcagattcgtcgtcttggcgcttggcggcttcaagcaactccactcgctctacctgtggcctctctcgagtccgaatcaacatggtagattgggtaaagacgagctgaaactctccctttctctcctctcgattcggtactacgagaagatgaatttcactaagagactcccctgagtccaaatgattttacttcagatctattttttccagcatcgttnttagttttattttattgtttngcgagatgtttgtaatttgtaatatctgctttgtacttgtttaagctcgttctcatatgtttgatattattaaaatctggcaaaatccatgtaagccagactgtctgaaacagctagttctgtaataatanaggctggtgagaatatttaagcc

SEQ ID NO: 112 - protein, 181 aa, Brassica napus
  peptide (1)..(181): Ceres Seq. ID no. 12557929
KEKAPPELITQSPILLDSILISPLNQKLDLHNRFHMKRSASNSVTNGDASNKKMKKTTEEDSEIGFANLDENLLYEVLKHVDARTLATSSCVSKIWHRTAQDERLWELICTRHWANIGCSQHQLRFVVLALGGFKQLHSLYLWPLSSPNQHGRLGKDELKLSLSLLSIRYYEKMNFTKRLP

SEQ ID NO: 113 - protein, 146 aa, Brassica napus
  peptide (1)..(146): Ceres Seq. ID no. 12557930
MKRSASNSVTNGDASNKKMKKTTEEDSEIGFANLDENLLYEVLKHVDARTLATSSCVSKIWHRTAQDERLWELICTRHWANIGCSQHQLRFVVLALGGFKQLHSLYLWPLSSPNQHGRLGKDELKLSLSLLSIRYYEKMNFTKRLP

SEQ ID NO: 114 - protein, 128 aa, Brassica napus
  peptide (1)..(128): Ceres Seq. ID no. 12557931
MKKTTEEDSEIGFANLDENLLYEVLKHVDARTLATSSCVSKIWHRTAQDERLWELICTRHWANIGCSQHQLRFVVLALGGFKQLHSLYLWPLSSPNQHGRLGKDELKLSLSLLSIRYYEKMNFTKRLP

SEQ ID NO: 115 - DNA, 1017 bp, Brassica napus
  misc_feature (1)..(1017): Ceres Seq. ID no. 12472913
aactgtcactcgaactccaacaaacagaagatggcgatatggtggcgtggcgtgagatccgcggcggaggcagctaatctgccagcagcatactcattcggtcgatcgattcggtgtttacatcagtatgagacgattcaggcgataccacgcgaggctacggggcgaagagtatcggctcgtgatcggacgattggccggattcccgccgtggttttcacccaatcgcttctcgagacggacgcttcgaagagaggcgtttcgaggaagcagcttttgacggccgataggaagcagatcaagtcgattgttgactctgtgggtctcccgttcttctgttcgactactttcaagctccaggtcagagcggggcaaggttcgtcgtcgctggttgagtcgggtcgtgtacttcccctcaagattcatagagatgaagagagtgggaagatacttaatttagtgttcgtgtgggctaatgatggagagcagctgaaggttgatgttccaattgttttcaaaggattagatgattgtcccggtcttaagaaagggggaaatctacggtcaatgcgaagcactntgaagcttntaggcccagcggaacacattccatcgaaaatcgaagtggatgtgagcaaactggacatagcggacaaagtgttaatgcaagaagttgaattccatccatcgttgaagctgttgagcaagaatgagacattgcctgtgtgtaagattgttgccacaagcccggtcaaagaaccagaagctgttcaagcatagaataagtccttcaactttagaaggagagaagcacccttcaagtcctctctagctacttatttttttgttntagaacgaagcaaattcagtttgaattgctgatcaacaacatatctgtttttgagtctttcttcggaatgttactttaactagtagtatccgattcttcgcaagagtcagaacaacttgaatttggtcgttaccagtgaaaataaaagcccaacaacgacttggtcc

SEQ ID NO: 116 - protein, 259 aa, Brassica napus
  peptide (1)..(259): Ceres Seq. ID no. 12472914
  misc_feature (194)..(194): Xaa is any aa, unknown or other
  misc_feature (197)..(197): Xaa is any aa, unknown or other
NCHSNSNKQKMAIWWRGVRSAAEAANLPAAYSFGRSIRCLHQYETIQAIPREATGRRVSARDRTIGRIPAVVFTQSLLETDASKRGVSRKQLLTADRKQIKSIVDSVGLPFFCSTTFKLQVRAGQGSSSLVESGRVLPLKIHRDEESGKILNLVFVWANDGEQLKVDVPIVFKGLDDCPGLKKGGNLRSMRSTXKLXGPAEHIPSKIEVDVSKLDIADKVLMQEVEFHPSLKLLSKNETLPVCKIVATSPVKEPEAVQA

SEQ ID NO: 117 - protein, 249 aa, Brassica napus
  peptide (1)..(249): Ceres Seq. ID no. 12472915
  misc_feature (184)..(184): Xaa is any aa, unknown or other
  misc_feature (187)..(187): Xaa is any aa, unknown or other
MAIWWRGVRSAAEAANLPAAYSFGRSIRCLHQYETIQAIPREATGRRVSARDRTIGRIPAVVFTQSLLETDASKRGVSRKQLLTADRKQIKSIVDSVGLPFFCSTTFKLQVRAGQGSSSLVESGRVLPLKIHRDEESGKILNLVFVWANDGEQLKVDVPIVFKGLDDCPGLKKGGNLRSMRSTXKLXGPAEHIPSKIEVDVSKLDIADKVLMQEVEFHPSLKLLSKNETLPVCKIVATSPVKEPEAVQA

SEQ ID NO: 118 - DNA, 945 bp, Brassica napus
  misc_feature (1)..(945): Ceres Seq. ID no. 12472626
aaaatcttcgatggaaacactttctcctcctctacgagacgacgatgaggaaaacgaagtagacgaagccaaaatgctcctcatcggtgagaacggaaccaacggtgagagtttctctcctctgtccgacggtgcaccggagctccagcagtacactatccgctccatcgagtcaacggtcgtgattcgtcaactaacatcacagggtctctccttccagctctggccagccgcttctactttcgtcgcgcttctcgataactaccgcctcgaccctaccaacagccccctcgccgcaacactctcctcgctgaaacccgccggctctacgactactactacaccgatgaacattctcgagctcggatccggaaccggcgtcgtcggaatcgccgcggcgatcactctttccgctaacgtcacggtgacggatctcccgcacgtcctcgacaacctcagcttcaacgcagaggcgaacgctcagactgtggcgagattcggcggtcaagtccacgcggcaccgctccgttggggagaggctgatgacgtggagattctggggcggaacgttgacttggttgtagcatctgacgtggtgtaccacgaccatctntacgagcctctcctgaaaacgctgcgtttaatggcggcggcgaaggggttagaggggaagaggttgatatttctgatggctcatctgaggaggtggaaaaaagagtctgtcttcttcaagaaagctagaaaggtctttgatgttgacgttatacactctgatgagcctcgaaatggtgcaagaagcggcgttttggtttaccgttttgtcgcgaaacaatcgaatcaaaatggtcggattgtttcgtgttaacagtttgcaaattttcaggattaatttcgtttgatgaatgaaatttctcaaatgtgtttatcaaaagatttccacattat

SEQ ID NO: 119 - protein, 287 aa, Brassica napus
  peptide (1)..(287): Ceres Seq. ID no. 12472627
  misc_feature (204)..(204): Xaa is any aa, unknown or other
KSSMETLSPPLRDDDEENEVDEAKMLLIGENGTNGESFSPLSDGAPELQQYTIRSIESTVVIRQLTSQGLSFQLWPAASTFVALLDNYRLDPTNSPLAATLSSLKPAGSTTTTTPMNILELGSGTGVVGIAAAITLSANVTVTDLPHVLDNLSFNAEANAQTVARFGGQVHAAPLRWGEADDVEILGRNVDLVVASDVVYHDHXYEPLLKTLRLMAAAKGLEGKRLIFLMAHLRRWKKESVFFKKARKVFDVDVIHSDEPRNGARSGVLVYRFVAKQSNQNGRIVSC

SEQ ID NO: 120 - protein, 284 aa, Brassica napus
  peptide (1)..(284): Ceres Seq. ID no. 12472628
  misc_feature (201)..(201): Xaa is any aa, unknown or other
METLSPPLRDDDEENEVDEAKMLLIGENGTNGESFSPLSDGAPELQQYTIRSIESTVVIRQLTSQGLSFQLWPAASTFVALLDNYRLDPTNSPLAATLSSLKPAGSTTTTTPMNILELGSGTGVVGIAAAITLSANVTVTDLPHVLDNLSFNAEANAQTVARFGGQVHAAPLRWGEADDVEILGRNVDLVVASDVVYHDHXYEPLLKTLRLMAAAKGLEGKRLIFLMAHLRRWKKESVFFKKARKVFDVDVIHSDEPRNGARSGVLVYRFVAKQSNQNGRIVSC

SEQ ID NO: 121 - protein, 263 aa, Brassica napus
  peptide (1)..(263): Ceres Seq. ID no. 12472629
  misc_feature (180)..(180): Xaa is any aa, unknown or other
MLLIGENGTNGESFSPLSDGAPELQQYTIRSIESTVVIRQLTSQGLSFQLWPAASTFVALLDNYRLDPTNSPLAATLSSLKPAGSTTTTTPMNILELGSGTGVVGIAAAITLSANVTVTDLPHVLDNLSFNAEANAQTVARFGGQVHAAPLRWGEADDVEILGRNVDLVVASDVVYHDHXYEPLLKTLRLMAAAKGLEGKRLIFLMAHLRRWKKESVFFKKARKVFDVDVIHSDEPRNGARSGVLVYRFVAKQSNQNGRIVSC

SEQ ID NO: 122 - DNA, 905 bp, Brassica napus
  misc_feature (1)..(905): Ceres Seq. ID no. 12471935
accacttaatatatgtatatgaatccatctcttcttcataaattcccacgaccatcggaccaaagaatcatacccctcctttctagccattcaaactagtaaacaatggggatactcaggaagaaaaaacacgagcgaaagccgtcgtttaagagtgttttaaccgcaatattagctacacatgccgcaacattcctcttgttgatcgccggtgtatccctcgccggcacagccgccgcatttatcgctaccatgccactattcgtagtattcagtccgattctcgtaccagctggtattaccactggtttactgactacgggtttagcagccgccggtggcgccggcgcgactgctgtcaccatcatcctgtggctctacaagcgagcaacgggcaaggcgccgccaaaagtcctagaaaaagtcttgaaaaagataataccaggtgctgcagctgcaccagcagccgctccaggagccgctccagcagcggcgccagcagccgcaccagctgtggcgccagcagccgcaccagctgctgcgccagcacctaagccagcagccccaccagcacctaagccagcagccgcaccgagtatatgaaaagaagtggtgggcatgagtaaaggttgatatggaaaactggatacatagaaaaaagagtaatccaacttttaaaaaataaataacaacttcacgtggggatagaaaaattttcaaatattattttactaatggatgtcgcggtacaaaataataacaaatgtaagcctttttattgtatagtattttaagaacgaagctatgtagcgttgacatttgtaccttattcaagttcaactatattattctagttcttttttcaccaatcctactatataaaanaagctaaattggagctttct

SEQ ID NO: 123 - protein, 165 aa, Brassica napus
  peptide (1)..(165): Ceres Seq. ID no. 12471936
MGILRKKKHERKPSFKSVLTAILATHAATFLLLIAGVSLAGTAAAFIATMPLFVVFSPILVPAGITTGLLTTGLAAAGGAGATAVTIILWLYKRATGKAPPKVLEKVLKKIIPGAAAAPAAAPGAAPAAAPAAAPAVAPAAAPAAAPAPKPAAPPAPKPAAAPSI

SEQ ID NO: 124 - protein, 116 aa, Brassica napus
  peptide (1)..(116): Ceres Seq. ID no. 12471937
MPLFVVFSPILVPAGITTGLLTTGLAAAGGAGATAVTIILWLYKRATGKAPPKVLEKVLKKIIPGAAAAPAAAPGAAPAAAPAAAPAVAPAAAPAAAPAPKPAAPPAPKPAAAPSI

SEQ ID NO: 125 - DNA, 608 bp, Brassica napus
  misc_feature (1)..(608): Ceres Seq. ID no. 12556889
attttttcatgttctgtggatgttagaaataaaacaaaggagattggtctgggagaaagaagcaaagaagaaaaatggcagcaacatttgcagctccatcgacagtgataggtctcggaggatcatctgtttctcccatcaaggccaaagctctctcttcatcctttttgaaaccaacattaagagcaaagaaccctctgaaagtcgccggagcatcaggaggaagattcacttgctttgagaggaactggctgaggagagatctgaacgtggtggggttcgggcttgtcggatggctagctccgtctagcattccggcgataaacgggaagagcctgacgggtctcttctttgagagcataggaactgagctcgctcacttcccaactcctccagctctcacgtcacagttctggttgtggctgatcacctggcacttaggcctcttcatatgcctcaccttcggacaaatcggatttaagggcaggactgaagattacttcaagaaataaatcattccctcttgttccatctgtacttattatcttactctctcttggttctctgtgtaatagtatgactctatatgaagctttctttcgattcct

SEQ ID NO: 126 - protein, 145 aa, Brassica napus
  peptide (1)..(145): Ceres Seq. ID no. 12556890
MAATFAAPSTVIGLGGSSVSPIKAKALSSSFLKPTLRAKNPLKVAGASGGRFTCFERNWLRRDLNVVGFGLVGWLAPSSIPAINGKSLTGLFFESIGTELAHFPTPPALTSQFWLWLITWHLGLFICLTFGQIGFKGRTEDYFKK

SEQ ID NO: 127 - protein, 79 aa, Brassica napus
  peptide (1)..(79): Ceres Seq. ID no. 12556891
FFHVLWMLEIKQRRLVWEKEAKKKNGSNICSSIDSDRSRRIICFSHQGQSSLFILFETNIKSKEPSESRRSIRRKIHLL

SEQ ID NO: 128 - protein, 73 aa, Brassica napus
  peptide (1)..(73): Ceres Seq. ID no. 12556892
MLEIKQRRLVWEKEAKKKNGSNICSSIDSDRSRRIICFSHQGQSSLFILFETNIKSKEPSESRRSIRRKIHLL

SEQ ID NO: 129 - DNA, 1022 bp, Brassica napus
  misc_feature (1)..(1022): Ceres Seq. ID no. 12474640
aaaaggttcttcctcctctcacacgctctgtcttcttcctcctcctccttggttagattagatatttagtagggctttgaagctactaaactcgagcaaaaaaaaaaatggagattgcggagcgtagggacgaggggatgagagaatctggaaacatggagaacataaagtccgactctttttccgatgaacgctactctcgcgacctcaaagctggtctccatcctctacggtacaagtttgcgatttggtacacacgtcgaacaccaggggtcaggagccagacatcttatgaggataacattaagaagattgttgatttcagcactgttgaagggttttgggcatgctactgtcaccttgctcgttcttctctcttgcctagtcctacagatcttcatttcttcaaggatggcattcgccccttgtgggaggattctgccaactgcaatggaggaaagtggatcgtacgtttctccaaagttgtatccgctcgcttctgggaggatctgcttcttgccttggtaggcgaccagcttgatgatgctgacaatatctgtggggcagtactgagtgtccgcttcaacgaggacatcattagtgtgtggaatcgcaatgcttctgatcatcaggcagtgatgggtttgagagactcaatcaagcggcacttgaagctgcctcattcttatgttatggaatacaagccccncgatgcttctnttcgcgacaactcctcttacaggaacacatggatgagaggatagctaggttcaaaatntgacacgtgatgtggagaaagatttgggtagctctcttgcaacctgggaagatatatggactcaaccccgttttcggtagtatcaatggcttacgatntaagcattgaaaatcctctcgacttgtgtaatcatatcgttttcttgtttctagatattgttgttaccttcaatggtttgcactttgcagtgttgtttgaaactataatgattcgaataaaacttgagctcacgtactggttttac

SEQ ID NO: 130 - protein, 218 aa, Brassica napus
  peptide (1)..(218): Ceres Seq. ID no. 12474641
  misc_feature (201)..(201): Xaa is any aa, unknown or other
  misc_feature (205)..(205): Xaa is any aa, unknown or other
MEIAERRDEGMRESGNMENIKSDSFSDERYSRDLKAGLHPLRYKFAIWYTRRTPGVRSQTSYEDNIKKIVDFSTVEGFWACYCHLARSSLLPSPTDLHFFKDGIRPLWEDSANCNGGKWIVRFSKVVSARFWEDLLLALVGDQLDDADNICGAVLSVRFNEDIISVWNRNASDHQAVMGLRDSIKRHLKLPHSYVMEYKPXDASXRDNSSYRNTWMRG

SEQ ID NO: 131 - protein, 208 aa, Brassica napus
  peptide (1)..(208): Ceres Seq. ID no. 12474642
  misc_feature (191)..(191): Xaa is any aa, unknown or other
  misc_feature (195)..(195): Xaa is any aa, unknown or other
MRESGNMENIKSDSFSDERYSRDLKAGLHPLRYKFAIWYTRRTPGVRSQTSYEDNIKKIVDFSTVEGFWACYCHLARSSLLPSPTDLHFFKDGIRPLWEDSANCNGGKWIVRFSKVVSARFWEDLLLALVGDQLDDADNICGAVLSVRFNEDIISVWNRNASDHQAVMGLRDSIKRHLKLPHSYVMEYKPXDASXRDNSSYRNTWMRG

SEQ ID NO: 132 - protein, 202 aa, Brassica napus
  peptide (1)..(202): Ceres Seq. ID no. 12474643
  misc_feature (185)..(185): Xaa is any aa, unknown or other
  misc_feature (189)..(189): Xaa is any aa, unknown or other
MENIKSDSFSDERYSRDLKAGLHPLRYKFAIWYTRRTPGVRSQTSYEDNIKKIVDFSTVEGFWACYCHLARSSLLPSPTDLHFFKDGIRPLWEDSANCNGGKWIVRFSKVVSARFWEDLLLALVGDQLDDADNICGAVLSVRFNEDIISVWNRNASDHQAVMGLRDSIKRHLKLPHSYVMEYKPXDASXRDNSSYRNTWMRG

SEQ ID NO: 133 - DNA, 890 bp, Brassica napus
  misc_feature (1)..(890): Ceres Seq. ID no. 12473977
attctgattattatctttcgaaaatgtttattctccggtcgcagaagctatggacggtggttatgattctagtgatgtcgtcgcgtgtaacgcactcgctgcacttcgatctgcactcgggacggacgaagtgtatagcggaagacatcaagagcaattcaatgaccgtgggaaagtacagcgtcgataaccctcacgaaggccacgatttgcctcaatctcacaagatctccgtcaaggtgacgtcaagctcagggaatgcgtaccatcacgcggatcaagtggcgtctgggcaattcgcgttctcggcagtggaagctggggactacatggcttgtttctcagccgttgatcataagcctgaggtgactctgagcattgattttgagtggaggacgggtgttcaatccaagagctgggctactgttgccaagaagagccaagtcgaaaccatggagtttgatgtaaagagccttcttgatactgtcaactctattcatgaagagatgttttatcttagagaaagggaagaagaaatgcaagatntgaaccggtcaacaaacactaaaatggcgtggttgagtttgctctctttattcgtatgcataggagtggcagctatgcagtatgtacacttgaagncctttttcgagaagaagaaagtcatctaatttgttacttacaggcaatcacacgcacgaaacaatctacttatcttttgggtgttgtatattaagtcaatgactactgcaagcatgttntcttgagacttagaactttgattttatgtgccagtattgtccttcttgggtttagttctttgtttagatttgttggtccttaatacttggataatttgatggtttaaactatataaaatgtgcatttcc

SEQ ID NO: 134 - protein, 222 aa, Brassica napus
  peptide (1)..(222): Ceres Seq. ID no. 12473978
  misc_feature (182)..(182): Xaa is any aa, unknown or other
  misc_feature (214)..(214): Xaa is any aa, unknown or other
SDYYLSKMFILRSQKLWTVVMILVMSSRVTHSLHFDLHSGRTKCIAEDIKSNSMTVGKYSVDNPHEGHDLPQSHKISVKVTSSSGNAYHHADQVASGQFAFSAVEAGDYMACFSAVDHKPEVTLSIDFEWRTGVQSKSWATVAKKSQVETMEFDVKSLLDTVNSIHEEMFYLREREEEMQDXNRSTNTKMAWLSLLSLFVCIGVAAMQYVHLKXFFEKKKVI

SEQ ID NO: 135 - protein, 215 aa, Brassica napus
  peptide (1)..(215): Ceres Seq. ID no. 12473979
  misc_feature (175)..(175): Xaa is any aa, unknown or other
  misc_feature (207)..(207): Xaa is any aa, unknown or other
MFILRSQKLWTVVMILVMSSRVTHSLHFDLHSGRTKCIAEDIKSNSMTVGKYSVDNPHEGHDLPQSHKISVKVTSSSGNAYHHADQVASGQFAFSAVEAGDYMACFSAVDHKPEVTLSIDFEWRTGVQSKSWATVAKKSQVETMEFDVKSLLDTVNSIHEEMFYLREREEEMQDXNRSTNTKMAWLSLLSLFVCIGVAAMQYVHLKXFFEKKKVI

SEQ ID NO: 136 - protein, 202 aa, Brassica napus
  peptide (1)..(202): Ceres Seq. ID no. 12473980
  misc_feature (162)..(162): Xaa is any aa, unknown or other
  misc_feature (194)..(194): Xaa is any aa, unknown or other
MILVMSSRVTHSLHFDLHSGRTKCIAEDIKSNSMTVGKYSVDNPHEGHDLPQSHKISVKVTSSSGNAYHHADQVASGQFAFSAVEAGDYMACFSAVDHKPEVTLSIDFEWRTGVQSKSWATVAKKSQVETMEFDVKSLLDTVNSIHEEMFYLREREEEMQDXNRSTNTKMAWLSLLSLFVCIGVAAMQYVHLKXFFEKKKVI

SEQ ID NO: 137 - DNA, 763 bp, Brassica napus
  misc_feature (1)..(763): Ceres Seq. ID no. 13504224
aattgattccttcgtcaagcctcaatcactttcctcactcctctctctctcaaatcaacagcacgaagagatgaagcacctgatccgccgcctctcccgcgtcgccgactccgcgaactacagcctcctccgctccgattcgcagcgacctagccgccgtccaccgccgcctcgtcgctcgaagaagcacacatcctccgttcccgagggacacgtgcctgtctacgtgggagacgagatggagcggttcgtcgtgagcgcggagctgcttaaccacccggttttcatcggtttgttgaaccgatcggctcaagagtacggttacgaacagaaaggagttctgcagatcccctgccacgtgttggtattcgagcgaatcatggagtcgctccggctcggattagcggtgccgagcgacctacaagatctgatcggcgacgagacgatttgacacgcgagggaatctttggtagttagagagagatattgatctggttcttcttttttttggctcagatgcagtacgacgtcgtgttgatggtgtacatagctatatgtatatttttttttttcgggatgatgatgatgaaaagttcaaatgggaaggggaaagattagcgatatttttagggcttttctttttgaatttttttttctttttataaaatttgtttgttgcaaatttcctgtttttcgccggtttaagaaccggtttgagactcttgtgaaggtttatatggaaattgcttcggtttggttatgc

SEQ ID NO: 138 - protein, 149 aa, Brassica napus
  peptide (1)..(149): Ceres Seq. ID no. 13504225
IDSFVKPQSLSSLLSLSNQQHEEMKHLIRRLSRVADSANYSLLRSDSQRPSRRPPPPRRSKKHTSSVPEGHVPVYVGDEMERFVVSAELLNHPVFIGLLNRSAQEYGYEQKGVLQIPCHVLVFERIMESLRLGLAVPSDLQDLIGDETI

SEQ ID NO: 139 - protein, 126 aa, Brassica napus
  peptide (1)..(126): Ceres Seq. ID no. 13504226
MKHLIRRLSRVADSANYSLLRSDSQRPSRRPPPPRRSKKHTSSVPEGHVPVYVGDEMERFVVSAELLNHPVFIGLLNRSAQEYGYEQKGVLQIPCHVLVFERIMESLRLGLAVPSDLQDLIGDETI

SEQ ID NO: 140 - DNA, 618 bp, Brassica napus
  misc_feature (1)..(618): Ceres Seq. ID no. 12557027
aagaccgtccattgtgagtcggttgcaaaaatcaacatagatgggaaaaaatctcaccttgaatcctttttgattgaaataaaatctcaaattcgatcaaagaaatgcaaacatcatctgttcctcctggaagaagtctctacctcaacctcatcgtcgtcgtcttagcgctctttgcatcgatcaccatggcagaatccaccggagaagcatcgtccgaagcgaaggtccacatcatctacaccgagaaacccaccgatgaggaacctaaagactatcatctccgtactctctcctccgctctcggcagtgaggaagcagcaaaggacgctctgatctacagttacaaggaagctgcttctggtttctcagctaagctcacacctgagcaagtcaccaagatctccaaactaccaggtgtgattcaagttgtgccgagccagacctaccagttgcacaaacctgttggtgctggtttcaagctgacttaactaaaatgtagcttcttgttgttgtaaatgtcgtggctttcagaactggtatctaactataataatgccatgaatttgctagagttctgtgttgttgagaaattgggttttataattatattatttt

SEQ ID NO: 141 - protein, 128 aa, Brassica napus
  peptide (1)..(128): Ceres Seq. ID no. 12557028
MQTSSVPPGRSLYLNLIVVVLALFASITMAESTGEASSEAKVHIIYTEKPTDEEPKDYHLRTLSSALGSEEAAKDALIYSYKEAASGFSAKLTPEQVTKISKLPGVIQVVPSQTYQLHKPVGAGFKLT

SEQ ID NO: 142 - protein, 100 aa, Brassica napus
  peptide (1)..(100): Ceres Seq. ID no. 12557029
MAESTGEASSEAKVHIIYTEKPTDEEPKDYHLRTLSSALGSEEAAKDALIYSYKEAASGFSAKLTPEQVTKISKLPGVIQVVPSQTYQLHKPVGAGFKLT

SEQ ID NO: 143 - DNA, 945 bp, Brassica napus
  misc_feature (1)..(945): Ceres Seq. ID no. 12472003
  misc_feature (934)..(934): n is a, c, t, g, unknown, or other
caccgtgtcaccgcttttgaagtaacaatgccgcagggagattacatcgagctgcaccagaagaggcatggacgccgcctcgattacgaggagcgcaagcgcaagaaggaggcgcgtgcagttcacaagcgctccaaacaagctcaaaactctataggtataaagggtaagatgattgctaagaagaactacgctgagaaagctcaaatgaagaaaacattgaagatgcatgaggagagttcatcaaggcgtaaagctgatgaggatgttcaggaaggagctgttcctgcttatcttcttgatcgtgagaacacctctcgtgccaaggttcttagcaatactattaaacagaagaggaaggagaaagctgggaagtgggaggttcctctgccaaaggttcgtcctgtggctgaagatgagatgttcagagtgatcagatccgggaagaggaaaacaaaacagtggaagaggatggttacgaaagctacatttgttggacctggtttcacaaggaagccgccaaagtacgagcgattcatccgcccttntgggctgcgtttcaccaaggcccacgtcactcaccctgagntaagatgcactttttgtctcgagatcattgggatcaagaagaatcccaacggtcctatgtatacgtcccttggtgtcatgaccagaggaacaatcattgaggtcaatgtgagtgagcttggtcttgttacaccagctggaaaagttgtntgggggaagtacgctcaggtgacaaacaatcctgagaatgacggatgtataaacgctgttctgcttgtgtaatcaaaatctccggcaagaataacgttgtttactttcttttttagttctctcctgaaaacaattttgtctttgactcgagtcttttatgtatctgtgtggtttaatacaatttaagcaaagcctnttttccgtttc

SEQ ID NO: 144 - protein, 269 aa, Brassica napus
  peptide (1)..(269): Ceres Seq. ID no. 12472004
  misc_feature (183)..(183): Xaa is any aa, unknown or other
  misc_feature (197)..(197): Xaa is any aa, unknown or other
  misc_feature (246)..(246): Xaa is any aa, unknown or other
HRVTAFEVTMPQGDYIELHQKRHGRRLDYEERKRKKEARAVHKRSKQAQNSIGIKGKMIAKKNYAEKAQMKKTLKMHEESSSRRKADEDVQEGAVPAYLLDRENTSRAKVLSNTIKQKRKEKAGKWEVPLPKVRPVAEDEMFRVIRSGKRKTKQWKRMVTKATFVGPGFTRKPPKYERFIRPXGLRFTKAHVTHPEXRCTFCLEIIGIKKNPNGPMYTSLGVMTRGTIIEVNVSELGLVTPAGKVXWGKYAQVTNNPENDGCINAVLLV

SEQ ID NO: 145 - protein, 260 aa, Brassica napus
  peptide (1)..(260): Ceres Seq. ID no. 12472005
  misc_feature (174)..(174): Xaa is any aa, unknown or other
  misc_feature (188)..(188): Xaa is any aa, unknown or other
  misc_feature (237)..(237): Xaa is any aa, unknown or other
MPQGDYIELHQKRHGRRLDYEERKRKKEARAVHKRSKQAQNSIGIKGKMIAKKNYAEKAQMKKTLKMHEESSSRRKADEDVQEGAVPAYLLDRENTSRAKVLSNTIKQKRKEKAGKWEVPLPKVRPVAEDEMFRVIRSGKRKTKQWKRMVTKATFVGPGFTRKPPKYERFIRPXGLRFTKAHVTHPEXRCTFCLEIIGIKKNPNGPMYTSLGVMTRGTIIEVNVSELGLVTPAGKVXWGKYAQVTNNPENDGCINAVLLV

SEQ ID NO: 146 - protein, 212 aa, Brassica napus
  peptide (1)..(212): Ceres Seq. ID no. 12472006
  misc_feature (126)..(126): Xaa is any aa, unknown or other
  misc_feature (140)..(140): Xaa is any aa, unknown or other
  misc_feature (189)..(189): Xaa is any aa, unknown or other
MIAKKNYAEKAQMKKTLKMHEESSSRRKADEDVQEGAVPAYLLDRENTSRAKVLSNTIKQKRKEKAGKWEVPLPKVRPVAEDEMFRVIRSGKRKTKQWKRMVTKATFVGPGFTRKPPKYERFIRPXGLRFTKAHVTHPEXRCTFCLEIIGIKKNPNGPMYTSLGVMTRGTIIEVNVSELGLVTPAGKVXWGKYAQVTNNPENDGCINAVLLV

SEQ ID NO: 147 - DNA, 999 bp, Brassica napus
  misc_feature (1)..(999): Ceres Seq. ID no. 12465955
ataagaaacaatacttccttcgtaatctccgcctcgtatctcttatataactcatctctctaaacctaaaaaatgttcctctccgttaaatctaacggtcatgtcaactaataccgtcgtccctctccgtcgcagatctaacggatatcacactaacggcgtggcctttaacggaatggataatattgtcaagaaaaccgacgactgctacaccaacggcaacggcaacggaggagtagagagaagcaaagcctcgtttctgacatggaccatgcgtgacgctgtctacgtagcgagataccattggataccgtgtttctttgcggtcggagttctgttctttatgggggttgagtacacgctccagatggttccggcgaagtctgagccgttcgatattgggtttgtggccacgcgctctctaaaccgcgtcttggcgagttcaccggatcttaacacccttttagcggctctaaacacggtattcgtagcgatgcaaacgacgtatattgtatggacatggttgatggaaggaagaccacgagccnctatctcggcttgcttcatgtttacttgtcgcggcattnttggttactctactcagctccctctaccncaggattttttaggatcaggagttgattttccggtgggaaacgtctcattcttcctcttctattctggccacgtagccggttcaatgatcgcatccttggacatgaggagaatgcagaggttgagactagcgatgctttttgacatcctcaacatattacaatcgatcagactgctcgggacgagaggacnctacacgatcgatcttgcggtcggagttggcgctgggattctctttgactcattggccgggaagtacgaagagatgatgagcaagagacncaatttagccaatggttttagtttgatttntaaagactcgctagtcaattaatcttttgttttcattttaaatgattagttgaacttgaacatatttgattt

SEQ ID NO: 148 - protein, 282 aa, Brassica napus
  peptide (1)..(282): Ceres Seq. ID no. 12465956
  misc_feature (150)..(150): Xaa is any aa, unknown or other
  misc_feature (163)..(163): Xaa is any aa, unknown or other
  misc_feature (172)..(172): Xaa is any aa, unknown or other
  misc_feature (236)..(236): Xaa is any aa, unknown or other
  misc_feature (266)..(266): Xaa is any aa, unknown or other
  misc_feature (276)..(276): Xaa is any aa, unknown or other
MSTNTVVPLRRRSNGYHTNGVAFNGMDNIVKKTDDCYTNGNGNGGVERSKASFLTWTMRDAVYVARYHWIPCFFAVGVLFFMGVEYTLQMVPAKSEPFDIGFVATRSLNRVLASSPDLNTLLAALNTVFVAMQTTYIVWTWLMEGRPRAXISACFMFTCRGIXGYSTQLPLXQDFLGSGVDFPVGNVSFFLFYSGHVAGSMIASLDMRRMQRLRLAMLFDILNILQSIRLLGTRGXYTIDLAVGVGAGILFDSLAGKYEEMMSKRXNLANGFSLIXKDSLVN

SEQ ID NO: 149 - protein, 257 aa, Brassica napus
  peptide (1)..(257): Ceres Seq. ID no. 12465957
  misc_feature (125)..(125): Xaa is any aa, unknown or other
  misc_feature (138)..(138): Xaa is any aa, unknown or other
  misc_feature (147)..(147): Xaa is any aa, unknown or other
  misc_feature (211)..(211): Xaa is any aa, unknown or other
  misc_feature (241)..(241): Xaa is any aa, unknown or other
  misc_feature (251)..(251): Xaa is any aa, unknown or other
MDNIVKKTDDCYTNGNGNGGVERSKASFLTWTMRDAVYVARYHWIPCFFAVGVLFFMGVEYTLQMVPAKSEPFDIGFVATRSLNRVLASSPDLNTLLAALNTVFVAMQTTYIVWTWLMEGRPRAXISACFMFTCRGIXGYSTQLPLXQDFLGSGVDFPVGNVSFFLFYSGHVAGSMIASLDMRRMQRLRLAMLFDILNILQSIRLLGTRGXYTIDLAVGVGAGILFDSLAGKYEEMMSKRXNLANGFSLIXKDSLVN

SEQ ID NO: 150 - protein, 225 aa, Brassica napus
  peptide (1)..(225): Ceres Seq. ID no. 12465958
  misc_feature (93)..(93): Xaa is any aa, unknown or other
  misc_feature (106)..(106): Xaa is any aa, unknown or other
  misc_feature (115)..(115): Xaa is any aa, unknown or other
  misc_feature (179)..(179): Xaa is any aa, unknown or other
  misc_feature (209)..(209): Xaa is any aa, unknown or other
  misc_feature (219)..(219): Xaa is any aa, unknown or other
MRDAVYVARYHWIPCFFAVGVLFFMGVEYTLQMVPAKSEPFDIGFVATRSLNRVLASSPDLNTLLAALNTVFVAMQTTYIVWTWLMEGRPRAXISACFMFTCRGIXGYSTQLPLXQDFLGSGVDFPVGNVSFFLFYSGHVAGSMIASLDMRRMQRLRLAMLFDILNILQSIRLLGTRGXYTIDLAVGVGAGILFDSLAGKYEEMMSKRXNLANGFSLIXKDSLVN

SEQ ID NO: 151 - DNA, 1244 bp, Arabidopsis thaliana
  misc_feature (1)..(1244): Ceres Seq. ID no. 13647121
gagaaacaacaatcaaaatacaattatacaatattaaacatttaacaaaataaaaaaatacaacttaaaactttaaaatttgagttataaaatttcgtctcgcggtgaattatacatttaaatcaaacaatagcataaatttattaaatcatcctacaaaatattcagttattttttaattaatgaaaatataagcccgcggtataccgcaggttaatatctagataaaaaaaataatcaaatttcaattctataaacatactaaataatatatctaaatatacaaaatataaaaaataacaaataattataagactgtgaattatatattacgaaagtaattactgtcaacactaaaataaaatatagacccgcggtataccgcgggttaaaatctagtatatactaaaactgttggtttttttttaatatataaattaacaaaatttatatatgctgcaaaacgagacctggttatatttggttatgagttgaaatagcaagttacctgagcaccaaggagtttcatggaaagtacattaaaggattgtttctctatatcagcagctcccatgaaaacagtacactccaaggagagctttgcacatgcagccgctgtggcgactccatgttgtccggctccagtggccgccaccacacggctgcaaccaagccgccgggaaatcatggcctgagcgagagcattattgattttgtgagacccacagtggctaagatcttcccgtttcaagtatatctctggtccaccttcgatggttggaactatgttcttgtagtgttcggttagacgttcggcgaagtagagaggcgtttctcttcctacgtagtctcttaacgctgtggtaagctcctcctgaaattcgtgatcgcacctaacaaagttaaattcgtcttcaagttctatcaggcgagacatcaatgtctccggtacaaatttcccaccgaacctcccgaatttaccgttaccgtcaccacgaagaaactgcctcttgtcggttcttgttgggaccgaatccaacgatggaccactattactgctgagtgcattgatttcacggtggtggcgttttgtggaaacgccgcaaacaatcaagtgtgtcatacggtggtttcttgccggaaccctaagaagtggctgccctcgtacctggattttactggacaacattttctctctcttttctttcttccagaatacttgttatatctatttgagattttct

SEQ ID NO: 152 - protein, 59 aa, Arabidopsis thaliana
  peptide (1)..(59): Ceres Seq. ID no. 13647122
MLSGSSGRHHTAATKPPGNHGLSESIIDFVRPTVAKIFPFQVYLWSTFDGWNYVLVVFG

SEQ ID NO: 153 - protein, 55 aa, Arabidopsis thaliana
  peptide (1)..(55): Ceres Seq. ID no. 13647123
MESTLKDCFSISAAPMKTVHSKESFAHAAAVATPCCPAPVAATTRLQPSRREIMA

SEQ ID NO: 154 - protein, 40 aa, Arabidopsis thaliana
  peptide (1)..(40): Ceres Seq. ID no. 13647124
MKTVHSKESFAHAAAVATPCCPAPVAATTRLQPSRREIMA

SEQ ID NO: 155 - DNA, 555 bp, Arabidopsis thaliana
  misc_feature (1)..(555): Ceres Seq. ID no. 13646302
atcaacattcacaattcacaaaaaaatacttgttcagttattaaagataaatctctcagaaaagaaaaaaaaaatggtgaacacaaaaattgtagccttgttaatggtggtgatgatggtaacaatgggaatggagaacattttggttcaggcaaatcgtcgtcatcatcattctccttccccttctccttcatctgattttgatgatagtggttcaaaatctccttctccttcaccaaaatcaaaagaaaagtcatcaacatattgcatgattggctgttcttttgagaagtgctttcaccatggaaaaagctcaagcgatgtggaaaagtatgacttatgcatgaaaaaatgttcgaagatatgcaacaagaagaaggaaagcgatgacatatatgtctaaattactaaagagcaaatgattgttgtttcgcatctactatgtctttgtcttattacttactcatcagatgtatatctctcataatatttttttatgagacgtaatcataataaatatatataaaggatataataaacattgatagtttcttt

SEQ ID NO: 156 - protein, 133 aa, Arabidopsis thaliana
  peptide (1)..(133): Ceres Seq. ID no. 13646303
STFTIHKKILVQLLKINLSEKKKKMVNTKIVALLMVVMMVTMGMENILVQANRRHHHSPSPSPSSDFDDSGSKSPSPSPKSKEKSSTYCMIGCSFEKCFHHGKSSSDVEKYDLCMKKCSKICNKKKESDDIYV

SEQ ID NO: 157 - protein, 109 aa, Arabidopsis thaliana
  peptide (1)..(109): Ceres Seq. ID no. 13646304
MVNTKIVALLMVVMMVTMGMENILVQANRRHHHSPSPSPSSDFDDSGSKSPSPSPKSKEKSSTYCMIGCSFEKCFHHGKSSSDVEKYDLCMKKCSKICNKKKESDDIYV

SEQ ID NO: 158 - protein, 99 aa, Arabidopsis thaliana
  peptide (1)..(99): Ceres Seq. ID no. 13646305
MVVMMVTMGMENILVQANRRHHHSPSPSPSSDFDDSGSKSPSPSPKSKEKSSTYCMIGCSFEKCFHHGKSSSDVEKYDLCMKKCSKICNKKKESDDIYV

SEQ ID NO: 159 - DNA, 594 bp, Arabidopsis thaliana
  misc_feature (1)..(594): Ceres Seq. ID no. 13647621
ggggaaataatggcgtagctctactagctcaagtttgagctctcccataatgagtacatcaagcttgtcctccatctcctgcctcctctggagatctctctcatgatgacttcgaaggtatgagaaactacagagataatgttaaactgcaacaaggttttagaacaccgggcagcccttagcgacgatccctttctctgttgggcaatttgccaaagggcaatggtctgtgttctcattcccccaccaatctggtaagcttatgttattgttctgtaacgcaaagtagatcaacactcccataaccgcagtgcctgcatcaagagctgcagagaggatgtagttatgccttgcccaccatcccttgtacctcctgaagatatagtagttgaacacgatcccaacagcgaaccacgaccagtaatgcacagccttggccattggcatcacattagcccctgagaagatcaagggaatatgaatctgatgtatccacttcttctccgggaatttccttgcaaagaaccagaccgggacaggagcaaggaagccaatgaggaagaaccagttcatcccggggtatatacctttact

SEQ ID NO: 160 - protein, 39 aa, Arabidopsis thaliana
  peptide (1)..(39): Ceres Seq. ID no. 13647622
MLNCNKVLEHRAALSDDPFLCWAICQRAMVCVLIPPPIW

SEQ ID NO: 161 - protein, 38 aa, Arabidopsis thaliana
  peptide (1)..(38): Ceres Seq. ID no. 13647623
MPCPPSLVPPEDIVVEHDPNSEPRPVMHSLGHWHHISP

SEQ ID NO: 162 - protein, 39 aa, Arabidopsis thaliana
  peptide (1)..(39): Ceres Seq. ID no. 13647624
MNLMYPLLLREFPCKEPDRDRSKEANEEEPVHPGVYTFT

SEQ ID NO: 163 - DNA, 536 bp, Arabidopsis thaliana
  misc_feature (1)..(536): Ceres Seq. ID no. 14307583
tgctatccgatgaacttctgaccatgattattgataaagtgagttcttgaaatcccatctctcttagtgtgatgtataatattttggtaaatttagttagcacatgcttcttttctttctctactttgtttttgctagacatttgctgatgcagattctgacaaagacggtaaaattagtaaggatgaatggaatgtctatgtgcataaacatcctagcttgttgaagaatatgactcttccttacctaaaggatgtgacgacagcattcccaagttttatattcaacactgaggttgaagactgaggcacaactgtccatgcaacaccggtcatcttttttctgcttggtcctgtaattcgagtgagattgtcatagcgcaagagcagaacgaggaaagaaggttttccttattttattttaagccaacgtagttgatgattattagctgtaagtaaaattgtcaagcactttgctttgttttgatgactttactgtaattgttccattgaaagtaatgaagcatttttcttttc

SEQ ID NO: 164 - protein, 40 aa, Arabidopsis thaliana
  peptide (1)..(40): Ceres Seq. ID no. 14307584
MLLFFLYFVFARHLLMQILTKTVKLVRMNGMSMCINILAC

SEQ ID NO: 165 - DNA, 663 bp, Arabidopsis thaliana
  misc_feature (1)..(663): Ceres Seq. ID no. 13648081
  misc_feature (1)..(663): Ortholog of  Ceres SEQ ID NO 13502952 as cited in SEQ ID NO 62271
  misc_feature (1)..(663): Ortholog of  Ceres SEQ ID NO 13596000 as cited in SEQ ID NO 68188
aaaaaaaaaaaaaaaaaatgaagaaacttcttttgatatttctgttttctcttgtcattctccaaactgcttgtgacgatagatgggcatgaagatgtacccgaaaacgacgaaaatgctcttcttaaggctgttgcaaaccaacctgtatctgttgcaattgatgctggaagttcagatttccagttttattcagagggagtgtttacgggatcttgtggaacagagctgaaccatggtgtggcagcggtcgggtatggatctgagagggggaaaaagtattggatagtgagaaactcatggggagctgaatggggagagggaggctatataaagattgaaagagagattgatgaaccggaagggcgttgcggtattgcgatggaggcatcgtatccgatcaagctatcgtcttctaatcctaccccgaaagacggtgatgtcaaagatgagctctagatatgtgtacacattgtgtaaaaccatatcaaaggtgatcccaattccttgttgattcatgttgttagtttcgtcttcatgatttgattttgttgttggttttgaatttgaataaaaatgtctcgtgttttctcaatcctttgtttattaattatgtacaagagaccaataagacacttttggcgaaaaaaaaaaaaaaaaaaa

SEQ ID NO: 166 - protein, 53 aa, Arabidopsis thaliana
  peptide (1)..(53): Ceres Seq. ID no. 13648082
MNRKGVAVLRWRHRIRSSYRLLILPRKTVMSKMSSRYVYTLCKTISKVIPIPC

SEQ ID NO: 167 - protein, 49 aa, Arabidopsis thaliana
  peptide (1)..(49): Ceres Seq. ID no. 13648083
MGMKMYPKTTKMLFLRLLQTNLYLLQLMLEVQISSFIQRECLRDLVEQS

SEQ ID NO: 168 - protein, 47 aa, Arabidopsis thaliana
  peptide (1)..(47): Ceres Seq. ID no. 13648084
MKMYPKTTKMLFLRLLQTNLYLLQLMLEVQISSFIQRECLRDLVEQS

SEQ ID NO: 169 - DNA, 910 bp, Arabidopsis thaliana
  misc_feature (1)..(910): Ceres Seq. ID no. 13648101
cccccagtggtaattctgttgaagctgatgcaccaccatcaccaatcttgtctttatttatcttgaatcgatgatttttagctagcctacgcgccctacatctttcgagtttcttaagaaagctctctccaaaattctgaagcacttgacccaaaggcagtagctcatcatcctcatcattattatcataatgatcaattgtgttacttgcatcaaacgtttcagttgattctgaagaatccagaaaaaactttgaaatagatttcaaccaccagtcacgatatctttcagtaacagaagtcgtagcgacacgagaaggtatgtaaagcattaaaccatcaagagacttattgtaaccatcccatgcttctttttctgtgaagctgctatgatcagtaaccaaaccaggaagatcttgagccagcccgaactgcattgccactcggtttggatagtaatcctccacaatatcaaccccaacaagctgagaaactctcatacatcgagcaaaggaaacgaatccatcatcaagattgtcatcaacagtcatccacatagcttcttcagggtaaaaccgaggagggttccaaatctgtaaaggtttagtgtaaggacgccaatcaaaatcaacaagattcaatctcacattcttagatgtttgtgagtgccaccgagatatcctaggttcaccttttggtatcactctagcttttggactggtactcttgaatctctcccatgcccagagttggactaacttaaacagtgatttcagagtgacatttggagtggacttttctctagcagaagcttgaatttgacccaaatctctgtatagtctagctagaacagcaggagcaaaagcaatcctttcgcctctagctaaacgaacagccataaggagaacttt

SEQ ID NO: 170 - protein, 69 aa, Arabidopsis thaliana
  peptide (1)..(69): Ceres Seq. ID no. 13648102
MISNQTRKILSQPELHCHSVWIVILHNINPNKLRNSHTSSKGNESIIKIVINSHPHSFFRVKPRRVPNL

SEQ ID NO: 171 - DNA, 1143 bp, Arabidopsis thaliana
  misc_feature (1)..(1143): Ceres Seq. ID no. 13648449
ggcgtcttcatcgctgctcgccatcgccggccaccggggttgccgctgatgcgattcgatccagtgggaacttttgtcaccttgcctcttctctctttcctaacactcaaatctctcctcagccttcagatagatagtctttgaagcaaaccaaaggtgaaaactgttctgcagttggtgatgacaagaagaatcacaagcttttgacttatgtttgagaatcatcatgggacaaggcttccgcaatcgaaatgggactttttcagcagcatcctagaaagactctttgcctttatcgcttcacctagacnacgagcaaggataactccatcctccatggctgagcaacctccttgtccgatatcaggagtcattgggtgaagtgcatctcctgcaacgcacacgttgtcttttgtgatgtttgaccatagcagttcccatggaggtcggtacttcagttgagacatcaccatgctatcaagatcagtggtctccaccacattcttaatgttttcaggcaagtctttgatcttgttcagcacaaactctttgaggatttccgaatttgtctcctcatctaacaagcgcaaggagaagagtcaaagacagtagtctgatatgaacaagaagctgcttgtagttagatattagatatcaggtaaagttgcatatcttcacctatatcagtggacgtgtgggttaggaaccagtagacagtgttgtggtcacatgggataaagccggaacgaacgccgtctccataaaactggaagaaccttttcccaaatccatggccttccggaaaatgtgtgagccctcggatttctaaccgggcagttgtagcgggatttttgaatcctagacacttaccaatcactgagtacagtgcatcgcaccttaccaaatcctgcatttcgtttagaaaccctacaattccgtagcaagtccaggcctcacatggtttacagaggacaagtagttatttaccttggttttgagaatggtcccgtcggagagatgagccttcttgtatcatccagccaattcaatatgaacaaccttagacgaaaacctgatggtctcttcaggcaactcacctgctagagcctctaacatcagcttcctctgtacgcatcgagactc

SEQ ID NO: 172 - protein, 56 aa, Arabidopsis thaliana
  peptide (1)..(56): Ceres Seq. ID no. 13648450
  misc_feature (34)..(34): Xaa is any aa, unknown or other
MFENHHGTRLPQSKWDFFSSILERLFAFIASPRXRARITPSSMAEQPPCPISGVIG

SEQ ID NO: 173 - protein, 48 aa, Arabidopsis thaliana
  peptide (1)..(48): Ceres Seq. ID no. 13648451
MVYRGQVVIYLGFENGPVGEMSLLVSSSQFNMNNLRRKPDGLFRQLTC

SEQ ID NO: 174 - protein, 47 aa, Arabidopsis thaliana
  peptide (1)..(47): Ceres Seq. ID no. 13648452
GVFIAARHRRPPGLPLMRFDPVGTFVTLPLLSFLTLKSLLSLQIDSL

SEQ ID NO: 175 - DNA, 430 bp, Arabidopsis thaliana
  misc_feature (1)..(430): Ceres Seq. ID no. 13593557
aaataatttacaaacagaattttagaccatttgagaaatttctacaaaatcaatcgagaaaagcaaattacatgaatcattgtcaaacagtacaataatgatcactacaagggagcttataaaagaagagcgaggaggaaagaggaagcagcaccaatatggaaggagcctgggaacataatagttgaggctgcagaggatgttgttgtgttgcgaggccctctgtatttcacccttttcttcatcaccactgcgagatttcttgagccatgctcaccctcagctgaacacaaaagaaaggcctgagagaagaagaagaggaatacgatggagaagaggagtatgcgtctggctttgatcatctcacccatctttggtttttgcgttttgcttaattctgatggatgtgagtattacatatataaagatt

SEQ ID NO: 176 - protein, 52 aa, Arabidopsis thaliana
  peptide (1)..(52): Ceres Seq. ID no. 13593558
MLLCCEALCISPFSSSPLRDFLSHAHPQLNTKERPERRRRGIRWRRGVCVWL

SEQ ID NO: 177 - protein, 34 aa, Arabidopsis thaliana
  peptide (1)..(34): Ceres Seq. ID no. 13593559
MEKRSMRLALIISPIFGFCVLLNSDGCEYYIYKD

SEQ ID NO: 178 - protein, 31 aa, Arabidopsis thaliana
  peptide (1)..(31): Ceres Seq. ID no. 13593560
IIYKQNFRPFEKFLQNQSRKANYMNHCQTVQ

SEQ ID NO: 179 - DNA, 512 bp, Arabidopsis thaliana
  misc_feature (1)..(512): Ceres Seq. ID no. 13648511
gcaccaggtccccccccccccccccgaagtaggcgagctttttactaaaaacgctcctcgtcacggaaatcgagacactctcaccattcatgccttctgacgccggtggagcttccgttcgccagcgtctggatctatcaactctattcagcctctctttgttctgtataagcttggtctcgtttgattcttcttccatgatttcaattctctccaaacatccaaattccctttcccatgtgttcttcttccctgagggttttctttggctccgatctgtctcagaccttggatccatctctgtccctgaaaccaaaatcagaagatccacaacagttcagcggctctttacctcaaacatcagagagtatctcttggaccatcagatgtgcattttccggtgagaacgtcgacggcacacgacgagctcaaaagctgggctggtggtctccctctacgcctcaccgccgaccatcactccaatctttcagaacttcaaccctagggtttgg

SEQ ID NO: 180 - protein, 104 aa, Arabidopsis thaliana
  peptide (1)..(104): Ceres Seq. ID no. 13648512
MPSDAGGASVRQRLDLSTLFSLSLFCISLVSFDSSSMISILSKHPNSLSHVFFFPEGFLWLRSVSDLGSISVPETKIRRSTTVQRLFTSNIREYLLDHQMCIFR

SEQ ID NO: 181 - protein, 91 aa, Arabidopsis thaliana
  peptide (1)..(91): Ceres Seq. ID no. 13648513
MCSSSLRVFFGSDLSQTLDPSLSLKPKSEDPQQFSGSLPQTSESISWTIRCAFSGENVDGTRRAQKLGWWSPSTPHRRPSLQSFRTSTLGF

SEQ ID NO: 182 - protein, 68 aa, Arabidopsis thaliana
  peptide (1)..(68): Ceres Seq. ID no. 13648514
MISILSKHPNSLSHVFFFPEGFLWLRSVSDLGSISVPETKIRRSTTVQRLFTSNIREYLLDHQMCIFR

SEQ ID NO: 183 - DNA, 843 bp, Arabidopsis thaliana
  misc_feature (1)..(843): Ceres Seq. ID no. 15226740
ggcatatttgaatagttcaaataatatgatcacctctctcttctctccttcatatcttttagagagaggaactgttgaattctgccgaccggattattctggtaaactgccgtcccaagttttgggcttttgcccggcatctttttggctttgttagcaaagatggccggtcctcttctggcaaatccggcttctacaagcggttttggccggcttttatccttcctccgccgttcgatcggttgttcttactgattgctttagtttctttttcagtttttctttcaataatttctaaagatttcaattggagattaattttaggtcataatagcctaagattaagttttcggatttgtatctttagaaagtttgatttgcagaattacctcaagtatgaaaggaagttttgtttccagcatattgggattgcctgtagccgtttctacatgtttatggagcttcgatcgatcaaatttgaggaatactcagatttttctttcctcattacctgtttttgccaaatctcttggttgatgattttggcatgcagatggaattgaattctctgtttgtgtatcctcccttctctgtttagcagtttccggtgagaaaaaaacaaaaatcgatgtttgccctttttcgacgttgattgtgttcaccggatcggagtctttgacggcaaaggatgacaggaacgtttcatcgcttctcttgcaacacgtgtcttgttatacgatcgtgttttgttaaagagatatccttcctttaaagaaatgtaactaagtggacctttgttgggatgtattctgtggatcattaataaacataatctttccagtg

SEQ ID NO: 184 - protein, 51 aa, Arabidopsis thaliana
  peptide (1)..(51): Ceres Seq. ID no. 15226741
AYLNSSNNMITSLFSPSYLLERGTVEFCRPDYSGKLPSQVLGFCPASFWLC

SEQ ID NO: 185 - protein, 46 aa, Arabidopsis thaliana
  peptide (1)..(46): Ceres Seq. ID no. 15226742
MKGSFVSSILGLPVAVSTCLWSFDRSNLRNTQIFLSSLPVFAKSLG

SEQ ID NO: 186 - protein, 43 aa, Arabidopsis thaliana
  peptide (1)..(43): Ceres Seq. ID no. 15226743
MITSLFSPSYLLERGTVEFCRPDYSGKLPSQVLGFCPASFWLC

SEQ ID NO: 187 - DNA, 925 bp, Arabidopsis thaliana
  misc_feature (1)..(925): Ceres Seq. ID no. 13647991
gagtagtacttttagtttactaatacttttttaagtataaaagttcatagtttcgaaaaaaaacaaaagactcgaaggatcgatgactgagatattattaatttattattgactcgtcggcatagcggttaactaaagccagcgcattgctagtaagcttcttgacgtcatcgactcgagagcagacgtcatctttgatagagtcgtcttcgtggacgtctttgaacccgtccgtacaagtatactcatcagtaagagctgcactaagccaagtcttgacattactcatctggaacctaaatgactcgatcgagccagacgcggagacaagctccttcatctgtttcatggagcctctcataccgtcaacggcatctttaagattctcgaagcagtctctaaggacgggggttgggtggtcgcggttataagcgttttggaggtaagagagaagctggagagtgttgtggagagtgagggagatggctacgcgcgcgaggcggtttgagtcattttggatggagttggcaaaagaggagagagtggagaagcaaaggtccgggtagagtgtggtgttgcaggccaaacggatgaaatcggagccgttggatggtgggagtggtggatcaacggtgaggatttgtgggagaaaggtggaaaagagaagtataaggagagtaggtctcatcattgttaccatattgttgtgtgatgtgtttggctcttttggattcataagccttggagttatttataggatttttgaaaaatatcagattttataaagaaacaaaattagagagttgagtttggaggtgaacaaaaatactctgccaacaattgtctgcatgaatgtttagtgggccgggccgaattccaatcttagaacttatcatatgaaaagaaaagaagttagttttttttt

SEQ ID NO: 188 - protein, 64 aa, Arabidopsis thaliana
  peptide (1)..(64): Ceres Seq. ID no. 13647992
MKSEPLDGGSGGSTVRICGRKVEKRSIRRVGLIIVTILLCDVFGSFGFISLGVIYRIFEKYQIL

SEQ ID NO: 189 - DNA, 1254 bp, Arabidopsis thaliana
  misc_feature (1)..(1254): Ceres Seq. ID no. 13648040
aaatcgactccggcaatatcacacactccctctccgatacagatttccggcaattacctggccctgagccataaatggcgtctcgagtgtttccctcgagctcgtgtggccattaccgtagaataagcttgctggaatctgatgttgaagaagagccgctaagtattgtttgaaaccatcgagcagaagctttaggtatccttgtgagattgttcttgtagtcaacatagtagatcccaaaccggaccgtgtatcctgagttccattcccaattgtctagcaatgaccacacaaaatatcctcttacgtcgcattcatcattcctgcaaagtgaatgcgggaacatttcaaactcaagaatctttgtgaatctctgcaaagtgaagaactttaccttatggcagctgataagtttgagaggtgggtttccatatatgtctttaacatacactgccagtttcctgattccccatgggacaatgtgtagccagcttgaccctgcctgtttcaagtatggtaagcagcagcatgagacaacagaatgttatgagctacaatatacggttcgaccgatgacttccccttcttacagaaccaatgtcccagaagtgagcaccttcctggagcttgtatccctgtgtcatagccttggatcgataccccatgaggctcattgaaagtgatccagtacttcactctatctccaaatgctttgaaacagtttggagaagatgaagaagaagaagaatgtcacctggtaagctgaagaagctgttccgaatacaaacccatctggaaaatttgctcggctgatagattctgaagaaacatgatcaagaggtacgaagaagacgacgaagaacggaaacagaactaagacgagtctcatcaaagattccatttttgggtcgcgtgaatagagaaagtgagagagagagagagataaagggatggaattttatggtgaatgaaagatttggaggcaagaaaatggagttttggtgtgtgtgtgtttttaatttgtaaagttgaagaagaaagaggaagagtgcaaaacaaaagctcacgtcttttgaaggcttttctttggttttgacatttgttctctctacttttactgcacacgtttcttatacttgtgccaaaaactttttaaagttgtttactctcccttaagataaaaaaaagtttgttactgagtgacaaaaaaaaaaaagaaaaaaaaaaaaaaaaaaactcgagggggggcccggt

SEQ ID NO: 190 - protein, 80 aa, Arabidopsis thaliana
  peptide (1)..(80): Ceres Seq. ID no. 13648041
MSLTYTASFLIPHGTMCSQLDPACFKYGKQQHETTECYELQYTVRPMTSPSYRTNVPEVSTFLELVSLCHSLGSIPHEAH

SEQ ID NO: 191 - protein, 65 aa, Arabidopsis thaliana
  peptide (1)..(65): Ceres Seq. ID no. 13648042
MCSQLDPACFKYGKQQHETTECYELQYTVRPMTSPSYRTNVPEVSTFLELVSLCHSLGSIPHEAH

SEQ ID NO: 192 - protein, 50 aa, Arabidopsis thaliana
  peptide (1)..(50): Ceres Seq. ID no. 13648043
MREHFKLKNLCESLQSEELYLMAADKFERWVSIYVFNIHCQFPDSPWDNV

SEQ ID NO: 193 - DNA, 1844 bp, Arabidopsis thaliana
  misc_feature (1)..(1844): Ceres Seq. ID no. 15179695
actagttctctctggcctcagagctagcatcaagagcgcttgtagcttcatctagtaacagaatctttgggtctttcaacatcgccctagcaattgcaattctctgcttctgtccacctgagagttgaacaccacgttctccaacctgtgtgtcgtagcctttaggaagtaatgtaatgaaactatgcgcattcgcagcggaagcagcagcttcaacttcaaccattgttgcatcaggctttccatagagtatgttctctagtatagtagtggcaaagagcgcaggttcttgattcacaagcccgatttgttcacgcaaaaacttcaactgaagcgtctttatctcaacaccatccaacagaatttgcccgctgtttggatcatagaatctctcaatgagggaaacaacagtactctttccagagccactcccaccaacaaccgccacagttttcccagaagggaagaaaatattaaagttcctgaagatcataacatcaggccgtgaaggatagctaaaagtcacatctttaaactcaatgttcccatgaacttgatccaaacattttccatccaacgggtcttgaattatcgtcggtctctggttaattatctccatcaacttataaccagccgctttacctttactaaacgccccaagattcgagaaagattgccccaaactcattccaccaacaatagcagagaatatagcagtaaacgcctttcctccatcggtttgtccattccgaataaaaactccagcataccaaaacaccaaagcccatgacatacaagctattccataagtacatcctaaacccaaccctttagccatccccgctttataaccgagcttaagcgtatactgaatcgcatccgaatacgcattaagtgccttactctctccaacatatgaataaacagttcgaacttgagcaattgcctgctcggcgataacaccggcgttagcataagattcacggctctttgaagtaattccggtgagtgtataagcgtataaacctccagcgaaagcgattccgggaatcacagcaacacttaacaaagctaatttccatgccgatacaaatccaactactaatcccgccaaaaatgttgagaggtaatgtataaagtttccaaccttttcactaatggcatcttgaacaagaagagtatcagtagaaacactaaagacaatgtcaccagttctagcatcagtatcaaagaacccaacgtcttgttttaatactgcttcaagatatttcttccttaatgctgctacttgtctttctccagaatacatccaacatgctatctctgcgtaagaagagaagcaaacgaccaaacccaagtagacgaaatatagagaatatctagagacttcatgaaccatttgatgtaaatccatttggtttttaccaaagccattaaccatttgaccaaagagtaaaaagaagacaggcatggaagagccatgaacaatggcaccaagagaaccaacgaacattaagagataatcaaatttatcagcgaaagaaaagagtttaaagaatggtaaactctgttctttcttcttctctgcttctggtggaacagtcttggcatcggttgtgttaggttccgacatggtttttgtagatccgagttcaaagaaagaaagaagaggaaacgagttggtttagtgagaaaacgagatcattgagcagtgagagagagagagagaaagaataaaaagtttttcttgaaaatctgacaattgttttgtgaagttcaagaactcttttacgagtgtcttgttttgaagtggtgaagagagagagagagagaatgagagtgtc

SEQ ID NO: 194 - protein, 80 aa, Arabidopsis thaliana
  peptide (1)..(80): Ceres Seq. ID no. 15179696
MNLIQTFSIQRVLNYRRSLVNYLHQLITSRFTFTKRPKIRERLPQTHSTNNSREYSSKRLSSIGLSIPNKNSSIPKHQSP

SEQ ID NO: 195 - protein, 42 aa, Arabidopsis thaliana
  peptide (1)..(42): Ceres Seq. ID no. 15179697
MSPVLASVSKNPTSCFNTASRYFFLNAATCLSPEYIQHAISA

SEQ ID NO: 196 - protein, 40 aa, Arabidopsis thaliana
  peptide (1)..(40): Ceres Seq. ID no. 15179698
MYKVSNLFTNGILNKKSISRNTKDNVTSSSISIKEPNVLF

SEQ ID NO: 197 - DNA, 852 bp, Arabidopsis thaliana
  misc_feature (1)..(852): Ceres Seq. ID no. 13648571
tctgttgtggctgctcgaatggctccgcgatgtatctcgccacgtgtgctattaagttcccgtgagacgaattcactcctttgcttcgtcccgtcgtccccgaggagtaaagcaacatcgccgtgtcgtctttatgaacttggtttctgactgcttgtccacttggttctttcttcatcatttcagttagattcccaaccactttgagtcctctcggaacgcgtagagtgtcttctacgcgctcgaggacgatggagataccggaactggcgattttgggagccagttccggtgttgtgaaggcgagttttggattgctatccgcgatttgtcttaagatttcactagcggtgttgagaggattagcggtagttaagacagcgccaagagacatcacggagaggcagacaatggggatggagatggtgttgggagagaggactaggaccacgtcacctctccgtattcccacgtcgtggaggagacagtcggcgacacgatccacggccctccataaatcggagaagcttatgcggtggtccgtggctgcgtctatgaaggcggttttgccacggtacgtttgggaggagatgaatgttgtgatgtcgagtgattcttttgaaggaagtgccaaatggtttgcgtttactgtaaaatgtggagtgtgatgtgcagaaaccgttccttggatcgatcagagatgatgatctttgagaattcgccattattctttggttggattagattgatgcaagctctcatatagttgcacttatcttatggaaatatcagcatcttaataaggcatatgctaaacgttcactgaaactatctaaatatctttcactactt

SEQ ID NO: 198 - protein, 138 aa, Arabidopsis thaliana
  peptide (1)..(138): Ceres Seq. ID no. 13648572
MEIPELAILGASSGVVKASFGLLSAICLKISLAVLRGLAVVKTAPRDITERQTMGMEMVLGERTRTTSPLRIPTSWRRQSATRSTALHKSEKLMRWSVAASMKAVLPRYVWEEMNVVMSSDSFEGSAKWFAFTVKCGV

SEQ ID NO: 199 - protein, 85 aa, Arabidopsis thaliana
  peptide (1)..(85): Ceres Seq. ID no. 13648573
MGMEMVLGERTRTTSPLRIPTSWRRQSATRSTALHKSEKLMRWSVAASMKAVLPRYVWEEMNVVMSSDSFEGSAKWFAFTVKCGV

SEQ ID NO: 200 - protein, 83 aa, Arabidopsis thaliana
  peptide (1)..(83): Ceres Seq. ID no. 13648574
MEMVLGERTRTTSPLRIPTSWRRQSATRSTALHKSEKLMRWSVAASMKAVLPRYVWEEMNVVMSSDSFEGSAKWFAFTVKCGV

SEQ ID NO: 201 - DNA, 1234 bp, Arabidopsis thaliana
  misc_feature (1)..(1234): Ceres Seq. ID no. 12394606
aggagcctctgtaattttgtagtagtctgtccgattcttctcaacgatttttgtattcatcgagtcaattgttcctgtgttttcattgattagatcttgtgaatatagtctttatagctttggttagagttttcttattggttaatgatgataaatccaaaggcttgtttctcaaacattcgcagtggccgcctaagagctttcgcctttcgccaggcttgagagttaatgctgttttatccttccttggatgtctgaaacttttgtatctaaacctgtattgttttgttttctattagggttttagatttgggactaagttattcaatgtcccattagcagaattgatttctcttagtgcttaataggattgaacaaagtccctcaaatcttgatccatctgtcactttgtcagcagtcttaattggtttcttgctgatcattatatgatgggaaataacatataatctcgattttgattaattggtagaatttgcttaatattggtcgatgaggataagatgaaggcttgtttctcaaaacattcgcagtggccgcctaaggctttcgcctttcgccgggcttgagagcttatgatgtttttatccttccttggatgtctgagaccaattctgttttagttagatgattgttgctgttagttttcggttgatgaggattatatttaaggcttgtttctcaaaacattcgcagtggccgcctaaagctttcgcctttcgccaggcttgagagctaatgcagctttatccttcctttggatgtctgaaaccgatgaatgttttaaatctcgtttttatgtttttgtctgtaagaaagatcaatgatgataaacttaaggcttgtttctcaaaacattcgcagtggccgcctaaagctttcgcctttcgccgggcttgagagttaatgcagcttttatccttccttggatgtctgagatctttattcactctatcgattatcttgtctgtttaggttattccttctagtagattattatcgtctaaattttgtgttgaatttgcaggtaatttcttggtggtagcttcttcgctttactggcttttggagaaagagttccttacgtttcctgtaatttcctttaatctgtaaaaatcattgtcagatttatttacaatctgtaaagagttctttgttgtaaacaattttgttcattggtgatgaaattttgttctcattatgaattttatttgtg

SEQ ID NO: 202 - protein, 53 aa, Arabidopsis thaliana
  peptide (1)..(53): Ceres Seq. ID no. 12394607
MQLYPSFGCLKPMNVLNLVFMFLSVRKINDDKLKACFSKHSQWPPKAFAFRRA

SEQ ID NO: 203 - protein, 41 aa, Arabidopsis thaliana
  peptide (1)..(41): Ceres Seq. ID no. 12394608
MNVLNLVFMFLSVRKINDDKLKACFSKHSQWPPKAFAFRRA

SEQ ID NO: 204 - protein, 34 aa, Arabidopsis thaliana
  peptide (1)..(34): Ceres Seq. ID no. 12394609
MIVAVSFRLMRIIFKACFSKHSQWPPKAFAFRQA

SEQ ID NO: 205 - DNA, 1132 bp, Arabidopsis thaliana
  misc_feature (1)..(1132): Ceres Seq. ID no. 15225940
gcagtttgagccgtttatagaaaagtcagaagctcttcatttctcagtggatcccgttggtaccgacgtcatgtaaaacatttcaactctacattgggttgcagtgcattatgaacaaagttttctctatgaatccgaaaacgtgagttattgagtttaaagaaagcaaaatacattgattatttgcaaataatagctgtttcctaacaagacaagccaacaaaagaaagattttaagctcccactttccagagacgttccttaacaccgagcttgcagcaaacatagacatcatgtgacgcttgtactatctgatcatgagagaggctacgagcaccccaattactcatacataactccttatctttcgtcactccttcatgccccaaatacaccttcacaatcgtctcaaacgagctactcaagagcaacggatggagatagtgccttatgtggacaagtctccagatatccaactgatggtggaatctctcgagcttgtcgttgtcttggctgttccatacgccgacaaaagtgattgtctgatcttccaagaaacttctaaggacgtcggggacgtacttacagtgagacaactgaatgatgagacagcgagtaccaacacatagttggagaatatccggtggaggatcggaaccacggggtgtccattgaacgccaagtccgacaactagaggtgtgataagcgaagacggctgacgaagcggatactgtggatccattggcgtatcactgagggagtatgagtgactgtgacgatcaaacgttctccaaagaagtcgacgtggtgttcttcgggtagagatgttgtggtgggtaaaaaagctcagcccgacctgaacccaaaataaacccgcccaccaaaaacccaactttagaaaacttagatgggtttttgatatagtgggtaaagcccgaaaaaacctgattgttccgagactacccgtgggtacccaacttagttttatcattttttagagtttatgtttaactgttaatatactattatatgtatgttatatctatattttgcttataaatatattttaaattatatttattttctgtattacatatatatttgatggaaaaaaggttaaattgcattacc

SEQ ID NO: 206 - protein, 82 aa, Arabidopsis thaliana
  peptide (1)..(82): Ceres Seq. ID no. 15225941
MPQIHLHNRLKRATQEQRMEIVPYVDKSPDIQLMVESLELVVVLAVPYADKSDCLIFQETSKDVGDVLTVRQLNDETASTNT

SEQ ID NO: 207 - protein, 64 aa, Arabidopsis thaliana
  peptide (1)..(64): Ceres Seq. ID no. 15225942
MEIVPYVDKSPDIQLMVESLELVVVLAVPYADKSDCLIFQETSKDVGDVLTVRQLNDETASTNT

SEQ ID NO: 208 - protein, 49 aa, Arabidopsis thaliana
  peptide (1)..(49): Ceres Seq. ID no. 15225943
MVESLELVVVLAVPYADKSDCLIFQETSKDVGDVLTVRQLNDETASTNT

SEQ ID NO: 209 - DNA, 2904 bp, Arabidopsis thaliana
  misc_feature (1)..(2904): Ceres Seq. ID no. 15168935
tgaattttctgtctatcccaggtgttagtctctttgcaaataagatctgcaaccgtcaggcgttgagtatcccagttagggggtcccactggcgttagcggggcagtgatagagatccagggctcatcccacaccagagtatcagcaccgtttccaatagccttccccaggttcttttttaacagatctctgcccagacagatgccacgccaaccatgggaggcagaagaagcaacatgacactcaaggaaagagttgtttctgcagtattttcccaggagggttctggccaagaggcaggtcggtttttccaagagtctccagctgattttagccagcagagcatcattgaagtgttggatgtctctgaaaccgagtccaccatctcttctggacatgggaggctggaagcttgaagcaggacatcgtatacgttggcatagctgccaaaacagattttagcatggttgtcttaccagcagtggataggaattttgaggaccagctgagtgctctttggcgaatccggtcaatgatactattgaagaggtccttttttttcctgccaaacagttctggtaatccgaggatactcattagctcctcacaatttttctcattggagcggcagaaaaacatagtatcatcagcgaacaggagagccccgagagaacctcactacagaggataaagaggtagggggagagaggatcgccctggcgaatacctctctgagggcagaccaatccctgagcagatccatttagaagaaaggagtatgagaccgtagagacgcactgcataacccagcagatccatttctggtgaaaacctagtctctttaagactagctctatgaaatcccattcgatgcggtcgtacgccttgctcatatcagtcttcactgccatgaagcatcttttcttagctccagatattttcaggacaggttgcaatctctgagtgatgatcttagaaatgatcttgtagaagactgtacagagcgctatagggcggtaatctgcaacctttcttggtcctgggatttttggtatgagccttatgtgtgtattgttgatgttcctaggcaggataccagaagagaaaaaggattgaacttcaagtataacatgaggcgccactgttatccagttggattgaaagaaacttgctgagaatccgtctggtccaggggctttgtctgcatgtatggagaagcatgcatgtttgatttcctcaggggaaggtagagagatgagttgcagagatcaagttagaacacggatttgagctggacattgcctcttccaaggtttcacgatcgaagaaagttatcaatggacgatggtctgagccttcaaaagtcaggacaaaggattgcctgagtgtcttagatcatagaggtcacattcagagaagaaagatctgaggtcaacaaaggagccctcaggcctggcaaggccacctgttttctctgtggcatcaagtatgtcattgaagtctccagtcaacaaccaagcagattctcttgatcccgatatcagtcagtgagctccagataagttttctttttgttctatccggttctccatagagaaaagtagtgtgaaaagtcttcccttcagctttgatgattgtatcaataaaattatggcaggaggagagtacttctagctcgatgtgttgtttccagtagagggccaggcctccacccccagggctgtgcggagatatgagtaaatggtttgagaaattcgaccattgaagttttttaagcaccacttcatcagggtttttcgtctccatgaggaataggatgtctggagagattgttttctgaatctctctcagtcgttgaactgtcatgggattccccagcccacagcagttccagcttgcaagttttaaggaagaggaggaggtggattgggaaaatccacccttcctttcacagtggctgggataattggccttgtaggaggagctttgcttgaagaagccagatttgctgcaaccctggtgtgttgtcgtctctgagaagaggatttacttgaagtgctgacagagtcatcaccatggcgtctaataggttttgtaagtggaggtcggcccttctttttctttggtgggatcggagggatctgttgtatctgagcaggatgtactggcacatcaggagagagaggctgttctacagagaaatggttatcaaaaggagagggaattgctaggatcggcgcagctcgtgtattgaatagtgacatcacagagttctcccattacggcttctgtagttgggatgagaggcgaagttgtgagggttagagtgtcgactgctgtctctcaagaggtctgtctttctggtggcgggaggaagtctgctcaatggagggatctttatcctgttgcaggcctgggcagtctttcttgtcatgtgtgagtcggtggcagtgggtacagtagctttttagcctcttataatccaaggggtgagttcatggtccagcagctctcctactccttctccaatatctgtgagcatttttggtttccaaaagtggagggggagtttataaagatgcaaacatatatatatgttttataatctctttcatatgttatattttttaagagtcggaataaaatatttaacacacacatagatatatagttgttattacaaacaagaaaggtagtacttatagacaagcatgcattcttctccataagagaatttgcagcaacggattcggttgaacgttattgtaacattcaatacaatcaaccgattcgatccgtcgcttattttattattttgtataaacatgcatgtttgtatcattcactgatatctaaacacacatcacaatatggcagaatatataactggtagataggttcaac

SEQ ID NO: 210 - protein, 75 aa, Arabidopsis thaliana
  peptide (1)..(75): Ceres Seq. ID no. 15168936
MVVLPAVDRNFEDQLSALWRIRSMILLKRSFFFLPNSSGNPRILISSSQFFSLERQKNIVSSANRRAPREPHYRG

SEQ ID NO: 211 - protein, 66 aa, Arabidopsis thaliana
  peptide (1)..(66): Ceres Seq. ID no. 15168937
MGGRRSNMTLKERVVSAVFSQEGSGQEAGRFFQESPADFSQQSIIEVLDVSETESTISSGHGRLEA

SEQ ID NO: 212 - protein, 59 aa, Arabidopsis thaliana
  peptide (1)..(59): Ceres Seq. ID no. 15168938
MTLKERVVSAVFSQEGSGQEAGRFFQESPADFSQQSIIEVLDVSETESTISSGHGRLEA

SEQ ID NO: 213 - DNA, 1240 bp, Arabidopsis thaliana
  misc_feature (1)..(1240): Ceres Seq. ID no. 14309993
actagttctctctggctctttaaactctaagtataacacccattcgttttgattctcttctggcgcccagtacttgtctaatccttcttccaaaacattcttaggaccaaactgtgaactttgatcgccacgaatactgctcgagttaacgaatgctttacgggcgagattgttcgagaaaatggagttcttcatttcgctgaactcttcaagaaccttaatgtcttgctcagatatcaatcctgaagaattaggaggtacattaagcaagaagagacagtttcttccaactgagttatagtatatatccaaaagctgaacagccggtttaggcgactccgacgcatgccaaaaccaaccgggtcgaatcgatacatcacattccgctggtacccaatcttgcccatagccatcaccttcttgagaatacgaaggctcagtgtcaccaatctttgcattggttctgttaaagagtgaccagcaagtagagccagctagaccagcttcatcaccaatccacctgacatcaggaccagcgtcagagaatataacagctttaggctgaagctgatggatcaaactaaaccaagtatcaaagaaatattccatatctttctctccgtctcctttagctccatctaaccaaacttccttaatctctccatactttgttagtaactcggtcatttgactcagatagaactcgttatactccaatgtcttgccataacactgttcatgtcgatcccatggagaaaggtaaagaccaagtccaattccagcttcctttgccgcagaagctagttcagccactacatcgccggctccgtttctccattggctagatttgacggagtaatcagtgtattcgctaggccagagacagaatccatcatggtgcttagctgtgaggataacgcgggaaaagcctgagtctttagcgatttggacccattgacttgcgttgagatgggtcgggttgaaaatggatgggttggcttttccggtgccccattcggagtcggtgaaagtgttgggtccaaaatggaggaacatggccatggatccgagttgccattggagctgttgggaggatgggaggggtaaaattggacatgggtgtggttttagtagtgatgatgaatttgagatttgggagagggagaggattgagaagaagaagaagaaaagagtgatttgagagttcatgggtcttgaaagattttagtgactttcgttc

SEQ ID NO: 214 - protein, 71 aa, Arabidopsis thaliana
  peptide (1)..(71): Ceres Seq. ID no. 14309994
MDGLAFPVPHSESVKVLGPKWRNMAMDPSCHWSCWEDGRGKIGHGCGFSSDDEFEIWERERIEKKKKKRVI

SEQ ID NO: 215 - protein, 48 aa, Arabidopsis thaliana
  peptide (1)..(48): Ceres Seq. ID no. 14309995
MAMDPSCHWSCWEDGRGKIGHGCGFSSDDEFEIWERERIEKKKKKRVI

SEQ ID NO: 216 - protein, 46 aa, Arabidopsis thaliana
  peptide (1)..(46): Ceres Seq. ID no. 14309996
MDPSCHWSCWEDGRGKIGHGCGFSSDDEFEIWERERIEKKKKKRVI

SEQ ID NO: 217 - DNA, 1947 bp, Arabidopsis thaliana
  misc_feature (1)..(1947): Ceres Seq. ID no. 15168900
atagtcggagatgagaagcttctcttctttcccccaaacgaagccacgaaccctaacgagatttgggtgacgaagtttagcaattccctgaacctccttctcgaattccttaaatttcgccgccggacaactctccgccccaatccgccgcactgcaaaagccgcaccgttctctaacaccgctttatacaagattccgtcgcttctattggttccaagtacgtaagctgatgcctttagtagagtatctagctccagctgagtttctccatccactgtcactagttgagtttcagtgttgtgttttactcgcccaccacctgttcgatcaaatgcctcaacgggtttttggttctctatgtcactctcggatgacaccgacgtttcttcgaccttctgcttatccatgaaccgcatcccatttttgcaggtggagatttcgtgaactccgaggcggcggggacgttgtgtttcgatttcttgacggataatgtatcggttttctccagacatttttgtaagacgttgaaagtgctgtattcttggtagcttctacgtttcttgagctggtatatgtagaggatgaacatggctatgatagctagaccagctatatctgcaagtgtaatgccgacgattgtgcttggttttagtttgcttttggctgtttgatttgttgattctgttgaagagtttgttggtgttggagttgtgggcatgactgctattgcaggtgaagtagtttcagagatatttggtgggtctgatagagtagaagggattgaacaaagggtctttaatggctgaccacataagcctatgttaccagaaaaagactcggtcttttggttaagcaatggtggtgtgttagggattggtcctgttagattgttgaaggagagatcaatgatggcgcttgctggaaatttttcggcgaaaggtggagaaatcatgccggagatttgattgtttgataagttgaggtaaaagagacttgttcctctgaaatctggaggaagagatccgtctagaagatttgaggagatatctagaacctgtactgcttcaaacccgcttggaatatcgcctgaaaatgaattcttcgccaaggaaatgactgtcagattcttgggaagtgagagattgggagggatttttccggtcaaggcgttggcagagagattcaagagctgcagactagccacgttgttgatactacggggtagttcacccagaaaccttgttgttaccaagggacagaatgcgaagctcactggcgttggacacagaatccggcagtgatccatggaagaaattgtcggagagatccaagattcttagatgtaggattgaaaacaagtcgggagaaacagaaccaagaagctgtttgttgggaagaaccaaacttgtaactctaaacatgtcaggggtgttgggaatcccaagctctgtgcatgtaacaccggtccaagagcacggtgtttcatcgttgtagttccagtttcgtagaactaagagaggatcattgaggatggaatacttgaaagagagtaaagcaacaccatctgtgttaagagcttggataagagtagggagatgaagaaggagaagatggaggaagaggttgcttctgttggaagtcatggttcgagttcttaggttttctctgttctctgagtatgtttatgaaaatgcctatacataggatagagagatggtgaaccactgcaagtaatgattgttttgttcaccaaattttttaagatattggagcaaagcaaaactatgaggttatgcttagagaaggtgaggttgaaagtctgaaaggtataaagaaaggggttggtaagttttttattctttaaaaagtgtttcataacattaaaatcatgacaccgttgacctgaacttgtataaaactctgtccttatttagagtttttttttt

SEQ ID NO: 218 - protein, 77 aa, Arabidopsis thaliana
  peptide (1)..(77): Ceres Seq. ID no. 15168901
MRSSLALDTESGSDPWKKLSERSKILRCRIENKSGETEPRSCLLGRTKLVTLNMSGVLGIPSSVHVTPVQEHGVSSL

SEQ ID NO: 219 - protein, 62 aa, Arabidopsis thaliana
  peptide (1)..(62): Ceres Seq. ID no. 15168902
MTVRFLGSERLGGIFPVKALAERFKSCRLATLLILRGSSPRNLVVTKGQNAKLTGVGHRIRQ

SEQ ID NO: 220 - protein, 59 aa, Arabidopsis thaliana
  peptide (1)..(59): Ceres Seq. ID no. 15168903
MPLVEYLAPAEFLHPLSLVEFQCCVLLAHHLFDQMPQRVFGSLCHSRMTPTFLRPSAYP

SEQ ID NO: 221 - DNA, 2077 bp, Arabidopsis thaliana
  misc_feature (1)..(2077): Ceres Seq. ID no. 14310053
acttcggatggccgcgaggtattgcatgagcgcggggtcctttgctgcgtaatctttttcgacctggccggcaactatcttggagtctgttttgatgatacaggtggtgactccgagggcccttagcttgcggaggccgaggatgactgcttcatattctgctatattgtttgtgcatctgtcggattccagagcgaagctgaggcgtgctgcatatctgtgcttgaccccggctggtgaggtgatgattgcagcggcgcctgcccccgcatggcaccatgcgccgtcgcaatggatagtccaaaccttttctgtggacgggtctggttgtgttattggcccagtccaatcgatgacgaagtctgccaggacttgtgacttgatggttgtcctgggctcgaagctgatgtggtagccggatagttcggctgcccacttggcaatcctcaccgatgcctctaggtttctgaataattcgccgagtcccctgtctgaggtgactcggaccttgaatgcttcaaagtagtggcgcagtttgcgcgaagacataacgactgcgtaagcaatcttctccagctctgtcatgttgcacttggacggtgtcagtacctcggagacatagtagacagggcattgcctgaccacgccctcaactgtctgctcctgcactagtgccgcgctgacagcgtgcggcgaagccgcgacgtagagcaatagggggagcgaggagtcggggcttgtgaggatggccagctccgacaggtactgttttagtgaggcgaaggccgctgcctgctccggtttccaggcgaagtcctttgcaccgcggagtgttttgaggaaggggagacttcgctcggcggacctggagatgaatctgttgagagcggccaatctgcctgtcagtcgctggacgtccctgacggactgcggaggcgacatgtctacgatggcctggatcttggttgggttggcctcgatgccgcggcgtgataccaggtagcccaatattttgccctgacgaacgccgaagacgcacttttccgggtttaggcggagtcgtgcgtctcgcatgttcgcgaatgtctcggcgaggtcggtgaggtggtcctccttgttcttgctggcgacgacgatgtcgtccacatatgtaaatatatttctgccaacctgcccttcgagtactgttttggtgagtctggagaaggtggacccggcgttcttgagtccctccggcattctgatgaagcaatatgtgccgaagggtgttataaagctggtgctagccttgtcttccttcttcatgtatatctggtggtaaccggagaagtagtcgaggagtgacatgacctcgcatccggccgcgctatcgactattttgtcgatccacggcaacgggaaattgtcctttgggcaggccttattgagactggtgaagtctatgcacattcgccatttcccgctttttttctgcaccattacaacattggagagccaggtggggtaagctattggcttgatgaatttagcctctaggaggcggtgcacctccgccttggcagcctctgtcttttcgtcggacattttgcgaagcctctgcctttttggtcgcaccgaagggtcaattcccaagctgtgctcaattatggatcgactgactccgaccaggtcgagggcggaccaggcgaagacatctatattcttggacaggcagcagaggagtctctcttcttcatgcgaggtgaggtcttcgctgatagtgactgtctgcttgggcgtggcctgatcgagggggacagtcttggtcccgtcttggctctgcagctgtgccttgtcgtgctgtttatcggttgggctcgcgggcgctgggacctcgcgctggtctgaccgggcacgaagtcccgctctatgttgcgcgccgtctgctggttgccgtagaccgtgatggcgcctagcggacctggtatcttcatacataggtacagtccgtggatggcggcttcgaacttattgatggagccccgacccatgatggcgttgtatggatataccatatccacaatatcaaaagtcactt

SEQ ID NO: 222 - protein, 106 aa, Arabidopsis thaliana
  peptide (1)..(106): Ceres Seq. ID no. 14310054
MIQVVTPRALSLRRPRMTASYSAILFVHLSDSRAKLRRAAYLCLTPAGEVMIAAAPAPAWHHAPSQWIVQTFSVDGSGCVIGPVQSMTKSARTCDLMVVLGSKLMW

SEQ ID NO: 223 - protein, 90 aa, Arabidopsis thaliana
  peptide (1)..(90): Ceres Seq. ID no. 14310055
MTASYSAILFVHLSDSRAKLRRAAYLCLTPAGEVMIAAAPAPAWHHAPSQWIVQTFSVDGSGCVIGPVQSMTKSARTCDLMVVLGSKLMW

SEQ ID NO: 224 - protein, 88 aa, Arabidopsis thaliana
  peptide (1)..(88): Ceres Seq. ID no. 14310056
MNLASRRRCTSALAASVFSSDILRSLCLFGRTEGSIPKLCSIMDRLTPTRSRADQAKTSIFLDRQQRSLSSSCEVRSSLIVTVCLGVA

SEQ ID NO: 225 - DNA, 1834 bp, Arabidopsis thaliana
  misc_feature (1)..(1834): Ceres Seq. ID no. 14310057
gtaccgggcccccccttttggcaaagaaagaaatttggtccattgaaataaggttccaagatacagatcataatcttttcgaaaacattgctaaagcacaaatggtgacatgcttcctctggctctcaaggtttgatgtgaaactttccatgtttacttctcgtagatccaggggtgctggctgctctgccaatcagcagggccctcggggaaccacagggcaatctccttattagcactctcaatgctgtcacttccatgaatgacattcctatagcacaaaacaaggtcatgagaacttggcatcatagtagaatctgataccacagacataatccgagaggctttaacactacatttaaaaaatgggttttctagattaaatcagaagtacaatacagcaaaaccctcatggacaactacgcagaataagatacagtacaccccaactattcatggctaaagacgagttaaatggatgattaaacagcaaccagagcaaccagtccccacaacaccaggaaagtacatcacttacatccactgatgtctaaatgttttgtggactccacatcagattcagaacaagtataagctcagatctggtaaacacatgccagaggatgtacctactggacccacgagttggatgtaacaggtcataatgccaacattaaaacagttgatctgcagcatggctgcaatcatgagatgaccacaaatgttcattaccccaagatacaaacaaactaatgaactgagagccaacatttggtcataatcatctacatgcattgtctcttaacatctaatttgactacacaaaataaataaccgtagctctacataaatccaatgctagtcagtcaagaattttagcatcactatggaaaagagcaaattttaggatatataactacgccgaactcaggagtgtgaacattttttacattggatgtatggcagtcccaattggattgagcagctttaacacattaagcatctaagcataaccaatgcatgaataacggtgactgaaaaccataagatacaaaaatcggactgagatctaacctgccaatgtcgacagcaaagtcgccacggatggtgccgggctcagaagccagggggttggtggcgccaatgatcttgcggccagttgtgacgacgctcttgccctcccagaccatggccaccacagggccagagatgatgtagtccacgaggccctggaagaagggcttggaggcgagatcggcgtagtgcttctcagcaaacgacctctccacgttcacaagcttcaaggctgcatttcgagttggcaggttatcaagcacgacttgttttacaaaccgtaatcagattacaaaaaacttagcagctatgcaccaaaatctttatcaacagatttaggaaaagtgacatcttatttgagcacaaactgttgaatttccgtctaaagccacatctttagtctttaaatggagaaattgaaggctgtttcggaacataatggaagtttgaatcaaaacatggacgctagattacccttgaggtagaagcccttcttctcaaaacggctgatgatctcaccaatctgaaaaaaccaagcaggatggagtgaacacaaactagtacaaaatcgtatcacaaagcgcggggacatcaccaaatcgaatcgaatgaacagaaattaactgggaacatatgatgcttacgaggcccctctggacgccgtcaggcttgatcatgatgaaggtgctctccattgcggcgactgcgagagggcgctggcacttgtttgatggtctggttttgtcggcgccgtcggagc

SEQ ID NO: 226 - protein, 77 aa, Arabidopsis thaliana
  peptide (1)..(77): Ceres Seq. ID no. 14310058
TGPPLLAKKEIWSIEIRFQDTDHNLFENIAKAQMVTCFLWLSRFDVKLSMFTSRRSRGAGCSANQQGPRGTTGQSPY

SEQ ID NO: 227 - protein, 45 aa, Arabidopsis thaliana
  peptide (1)..(45): Ceres Seq. ID no. 14310059
MSTAKSPRMVPGSEARGLVAPMILRPVVTTLLPSQTMATTGPEMM

SEQ ID NO: 228 - protein, 44 aa, Arabidopsis thaliana
  peptide (1)..(44): Ceres Seq. ID no. 14310060
MVTCFLWLSRFDVKLSMFTSRRSRGAGCSANQQGPRGTTGQSPY

SEQ ID NO: 229 - DNA, 2021 bp, Arabidopsis thaliana
  misc_feature (1)..(2021): Ceres Seq. ID no. 14309779
ccaaaccaaaacctcacattgctcccaataattaaaatgaagagggacactttggtcaatacagcctcataaccctcctcgctatagagtggccgtgactattcgccttagccgccgtcttctcccacccaccaccaccaccaccgcctccgcctccaccactaccaccgctggtcttccagcttctcctcatcggagtcaaataaaacctcaacattccgttctctccatctttggacgaatacctcgaactcttattcctcgccgatcctccaccggagcttcgccagctcacattgctgttactcctcctcatcttcggtcctcctccttctccattcctcatctccggccatgattccgataaagacctctcaaccattccggcgctgttggatctgctatacctatcttcttcttcatcgtccttaccttttctgtatataaaccctaaaatgctccattttccccaccgtctcgatttcttatcgccgttttgattccctttgttctccgctgtttccatggaatttgagtctattgttgttgtcgaatttgataccgatttgacatcctctagctccgttacaatttttctaatagaattggatctgtcgaggctcttccgtctccgtgacgacggaggtccagtgtagtagtctcgagtttgattggatccgcctgggattatgataatcgggtcggagtcaccgctaatcggtttaattgacggagacgatggaatctgcatgtctgatcgattcaacggagcattttccacaactgataacatcgatggcggcagaggaaccctagacgccgttgtcctgccgattaagtgtccatcccacgacgctcttggctcatctaatgagtagcgagaatcgtccattgaaatccgacctatatcgacggagaatctcccggcgtcaagagagaatctcgggtcggtgtcgcttgatctccggcctattccgatttcagactgtggccgtcctccgccgacaccgtttctcggcttcttcaccttctgcttctgcttccatttctgaagcttcttgctgaaaacagaggccgccgaaaagaaactcccggcgaaatctttcaccgacggtttctttgtttgtgagtagagatccatgtaatccttcattggcttcaattcctcttcttcctcaccaatttcgctgcttttttcctcaactatctcgccgggatcgttctcaccgttttcttcatcctcctcaatttcagcttcttcagtcacctctaaaactatctcactcacgctagactccctagcctcctcctcgattttatcgacggaggcagcttcattgatgggaaggtttctttcgtcgtcacgaagtctgacgtcacaagaccgacgctgtggctcaaacccaccggaaaatccttcgttgttctttgcggaaaaggactttgtacgtcggagctccgggaagaaaccgggtctgacccgaccgtttccgttggagttgttggtaccactagaggagggcttgaagagagcttttaacgaaacagcggagatagagggaggtttccaggaagaagaagacggtggcggagcggcgttgtgatctaagacggagaggcggtcgcaaagacaagaaggacagaaaccggagaaacgctcttctgggtggagatcacatgatgtagataagcgatgcggttgagaaggcggagctagttcgtcgacggcggtgacgggagcttggtcggcggagagattcataagaggaaaggatgagtgataagacttctttctcttcgtctcatatcatcagtgtcttgtctgcttaattgcttagaggggagagagatgggaagagatgttatgtctgaaactttcgtcttttaccaacggaaattgaaagagaaaggagatgaagagaaataacaaacagttatttattatttaaagaaatttaaaatatttaatgaaatattttgcaggtgtcagattaaatctgcgctattttttgtttttaaag

SEQ ID NO: 230 - protein, 87 aa, Arabidopsis thaliana
  peptide (1)..(87): Ceres Seq. ID no. 14309780
MGRFLSSSRSLTSQDRRCGSNPPENPSLFFAEKDFVRRSSGKKPGLTRPFPLELLVPLEEGLKRAFNETAEIEGGFQEEEDGGGAAL

SEQ ID NO: 231 - protein, 64 aa, Arabidopsis thaliana
  peptide (1)..(64): Ceres Seq. ID no. 14309781
MSSENRPLKSDLYRRRISRRQERISGRCRLISGLFRFQTVAVLRRHRFSASSPSASASISEASC

SEQ ID NO: 232 - protein, 62 aa, Arabidopsis thaliana
  peptide (1)..(62): Ceres Seq. ID no. 14309782
MIIGSESPLIGLIDGDDGICMSDRFNGAFSTTDNIDGGRGTLDAVVLPIKCPSHDALGSSNE

SEQ ID NO: 233 - DNA, 1208 bp, Arabidopsis thaliana
  misc_feature (1)..(1208): Ceres Seq. ID no. 14310295
gtaccgggccccccctcccctgtttcctcgaagggcctggtctctgcgctagtcatgtcacgaggagcagatgatgcatatacttgatcagtttcactagctattattcgcctaactgaaggatcaactatcactgcagcattcacaagtggtgtatgaccagatactgccatatcaataacaactctcatgaacttgcagattgattgtgtttcctcctcgctgaacccaccgatgccatctatattgtaggttggtggatgaaatgaagtaggccatatcttactttgttcttcccactcttctttggataccgcagcatatttgcatacttgtgtaataaaaggactcaactcatagggatcaacgagtctctgcacatcaggtggcatgtcactcaactgatcgttgtgctcaggtgctagacataagatgacagtcaactgagtttcaccgcaatctggcagaatcttcttcttcacccttttaacatgacgaagatcttctagaggagcaatcttacataaatgcctcactatcgtattggcaaatctgggtttgattaggctagcatataccttcacagtgggctgatggtcaggtgacaatgaaggcttttcaggtatatggataatttcccatgcatctgaatccataattttattttatctatacttgagcgctggagagcttgctccaagcaacaagacacagagacgcagcgagcgatagccgatagagaggaaggaggagttcaccaaaaaggtcaagaagacgacagcttacacgtcgccgttttaggtcttatctaattaacctttaagaattttgtacggcaacagaaccagagaacgttgacggctaaaggcggcgaaatggacgttgatgagcggagcagctactgtatcgagggtatggtcgtctgttgagattgaactctccgattgatcatggcgttgaacttgcagtcctctcaactggttgcagtctttgatggtcagaactatgagttctgggctgcaagaatgaaaactactctcttgaatagagatctatgggaagtcgtcaaagatggcgtaccagaagctacaactcaatcaactgaaactccagataaaggaaaagatgctgccttgaaggctctaaaagctaaagacactgctgctctccaaatgggggggggggggggggactagtgagcctggtgc

SEQ ID NO: 234 - protein, 81 aa, Arabidopsis thaliana
  peptide (1)..(81): Ceres Seq. ID no. 14310296
MALNLQSSQLVAVFDGQNYEFWAARMKTTLLNRDLWEVVKDGVPEATTQSTETPDKGKDAALKALKAKDTAALQMGGGGGD

SEQ ID NO: 235 - protein, 56 aa, Arabidopsis thaliana
  peptide (1)..(56): Ceres Seq. ID no. 14310297
MKTTLLNRDLWEVVKDGVPEATTQSTETPDKGKDAALKALKAKDTAALQMGGGGGD

SEQ ID NO: 236 - DNA, 1522 bp, Arabidopsis thaliana
  misc_feature (1)..(1522): Ceres Seq. ID no. 15174947
accgtgatgatcgtcggtctcacacgtgcgtactgtggatccaggtaacgcgggagataagcctcgaggctgagctccgttgggtacggcctcgccgtgaaattgtaatttcgatgaggattgcttcctccgactaagactctgccgtctgacagaagaagagacgccgaatggtacattctagggattcgagtcggggtgagaatttcgaatctccgggtctggtcaggctcctcgggtaagtataaaatcgggttgagaacagcgttcgtcgcgtcttcccaaccagcggttccgttagcagcaccgttaatgatcaaaacgtcaccgtttggtaacagtaacatatcagacatgacacgtggcgatggcatttgctccatgacccatttcggatccgggtcggtcactttcaatctcccacacgtgcgtgatcccgcgacgaagattttaggaatcgtcctcgccgctttgaagaacgctcccggcggagcaccgccgcataccataacctcagcagttatcttcgttctgttaatgtctccggtgagaaagagagggaggagcacggaggagccagtgctgggataattccgtttatcgccgccgggaatctgtggaaactccttgatgattcggtgattgacgaaatcgaacaaaatcgatctccgattggcgaagatgaagagattaccgtcggggagaagatgaagaaacggataaagattgttttcttcattcggatctctcgtctccgccaagaatctgagattgaaaacggattctcccggatccttggggtaaaactcgtagttgaaagctcttcttccgccgacgatgataatccgaccatcgggaagaatctgattggtggaataccaccggcgagaggagagatacgctctgttctcaatccaatcacacgaaacgcttccaactcctccgtcgcaaggtgtgaaaacccgtacagttctttcgccgttgccataaccgccggtttggattaaagaaccggaagcgtttaaagaaccggaagagcaccacgtgtcgtaacgtagtgtttgagaagggagagaaacattcgaaggtccataatccgtacggtcaaagatgacgactttgttgttgtgtagaagctgcatgtgcattgcggatatacctacactcggctgcagaagatcccacctcccgccggtgagaatagctaacggtgaacgtggaaggagcaaatccgacgtggaacagaggaagaagaagaagaatgatatcacgacggcgttaaggttgttcttgaatctttcttgcgtcattattttcagctaagaatcttctttctccggtgaaagagatttaacatttaaagcttctttgagtaattattagtgtctttcttgaaatcggtaggagaagaaacatttatggtgttgtattgttttacttttctggtgaaatgtgtgatcaagactcgcagtgctctctgtacataatgatctggtagatttgtaacatatggtcaagattt

SEQ ID NO: 237 - protein, 99 aa, Arabidopsis thaliana
  peptide (1)..(99): Ceres Seq. ID no. 15174948
MKKRIKIVFFIRISRLRQESEIENGFSRILGVKLVVESSSSADDDNPTIGKNLIGGIPPARGEIRSVLNPITRNASNSSVARCENPYSSFAVAITAGLD

SEQ ID NO: 238 - protein, 92 aa, Arabidopsis thaliana
  peptide (1)..(92): Ceres Seq. ID no. 15174949
MIKTSPFGNSNISDMTRGDGICSMTHFGSGSVTFNLPHVRDPATKILGIVLAALKNAPGGAPPHTITSAVIFVLLMSPVRKRGRSTEEPVLG

SEQ ID NO: 239 - protein, 78 aa, Arabidopsis thaliana
  peptide (1)..(78): Ceres Seq. ID no. 15174950
MTRGDGICSMTHFGSGSVTFNLPHVRDPATKILGIVLAALKNAPGGAPPHTITSAVIFVLLMSPVRKRGRSTEEPVLG

SEQ ID NO: 240 - DNA, 1092 bp, Arabidopsis thaliana
  misc_feature (1)..(1092): Ceres Seq. ID no. 12396837
aaaataatattaattttctcggcgaggcttgcagcgtggtcggcagtcagcttctccaatgaaagttgtttgcttgggactccgagatctgtggatctattggatgctctgtcttataaagtgtcggcgaaggctctggtctcattatgtttcctgttgcttgtagcggatctgtgtttgtttgtctcactctgttttgctagtccggtaagcagactttccaacctttcttcatagcctttttgttagggttagacggaatcgcttttgttgggttcttgagttggctgtaacagtttcagagatagtatcgtttagcttcttttcttctccgacggtctgggatgttgaaaaggcaatgtctttccggttttagttgtttaagtttcgttttgtctctgcatgttttggatagaagatgggattcccattttatgctttttgatgaatgaacgaatgctcgttgtggtgattatctggcctacaagttcttttgtattcttgggagatttctttggttcactctggttcgatcttctgctgctcttgattcttcgagaatggtgttacccggtgtggatttttcgctccttgtctctgcatttcagatctgatcgagatctggtcctatggttttgcttctatctaggtgtaaaatgtcgccttgtctccgacgtcaccgtatccggaagaaagtgtgaggttccatgtgtggttctgtctttgcggattatgaagattagcataggagttctgttacttttaggcagtttggcatctttagaggaggattagattatcgatggttggccacgggcatcttcgatatgtactatcaaaggatctcttgaagtatgctttccttgttgggttggtttatggtcccatttggttgagtgttttgttttggtctgttcttgtagtggggttcttctgctttcattatatgtttgtatcggtttgtagccttgtagtattgtttctttgcttccctcacatagggctttagactccagagatatctttgttttctgctagcatatggttgtaatcttccaaatatcattcatggtttttaataaaatctagatg

SEQ ID NO: 241 - protein, 130 aa, Arabidopsis thaliana
  peptide (1)..(130): Ceres Seq. ID no. 12396838
MFWIEDGIPILCFLMNERMLVVVIIWPTSSFVFLGDFFGSLWFDLLLLLILREWCYPVWIFRSLSLHFRSDRDLVLWFCFYLGVKCRLVSDVTVSGRKCEVPCVVLSLRIMKISIGVLLLLGSLASLEED

SEQ ID NO: 242 - protein, 116 aa, Arabidopsis thaliana
  peptide (1)..(116): Ceres Seq. ID no. 12396839
MNERMLVVVIIWPTSSFVFLGDFFGSLWFDLLLLLILREWCYPVWIFRSLSLHFRSDRDLVLWFCFYLGVKCRLVSDVTVSGRKCEVPCVVLSLRIMKISIGVLLLLGSLASLEED

SEQ ID NO: 243 - protein, 112 aa, Arabidopsis thaliana
  peptide (1)..(112): Ceres Seq. ID no. 12396840
MLVVVIIWPTSSFVFLGDFFGSLWFDLLLLLILREWCYPVWIFRSLSLHFRSDRDLVLWFCFYLGVKCRLVSDVTVSGRKCEVPCVVLSLRIMKISIGVLLLLGSLASLEED

SEQ ID NO: 244 - DNA, 758 bp, Arabidopsis thaliana
  misc_feature (1)..(758): Ceres Seq. ID no. 13499585
atcgattgaggggccttctctctcttaacacactcttattcttcagagagagaatgagaattccggcgacaactggtttttttgttttatacatagtttctgacttttgacggatctctctttccgcttagtcagattttaataattttcggtttagcttggttcgtttccggttaagatcggattatttttagttttattttttttccctctttctacaggatttcagtgtaaatcccgcttgctgtcaattggtttctttcatgttcatctgttggcttgactcttctccaaagttagagtaatatcttcgccgtaatgtcttcgtcgttatgcgaagtggacctctctatcggtcttgggcggagcttcttcctttgaagttggggttgagatgaagatctacaaaatctcctattactcaaggtggaaacaacatacccaatttgatttgtggcggtaatatctgtagaaggatggctccaagagcgtgaattgaagccttcacctggtggttaagaccgtcgtcggacgtgacggcaaattaaaaatttggcggtgagcaaccaaaggtgttcccgcggttttctcgcttgtgccacatgaatccattaggttttagcatcaaacacgtgtctcttacgtatcttctttgtgtaattgagtttattttaaaattaggcttcaaaagactttgtatcacgtatcttgtaatctgtcctttatgaatttcgttataagacgaaaaattgcctgcc

SEQ ID NO: 245 - protein, 41 aa, Arabidopsis thaliana
  peptide (1)..(41): Ceres Seq. ID no. 15223081
MNPLGFSIKHVSLTYLLCVIEFILKLGFKRLCITYLVICPL

SEQ ID NO: 246 - protein, 35 aa, Arabidopsis thaliana
  peptide (1)..(35): Ceres Seq. ID no. 15223082
RLRGLLSLNTLLFFRERMRIPATTGFFVLYIVSDF

SEQ ID NO: 247 - DNA, 819 bp, Arabidopsis thaliana
  misc_feature (1)..(819): Ceres Seq. ID no. 12331947
  misc_feature (1)..(819): Ortholog of  Ceres SEQ ID NO 15179609 as cited in SEQ ID NO 0
acatcatctgcaataacttgagcttctttagtcgttgggaaaacacctcctccttcaatacatttatcaacatcaaattcatctctccgactaaaataagcattccctttcttacctacacttatcacaacacagtctattcctctctgcttcaactcttgaactcgcagagtagctttcttggtcactgcattgttgaaaccaccacacaatcctttatcgccagtaacaacaaccaaggcaactctcttcacgggtctaacaatgctcagaggaaaatcaatgtcttctaattgagcagattggttaattgagtagagaatctccacaagagtttcagtgaaaggtctaccctttatgactgcatcttgagctcgacgaactctagctgccgccacgagtctcatcgcttccgttatcttctgggtattcttcacactgtcgattcgttctcgtaactctcggattccagctcgaatttgaattgagggcaacggagatctcgacgaaatccggtttggtgtcagtgattgaaacggataataacgaaatggtttcaaggtagctatgaaagagtaggactctgagctcgaagccgaattcgaattcgaaggagacgacaagagccaagagatcgagatcgaacctgtcattttcgtttgggaaagaagaccctgaacttgagaggtttaagatttcatcttctcgtgaagaaatgagcaaagaaagagaacttgaggggttttctgtaattatcatgtttattaggggtcagtatgtaaaaattactacaaaagtcaaaagtagagtttttgtttt

SEQ ID NO: 248 - protein, 96 aa, Arabidopsis thaliana
  peptide (1)..(96): Ceres Seq. ID no. 12331948
IICNNLSFFSRWENTSSFNTFINIKFISPTKISIPFLTYTYHNTVYSSLLQLLNSQSSFLGHCIVETTTQSFIASNNNQGNSLHGSNNAQRKINVF

SEQ ID NO: 249 - DNA, 1401 bp, Arabidopsis thaliana
  misc_feature (1)..(1401): Ceres Seq. ID no. 12335078
  misc_feature (1)..(1401): Ortholog of  Ceres SEQ ID NO 13656435 as cited in SEQ ID NO 65853
gtggcatcttaatcaaattcttcttcgccttcactttcaattgtctctccaatatcctcaccagatctgaaaccggcaccggcgacgtgtttccgaggttaaacactctcaattgcgccggacctctcttcttccctccactccctgtactcttctccgccgtatctagcgccgctaaacatcccttcactatatcgtctatgtaagtgaaatccctagccaccgttccgtgattcgccgattcgaatatcgaaatcgatttgccttttagaatatctttagtgaagaagaaatacgccatgtctggtcttccccaaggtccatacacggtgaaaaatcttaatccggttagagataatccatagatgtggttgtaggtatgtgcgatctcttcgccggcttttttagtggcggcgtataaactcgccggttgatctgttttatctttctccgagaacggaactttggtgttgagtccgtagacggagctagacgaagcccagactatagcaggttgtggattcacagatttgcagatctcgaggagattgacgaatccggcgatgatgctatgaacgtacgagctagggttttccattgcgtaccgtacaccagcttgagctgctaaatgcataacgtgtgtgaaggagacgatcttgaatagcttacggagtaattcgacgtcgtttatgtctccttctacgatgaagatcccacttctctcgagtaaagcttgtcttgctcgtttcagagatggatcgtagtaatcgttgaagttgtcgaggccgattacgccgtctccgcggcgttttaatgcggcggagacgtgtgttcggacgaaaccagctgctccggttactaaaactgtgattccgttgtttgttgaggttcggattcgagctgaggatctgagacgtttttcccaagctggtcctccgtaggtgttggttcggagtgaacggcgagatggatcggacggtgaagaagggttaatggacggtggagatcggaggaaagagtagagagatgagacagaggaggaagaaggagaaaaatgcaaactttgtgagagaagattggaatctgagacgatgcaagtaggaagatttctccatcttgaatttgcctgggcttgaagaacatggggattgaagattttagagatccaaatcatagggaaaatatgaagaagagagtcaaaaaaattactgtaaaaattggttgactcttctaaagatttgttgtcgagtcttgaaatttgattggtgagatactaatactccaagattttcgggaagccactcgtcccaaaagttttgaatttgaaccaaagttttaaacttttgttaatagatttgttttgcggatagttgctaaatacaaaaatggactctaaatttg

SEQ ID NO: 250 - protein, 67 aa, Arabidopsis thaliana
  peptide (1)..(67): Ceres Seq. ID no. 12335079
GILIKFFFAFTFNCLSNILTRSETGTGDVFPRLNTLNCAGPLFFPPLPVLFSAVSSAAKHPFTISSM

SEQ ID NO: 251 - DNA, 476 bp, Arabidopsis thaliana
  misc_feature (1)..(476): Ceres Seq. ID no. 5675962
  misc_feature (1)..(476): Ortholog of  Ceres SEQ ID NO 12556889 as cited in SEQ ID NO 125
  misc_feature (1)..(476): Ortholog of  Ceres SEQ ID NO 15172982 as cited in SEQ ID NO 51725
  misc_feature (1)..(476): Ortholog of  Ceres SEQ ID NO 13598188 as cited in SEQ ID NO 61498
aatttcaatcaaacatatatatgcatatgataatcttgatttgtgatttctcgtatgttttttagcctttttaaaaccaacattaagcgccaagaaccctttgagactcgccggtgcatcgggaggaagagtcacttgctttgagaggaactggttgaggagagatttgaacgtggtaggatttgggctgatcggatggctagctccgtcgagcattccagcgataaatgggaagagcctgacgggtctcttcttcgatagcatcggaactgagctcgctcacttcccgactcctccagctctcacttcacagttctggttgtggttggttacgtggcacttaggcctcttcctctgcctcactttcggacaaatcggattcaagggcaggactgaggattacttctaaggataactattcttgttttcgtttgtactatatgctctctcttggttatgtgtaatattatcaatca

SEQ ID NO: 252 - DNA, 1168 bp, Arabidopsis thaliana
  misc_feature (1)..(1168): Ceres Seq. ID no. 12324442
  misc_feature (1)..(1168): Ortholog of  Ceres SEQ ID NO 15168366 as cited in SEQ ID NO 60199
aagtcttggaatcttcgggacgtttcttgttgctctctttgactttcttgaagtatttgtttatgttttcccatttctctttgcatctctttgagttcctgttgaatcctaaccttctcattcccgctgatatctcttcccacaatggtccttttggtccgttttcttgatatttcgaatcaagattcgtcctcagctttatcaatgcttctatctccactttcggccaccgcgacgagctcgctgaagctgcaggagtcatattctgatcaccaccattgtccgttttcgttgtgtctaacgtcgacacaaccgcttgaattggctgcggaagcggagcaggaggttgcggtggaggagaccgttgaggcggttgctgctgattgttgttattaagctgcattgatggtcgaacttgttgcggctgaggctgcggttgtggctgattcggttgtttctctgacagtttttgaagaaaggccataacagcagcgtcttttgcagcggacatagagcgttcttgagctaagatctcgtgctcgcggttgattctggcaatctcttgaactctccaagactcttctctaaccaatctctcgtgttctcgcttttcaacagcttccaagaatttgcgttgaagctcttcctgtttatcaactacttgtttcatcaaccgctcgaaaaacaccttccatttcctcttccttttcttccttgtagtcgcagttccaccacccatctccatgtcagaagaagtcgaataagaagacgaagacgatgtagaattatccgatagaaaatcaccggagatgtttggaaacgaaggtacattaatctgctgagtatacggaggaattgatgaagaaggaagcgtcggcataactgtcgttaccggaggaggagttgaaaatatggagctgttgttgttgttgttgttgttgttgttgttttgctgtggtcgaagaggcgtttgttgttgatgatggtggagtgaggttgtagattgagactcgagagcttctaattgatcaaagaagcgataagttttgccttcggattttccggtacgaccttctttggttcgtttgtggtatttgtaaacgttctcgaatttctctttgcatttctttgcgtttcttatgtaaccatgctccgccattttcctacc

SEQ ID NO: 253 - protein, 83 aa, Arabidopsis thaliana
  peptide (1)..(83): Ceres Seq. ID no. 12324443
MVLLVRFLDISNQDSSSALSMLLSPLSATATSSLKLQESYSDHHHCPFSLCLTSTQPLELAAEAEQEVAVEETVEAVAADCCY

SEQ ID NO: 254 - protein, 63 aa, Arabidopsis thaliana
  peptide (1)..(63): Ceres Seq. ID no. 12324444
MLLSPLSATATSSLKLQESYSDHHHCPFSLCLTSTQPLELAAEAEQEVAVEETVEAVAADCCY

SEQ ID NO: 255 - protein, 55 aa, Arabidopsis thaliana
  peptide (1)..(55): Ceres Seq. ID no. 12324445
VLESSGRFLLLSLTFLKYLFMFSHFSLHLFEFLLNPNLLIPADISSHNGPFGPFS

SEQ ID NO: 256 - DNA, 1002 bp, Arabidopsis thaliana
  misc_feature (1)..(1002): Ceres Seq. ID no. 12332492
  misc_feature (1)..(1002): Ortholog of  Ceres SEQ ID NO 12466401 as cited in SEQ ID NO 20698
gaattagacacattttaaagaagtttcagattttagaacttacagagccagagccaatagtgatctgcgagaagctaagatcaatcggagaagaagtgacatgaacaccaaagaaagtaccagtgttacggtacaacattctcagtgtcgcgttcatagtgatcatatcagttcctatacctccagcatcttgtccagcttgaaccttaagttgctcaaacgttatactctgcaaaattcaattctacaaacgtaagcacgactctagatctgaaatctgatctcgatctactaagtcaactctcacaaaccttaacagagatcttaggtttctgaggtttagcagctgcataaagaatcaaagagaagaaagcaaagagtagagagaatccaacaatgaaagctaaaacataacatcgacgaggcaaagcttcttgttctctatctccatcatcaagaagaccttcttcttcaatcatagcgaactgtttttctccagcgtggcccttacgttttgagccgttgatcttggagaagcggcttgaggaagagtgagaatgtggtggagatcccatcgggctggtgagtaccggtgttgagtggaatgatgttgctgttttctccccatcgtgggagtcacgtgatggagattggacgaagtaggctggtcgacggggagatctagtcggcgatgaagctgagaggcttgtcacctcggagtcggtcttcgcgtgcatcttgagattggaatggaagatgaacaagtagaagatgagaggttatgtgatgtttgtatttatgtattgaattatttagtcaatgagtggatttgagggccatttgcccattgctttgtatattaccgtaacgcattatagcatcatgatcgcttttttttttttttttttttaatacgattggtaatcaaaatttaagtcacctagtattttatagttgttgaaataggcaaaaagatatttgtagtaactttttgactttttt

SEQ ID NO: 257 - protein, 51 aa, Arabidopsis thaliana
  peptide (1)..(51): Ceres Seq. ID no. 12332493
MNTKESTSVTVQHSQCRVHSDHISSYTSSILSSLNLKLLKRYTLQNSILQT

SEQ ID NO: 258 - protein, 33 aa, Arabidopsis thaliana
  peptide (1)..(33): Ceres Seq. ID no. 12332494
IRHILKKFQILELTEPEPIVICEKLRSIGEEVT

SEQ ID NO: 259 - protein, 30 aa, Arabidopsis thaliana
  peptide (1)..(30): Ceres Seq. ID no. 12332495
MSGFEGHLPIALYITVTHYSIMIAFFFFFF

SEQ ID NO: 260 - DNA, 818 bp, Arabidopsis thaliana
  misc_feature (1)..(818): Ceres Seq. ID no. 13500182
  misc_feature (1)..(818): Ortholog of  Ceres SEQ ID NO 15226744 as cited in SEQ ID NO 61720
gaaaaagtgtgtgtcagagaataatgattcgagcggttctcctgttccttgtcttcgtcgttgagacgagagtacaagcgcagctagtgccgccggtgaggcaagatggtttcgtttaaccaccgggtcatcgtttcgacccggatactatactaattgaggcgtattttgacccggtttgcccggacagtagagactcttggccgccactgaagcaagctcttcatcactatggatctcgcgttgcccttctcctccatctccttcctttaccctaccatgacaatgcctatgtaacatcacgggccttacacattgtgaataccgtacacgccaatgctaccttcagtttgctggaagggttcttcaagcatcagtcattgttttacaacgcgcaaacacaactcctttcaagacctgcagttgtggagaaaatagtcgaacttggaacagtctcgttggggaactcatatcaatcggttcttaaatccggcttcagcgacaaaaaatcggatcgtgcaaccagagtttccttcaagtatagcgcttcaagaggggtttatggtacaccaaccttctacgttaacgggtttgtattgtctgatgctgcttccccttcaaattttggaggatggaagaaaatcattgatcctctggttcaagcacatgagatggaagataacttcattcccttcctttgaagattttaagtgcttttgctgtgtcaattgtcatggtataatactatctgtaatgtatagactttctcaaaacctgtatgttgctcattgtaaatttgtaataaaggaaagtgatcc

SEQ ID NO: 261 - protein, 85 aa, Arabidopsis thaliana
  peptide (1)..(85): Ceres Seq. ID no. 13500183
MVHQPSTLTGLYCLMLLPLQILEDGRKSLILWFKHMRWKITSFPSFEDFKCFCCVNCHGIILSVMYRLSQNLYVAHCKFVIKESD

SEQ ID NO: 262 - protein, 71 aa, Arabidopsis thaliana
  peptide (1)..(71): Ceres Seq. ID no. 13500184
MLLPLQILEDGRKSLILWFKHMRWKITSFPSFEDFKCFCCVNCHGIILSVMYRLSQNLYVAHCKFVIKESD

SEQ ID NO: 263 - protein, 50 aa, Arabidopsis thaliana
  peptide (1)..(50): Ceres Seq. ID no. 13500185
MRWKITSFPSFEDFKCFCCVNCHGIILSVMYRLSQNLYVAHCKFVIKESD

SEQ ID NO: 264 - DNA, 649 bp, Arabidopsis thaliana
  misc_feature (1)..(649): Ceres Seq. ID no. 12331732
  misc_feature (1)..(649): Ortholog of  Ceres SEQ ID NO 12396837 as cited in SEQ ID NO 240
aaaaataatattaattttctcggcgaggcttgcagcgtggtcggcagtcagcttctccaatgaaagttgtttgcttgggactccgagatctgtggatctattggatgctctgtcttataaagtgtcggcgaaggctctggtctcattatgtttcctgttgcttgtagcggatctgtggttgtttgtctcactctgttttgctagtccggtgtaaaatgtcgccttgtctccgacgtcaccgtatccggaagaaagtgtgaggttccatgtgtggttctgtctttgcggattatgaagattagcataggagttctgttacttttaggcagtttggcatctttagaggaggattagattatcgatggttggccacgggcatcttcgatatgtactatcaaaggatctcttgaagtatgctttccttgttgggttggtttatggtcccatttggttgagtgttttgttttggtctgttcttgtagtggggttcttctgctttcattatatgtttgtatcggtttgtagccttgtagtattgtttcttcttccctcacatagggctttagactccagagatatctttgttttctgctagcatatggttgtaatcttccaaatatcattcatggtttttaataaaatctagatg

SEQ ID NO: 265 - protein, 77 aa, Arabidopsis thaliana
  peptide (1)..(77): Ceres Seq. ID no. 12331733
MVGHGHLRYVLSKDLLKYAFLVGLVYGPIWLSVLFWSVLVVGFFCFHYMFVSVCSLVVLFLLPSHRALDSRDIFVFC

SEQ ID NO: 266 - protein, 70 aa, Arabidopsis thaliana
  peptide (1)..(70): Ceres Seq. ID no. 12331734
KIILIFSARLAAWSAVSFSNESCLLGTPRSVDLLDALSYKVSAKALVSLCFLLLVADLWLFVSLCFASPV

SEQ ID NO: 267 - DNA, 809 bp, Arabidopsis thaliana
  misc_feature (1)..(809): Ceres Seq. ID no. 12339176
  misc_feature (1)..(809): Ortholog of  Ceres SEQ ID NO 13599581 as cited in SEQ ID NO 0
aactcgacacatcgagtcaactcgctaccagcactgatcggtttcccaattccgtccaccgtaactgccgtatccagccgttaacggccgactccgaagaagagtcctccgatcataaacggcgcgtttctcgggatccgaaagcgtgcaatacgctgcgtggatcttcatgaaatcgtccgccgacgagttatcccgactatttctcgctacatcgggatgacagatcctggctagtcgccggtaagctgatttgatctcttgactcgtcgagccgacgggaatttcaaggatctcgtagagagacgccggttgctgaaaatcgctgcgggatttggcgtaatctcggtagatcttcggcgcaggtgtaggacgcggtggttgtagaaagcgacggcgagatccgggaaatgcgtgacggtggtgaagtagaagagaacgacggagaagaagaagaagaagaagagagaaatggagtagcgaagaaggttggggaagaagaaagcatcgtgaaacgacggcgtttttgtttgtcttttggtttaagttccgatttgggttttgtgatgcagtgtgatttgagatgagaaattagaagggtttatttataggggaagaagtgattagtacgtataacgtttagttagcttttaaataattgaagattaggcagattaatgtatcttgtccggttaagcaaaatcgaaccgggttgggtcagtgtgttttcggatcttgagaaagctgagtcagactaaaaggcttatccacagttgtaaataatgggagaagtgagataagattcaacg

SEQ ID NO: 268 - protein, 58 aa, Arabidopsis thaliana
  peptide (1)..(58): Ceres Seq. ID no. 12339177
MRDGGEVEENDGEEEEEEERNGVAKKVGEEESIVKRRRFCLSFGLSSDLGFVMQCDLR

SEQ ID NO: 269 - protein, 56 aa, Arabidopsis thaliana
  peptide (1)..(56): Ceres Seq. ID no. 12339178
LDTSSQLATSTDRFPNSVHRNCRIQPLTADSEEESSDHKRRVSRDPKACNTLRGSS

SEQ ID NO: 270 - DNA, 642 bp, Arabidopsis thaliana
  misc_feature (1)..(642): Ceres Seq. ID no. 12423227
  misc_feature (1)..(642): Ortholog of  Ceres SEQ ID NO 12609177 as cited in SEQ ID NO 55753
  misc_feature (1)..(642): Ortholog of  Ceres SEQ ID NO 12609935 as cited in SEQ ID NO 55757
  misc_feature (1)..(642): Ortholog of  Ceres SEQ ID NO 13594206 as cited in SEQ ID NO 59075
  misc_feature (1)..(642): Ortholog of  Ceres SEQ ID NO 13654038 as cited in SEQ ID NO 69261
  misc_feature (1)..(642): Ortholog of  Ceres SEQ ID NO 14309346 as cited in SEQ ID NO 0
aaaactaaacaacgtaaaaacataagaaaaacagagtaaacaaagtaatgcgccgattgtcgacggagagtatgagatgagaagagaaattgatattgatattgtttgatatctactgtagttgattcgtcttgacaaagaggaaggaggctgcttgacatcgaccaccctgaaggtccttttggtacaaaggaatctcctgctgtcgtacagtcctactttgacaagagaaatatcggatgccgtggtggtgaaggcgaggatggacacgacgtcgtttggttctggctagataaaggaaagtcatttgaatgtccagtgtgctcccaatactttgagcacgaagtggttggtccaggcggaccaccagacggtcatggtgacgatgaagaccaccaccattgattccggtcttttcttaacggcgaaatgttttcttctattgtagtgagtggaataaatatttctcgttggtgaaaacacttaaatatgttttttttgatcctcgagaagacaccaccactttatttgcctcaggctctaaccctttttgctttcttgagacttttgtttttatgaatgattctcgagtcagaatcattcttctttttttgaattatataatatatagtttttggtgtt

SEQ ID NO: 271 - DNA, 709 bp, Arabidopsis thaliana
  misc_feature (1)..(709): Ceres Seq. ID no. 13580626
  misc_feature (1)..(709): Ortholog of  Ceres SEQ ID NO 13587131 as cited in SEQ ID NO 331
agtctagtgtttccgggagcagcctgagcaggaggaagaagacgaagaagaagacgtgccaccaagaagccatactcaaggtccattgttggtgctaccttggaagtaattcagaagaagagagctgagaaccctgaagttcgtgatgcagccagggaagctgctctgcgtgagatcaaggaaagaatcaaaaagaccaaagatgaaaagaaggctaagaaggttgaatttgcttctaagcaacagaaggtcaaggctaatttccccaaagctgctgctgcatccaagggtcctaaggtgggaggtggtggtggcaaacgctgaagagcttaaagccatcttttctcactctgcgtcttttctgctagtagctacttttagtagttgatgttcatttctgaatatttgcaaaacataaaccttgttatttcgtttttgtctctcacttttgctactcttataatatcagacttgagaattttgctgcttatgaactttatttttttttttttttttttgttgacgatattaattaatttatgagcatgacgtgggacaaacaccgtacttagtacgtaatacaagtagttataacgtgggaacaaactagtaagtaacacatttaaataaggaaatagtaatagttgccgtagaagccaagcaagcataataatcatatcttctttgtgactgtgactttaagaccatt

SEQ ID NO: 272 - protein, 80 aa, Arabidopsis thaliana
  peptide (1)..(80): Ceres Seq. ID no. 13580627
MQPGKLLCVRSRKESKRPKMKRRLRRLNLLLSNRRSRLISPKLLLHPRVLRWEVVVANAEELKAIFSHSASFLLVATFSS

SEQ ID NO: 273 - protein, 61 aa, Arabidopsis thaliana
  peptide (1)..(61): Ceres Seq. ID no. 13580628
MKRRLRRLNLLLSNRRSRLISPKLLLHPRVLRWEVVVANAEELKAIFSHSASFLLVATFSS

SEQ ID NO: 274 - protein, 51 aa, Arabidopsis thaliana
  peptide (1)..(51): Ceres Seq. ID no. 13580629
MFISEYLQNINLVISFLSLTFATLIISDLRILLLMNFIFFFFFLLTILINL

SEQ ID NO: 275 - DNA, 789 bp, Arabidopsis thaliana
  misc_feature (1)..(789): Ceres Seq. ID no. 12369935
  misc_feature (1)..(789): Ortholog of  Ceres SEQ ID NO 14307296 as cited in SEQ ID NO 53966
attgcttgcttgttattatgcatccaaaccttaaaaacttgtctcctcagattcaccatcctacaaaacttatcaatctcttcttcatctttcttctgcatcctccaccctaatctctctgcaaattccttcatcttctccttttgttcttcattgatctttgtcctcactctcttcttcttcctcatcatcatcatcatcaaacttttcccatcaacgttttggttacgatgactcagaatcttcttcatatcctcgcttgaagatgaagtcctccgtccaatctcacccgttggatgcattacacgtggcttgtacgagctgttactgctgtaaaacgccggagttatcatcagctgataatcttgtttactgttcatgtgtccgtacacttctttccggtggaagctccggtgacagttacaggcggcgcattttaaagcaccgagtgtaccttcttctccgccggccatgaactcgcagcatccgtccaccacgtgtcctccggttgaggccgcgtggttcttctgacattcccggtacttagctccttggtcgacacgtgtctttggtttttggttttctttcttgatcgggaataaagccatggatggatctgattcgggtttggcttctggttccggatccgtatgtggctttacttctgttgagattattgttgtggttgtaattgcattgcattttcctccaagctccattgtgaatctgacccaaaacaacaaaactttgttaaatattaatacgtataaatcattcaataatgcatgc

SEQ ID NO: 276 - protein, 77 aa, Arabidopsis thaliana
  peptide (1)..(77): Ceres Seq. ID no. 12369936
IACLLLCIQTLKTCLLRFTILQNLSISSSSFFCILHPNLSANSFIFSFCSSLIFVLTLFFFLIIIIIKLFPSTFWLR

SEQ ID NO: 277 - protein, 69 aa, Arabidopsis thaliana
  peptide (1)..(69): Ceres Seq. ID no. 12369937
MKSSVQSHPLDALHVACTSCYCCKTPELSSADNLVYCSCVRTLLSGGSSGDSYRRRILKHRVYLLLRRP

SEQ ID NO: 278 - protein, 61 aa, Arabidopsis thaliana
  peptide (1)..(61): Ceres Seq. ID no. 12369938
MDGSDSGLASGSGSVCGFTSVEIIVVVVIALHFPPSSIVNLTQNNKTLLNINTYKSFNNAC

SEQ ID NO: 279 - DNA, 679 bp, Arabidopsis thaliana
  misc_feature (1)..(679): Ceres Seq. ID no. 12384513
  misc_feature (1)..(679): Ortholog of  Ceres SEQ ID NO 13648511 as cited in SEQ ID NO 179
agaaatgatgggcgactgtgaatcatatagggtgaccatttgccagcgtttgaactcgtcgtgtgtcgtcgacgttcccagccgaagaagcacaactgatggtccaagagatactcctgccatcaacgaaaaccggtgagaagaaaccaaaggtggtgttggtgctagtccagatctagagctttttgataagttgatgaagtcttgctctgatgtttgagaagaggagctgttggactgttgtgaattttcttgttttgggttcgaagacagagatgcatccaagatctgagtcagatcggagccaatagagcatcgatatactcttccgtcacaaagaaaactttcagtgaagaagctcacataaaaaaggagatttagatattttgagagatttgagataacggaggaagattcaatgaagataaagcttatatagaacacatgaaggttgatgggagttgataagtcccgacgctggcgatcggaaccaccaccggcgtcagagagtatggttgtcgagagtgtctcgattttggtgcctaggagcttttttagtcacgaatagactagacaaaaaattccccatgttaattttgtacaaatactaaaatgtaatactagttgaactttacatatatgtttatgaaggcaaatcttaacaaactcaaagatttgt

SEQ ID NO: 280 - protein, 45 aa, Arabidopsis thaliana
  peptide (1)..(45): Ceres Seq. ID no. 12384514
EMMGDCESYRVTICQRLNSSCVVDVPSRRSTTDGPRDTPAINENR

SEQ ID NO: 281 - protein, 44 aa, Arabidopsis thaliana
  peptide (1)..(44): Ceres Seq. ID no. 12384515
MMGDCESYRVTICQRLNSSCVVDVPSRRSTTDGPRDTPAINENR

SEQ ID NO: 282 - protein, 43 aa, Arabidopsis thaliana
  peptide (1)..(43): Ceres Seq. ID no. 12384516
MGDCESYRVTICQRLNSSCVVDVPSRRSTTDGPRDTPAINENR

SEQ ID NO: 283 - DNA, 1040 bp, Arabidopsis thaliana
  misc_feature (1)..(1040): Ceres Seq. ID no. 13492499
  misc_feature (1)..(1040): Ortholog of  Ceres SEQ ID NO 12562983 as cited in SEQ ID NO 53309
acacctttatagttgtagctaggttttcgaatttcttgagtttttttgtttaaggatttaaaaacattttttgaaattcggagaaaaactttttaagatttcattagtgggtgattttccttaaaaaagagaagaaaaaaaagatacctggcaaaagtcgttcaagacaaaatctgggacataatcgagtctcttagaagaaaccatcccagagaatctcctaagatctgttgcagaagcaggaagcatcacctccttgatacggtggcacttagccctagcgataaacgcctcgttgtcactcctccgcaaattaacaccggagctcgcaagcaccaccttctccactttctccggaaacattttcgccatattatacgccacaaacccgccgtagctcgtcccaacgacactgaatctctcgacctcgagcttctccataagcttccccatgcacaacgcttgaaacatctccgaccggttctcaccggaggaagaggagccgccgaagaagactaggtcggggacgtagagacgaaagaagtgagagagtggcttgacctgatggctccattgccatacagcggaaggtccaaaaccatggaggaggaggagcgacggtttttgtgtattttccgatgatgaagacggtggtggtccccagaactgtatggtggtttcggagtcgatggatagggtttgtaaggagagaccagcggaggagaatctccggcggagtagtgcctcaacgaatcttgcgacgcttagaaacgagggagccatatttttgtagagtgctagaaaacgaaacaataagtaagctttttgagtattattggaaagataggagaactaaagagaaagagatgtttagtttgaaattattgcatttatagacagttataaaataaatgcatttattggctgcatgcaccatacaatgatagaggctaaccttttgttaattcttgtttccttgtttgattcttgtaagttgtaacgtttgattattcttttgtttaattttggatttatttgtt

SEQ ID NO: 284 - protein, 85 aa, Arabidopsis thaliana
  peptide (1)..(85): Ceres Seq. ID no. 13492500
MMKTVVVPRTVWWFRSRWIGFVRRDQRRRISGGVVPQRILRRLETREPYFCRVLENETISKLFEYYWKDRRTKEKEMFSLKLLHL

SEQ ID NO: 285 - protein, 84 aa, Arabidopsis thaliana
  peptide (1)..(84): Ceres Seq. ID no. 13492501
MKTVVVPRTVWWFRSRWIGFVRRDQRRRISGGVVPQRILRRLETREPYFCRVLENETISKLFEYYWKDRRTKEKEMFSLKLLHL

SEQ ID NO: 286 - DNA, 519 bp, Arabidopsis thaliana
  misc_feature (1)..(519): Ceres Seq. ID no. 4911155
  misc_feature (1)..(519): Ortholog of  Ceres SEQ ID NO 12336087 as cited in SEQ ID NO 20546
gattgatactgaagcaatacaagcaacaaaactatcaacgccgccactccccacggcgagcttccaccgtcacctccggctccgggactcacgtaagttgtccgacgactgcttgaaaacatcccgagaagcgcatcagggttctccatggaagataaccaccggaccaagactataagaaacagaggaatcaagagaagcgcaaaatttatctgctcttccgctgattcggctgcttcttccaagctgaagtaccatgaactcaacaagaacactgaagcaacggctaggatcaaaagaactgggtatggtagtggcgatagcgagaatgaatccaggatcgatgatcttctctcttcataagccatagttcctaacttcctataataatgatgatgagagaaggtcttcttggttcttttatgtgctgagggaaacttatagaaaccgactttaggttataatattatatgtttgaccgacagatgaaagattatattaatgtttttgttcaaattc

SEQ ID NO: 287 - protein, 71 aa, Arabidopsis thaliana
  peptide (1)..(71): Ceres Seq. ID no. 4911156
MEDNHRTKTIRNRGIKRSAKFICSSADSAASSKLKYHELNKNTEATARIKRTGYGSGDSENESRIDDLLSS

SEQ ID NO: 288 - protein, 58 aa, Arabidopsis thaliana
  peptide (1)..(58): Ceres Seq. ID no. 4911157
IDTEAIQATKLSTPPLPTASFHRHLRLRDSRKLSDDCLKTSREAHQGSPWKITTGPRL

SEQ ID NO: 289 - protein, 37 aa, Arabidopsis thaliana
  peptide (1)..(37): Ceres Seq. ID no. 4911158
MNSTRTLKQRLGSKELGMVVAIARMNPGSMIFSLHKP

SEQ ID NO: 290 - DNA, 1168 bp, Arabidopsis thaliana; identical to SEQ ID NO: 252
  misc_feature (1)..(1168): Ceres Seq. ID no. 12324442
  misc_feature (1)..(1168): Ortholog of  Ceres SEQ ID NO 15168366 as cited in SEQ ID NO 60199

SEQ ID NO: 291 - protein, 83 aa, Arabidopsis thaliana; identical to SEQ ID NO: 253
  peptide (1)..(83): Ceres Seq. ID no. 12324443

SEQ ID NO: 292 - protein, 63 aa, Arabidopsis thaliana; identical to SEQ ID NO: 254
  peptide (1)..(63): Ceres Seq. ID no. 12324444

SEQ ID NO: 293 - protein, 55 aa, Arabidopsis thaliana; identical to SEQ ID NO: 255
  peptide (1)..(55): Ceres Seq. ID no. 12324445

SEQ ID NO: 294 - DNA, 1134 bp, Arabidopsis thaliana
  misc_feature (1)..(1134): Ceres Seq. ID no. 12327481
  misc_feature (1)..(1134): Ortholog of  Ceres SEQ ID NO 13648449 as cited in SEQ ID NO 171
atgcgtcttcatcgctgctcgccatcgccggccaccggggttgccgctgatgcgattcgatccagtgggaacttttgtcaccttgcctcttctctctttcctaacactcaaatctctcctcagccttcagatagatagtctttgaagcaaaccaaaggtgaaaactgttctgcagttggtgatgacaagaagaatcacaagcttttgacttatgtttagaatcatcatgggacaaggcttccgcaatcgaaatgggactttttcagcagcatcctagaaagactctttgcctttatcgcttcacctagacaacgagcaaggataactccatcctccatggctgagcaacctccttgtccgatatcaggagtcattgggtgaagtgcatctcctgcaacgcacacgttgtcttttgtgatgtttgaccatagcagttcccatggaggtcggtacttcagttgagacatcaccatgctatcaagatcagtggtctccaccacattcttaatgttttcagagaagaagaaacatactcggattctggaaacagcatctctgtgggaggagttcctgcagaaattgttccaaccacccatctgcagcaaaatcaaagatgagtccccttttttactgagctgattatatatgaatagtaataatagtgttagtttgatacccttcaaggcgatcatggagactgcgaatatgctgagaaacgccgagagcttccatggccttccaagcattgaaccaagtggtaaatgcaaatcctgtcgctctcagtgtctccgaagattccagcaccatgcttctgatcccaagcctgtgacacacaccactttagttaacttactctgcttaataacaactcaaaaggcacgccacacacacctgtgtagtccaacagcggtggaaaggccggagataccggcgccaacgatgatgatatctgggctgccttcttcttccatggtgcgttgatgatcttagaaagaaagctctgtttttcttcctctctagtatttatttttaactttcaagtaaacaaaaagaaatgtggttgaagttggcaagtcaaacaaggcaccccgttctaggcaggcggctacagtcatcaaatatcgaatctttaat

SEQ ID NO: 295 - protein, 111 aa, Arabidopsis thaliana
  peptide (1)..(111): Ceres Seq. ID no. 12327482
MNSNNSVSLIPFKAIMETANMLRNAESFHGLPSIEPSGKCKSCRSQCLRRFQHHASDPKPVTHTTLVNLLCLITTQKARHTHLCSPTAVERPEIPAPTMMISGLPSSSMVR

SEQ ID NO: 296 - protein, 96 aa, Arabidopsis thaliana
  peptide (1)..(96): Ceres Seq. ID no. 12327483
METANMLRNAESFHGLPSIEPSGKCKSCRSQCLRRFQHHASDPKPVTHTTLVNLLCLITTQKARHTHLCSPTAVERPEIPAPTMMISGLPSSSMVR

SEQ ID NO: 297 - protein, 91 aa, Arabidopsis thaliana
  peptide (1)..(91): Ceres Seq. ID no. 12327484
MLRNAESFHGLPSIEPSGKCKSCRSQCLRRFQHHASDPKPVTHTTLVNLLCLITTQKARHTHLCSPTAVERPEIPAPTMMISGLPSSSMVR

SEQ ID NO: 298 - DNA, 760 bp, Arabidopsis thaliana
  misc_feature (1)..(760): Ceres Seq. ID no. 12396366
  misc_feature (1)..(760): Ortholog of  Ceres SEQ ID NO 12609863 as cited in SEQ ID NO 52056
  misc_feature (1)..(760): Ortholog of  Ceres SEQ ID NO 13661859 as cited in SEQ ID NO 61611
aaaaatttagacaaatatttctttaactccaatacaaaagtacacatagcattaggttattcctaagatttctgggcttctggtcctaaaatcccattcactactgacgtagcgacaagaactccgacgaactcagccgccacgacggctccagcttgtgtcaatccattaaaactaaccgccgtcacgatttccttctccgccgtctctacacctctctccgccgcttctaatcctttctccgccgcatcaacgcctttctccgccgtctcaaagccttctttcacgatctccaccgcttcttcttctgctttcttcagtttctttcttataccaaataacggaatattctcagccattgatgcagactgaagtcccgtcactaccgtcgctgccgtcaacgaaaataacagattcctgcgagaggcgccggtcagcgagaacgaagcaagcgcgggtttgttagaatgcgccgctcgtgggctaacatgcgcggttcttgcgcaacgcgcctgaagagctccactgccgccgctgagtaaagaaagcgaaacagtcgaagccattttttagatgatctcacaagaaacgaaaaaagctctcagatgtgaaatagaaaatacgaaaagttttgataatatataagataacaaaataatttcattgtcaattgacgtgacacgtcatctccattgagattctttgataaatgggtataaaaaagattataattaaagaataataaaacattttgtacgtt

SEQ ID NO: 299 - protein, 34 aa, Arabidopsis thaliana
  peptide (1)..(34): Ceres Seq. ID no. 12396367
MQTEVPSLPSLPSTKITDSCERRRSARTKQARVC

SEQ ID NO: 300 - DNA, 1528 bp, Arabidopsis thaliana
  misc_feature (1)..(1528): Ceres Seq. ID no. 12385074
  misc_feature (1)..(1528): Ortholog of  Ceres SEQ ID NO 15178797 as cited in SEQ ID NO 1152
  misc_feature (1)..(1528): Ortholog of  Ceres SEQ ID NO 15175688 as cited in SEQ ID NO 60465
ataaggaaattagggtttttctcttcttttcttttttgtttaaaccaatctggttttacttttcaagtttggatataaacccaaatcgaatcgagaaaccataccaaaccactcagagattccgttatccatatttcccctgtttttccattaaggtaggattaatccatcaaataaaacattttgaaaatgtgctatgaatacatcaaatgagaggtttggttcatgttttattaatcaatccgaataacattacatatttgtctatattattgactcaaatatattttttcgtaatcctagagataagcttggtttacttgcaaatttcaagaggagcaccacacaaacacttgttgtgaaaataggaataagaatcaaatgtctgaagtttccctccagttgggatgtgtccacacagtttgttgtagctaacattgaagaactgaagaggagcttcagtccactgcaccggaatattcccagtgatcccattgtggttcaagtccaagataccaagtgttttagggatatcaacctttgagatatcgaactggaacatgtttcttgataagtcaatagaccaggttgttttgttggaaccaaacaacatcgaagcatcaccttggagcttgttgcgggataaatcgatccggttaaagtcgatgttgcctaatgatttgggtattggaccggagagctggttatgtgataggcgaaggtcagggactgttcctggaaacgacccaaatgactctggtatggaacctacaacataaagatcgttgtttagacaagacactgaatgatgtaataaaggaaaagatcgttctttacctgtaagtttgttcctgctaagttcaagagccaagattttaggtaacgtagagagagaacttggaatggaaccagagagatcattgaaggaaagttctaagaactcgagattcttgagctgacttataaagtcaggaattggacctgtcagattcgtccagctgagcctgagcattcggaggttcttgagtttggcgatggtgggttggattgtaccggtgaggttagagagtttgcggaagacaagggtctcaagatacggcaagtcaccgacttcagccgggatctgaccggagatctggccggagaatatggttaaggcggtaacacggtggttaacggtggcgtcgccgcactcaaggcagtaccaggagcaacagtcggtttgagggtcccatgaagcgaggtgataagggttgtttagagatttcttgatcttgaggagggtgtttttgtcattttggttacagagatctttagacaaacaggtcgtgaggaatgtgaacaagaacaagagagtggaaagtaatgtcgctgtcttatccatggtgttggttttgaattttgatggaaagtgttagtgatacatatacatactatatagtgagtgatatagacttagagagacggattcgatttgatctctgtttccacatggaccgtaataatagtcaatacatatcatatagcc

SEQ ID NO: 301 - protein, 72 aa, Arabidopsis thaliana
  peptide (1)..(72): Ceres Seq. ID no. 12385075
MFLDKSIDQVVLLEPNNIEASPWSLLRDKSIRLKSMLPNDLGIGPESWLCDRRRSGTVPGNDPNDSGMEPTT

SEQ ID NO: 302 - protein, 65 aa, Arabidopsis thaliana
  peptide (1)..(65): Ceres Seq. ID no. 12385076
KEIRVFLFFSFLFKPIWFYFSSLDINPNRIEKPYQTTQRFRYPYFPCFSIKVGLIHQIKHFENVL

SEQ ID NO: 303 - protein, 55 aa, Arabidopsis thaliana
  peptide (1)..(55): Ceres Seq. ID no. 12385077
MIWVLDRRAGYVIGEGQGLFLETTQMTLVWNLQHKDRCLDKTLNDVIKEKIVLYL

SEQ ID NO: 304 - DNA, 695 bp, Arabidopsis thaliana
  misc_feature (1)..(695): Ceres Seq. ID no. 12580203
  misc_feature (1)..(695): Ortholog of  Ceres SEQ ID NO 12612333 as cited in SEQ ID NO 56421
acataagtctctctcttacattttgaaaccctaatttccaccatcaccgccaacgccaactccacccgtcattacaccaccaacaccaactccacccgtcattacaccaccaacaccaacaccacccgtcgtgacacctccaacaccaacaccacccgtagtaacaccaccaacaccaactcctcctacgcctattccagagacttgcccaattgacacgctgaagctaggcgcttgtgtggacgttcttggaggtttgattcacatcggacttggaaaaagccacgccaaggcagaatgttgtccggttttaggaggtttacttgacctagacgcagccgtttgtctatgtaccaccattaagctcaaacttctcaacatcgaccttgttctccccattgctcttgagcttcttctcgactgtggaaaaactccaccatctgacttcaaatgtcccgcttaatcgatgtagaacgttgagagtctctggacgactccaaaagtttcgtttcttcaagaaatttgttagtttcatgatctatttggtaatgggaggttaatctgcatatgtgcgacctttagttacatgtttcatttgatacaataaaaggcgttgtaatttgggtttgagatctcaatttctttgggttttcttgttatgttgtacttttaagaagaagaaaaaaaaaactgtt

SEQ ID NO: 305 - DNA, 410 bp, Arabidopsis thaliana
  misc_feature (1)..(410): Ceres Seq. ID no. 12343401
  misc_feature (1)..(410): Ortholog of  Ceres SEQ ID NO 13646254 as cited in SEQ ID NO 20314
  misc_feature (1)..(410): Ortholog of  Ceres SEQ ID NO 12323993 as cited in SEQ ID NO 20720
aacgattcttctaatttggtctcttccctcaaacacgacgacggcgttttctttcatttcttctctcgacaatccctaaaaagaattgtgtttgtgttcttctggtgatgttagggattgtcgagagaagaaagctgaggaagtgaccgaaactccggcggttgtggaggaggagaagaagacagaggtggttgaggagaaacagactgaggttgcggctgctgaggaagtcgccgttgagaaggccgaggagtaaagaggaaggaagaagctatatatgaccttttttggtctcatatcgttttctgtttattttattttatcaacatttcataagtattttctatgtttgttgggtttgttatgatgaaatcagatgtttggatcttttaatggttgctacattgttt

SEQ ID NO: 306 - protein, 35 aa, Arabidopsis thaliana
  peptide (1)..(35): Ceres Seq. ID no. 12343402
NDSSNLVSSLKHDDGVFFHFFSRQSLKRIVFVFFW

SEQ ID NO: 307 - DNA, 725 bp, Arabidopsis thaliana
  misc_feature (1)..(725): Ceres Seq. ID no. 12325825
  misc_feature (1)..(725): Ortholog of  Ceres SEQ ID NO 15174329 as cited in SEQ ID NO 0
attcaaaagtgtataatttggaaactggaatattctttcatgggaagtctggccgaagaaggcggcgacctccttcttcctcgtggcggtgtctccggtggtgccaaaaccggggaaggactttgcagcggtgataaaggcgttgtaagtgtagaaacctctagcgggacaagcggcatcattcctatgcttaagcatatcatcgaactgagaacttgaaatgatgcccgaaagatcgccggtgggtccaggaggagtaccaccgggagtgcactggctttggcagccaggctgcttacagtatggttcggtgttaccgcaccagccgaactcgctgcagcatagaccgttggggcagagtgctcctccagcttggcgaccacattgctcggccgaggataatgataggagaagtgaaaagatgagaaagagaaaaagattagtcttcattttgttcaatgttctatggttttctttttgtggaggcatgaaagatatatatagatccaattaatgaatgttttatcacatcaaattctatctttttccatagtttattgtttgttatgtctatggagtgtggctatggggaacaaacagtatttggtaggtttgtttttgattatatttattttccttccgtcattgttgctaggttagatattgatttgtttttttgggggattatcatgttaataattccaagtaatgagaactttctatgt

SEQ ID NO: 308 - protein, 97 aa, Arabidopsis thaliana
  peptide (1)..(97): Ceres Seq. ID no. 12325826
MMPERSPVGPGGVPPGVHWLWQPGCLQYGSVLPHQPNSLQHRPLGQSAPPAWRPHCSAEDNDRRSEKMRKRKRLVFILFNVLWFSFCGGMKDIYRSN

SEQ ID NO: 309 - protein, 96 aa, Arabidopsis thaliana
  peptide (1)..(96): Ceres Seq. ID no. 12325827
MPERSPVGPGGVPPGVHWLWQPGCLQYGSVLPHQPNSLQHRPLGQSAPPAWRPHCSAEDNDRRSEKMRKRKRLVFILFNVLWFSFCGGMKDIYRSN

SEQ ID NO: 310 - protein, 72 aa, Arabidopsis thaliana
  peptide (1)..(72): Ceres Seq. ID no. 12325828
IQKCIIWKLEYSFMGSLAEEGGDLLLPRGGVSGGAKTGEGLCSGDKGVVSVETSSGTSGIIPMLKHIIELRT

SEQ ID NO: 311 - protein, 59 aa, Arabidopsis thaliana
  peptide (1)..(59): Ceres Seq. ID no. 12325829
MGSLAEEGGDLLLPRGGVSGGAKTGEGLCSGDKGVVSVETSSGTSGIIPMLKHIIELRT

SEQ ID NO: 312 - DNA, 1211 bp, Arabidopsis thaliana
  misc_feature (1)..(1211): Ceres Seq. ID no. 12385203
  misc_feature (1)..(1211): Ortholog of  Ceres SEQ ID NO 14301696 as cited in SEQ ID NO 67215
aagcttcttcttgtgtgttttactgattttgattactttaagtcctaaagggaaccaacataggcatctaatgcttgtacctcttttgcttttggtcttaattcttttctctggtggttcaggtatgttgaactgtattaaaatacaacattggtcttggcactgtgtcttgtggatcaattatggatctgcttcatagaaagataatatctttccagtttctttatcttggaaatagtacaaactccgatctcggttcttggatagagttcactaggtctttttcttttatacaagttgtgggtaagcaaatagaaatatagttgaataaacatgccaaagctaaagactttgaagatgactactgactcagagaactgtaccgtattctttttcatttcttcgtcgtgcaattacgagaaatcaggattccggttggtggaccggtcatctgaagttggcacctcccgtgcagctgataagagtaatgaatcattccaaaatgagctttgactttgaaggcaagcctaccaaactagagatcaaacggattggttccaacctcgtctcatgctttttctgcaagaatggctggaccacttgcgctgcaatcaatctattgaagaagaagagctcaatccgaagcttctcaaacttcacttctatcttcttattagggttagtgaaattcaccagcatggacaaatcgccgttgaaaaactccggcgtgtcgaagtagatcgtgtgtaggtttgcgtttgggatgtcgaaaacaggtattcttggtctaatcgcaagaaacactatcaaagtggcaatcgcaaaaaagataagcaaaaggctgaacacaaaacagaaaccggcaacacaccatatccagagactggtcctgctactccttggctgacggagaatcaccctatctttcctcggctctgcatcaagaccgttgaatctaaccgttgctggctttgttaagaccatttggccaactggtgtggattgtgtgctctgtggtgttctccatggtgtggttcttggagtataccatacagacgatggtgtttcccatgatggcgtttcgggcggttgcaactgcggtggaggaggaagatgaggtagatttggcatgagttatgtgatcaatgaaaggaaaattggaaatgtgtaatggttatggattaaataggaaaataacagaacttttgttt

SEQ ID NO: 313 - protein, 83 aa, Arabidopsis thaliana
  peptide (1)..(83): Ceres Seq. ID no. 12385204
MNHSKMSFDFEGKPTKLEIKRIGSNLVSCFFCKNGWTTCAAINLLKKKSSIRSFSNFTSIFLLGLVKFTSMDKSPLKNSGVSK

SEQ ID NO: 314 - protein, 78 aa, Arabidopsis thaliana
  peptide (1)..(78): Ceres Seq. ID no. 12385205
MSFDFEGKPTKLEIKRIGSNLVSCFFCKNGWTTCAAINLLKKKSSIRSFSNFTSIFLLGLVKFTSMDKSPLKNSGVSK

SEQ ID NO: 315 - protein, 65 aa, Arabidopsis thaliana
  peptide (1)..(65): Ceres Seq. ID no. 12385206
SFFLCVLLILITLSPKGNQHRHLMLVPLLLLVLILFSGGSGMLNCIKIQHWSWHCVLWINYGSAS

SEQ ID NO: 316 - protein, 59 aa, Arabidopsis thaliana
  peptide (1)..(59): Ceres Seq. ID no. 12385207
MLFLQEWLDHLRCNQSIEEEELNPKLLKLHFYLLIRVSEIHQHGQIAVEKLRRVEVDRV

SEQ ID NO: 317 - DNA, 1676 bp, Arabidopsis thaliana
  misc_feature (1)..(1676): Ceres Seq. ID no. 12357570
  misc_feature (1)..(1676): Ortholog of  Ceres SEQ ID NO 14315257 as cited in SEQ ID NO 52552
  misc_feature (1)..(1676): Ortholog of  Ceres SEQ ID NO 13597843 as cited in SEQ ID NO 64850
  misc_feature (1)..(1676): Ortholog of  Ceres SEQ ID NO 15176787 as cited in SEQ ID NO 66468
atcttagattcaagagatattcttagtgacgtcttgaataaactttagaagagcaacgtgcgaagatccaccgtccattaaagctaagtgactcttctcgctcatctccttcactctactcctcacgtcactatcctgctccatcaaacaccggatccctctctctatctcctctgcccatcaactcatcatccgccgccatgaaatctcctcggaaactatttcggacctccaccgctagccctagctcctcaaccatctcgaacgcgttaacttgttgctctgcgtaaagcggccacgtagccatcggaactccgaaccatagactctctagcgtcgagttccatccacaatgcgacacgaaccctccgatcgcaggatttgctagaatggcgctttgtggagcccaacctacaatctttcctatctctgccgtccgttccaagaatccttccgggagaatttcctcaagattcgtaaattcttcgggaggtcccatcgatccttttggttgagcacgacgaagagaccagacaaagcggtgaccacttcgctcaagcgcgattgcgatttctttagcttggccctcacggaaacctcccatgcttccgaaacagaggaaaacaacggatttacgtggctgctcgtctagccaccgtaggatctccgattgcttatcgtcagatgaatttggaccgttgattttaagattcataaccggtccaactgtgtacaccgtaggcagaggactatctacgccggagaaaaacttcatagcttgaggctcaagctcagcgaatgtatttaccaaaatacctttagtttctcggaatcttctggtttgtctaaacataaccggtaaccactccttggttaatagaaccgaggggaaacacttaaccggtaaaggacgagtcaaacaaggaacttccagctcagtagtgtccgagtccttgaggtcactaacgtcatagttcttaacgtcgtaaaggtattcaacatgaacttgcaatccaagaaacgttgcgttggatgtgtaaaacatgtaactgggaacaccaaactcattagcgacatcaatcatcatcatgcaaaacatatccaccacgaatccagcaagacgcgacggcgaatctggtggacccgggtcagtaagtttttccaccgtggctttgacctgcggcttgaagttatcaatgtagtcgaaaaaatgtggtttggtgtcatcggagtctggtttatcagggacggagagaacgttgtagctaagacgttcttcagaatcagaggagagagaagcgatgtaagaagaagagttactgctactaaatccatgcatctgagggatgatgatgatggtgatggagagatggtcgtcacggtcaacaagaagcttagctacctccactaatggccggagatgtccgtcaccaggtgatggttgaagatgtttcggtgaagagataagattcgtctttagcatacatgacatgtggtacttggacatctactgatgttagtttaacttttgtcacaggccatacaatcttgatcttcagacttcaacgttagtacgttacgttagtatttttttcttttaattgtcagctatatactgcactatcatacaattaaaggtaaccgacgtttaattcattgagattttgttggcatgt

SEQ ID NO: 318 - protein, 136 aa, Arabidopsis thaliana
  peptide (1)..(136): Ceres Seq. ID no. 12357571
MNLQSKKRCVGCVKHVTGNTKLISDINHHHAKHIHHESSKTRRRIWWTRVSKFFHRGFDLRLEVINVVEKMWFGVIGVWFIRDGENVVAKTFFRIRGERSDVRRRVTATKSMHLRDDDDGDGEMVVTVNKKLSYLH

SEQ ID NO: 319 - DNA, 782 bp, Arabidopsis thaliana
  misc_feature (1)..(782): Ceres Seq. ID no. 12326622
  misc_feature (1)..(782): Ortholog of  Ceres SEQ ID NO 15174024 as cited in SEQ ID NO 0
aatccattctcatcttcctcttcttccttcttcttaatctctcttcttcttaccatttctcctctctcttcttcttcttcgttcgtcttccttaacctaggaatccgaccacctttgcttgtccctaaaagctcaaaattgattttgctccaaccaatcttatcttcattatcccaaccaaatctctcactaatctccaacaacatcgaaacagagtttacctcttctctactcttccttacagaagttaaagctctcatgctctcatcacttccatggaggattttctctgcaaattcccactcagttctatctttataaacatcgtcttcgagcacttcatcagcaagctttgcccaatactcagaatctcctgcacgaagattctttgagacccatttaagataagaagaaggcaaagtaccaagcattttgcccttgtgtttgccgaagtctatgattgtgtctctggcggctagggtttcgatgatttgaagttttttgattaagggtttagattgattggtggagaagataccattagatgaagaaagatttcttcttggtctgaaagatgatgatgatgatgagattctgaagatggtttttgttgttactgcagcagagtgaggactgtggaacaagaccaccgagaaactcattgttgtgtccccaaaatattgtctattttttcttgaatcctataaaatacatttagggggtgttattcgttaatagattttaatagaattgaaatccaacacactaattcactgttatcc

SEQ ID NO: 320 - protein, 106 aa, Arabidopsis thaliana
  peptide (1)..(106): Ceres Seq. ID no. 12326623
NPFSSSSSSFFLISLLLTISPLSSSSSFVFLNLGIRPPLLVPKSSKLILLQPILSSLSQPNLSLISNNIETEFTSSLLFLTEVKALMLSSLPWRIFSANSHSVLSL

SEQ ID NO: 321 - DNA, 457 bp, Arabidopsis thaliana
  misc_feature (1)..(457): Ceres Seq. ID no. 13503849
  misc_feature (1)..(457): Ortholog of  Ceres SEQ ID NO 12635272 as cited in SEQ ID NO 495
  misc_feature (1)..(457): Ortholog of  Ceres SEQ ID NO 13594789 as cited in SEQ ID NO 52172
  misc_feature (1)..(457): Ortholog of  Ceres SEQ ID NO 14306131 as cited in SEQ ID NO 52246
  misc_feature (1)..(457): Ortholog of  Ceres SEQ ID NO 14309585 as cited in SEQ ID NO 52660
  misc_feature (1)..(457): Ortholog of  Ceres SEQ ID NO 14305267 as cited in SEQ ID NO 0
actgaaattttttcaacttccagagagagaacgtagcaaaacagggcttaccggagcagaacggaaaaacccatttcgaagctggagatgatcgtgctaaggagtacgtcagtctcttgaaatcgaacgatccaattggattcaacattgttgatgttcttgcttggggttctattggacacatcgttgcttactacatcttggctacttccagcaatggatacgacccaagcttctttggatgattcgtttcaatgtcaatctctcgtatatgtatatgtatatgtttgacttgtgttgcaagctatctaatctgttctctatctctgtttcttcttctgttgttgttgttgttgtctaagacttgtccctctttttgcaaatgttttatttctccatttacaaatattggtttgcagagttttataagaagaacataatagtatatacactatgc

SEQ ID NO: 322 - protein, 61 aa, Arabidopsis thaliana
  peptide (1)..(61): Ceres Seq. ID no. 13503850
MSISRICICICLTCVASYLICSLSLFLLLLLLLLSKTCPSFCKCFISPFTNIGLQSFIRRT

SEQ ID NO: 323 - protein, 45 aa, Arabidopsis thaliana
  peptide (1)..(45): Ceres Seq. ID no. 13503851
MFLLGVLLDTSLLTTSWLLPAMDTTQASLDDSFQCQSLVYVYVYV

SEQ ID NO: 324 - protein, 39 aa, Arabidopsis thaliana
  peptide (1)..(39): Ceres Seq. ID no. 13503852
MIRFNVNLSYMYMYMFDLCCKLSNLFSISVSSSVVVVVV

SEQ ID NO: 325 - DNA, 629 bp, Zea mays subsp. mays
  misc_feature (1)..(629): Ceres Seq. ID no. 12589744
acaactttcgcgacgtctgcgacatcagaaaactgagctcgccccctcttgccttccctcctccgccggaccgctgctgtccgcctccaaccctccagttcgacgcaggcggcgacggcggcgcgccgagatgaaggtctccgtgaagacgctcaagggatctagcttccagatcgaagtggagcccaccgacaaggtactcatcggttgcgctcccgatctgtcgctatgtttctagttgctgatgtattggcggggctgcttcgctagatttggctgctttttaggtttgtttggggtctaggatttggttggttccgctgtggaggagatgagagtattggaagccgcgggcgaagctgccgtggatccaatctgtaggttgctgatttggttccggtggtgcgtgtggaacaggcggaacggagagctgttgcagacttcgcctgtggattttctggtttcaatttgggttttttcttggatacatgaatcagatgacaaggtgaagttatcaggcattgtagttggtagatagagcataggttgcagtcaatctatcgtcgctgtcctacatctcttcaggttgtgtgtttaattgaataaagagtaaggcaacacgatacttc

SEQ ID NO: 326 - protein, 78 aa, Zea mays subsp. mays
  peptide (1)..(78): Ceres Seq. ID no. 12589745
QLSRRLRHQKTELAPSCLPSSAGPLLSASNPPVRRRRRRRRAEMKVSVKTLKGSSFQIEVEPTDKVLIGCAPDLSLCF

SEQ ID NO: 327 - protein, 68 aa, Zea mays subsp. mays
  peptide (1)..(68): Ceres Seq. ID no. 12589746
MRVLEAAGEAAVDPICRLLIWFRWCVWNRRNGELLQTSPVDFLVSIWVFSWIHESDDKVKLSGIVVGR

SEQ ID NO: 328 - protein, 43 aa, Zea mays subsp. mays
  peptide (1)..(43): Ceres Seq. ID no. 12589747
NFRDVCDIRKLSSPPLAFPPPPDRCCPPPTLQFDAGGDGGAPR

SEQ ID NO: 329 - DNA, 735 bp, Zea mays subsp. mays
  misc_feature (1)..(735): Ceres Seq. ID no. 15225657
ttttttttttttttttagaaaaccatatttcaaatagacattttcattgtaataattgattataaccgctggctgaatcatacagagttatctcaaccaaacttaacaaagagctctccattgattaaagtaaagacagacagcaaaacaagcttcaattctactaaaaaccaagatgaattaacccaccaaacatccatcagtctctgcaactagatacctcaggcatagttcaacctgaatatgtcgttgaacacgtagtagtttccctgattcgataccaaatggaacatctggctgaacttgagagcgtgctgttcgcccgcgagctgaagattaccggagacaaagacgagcatgccggcggcgggaccagagggctggcaatcgacggtggtgatgttgtgcttgcactgctggaaaggaaggctggtgagcttggcgacgatgttctgagagccctggatcttctgcccttcgaaggtcagcatggatccttcttggtaaagagagaccaatcctccacgattcgaatcgaaggtggtgtagtagtgctccacgaaagccttcgctactgcgtctggatccatctctctcgtcttcctctctctttctctttctctttccgtcgtcctttcaaagagtctagagagagaaacgaaacggaaagggtgagatgataaaactgaaaatttccagtttttcgattaggatgttctaggtaatggtctcgtg

SEQ ID NO: 330 - protein, 131 aa, Zea mays subsp. mays
  peptide (1)..(131): Ceres Seq. ID no. 15225658
MEHLAELESVLFARELKITGDKDEHAGGGTRGLAIDGGDVVLALLERKAGELGDDVLRALDLLPFEGQHGSFLVKRDQSSTIRIEGGVVVLHESLRYCVWIHLSRLPLSFSFSFRRPFKESRERNETERVR

SEQ ID NO: 331 - DNA, 723 bp, Zea mays subsp. mays
  misc_feature (1)..(723): Ceres Seq. ID no. 13587131
agattcaaataaaatgagataagtaagtatacaaacaaaaaatttcataatctgcataaaaatctcttttgagtgcaatatatcagatagggtgcaagactgtaataaaaacttgtgacgaaacaaaagtcgaaacaattaaaaaagataagtgcagagatgaatgagggctaatctattcaacgtctgccaccaccaccacccaacttagcagccttgggtgcggcagtcttggggatgctgcccttgattttttgttgcttggaagcaaactcggccttctttgccttcttctcatccttggtcttcttgattctctccttaatgtcacgaagggcggcttctctggctgcatcacgaacttcaggcttctctgcacgcttcttctgaatgacctccaaagtagcaccaacgatggaccttgagtaaggcttcttggttgcacgtctcctcttcttcacagcctcttgagcagcatccttcttgtgctgtttacggtacatagtggtccatgcaagcttggaaggcttcaacttattgtgaaaataatgcttacatttcgagttgatgaacaaaaacacctgagagtcagatctgatgaatctgatacccctgcctgggtaaatcttgtggccactgaatcggcaaagctcagtcttgagaaccatggctccgccgccgcgcttaaacttttttttttttacactggaagccctaaaaatc

SEQ ID NO: 332 - protein, 58 aa, Zea mays subsp. mays
  peptide (1)..(58): Ceres Seq. ID no. 13587132
MLTFRVDEQKHLRVRSDESDTPAWVNLVATESAKLSLENHGSAAALKLFFFYTGSPKN

SEQ ID NO: 333 - protein, 50 aa, Zea mays subsp. mays
  peptide (1)..(50): Ceres Seq. ID no. 13587133
MLPLIFCCLEANSAFFAFFSSLVFLILSLMSRRAASLAASRTSGFSARFF

SEQ ID NO: 334 - DNA, 818 bp, Zea mays subsp. mays
  misc_feature (1)..(818): Ceres Seq. ID no. 13599506
gaatgaatattctgcaaattacatttcatcaaacaaatacaagtgttacacatgcttaatcaaattactgttcattcacacacgcacacccaatcgtatgtatctcttgtagtacgacacagccaaactaagacaaattaatctcaccaaaccagtgcatataaattaacacacgcaagaaaaactacttaacaaccgaccgatatattattgcatgatgaaatcaaatttggaatgaacaactaaaataacggatgcactgacgatgcatgcatgcgctgagtgatggacgatttgctgatgaattaagcgcactggaagcccttgggggcggtcttgccgcagtagttgaggaggaggctgagcttgatggggatgttgaggacgatgccgaggacgttggccttgagcgcggtgcagaggcacacggcggcctcaaggtcggccaggccgccgaggaggctgcagcacttgtcgccgccgccgctgggggcggtgccgacgcccgcgctcactaggcccagcacgttggcgcaggcgcccagcttcagtgtgtccgtggggcagtaccccgtgccgcccgatgacggcggtggcgggcatggcgtcggggtagcaggcgctggcgggggcggggacggggacgccgggggaggggtgtggtgcttgcagctgttgcacgcgtcgccggccaggaacgtgctggccaccagcagcgccagcaggcacgccgccgaggtcctggacgccattgctgccggctaagctagctagctagtgctggcgagagtgagctaggagggtttagtaggtctaat

SEQ ID NO: 335 - protein, 131 aa, Zea mays subsp. mays
  peptide (1)..(131): Ceres Seq. ID no. 13599507
MGMLRTMPRTLALSAVQRHTAASRSARPPRRLQHLSPPPLGAVPTPALTRPSTLAQAPSFSVSVGQYPVPPDDGGGGHGVGVAGAGGGGDGDAGGGVWCLQLLHASPARNVLATSSASRHAAEVLDAIAAG

SEQ ID NO: 336 - protein, 129 aa, Zea mays subsp. mays
  peptide (1)..(129): Ceres Seq. ID no. 13599508
MLRTMPRTLALSAVQRHTAASRSARPPRRLQHLSPPPLGAVPTPALTRPSTLAQAPSFSVSVGQYPVPPDDGGGGHGVGVAGAGGGGDGDAGGGVWCLQLLHASPARNVLATSSASRHAAEVLDAIAAG

SEQ ID NO: 337 - protein, 125 aa, Zea mays subsp. mays
  peptide (1)..(125): Ceres Seq. ID no. 13599509
MPRTLALSAVQRHTAASRSARPPRRLQHLSPPPLGAVPTPALTRPSTLAQAPSFSVSVGQYPVPPDDGGGGHGVGVAGAGGGGDGDAGGGVWCLQLLHASPARNVLATSSASRHAAEVLDAIAAG

SEQ ID NO: 338 - DNA, 671 bp, Zea mays subsp. mays
  misc_feature (1)..(671): Ceres Seq. ID no. 13599287
aacgagaagacaccattgtttattaaaaaaagcagattcagagaataagagtttggaacattgtgggattcttaagaacaaaacaaagatttagataaaacggttctttaaacttgtgatgatgatcaagatgaagcctgtcccaacagagtttgaatgtctttctcgaattgaagaggagaggttctaggagaatatctctgggagactttgccgtcaggagaaaccaagaactttgtgaagttccatttgattgcgtcaataagcaaacctcctttctctgctttcaagtatttgtataatggcgccgtgttcttcccgttcacatccaccttgtcaaagatggggaactcagctttgaactttgtgcagacagtttgttggatctcttcattgtttcctggttcctgtcccaagaactgattgcacggaaacgctaaaatctccaacccttggtccttgtatttatcgtacagaacattcagttccttgtagtttgcatccgtcagaccacatttggaggcaacgtttacaatcaaaagagttttgcctttgaattggctcaaactcacatctttaccttcaatatccttaacggtgaagtcgtagatagactgtggagattcctccgccattttggtctctctagttttctctttgcttttagtttt

SEQ ID NO: 339 - protein, 30 aa, Zea mays subsp. mays
  peptide (1)..(30): Ceres Seq. ID no. 13599288
TRRHHCLLKKADSENKSLEHCGILKNKTKI

SEQ ID NO: 340 - DNA, 733 bp, Zea mays subsp. mays
  misc_feature (1)..(733): Ceres Seq. ID no. 12635643
gaaacgtttcacccagtttcactgtttatttatctttagtctttctttactactccaaaagtcaaaccaaaacgaagtaattgttgataacttagaaagaagcaaaactaaaagcatccaatgattaaaaagcaaacgcacatagacattttattcgtagaggaactctgaagctaaacggttggagaatagagaatcaatcacagctcgtcagctccatatgtgtcgtctacatcttcttcttcttgttcttgttctccaccagctggtttttcatttaccgcgataagctctgtgtcaaatatcagtgttgccccaccggggatggttggaggagagccctgttcaccatatccaagtttagcaggtatctttaacttcctcttctctcctacacacgcacctagcaatccttgatcccagcctttgataacctgaccacttcctaactcaaactcgaacggttcatccctttcaaagctcgaatcgaatactgttccatcagtaagtttccccctgtagtgcaccttgatcatatcacctttgtgagccttcacttcacacgttgctggcttaaacttaacaccgatctgcaattccgacacatctcctgtcttcttggcaaaaccttggagtgaaatgagagagaataagatcaagcaaagggagtaacggagacacatcttaactctctcgccaaaaaaatcgcttcgtttagttccgtttgattttt

SEQ ID NO: 341 - protein, 40 aa, Zea mays subsp. mays
  peptide (1)..(40): Ceres Seq. ID no. 12635644
KRFTQFHCLFIFSLSLLLQKSNQNEVIVDNLERSKTKSIQ

SEQ ID NO: 342 - protein, 30 aa, Zea mays subsp. mays
  peptide (1)..(30): Ceres Seq. ID no. 12635645
MVGGEPCSPYPSLAGIFNFLFSPTHAPSNP

SEQ ID NO: 343 - DNA, 707 bp, Zea mays subsp. mays
  misc_feature (1)..(707): Ceres Seq. ID no. 13599533
ctttattgtgtttaaacatcgacggtatcgataagcttttttttttttttttttcttttttttttttttatcaatacgaagagtatatgcttgtttgccaagaaaagcagaactggttacacaatcgaaatgtgggagtggagcagatccacatttgatgaaataaaaaacaaagcacggaaagcaaatcttattcggcgcccaagcaacagtacgtccattaatgggctgggcaagtgaaaccagacgggcacttcttgccgcagtggttgaggaggagtctgatgtccacaggcacgttgaggcggaggccgagaatgtcggccctgacggcggtgcagaggcagacggcggcgtcgaggtcggccaacccctggagcagcgggcagcactggtcgtgcgccggaacgccgaccttgaggccgagcagccggccgagaactttagcgcacaccctcaggttgagcacgttgattgagcactgcccagcgccgtggccgtggccgtgccctcctccatggtatggcggcggaacgacgatgggtggtgtcggcacgacgaccggcggttggcaatagatgcttccgcagccgtgggcggcgacggcagagaggagaaggctcagggcgacgaagagggcagcgttggatgacattgtgattgtgtggcgtgctagagtaatatagctagtgctttgggtttgggat

SEQ ID NO: 344 - protein, 97 aa, Zea mays subsp. mays
  peptide (1)..(97): Ceres Seq. ID no. 13599534
MSTGTLRRRPRMSALTAVQRQTAASRSANPWSSGQHWSCAGTPTLRPSSRPRTLAHTLRLSTLIEHCPAPWPWPCPPPWYGGGTTMGGVGTTTGGWQ

SEQ ID NO: 345 - protein, 86 aa, Zea mays subsp. mays
  peptide (1)..(86): Ceres Seq. ID no. 13599535
MSALTAVQRQTAASRSANPWSSGQHWSCAGTPTLRPSSRPRTLAHTLRLSTLIEHCPAPWPWPCPPPWYGGGTTMGGVGTTTGGWQ

SEQ ID NO: 346 - protein, 84 aa, Zea mays subsp. mays
  peptide (1)..(84): Ceres Seq. ID no. 13599536
MGWASETRRALLAAVVEEESDVHRHVEAEAENVGPDGGAEADGGVEVGQPLEQRAALVVRRNADLEAEQPAENFSAHPQVEHVD

SEQ ID NO: 347 - DNA, 650 bp, Zea mays subsp. mays
  misc_feature (1)..(650): Ceres Seq. ID no. 13599214
aacccaccgagactttatcatatgtatatgactattgccatctacaaggaacagtttttggagatatacaaacagaaaactagtatgggggggacatacataaacgaattgagaaacattacacttacaagggaattcacttcttccattgcggaatccgctgaaccacaacctttcctgagttttctttgttccctactattgtttggcacgcgagcctccaagattcaggcttctttttcagatacttgttttctgtatctgttctctggttcagaagttctctgccatcaagaatctcaacaatgcaagttccacagcttcctccacctccacagttcatcactttcccgtaagtagcgtaaagctcgatcttgctatcctgcatgatgcttctcagaagcttctctccgctcacagctttcgctttatccctcggatacgtcccgtcgctcccaggcttcggaccgaagaactcgagctctatctcaggaggaggcttcgtggtagaaatcccctgctgagatgcttctgaagaagaagaggaacaacaggagataacgcgagctcttccattcacggaaacttgtcgattcttcacaccggagaaggagaatccgaggttgaaaccgagcgaagccatttctttt

SEQ ID NO: 348 - protein, 119 aa, Zea mays subsp. mays
  peptide (1)..(119): Ceres Seq. ID no. 13599215
NPPRLYHMYMTIAIYKEQFLEIYKQKTSMGGTYINELRNITLTREFTSSIAESAEPQPFLSFLCSLLLFGTRASKIQASFSDTCFLYLFSGSEVLCHQESQQCKFHSFLHLHSSSLSRK

SEQ ID NO: 349 - protein, 112 aa, Zea mays subsp. mays
  peptide (1)..(112): Ceres Seq. ID no. 13599216
MYMTIAIYKEQFLEIYKQKTSMGGTYINELRNITLTREFTSSIAESAEPQPFLSFLCSLLLFGTRASKIQASFSDTCFLYLFSGSEVLCHQESQQCKFHSFLHLHSSSLSRK

SEQ ID NO: 350 - protein, 110 aa, Zea mays subsp. mays
  peptide (1)..(110): Ceres Seq. ID no. 13599217
MTIAIYKEQFLEIYKQKTSMGGTYINELRNITLTREFTSSIAESAEPQPFLSFLCSLLLFGTRASKIQASFSDTCFLYLFSGSEVLCHQESQQCKFHSFLHLHSSSLSRK

SEQ ID NO: 351 - DNA, 2013 bp, Zea mays subsp. mays
  misc_feature (1)..(2013): Ceres Seq. ID no. 15226190
tgattactattaccttttctgttccaaagacaaaggtggatttcacactttgaaatcctgtacctaaagtgacctttaggaaaaggagacctaatcttaggaacaaaaacaaaactatttttgtaagtatctatacgctttaatgtttgttcctatgataactgtttgatttggttctttgattgagtgtcatgagttgtggagtaatgtccacaattgcatctgtatatgcatataggcataaaaaatgtttatggccattcacaatatagacgaagccgaagctcaccagcagcataaatatataagagataaaactgcttcggtggatcaaccaaagtctatgcttttgtgtgaagacacagctgagcataaagtggtgttttgtaacaccccgtccaatcccggactgacggtacttactcctgttagctctctaggatcatatattggccccacagaccaacacgagtcttttgtgcgcactttgtcctcactcatgcgcacccgagaaaacttcccggtcggtcacccatcccaaattgctccaagacaagcacgcttgtcggcgtttcgagacagggggtccctaagccgacgagtgagtgtgctgcgtgccccagcccagatgggtcgagcgcgtgggcgagcgcggaggggggagaggcgaggcggccggagccgagcgtgagagaggtggaagtcccgcggccttcgtgttcgtcccgcgcccaggtcaggtgcgcttgcagtaggggggttacaagcgtccacgcgggtgagggaagcgagcggccccaagagagcgcctgtcccgtcctcggtcccgcgcggccaaccttctctgagaaggccctggtccttccttttatagtcgtaaggagaggacccaggtgtacaatggggatgtagcagagtgctacgtgtctagcggagggagagctagtgccctaggtacatgccgatgtggcagccagagagatctgggcatcctgctggcgtgatgtcgtggctatcggtggtgcggtggagcctgatggagggacagctgttggagcggtcgagtccctgctgacgttgtcctgctgccgtaagagagctgggggccgccgtcgtcatagagctcgtggagcgccatcattgcccctctggcggagctggccggacgagacgccggtcttgttctccgtgacccgagtcgattcggggtagggtgatgatgacgtttcctgttgacgtggcggtctgtgctctaggcagggcgacgtggggtttcctccgaagccgaggttgagtcttgccttcagttgccgtggccgagcccgagccagggggtcgggcgaggcggaagtcgtccggccgaggccagggcggagtccgagccctggggtcgggcgaggcggagtttcgtcgtcttccgggtcttagcctgagtccgagccctggggtcgggcggaacggagttcgccgtcttccgggttttagcccgagtccgagccctggggtcgggcggagcggagttcgccgtcttccgggtcttagcccgagtccgagccctggggtcgggcggagcggagttcgccgtcttccgggtcttagcccgagtccgagccctggggtcgggcggagcggagttcgccgtcttccgggtcttagcccgagtccgagccctggggtcgggcggagcggagttcgccgtggcgcctttggcaaggcctagttgcctgtcagactcactctgtcgagtggcactgcagtcggagtggcacaggcggcgctgtccttctgtcagactggccagtggagcggtggagtgacggcggtcacctcggctctgccgagggcgcgtgtcaggatagaggtgtcaggccacctttgcgttaaatgcccctgcaatttggtcagtcggtgtggtgatttagtcaaggttgcttctgagcgaagcccaaggccttgggcaagccgggtgatgtgtccgccataaaaagggggcctcgggcgagacggaagtct

SEQ ID NO: 352 - protein, 147 aa, Zea mays subsp. mays
  peptide (1)..(147): Ceres Seq. ID no. 15226191
MFMAIHNIDEAEAHQQHKYIRDKTASVDQPKSMLLCEDTAEHKVVFCNTPSNPGLTVLTPVSSLGSYIGPTDQHESFVRTLSSLMRTRENFPVGHPSQIAPRQARLSAFRDRGSLSRRVSVLRAPAQMGRARGRARRGERRGGRSRA

SEQ ID NO: 353 - protein, 145 aa, Zea mays subsp. mays
  peptide (1)..(145): Ceres Seq. ID no. 15226192
MAIHNIDEAEAHQQHKYIRDKTASVDQPKSMLLCEDTAEHKVVFCNTPSNPGLTVLTPVSSLGSYIGPTDQHESFVRTLSSLMRTRENFPVGHPSQIAPRQARLSAFRDRGSLSRRVSVLRAPAQMGRARGRARRGERRGGRSRA

SEQ ID NO: 354 - protein, 115 aa, Zea mays subsp. mays
  peptide (1)..(115): Ceres Seq. ID no. 15226193
MLLCEDTAEHKVVFCNTPSNPGLTVLTPVSSLGSYIGPTDQHESFVRTLSSLMRTRENFPVGHPSQIAPRQARLSAFRDRGSLSRRVSVLRAPAQMGRARGRARRGERRGGRSRA

SEQ ID NO: 355 - DNA, 634 bp, Zea mays subsp. mays
  misc_feature (1)..(634): Ceres Seq. ID no. 13623539
acgagagctagggagatgaaatgccttttgtacatgatggaaggaaacaaattacgtacatactgcaattatatctgggttctcagccttgccatggttggtcaagcccctctatgattttatcagttgattcaggtggttgattatatggtggttcagagagctcgaggtgaatcacagagtacatatagatctctccactccagtcactatgttgggaatcctcagcctttggaggaatcatgagtgcatacttcagtggttctccagtcacttatggcgtaagatttgtctttggtgttacagcacttttgccactgttccgagtagcagagaaggacaactctggcaaactgtgaagaaaataaaagattttcacaagcggaatcttcagaatctgaataaaggagttcgtgggaatcagttgtaccaaaaactggttcagttttcgtattccaagcatactactggaagttcacactgatcggcgacaaactctcgcccaaggagaagttgaaggaggatcagcgtgaacacccactgaaagagagatggagttgaatgagaaatctgaaaagaatacgcaagaggtagatgagaagttccaaaacacaaacttgtatctcaagaactt

SEQ ID NO: 356 - protein, 90 aa, Zea mays subsp. mays
  peptide (1)..(90): Ceres Seq. ID no. 13623540
MLGILSLWRNHECILQWFSSHLWRKICLWCYSTFATVPSSREGQLWQTVKKIKDFHKRNLQNLNKGVRGNQLYQKLVQFSYSKHTTGSSH

SEQ ID NO: 357 - DNA, 1898 bp, Zea mays subsp. mays
  misc_feature (1)..(1898): Ceres Seq. ID no. 13623325
gggcaatgcatgcccctcttcttgcctttcgaccacaatcgcgacgctaaccacctgagtggtcgcggcgacgtagaccaagagggcttctccggcagctgggggcaccaagataggcgccttcgtgaggagcgccttcaggttcccgagggcttcctcggcctcaggggtccaagtgaagcactcggccttcctcaagaggcggtacagaggtagacctctttcgccgaggcgtgagatgaagcggctcagagccgcgaggcatcccatgaccctctgtacgcctttcaaatccttgatgggccccatgctggtgatggctgcgatcttctccgggttggcttcgatgccccgctcggagacaatgaaccccaagagcatgcctcatggcaccccgaagacacacttctcgggattgagcttgacgcctttcgccttgagacattggaatgtcacttcaaggtcagaaaggaggtcggaggctttcctcgtcttgactacgatgtcatcgacgtaggcctcgaccgtgcggccgatgtgttcaccgaacacatggttcatgcaccgctggtacgtcgcacccgcattccttaaaccgaacggcatggtgacatagcagtacatgccgaagggtgtgatgaaagaagtcgcgagctggtcggactctttcatcctgatttggtgatatcctgagtaggcatcgaggaaagacagtgttcgcacccaacagtggaatctatgatttgatcgatgcgaggcagagggtagggaaccttcggacatgccttgtttagaccagtgtagtctacacacatccgccatttcccccctttctttctcacaagcacagggttggcaagccattcgggatggaatacctctttgatgaaccctgccgccattagcttgtggatctcctcgcctatggctctgcgcttctcctcgtcgaatcggcgcagaggctgcttgacgggtcgggctccggctcggatgtccagcaagtgctcggcgacatccctcggtatgccgggcatgtccgagggactccacgcgaagacgtcggcgttcgcgcggagaaagtcgacgagcactgcttcctatttgggatcgagcccggagccgatccggatctgcttggaggcgtcgccgctgaggtcgagggggacagacttaaccgtctccgctggctcaaagttgccggcatgacgcttcacgtctagcacctctttagagaggctctccaggtcggcgatgagggcctcggactcggcgagggcctcagcgtactccacgcactccacgtcgcattcgaacgcgtgtttgtacgtggggccgacggtgatgaccccgttggggcccgacatcttgagcttcaggtaggtgtagttggggacggccatgaacttcgcgtagcatggtcttcccagtaccgcatggtaggttcctcggaacccgaccatctcgaacttcagggtctcccttcggaagttggagggtgttctgaagcagacgggaaggtcgagttgtccgaggggctagacgcgcttcccgggaatgatcccatggaagggcgcagcgcctccccggacggaggatagatcgacacgcaggagcccgagggtctcggcgtagatgatgttgaggctgctgcctccgtccatgaggactttggtgagcctgacgtcgccgatgacggggtcgacgacgagcgggtatttccccgggctcgacacatggtcggggtggtcggctcggtcgaaagtgatgggcttgtcggaccagtctagatagactggcgccgccaccttcaccgagcaaacctcccggcgctcttgcttgcggtgccgagccgaggcgttcgctgcttgcccaccgtagatcatgaagcaatcgcggac

SEQ ID NO: 358 - protein, 106 aa, Zea mays subsp. mays
  peptide (1)..(106): Ceres Seq. ID no. 13623326
MNPAAISLWISSPMALRFSSSNRRRGCLTGRAPARMSSKCSATSLGMPGMSEGLHAKTSAFARRKSTSTASYLGSSPEPIRICLEASPLRSRGTDLTVSAGSKLPA

SEQ ID NO: 359 - protein, 93 aa, Zea mays subsp. mays
  peptide (1)..(93): Ceres Seq. ID no. 13623327
MALRFSSSNRRRGCLTGRAPARMSSKCSATSLGMPGMSEGLHAKTSAFARRKSTSTASYLGSSPEPIRICLEASPLRSRGTDLTVSAGSKLPA

SEQ ID NO: 360 - protein, 92 aa, Zea mays subsp. mays
  peptide (1)..(92): Ceres Seq. ID no. 13623328
MKRLRAARHPMTLCTPFKSLMGPMLVMAAIFSGLASMPRSETMNPKSMPHGTPKTHFSGLSLTPFALRHWNVTSRSERRSEAFLVLTTMSST

SEQ ID NO: 361 - protein, 68 aa, Zea mays subsp. mays
  peptide (1)..(68): Ceres Seq. ID no. 13623329
MPLFLPFDHNRDANHLSGRGDVDQEGFSGSWGHQDRRLREERLQVPEGFLGLRGPSEALGLPQEAVQR

SEQ ID NO: 362 - DNA, 1226 bp, Zea mays subsp. mays
  misc_feature (1)..(1226): Ceres Seq. ID no. 12636782
ggaatctaaaatttacaaacttaagcacacactacaagccgggttagcgttagaattaaatccgagtccgaaagagagggaaaacaagtcaaccaagaaataaagcggatgaacatggtgatttgttttaccgaggttcggttccaaagaacctagtccccgttgaggtggtcacaaagaccaggtctccttcaaccctttccctctctcaaacgtcacttagactgagtgagctttctccttaatcaaacgggtcacttagaccccgcaaggaccaccacacactttgtgtctcttgctttgattacaagtcacttgagaataagaatgggaaggaagaaagcacgaatgcaaaagccaagcaacaagagcgacaaataacacacaaatcactctctctcaagtcgctaatcactaatgatcacttgtctcaattgtggaacttggagagtttgaaagctttgattgtgtcttggaatggattgctagctcttgtattgaatgtgaaaggttggaatgcttgggtgaagtgaatggaggtggttggggttgtatttatagcccccaaccacttcctagccattgctccatttctgccaactgcggacggtccacgcccctggtccggatggtccgcccctgcacatcaacgactacaatcgcaatggtcagcagtaacggctatatcaacggctactatgcattaaatgtgtcgtcagatgtcagataaaggtagtcgcggacggtccggtcgtgcaccccggacggtccgtgaggacgctataattcattttaccgaacccgtcacctttgggtttttcggttctgcgccgatcgaatggtccgtgcctgaggccggacggtccgcgcttggtctcggacggtgcttgcttttccatcgaacggtccgtagtgtagacttgtgtttttgcattggttctgtccgaggctcaccctagtgtcgcggacggtccgccgcaagggcccggacggtccgcgcttaggtgattttccaaaaagcttctcctgtccggaataatctacgacattctggacagtcaatttagaatagttgtagatgaacttatgcacctgtggaatgatcaactagacaaactggttagtccatatgtttataatggtggtcaaacaccaaaatcgattataggaaatgttgacactatttccctttcagttatccaacgaaccagtccttacggagaggt

SEQ ID NO: 363 - protein, 83 aa, Zea mays subsp. mays
  peptide (1)..(83): Ceres Seq. ID no. 12636783
MCRQMSDKGSRGRSGRAPRTVREDAIIHFTEPVTFGFFGSAPIEWSVPEAGRSALGLGRCLLFHRTVRSVDLCFCIGSVRGSP

SEQ ID NO: 364 - protein, 79 aa, Zea mays subsp. mays
  peptide (1)..(79): Ceres Seq. ID no. 12636784
MSDKGSRGRSGRAPRTVREDAIIHFTEPVTFGFFGSAPIEWSVPEAGRSALGLGRCLLFHRTVRSVDLCFCIGSVRGSP

SEQ ID NO: 365 - protein, 57 aa, Zea mays subsp. mays
  peptide (1)..(57): Ceres Seq. ID no. 12636785
MEVVGVVFIAPNHFLAIAPFLPTADGPRPWSGWSAPAHQRLQSQWSAVTAISTATMH

SEQ ID NO: 366 - DNA, 684 bp, Zea mays subsp. mays
  misc_feature (1)..(684): Ceres Seq. ID no. 12637435
atttatggagctgaccttgctgcttttctgcaaacacttgccaagataattgaggaccccaaggatcttactttctgaatgtcccaactgattgtttttccctgaggcaatcaaaaccgggtgcttcttacctatcagtagatgtgtagtttgtcttctgtttatgtgattaggtgttttaagctgtcaccaatgtcagcatcaggtgtatctaccatttttaccggaggtttcatggatagtggattttgttgagctcctcaatgtaccgtatccttgtgagatacaaagaatgaaatgtaccttgtaccaccctgtggttgatttcgcatgcctgtcaaacaaaaatatggctgatgctcttgcaagggtgccgacgcgatatcttcagggagatctgtaaaaacgggtcacatatctgtttgttttacatgtgaaggagacggatcagggcctgttcgtttccgtaggattacaccaagaattattcctgttgatcaaaacttatataaattagagaagcaatccgggctggaacagttccggccttctattccgtgtcaaccgaacaggccctcatggtttctccaaaccactccaatgatgccaaggctgtagagtatcggatgtcctgacctgacctgctgttttacattcctgggatagctcaagatagcgtcctcc

SEQ ID NO: 367 - protein, 37 aa, Zea mays subsp. mays
  peptide (1)..(37): Ceres Seq. ID no. 12637436
MCSLSSVYVIRCFKLSPMSASGVSTIFTGGFMDSGFC

SEQ ID NO: 368 - protein, 36 aa, Zea mays subsp. mays
  peptide (1)..(36): Ceres Seq. ID no. 12637437
MKCTLYHPVVDFACLSNKNMADALARVPTRYLQGDL

SEQ ID NO: 369 - DNA, 658 bp, Zea mays subsp. mays
  misc_feature (1)..(658): Ceres Seq. ID no. 12638082
atgaagttcccctctgcccttgagtccaacctgtgttcatcactagagggacgtaactcttgagttcaagtcggtgttaacccactccacagccacccaacatactgtattccgtgcatcgagtgccagtggcgaccatagcagcagttcacaccctcaccatggccatgattcctcggaggttgtctcggccttgtgttgcccgttccctactcctcgcagaactcctaccagaaggagtgaagattcaagctgaagtggtgactgaagaggaatctactccagtggctgctgatcaagtggaggagccatctaattggggtttaatagagggatcgagtacctcttcactgcaataagcatatacttgagagtcatttttccttagtcaggtaagacttgcgaaagtacactccgtactcagggttttcgaacccatgttgttgtaggtgatgatgagtactctaggtgttcctatggttggagggcgtttccagttctgaaggaagattagttagtcttgtgtataagctttggagggttcctaccttcctgctaatgtaataagttatgcactttgagtatatcaggacttgtaataaatgtaactcttcctatgtaataaccttcagttttagaaatgaaaagaatattttgt

SEQ ID NO: 370 - protein, 65 aa, Zea mays subsp. mays
  peptide (1)..(65): Ceres Seq. ID no. 12638083
MAMIPRRLSRPCVARSLLLAELLPEGVKIQAEVVTEEESTPVAADQVEEPSNWGLIEGSSTSSLQ

SEQ ID NO: 371 - protein, 63 aa, Zea mays subsp. mays
  peptide (1)..(63): Ceres Seq. ID no. 12638084
MIPRRLSRPCVARSLLLAELLPEGVKIQAEVVTEEESTPVAADQVEEPSNWGLIEGSSTSSLQ

SEQ ID NO: 372 - DNA, 1195 bp, Zea mays subsp. mays
  misc_feature (1)..(1195): Ceres Seq. ID no. 12636774
gaggtcgacggtatcgataagcttttttttttttttttttgttgatcatctccttttggattaaattgctgctgaaattgcttaacttgataacaaaaggtacaaggtttagatcttcaaggtctcaatcattcttattcctttagagaagtgttctttgaccccctccaagaagtccgcctctgtaatcctcctgtaccttgccggacgcttctcatccagtaaaccggccgccggctgaagcacattgtcgcgttccaccgcatagagcatggccaacgagatcctctccttctctgcattcgtcacaaccctgtgcactgggctcttgaatatcccgttgctcattatctccaaggagtctcccaggttgatgaccagagtgtgaggaacgaacggaacattgaaccacgtgttctctctctgaacctgcagtccaccgacctcacgatcgaccagaagaaccgtgagaacggggccgtcagagtgagccttgatgcccaagacgagctccggcctcggacaaggagggtagtagttgaatctggcataggcttgagggctagcaccaagctgcttgatgaactcttcctcatcaagctccaagatcttggccatcgctcgcaagattctgtccctcatactcttggtttttgatgcgtactcgtgcagaagatccctgaaggattcagggtatttgggccactgagcaaggcttctttcgtcttcaggctccaccttcagctgcagacggtcgttccagtcaaggatatgatcctgcgccaccactgggtcactgccgtacccttcgagctggaagcgcgtgccttccctcaggttgctgtacttctgcctctcctggagcggctggtggaagaactcccgtgacgcctccatcagatcctccattagagacgcgtctatgccgtggttggtagccagaaaaagcccccaggtctgtagcgccgagcggagcttggctgcctcgtcggcggtcgacagcttgttgaggtcgacgatagggaggggatccggcatgtcagccgcgagcatcaggctgccagggcggtgctcctcccgctgcacgaaccggctcggcggctcgtccacgagggcggccagatctttcactggagtcggcaccgtccatgattcaacagccatcggtgcttgcttattactaccacacacgaag

SEQ ID NO: 373 - protein, 91 aa, Zea mays subsp. mays
  peptide (1)..(91): Ceres Seq. ID no. 12636775
MPWLVARKSPQVCSAERSLAASSAVDSLLRSTIGRGSGMSAASIRLPGRCSSRCTNRLGGSSTRAARSFTGVGTVHDSTAIGACLLLPHTK

SEQ ID NO: 374 - protein, 53 aa, Zea mays subsp. mays
  peptide (1)..(53): Ceres Seq. ID no. 12636776
MSAASIRLPGRCSSRCTNRLGGSSTRAARSFTGVGTVHDSTAIGACLLLPHTK

SEQ ID NO: 375 - DNA, 920 bp, Zea mays subsp. mays
  misc_feature (1)..(920): Ceres Seq. ID no. 15225596
atgcaccacgagcgcctccgccgctccaacgctccaacgcttgagcgcctccaacgccactccaacgccacgagcgcctccgccgctccaccgaacaactccaacgccactccagctcttgcagcagtagaactctactgcagccagctacgacaccctgcgcctgccgcactaggtacatttgattctggtttctgccgcacaagatccgctacctcttggacccggacatctacaccgacggcaggatctccgtgcagggcatcgacgccgtgctcttcgcgccggacgacgccaaggccacgcagaccgtcgacccgaacaggaagcctcctaccatcgtcacccacaagaagaagatcaagctccggcgagtattggccaacgtgaaaacatggaggtgaagtgaagcaagtggtagttgagcatatgctggtggttggttgtcttcatgaacatctctttgatggctgataccattcctgggactgcaagccaacactgtcctttaacccatgacccatgagcaacaatttcttcttaacaacagagcatgatgttagagaaatttggcttcaagcgcaaaattaggttgcttcgtgggagtgatgcatggcctgaacaaatgatatgagcaaatttgacaactgcagttctgttatggtgaatggtgattgtagttcagtttcagctctaacctatgaaaaattgaatggcagttgcactaatctgttggtggaatgattttcccagtaatttcctggacaagcagatcactgagaaccatctaccttatgagaaatgatgccttgtatggttcagtatagttcttgtattgctggtttaaattaattcttgtatggcagttgcactaaactgaatggcagttgcactttgagatattcttctattgttggttt

SEQ ID NO: 376 - protein, 129 aa, Zea mays subsp. mays
  peptide (1)..(129): Ceres Seq. ID no. 15225597
MHHERLRRSNAPTLERLQRHSNATSASAAPPNNSNATPALAAVELYCSQLRHPAPAALGTFDSGFCRTRSATSWTRTSTPTAGSPCRASTPCSSRRTTPRPRRPSTRTGSLLPSSPTRRRSSSGEYWPT

SEQ ID NO: 377 - DNA, 682 bp, Zea mays subsp. mays
  misc_feature (1)..(682): Ceres Seq. ID no. 13600048
aggtacttgttgttgagcgcggagagaggagaggcgcagagcatcgacgatggcgagcggcagcatgaagagggagatcagcgagacccacgacaccctccgcttcggcctcaatgccggcgtcaaggccgacctcgcgccgccgcacccgctccagtccagcatccaatcggaggccaagttctgggcggacaagaagaagtttgggacagaggccatctacggatccgccttgaacatccgcaagggatctcgatgcccaaatcctctcaaggttccaaaggccccctggtgctttgccatcatctctgcttggatatgaggcactgacaggttccctagatgattttggttttgaagattatcttaacatgcctcaagattttgaaggtttccgtcaacctgacatgcaccacggaatggaggttcgccttggtttgtccaagggacctatctgccctagcttcagttgaggcagtgaatgtagttttgcggttctgccgcacgttgatgcaccttagtccagtacactcgggtcaataaaagaccccattaggatggtgaaacggtgaaaactgatggcttgcatatgttcagagtgttatgttgtaatgaacagtgttatgttgtaatgaacgcatatatcgcatgattgatagcttggctagctgtgcgcaggctt

SEQ ID NO: 378 - protein, 109 aa, Zea mays subsp. mays
  peptide (1)..(109): Ceres Seq. ID no. 13600049
RYLLLSAERGEAQSIDDGERQHEEGDQRDPRHPPLRPQCRRQGRPRAAAPAPVQHPIGGQVLGGQEEVWDRGHLRIRLEHPQGISMPKSSQGSKGPLVLCHHLCLDMRH

SEQ ID NO: 379 - protein, 90 aa, Zea mays subsp. mays
  peptide (1)..(90): Ceres Seq. ID no. 13600050
MASGSMKREISETHDTLRFGLNAGVKADLAPPHPLQSSIQSEAKFWADKKKFGTEAIYGSALNIRKGSRCPNPLKVPKAPWCFAIISAWI

SEQ ID NO: 380 - protein, 85 aa, Zea mays subsp. mays
  peptide (1)..(85): Ceres Seq. ID no. 13600051
MKREISETHDTLRFGLNAGVKADLAPPHPLQSSIQSEAKFWADKKKFGTEAIYGSALNIRKGSRCPNPLKVPKAPWCFAIISAWI

SEQ ID NO: 381 - DNA, 937 bp, Zea mays subsp. mays
  misc_feature (1)..(937): Ceres Seq. ID no. 13623756
ccgaaagtttcgaacaaaagtccacaaatccccttcgccgtctccggcgagccccacccctcatcgccgccgggccaaagagacagtgagaggggnggatggatcagtccatcagagccgcatgcgagttcctctcgtcggtgctaaaccacgctgagtcctcgtcccgcgagcttcgccgacgccgtctcccaacgccccgtccacctcgagatggcgaggacctcgttcctgcagaagctggagcacagggtggagggcgtcggccgccgacttgcagcacatcgagtccatcgccctcgacaccgtctccttcgaggagctcctcggccactgcggcgaggcgctcaaagtctacgcgcgccacgccgacgccctccagtcgcacctcgcttcctttggctacgagcccccggacgcacaacaccccgtgatcgatgtggatgtggaagatggagatgtcgggaaggttggggaccctggagatagatgcctcagcgtgtcgcgttcagtgctcaggtcgggtaagcggcggtttgatggccacagcgatgcgatgtatcctctttggtttgatttagttcggaaagcaagattggcattgcctcggtagaacatctcaactgattgtatcagcagatgttgcatcttcaggtgccatggatccaattggaggcactagtattaggaaatgatgcacttgtaagaatgcctacaggtttgaggacctatttattctggtacgtttatgctaagcaggagctgtatataggagatgcatcgaagctgaaaccctgagacacatagttttggtcggaactgcactgtgcttttcttgactgccgattagatttgaagagtcactgaaggatcttgggttttcagatgcttgtctagccactctttcttctgaaggcgcacattatggtgagagccc

SEQ ID NO: 382 - protein, 111 aa, Zea mays subsp. mays
  peptide (1)..(111): Ceres Seq. ID no. 13623757
MDQSIRAACEFLSSVLNHAESSSRELRRRRLPTPRPPRDGEDLVPAEAGAQGGGRRPPTCSTSSPSPSTPSPSRSSSATAARRSKSTRATPTPSSRTSLPLATSPRTHNTP

SEQ ID NO: 383 - protein, 91 aa, Zea mays subsp. mays
  peptide (1)..(91): Ceres Seq. ID no. 13623758
MARTSFLQKLEHRVEGVGRRLAAHRVHRPRHRLLRGAPRPLRRGAQSLRAPRRRPPVAPRFLWLRAPGRTTPRDRCGCGRWRCREGWGPWR

SEQ ID NO: 384 - DNA, 656 bp, Zea mays subsp. mays
  misc_feature (1)..(656): Ceres Seq. ID no. 12637709
accagccggtgttggtttcagcttgtattcccactctgtcgcacagcgtcgcccgtcgccgctgagatcctaggaagaaatggagctctctcgcaagctcttcacggccgtcctcctcgtcatgctgctgctgctgtccgcaggtacgttggtgcggccggctagccgtcttacatgtcttctgtgctgtggactcatcagccgctggcggccggcggcagcctactgatgatgatctgtctgagatgctgctgcgtgctgctgcagaggtcgggccggtggcggtggcggaggcgcgcacgtgccactctcagagccacaggttccggggcccctgcctctgccggtgcaaatgtgccaacgtgtgcagggccgaggggttctccggcggcaggtgccgcggcttccgccgccgctgtttttgcaccacgcactgccactgattcgctctcccaccgcccgcctggcgtctccgtcgatcgcgtcgcgaccactccatggctccacgcatgaatatcaagggtgtgcgcggtttgtgttgtgataccaaattgtatcctcgtcgtgtgttgagcagcggcgtgctgttgtacgtacgtctgcctctgttccacgtttcgggattttccatagcaaatacacgcgtcgatagagat

SEQ ID NO: 385 - protein, 112 aa, Zea mays subsp. mays
  peptide (1)..(112): Ceres Seq. ID no. 12637710
MSSVLWTHQPLAAGGSLLMMICLRCCCVLLQRSGRWRWRRRARATLRATGSGAPASAGANVPTCAGPRGSPAAGAAASAAAVFAPRTATDSLSHRPPGVSVDRVATTPWLHA

SEQ ID NO: 386 - protein, 94 aa, Zea mays subsp. mays
  peptide (1)..(94): Ceres Seq. ID no. 12637711
MMICLRCCCVLLQRSGRWRWRRRARATLRATGSGAPASAGANVPTCAGPRGSPAAGAAASAAAVFAPRTATDSLSHRPPGVSVDRVATTPWLHA

SEQ ID NO: 387 - protein, 93 aa, Zea mays subsp. mays
  peptide (1)..(93): Ceres Seq. ID no. 12637712
MICLRCCCVLLQRSGRWRWRRRARATLRATGSGAPASAGANVPTCAGPRGSPAAGAAASAAAVFAPRTATDSLSHRPPGVSVDRVATTPWLHA

SEQ ID NO: 388 - DNA, 1419 bp, Zea mays subsp. mays
  misc_feature (1)..(1419): Ceres Seq. ID no. 13600652
cccccctccagttccaactttattgtgtttaaacagtcgacggtatcgataagcttttttttttttttttttcggataataagacataaaacatccattaaaaataagtaggagtacttctcgagagaaaaaaataagtaggagtacaataaagaccaaattgataatattcttctttcaatcgtccaatttatactcctacttaataatgagatatagtaatagcaatgtgttcgcaaataactatcagctgctcatccgaaagacaaacgcatttggtcttgactcctgagttcgactaatttctctgatagacaccaaacccttagctacgctttgtgacacccacctaccagttggaggatgcaatgccatgctctatctttttatagtatgagccaaatgcatgatgcttgaacacaccagacctccgcttctccagctctgtccgtaatctctgtgcttctatttttatgttgataaaatcactctctatggcctgactctcctcaagaagctcaacttttgcacgtttctcatgctcgtatgccatcctggccctcgaaatctcctcttgtatatcatgcaacccttctcttatagcaggtatctgcttgttctcggattggatctgctccagctccctgtacaatgactgaaccttcacaaatagctctttgcacaaagcttccaactccatcttttcagaacttaggaccaacacttcttccttgataagtttaagagcatgcatatgttcctctaacttcatgcctccctggataatatccctgtattccatttcattatcaacacgaagtctaggaatggtttgtttggcaagtatatggatctcgtcttcaatgacagctaattcttgcctaaggcccaaaatatcctctagcacaagagtattattagcagcaattctacaaatctcttaacaaccaactgcaagttcgtcctggaaagggagcagaggcatgggtccaggaactcctccatctaatgaatttgaaggggaatttctatgaccattattgctccaaggttgccgagccatgtggttttctgatggtgcccaagtctttggtgcactggaaaagtttttagcatttcaacaaaaactttgtcttctcaaagcgagaaataatctctccagcctaataaatcttgaatcagagctggattacattccgaaaccgcaagaataagatacagaacgaacaagccattgtacaacatgcgtgtgggcgccaaaaatcggaatctccttcttggcgaagagaggctgaaaagctttccgaacgcgagccccaacttccttcgcacccacttccttcaccaccttgacctggccggagcggcaccccggtcactttcctctctcaagtctcaagcatgttgtctctttgctct

SEQ ID NO: 389 - protein, 58 aa, Zea mays subsp. mays
  peptide (1)..(58): Ceres Seq. ID no. 13600653
MRVGAKNRNLLLGEERLKSFPNASPNFLRTHFLHHLDLAGAAPRSLSSLKSQACCLFA

SEQ ID NO: 390 - protein, 57 aa, Zea mays subsp. mays
  peptide (1)..(57): Ceres Seq. ID no. 13600654
MPPWIISLYSISLSTRSLGMVCLASIWISSSMTANSCLRPKISSSTRVLLAAILQIS

SEQ ID NO: 391 - protein, 50 aa, Zea mays subsp. mays
  peptide (1)..(50): Ceres Seq. ID no. 13600655
MWFSDGAQVFGALEKFLAFQQKLCLLKARNNLSSLINLESELDYIPKPQE

SEQ ID NO: 392 - DNA, 568 bp, Zea mays subsp. mays
  misc_feature (1)..(568): Ceres Seq. ID no. 13600405
aacccttctgtcgtaccctctggatcgaagcctggacgacgcgaccgtgcggcggcgactcgacgcaaccagcacggcggcggcgcacagccccgacgacgactctccccactgccttctctccgttctacaatgagtatctcattgcgggatcgtattagaaagaggagggaagaagaagaagaagatgacatgatgatatttattgggaagcaaagtattggaaaaaactgcatttagttgatgatccactagaagtttaagctatgtcccactcgagtctttatacagtggtgatgtctcttgttatgctatgttcactgcatgatttttgtttttggcatgtctacaactggttcagctgttcagctgctcattgtggttgcagtcaaccataagattgttgtcttagcacctttgatatgtcttagcaaaaactcccagttcactctttgatatgtctagattgaaccagttcactctttaatatgtcttagcattgaacttgttttagattcaacaaatattcttgtcacggtgccagcaatatattaaatctacattgtgt

SEQ ID NO: 393 - protein, 79 aa, Zea mays subsp. mays
  peptide (1)..(79): Ceres Seq. ID no. 13600406
NPSVVPSGSKPGRRDRAAATRRNQHGGGAQPRRRLSPLPSLRSTMSISLRDRIRKRREEEEEDDMMIFIGKQSIGKNCI

SEQ ID NO: 394 - protein, 52 aa, Zea mays subsp. mays
  peptide (1)..(52): Ceres Seq. ID no. 13600407
PFCRTLWIEAWTTRPCGGDSTQPARRRRTAPTTTLPTAFSPFYNEYLIAGSY

SEQ ID NO: 395 - protein, 44 aa, Zea mays subsp. mays
  peptide (1)..(44): Ceres Seq. ID no. 13600408
TLLSYPLDRSLDDATVRRRLDATSTAAAHSPDDDSPHCLLSVLQ

SEQ ID NO: 396 - protein, 35 aa, Zea mays subsp. mays
  peptide (1)..(35): Ceres Seq. ID no. 13600409
MSISLRDRIRKRREEEEEDDMMIFIGKQSIGKNCI

SEQ ID NO: 397 - DNA, 1057 bp, Zea mays subsp. mays
  misc_feature (1)..(1057): Ceres Seq. ID no. 14309469
atgtttagctttatctgtctcgacggatctctcctcctctctctctccaatccaccgtcccgacgtcgtccaatccctcgatttatctctccgactcacctcctccaaaacctaaaaaccagcacttcttattttgttctgatctcttcaacctattcactcctccgcctctgaaacctccatcaccgtactcatcagccaccaccacatgtccctcaccagcagcgtgtcataccctctctgtgctaagcatctctttgctaactcgcacgctcatcctttgttttctctctctgaccgtctttaccttttgattcttccttcttctcctatcaaacagacagatcttccattagtctcaagggtaatggctttactctactgttagattgattgttctgataaagttgattcctttctctgtagagagtagtgtatctgtttactttctcccatgttcattggttcaacagtttccttccgagatgaagacatcaaatgagaaaggaaggtgggaaagaggaaggcaccagctgagaagcctagcaagcaggagaagaaggctaagaaggaccttaacaaaccaaagagagctcctagtgccttctttgtcttcctttacaataaactctaaggaatctggtcgacgaagaaacatgcgccgatgcttacatagcacaacaatagaactagtctcttcatgccaaaaatgtatggggttgttggtgtggtcacttgatgtttatgtcctaacaaatgagaccaatgaaagtcaaaaagatcgtttaagtcaaaaagtcaaaaagatcggttaagtcgatgttacttcatgtctatttcgttactgatatgaagttgtagcttcttctgtttgttcgtcatgtcttctcgtgtggtcttgtgaaatcacatgttttgtattgttgttgtgttgttgtgtagtcttgtgtcacagactagagtgtggttgattcacatgttttgtattgttgttgtgttgttctatatatatgtgtttattcagattggtcattttatagacagtcattcactcatc

SEQ ID NO: 398 - protein, 109 aa, Zea mays subsp. mays
  peptide (1)..(109): Ceres Seq. ID no. 14309470
MKTSNEKGRWERGRHQLRSLASRRRRLRRTLTNQRELLVPSLSSFTINSKESGRRRNMRRCLHSTTIELVSSCQKCMGLLVWSLDVYVLTNETNESQKDRLSQKVKKIG

SEQ ID NO: 399 - protein, 59 aa, Zea mays subsp. mays
  peptide (1)..(59): Ceres Seq. ID no. 14309471
MSLTSSVSYPLCAKHLFANSHAHPLFSLSDRLYLLILPSSPIKQTDLPLVSRVMALLYC

SEQ ID NO: 400 - protein, 57 aa, Zea mays subsp. mays
  peptide (1)..(57): Ceres Seq. ID no. 14309472
MFSFICLDGSLLLSLSNPPSRRRPIPRFISPTHLLQNLKTSTSYFVLISSTYSLLRL

SEQ ID NO: 401 - DNA, 905 bp, Zea mays subsp. mays
  misc_feature (1)..(905): Ceres Seq. ID no. 15178809
acgtcgtttaagggtttagggttgtgtcgtctcctccaatacgagatctactcacaaactatggtttcaatagcggtgtttcatattcttctttaacactccgaaaaactttcagttacagattcatcttattaatgtccttcttaaatccatcacccacccacgatctactttcaatgcgagcttcactcaagcaaggcggtggaactgcgactataaaaaggcaaaagacaaggttacagatatcagaactggtgcaactaaacttaaagaagctagcgaagccgacttccatggagcaactactctaattaagaagattgtgaatgctaactggccaaagaattccaatcagttctcaaagagtttcagaaaggtcagagacttgcagctgaaagagaaattacatatactcttgtggtcactaaagatatacctaccagttataatacacgggaactggatattgaatctttaaggacctcccaagagcaagctcttcttctacaataaaaaatataatatcagctttaacattgataactcacatgccgcaactgcacaagccactgctcaactcagaaaagcatctaaaactcaaagcaaattcatccttggtactaggagagactctcttctcaaactttttttaaattttctgatcccgttttttagcagttaaagctaagtttcatatatatgttttacttttgttgcaggcatgcctttttattcacatatttgggactgtcatcatctttatcctggtctgagcagcatcaaccgaagtagagtcgaggaaactatacaagttaccacattaaagatatatatatattgtacagattctttgtactgtatcttccttcatcccttgcaatcgaattgaatcttagcatttatgt

SEQ ID NO: 402 - protein, 58 aa, Zea mays subsp. mays
  peptide (1)..(58): Ceres Seq. ID no. 15178810
MSFLNPSPTHDLLSMRASLKQGGGTATIKRQKTRLQISELVQLNLKKLAKPTSMEQLL

SEQ ID NO: 403 - protein, 55 aa, Zea mays subsp. mays
  peptide (1)..(55): Ceres Seq. ID no. 15178811
MPFYSHIWDCHHLYPGLSSINRSRVEETIQVTTLKIYIYCTDSLYCIFLHPLQSN

SEQ ID NO: 404 - protein, 44 aa, Zea mays subsp. mays
  peptide (1)..(44): Ceres Seq. ID no. 15178812
MRASLKQGGGTATIKRQKTRLQISELVQLNLKKLAKPTSMEQLL

SEQ ID NO: 405 - DNA, 767 bp, Zea mays subsp. mays
  misc_feature (1)..(767): Ceres Seq. ID no. 15178816
tcagtaatgcataacatacacaactgaagtcagattttggtccgaataagtctgatgatgactcaggaagaagcagccttggcagcctcaagtctggaactaacagcctcccaagacacaagattgttcatgaatgtctttatgtaatccggtctgcggttctggaagtcgagatagtatgcatgctcccagacatcaatggtaagcaatgggaaagagccaagcacaagggggttcacagcatttggagttttcactactttgagtttgttgtctgcgtaagcaagccaggcccagccagctccaaactgagtggcggcagcagcattgaactcatcatagaacttctcataagaagtgaaatctctttcaagcagagcaagaagctctcctgatggttttcctccaccaccgggtttcattgattcccagaagaactcgtggttccacgcctgagcagcgttgttgaaaggagggaggaggtcgccgttgttgtaagtgttttggatgatatgctccaagggcttgccttcgagctcggatccaagaacctgtttcttgaggttgtccacataagccctgtgatgttttccccagtgaaactccagagtttgtttgctcatatgcggctccaaagcatccagagggtatggaggtggcttgaggacgtagtttgcggttacagcagctgaagcagccatttctcttttgggaatgaagctctggtttcaaggcaagtgaggagaccacacgccagaggtatctgt

SEQ ID NO: 406 - protein, 70 aa, Zea mays subsp. mays
  peptide (1)..(70): Ceres Seq. ID no. 15178817
MLPDINGKQWERAKHKGVHSIWSFHYFEFVVCVSKPGPASSKLSGGSSIELIIELLIRSEISFKQSKKLS

SEQ ID NO: 407 - protein, 59 aa, Zea mays subsp. mays
  peptide (1)..(59): Ceres Seq. ID no. 15178818
MLQGLAFELGSKNLFLEVVHISPVMFSPVKLQSLFAHMRLQSIQRVWRWLEDVVCGYSS

SEQ ID NO: 408 - protein, 35 aa, Zea mays subsp. mays
  peptide (1)..(35): Ceres Seq. ID no. 15178819
MFSPVKLQSLFAHMRLQSIQRVWRWLEDVVCGYSS

SEQ ID NO: 409 - DNA, 726 bp, Zea mays subsp. mays
  misc_feature (1)..(726): Ceres Seq. ID no. 15174447
acaaaactttcaactaccaatacgcaaagtattaaccttttcaggaccaacagcatcgaaaacgtaaacctgaccacggaacgagatcgttagctcattagctccttccatcggccgggaaccttgcaattcagagccctcggatcggtgaggaaccaagtgagagccatcggggatcaaatcggaggcagcgtagatggaatcgggatgagggatatcgtccatatcgtcgtaaggaatgtgaccggcggaggttgcggaggtagagacatggtcttcgccaacggtggcggagctgctaccgatctgattagggttaatctcgggttgggtatggtgaccaaacatcgcaagctgcctaaaagagaagagcttttcacattgattggaagcgagagatgggagtggagaataaaaccataaccctaattgcaaaagagagagagagagagaaaattggagaaaagagtagtacaaagagagatggtgatcgacgcgtgtggaggagagggattggccgtcgtggatcggtgactttagaggtaaataaatcgcagcaacttctgagatcaccctacgacttcactccactggacttttcacctgttggctattgggccgtttaattatgtttccaaagcccccatcaaggctcactttttttttgttatagttttaatatgttttacatttatatttgcattattaagttttaaatattttaac

SEQ ID NO: 410 - protein, 75 aa, Zea mays subsp. mays
  peptide (1)..(75): Ceres Seq. ID no. 15174448
MGVENKTITLIAKEREREKIGEKSSTKRDGDRRVWRRGIGRRGSVTLEVNKSQQLLRSPYDFTPLDFSPVGYWAV

SEQ ID NO: 411 - protein, 71 aa, Zea mays subsp. mays
  peptide (1)..(71): Ceres Seq. ID no. 15174449
MRDIVHIVVRNVTGGGCGGRDMVFANGGGAATDLIRVNLGLGMVTKHRKLPKREELFTLIGSERWEWRIKP

SEQ ID NO: 412 - protein, 50 aa, Zea mays subsp. mays
  peptide (1)..(50): Ceres Seq. ID no. 15174450
MVFANGGGAATDLIRVNLGLGMVTKHRKLPKREELFTLIGSERWEWRIKP

SEQ ID NO: 413 - DNA, 1104 bp, Zea mays subsp. mays
  misc_feature (1)..(1104): Ceres Seq. ID no. 13622227
cgaggtcgacggtatcgatattttttttttttttttttggctacactcatacccacctcaatacatatattatcgatttatagtgggttaggataagaaaataactaattttcatcaaaatcaaccccaccacatggattgtggtggcacaagagcacatgtacacaccaatttaaatctcccagcatccccgagcacacaaatccgctagtaaaacatactgtgatcaaaactgcaaccgttacacggtacaagcaaaaccaatctaatttaatacctttccgccaacctagctgatacagcccttagcttagaatacactttgccagcaggtgaacccaagatgagactgcaaagcgaatcccgcgcgaccttgatgttaacaaaggatccaagtatatggatctttgtatcagcgataacgatgcgggtcctggtagagttctcaatagcgtacttggtcttgcctcctttccctgataggcggccgatagcacgcgacagatgctcccctcgcagggtcttcacgtccttgatttcgaaggagtccacatacaggtcatcaagacgcagcaaggcgacggcatcagcaatgtcgaacccaagcataaaagcatgcacaaagtccgcacatttctgaaggttgctcacgtccggtgtgtcttgccttgtctttagctccaccctccttgccttgagattcatgcgtatatcgatcttcatatgctcgtatacgggtgtgtagatttccatccagcatcgcttgagcggcgcgaaccggtgctgcgggacgggcactttccggaactggggcctcccgccgctcatctcattcggcgtcagagcatcgaaccgcggcttgtccacggcgcccggccccgtcgcgtggtccaccgccatctccgaggaggaaacccccgtcgcggacgccatcgagtgcgttttcagcaggggcgaatcttgtggcgctttttgcgtggcgtagggcggcggcggcggcggtagagagtgagagacggcgcagatagagagggtgagggcacggcggttggcactgggtgtaaggcgtcgagacgaggcggaggcttttttgattaggatgtt

SEQ ID NO: 414 - protein, 98 aa, Zea mays subsp. mays
  peptide (1)..(98): Ceres Seq. ID no. 13622228
MRLQSESRATLMLTKDPSIWIFVSAITMRVLVEFSIAYLVLPPFPDRRPIARDRCSPRRVFTSLISKESTYRSSRRSKATASAMSNPSIKACTKSAHF

SEQ ID NO: 415 - protein, 93 aa, Zea mays subsp. mays
  peptide (1)..(93): Ceres Seq. ID no. 13622229
MLVYGCVDFHPASLERREPVLRDGHFPELGPPAAHLIRRQSIEPRLVHGARPRRVVHRHLRGGNPRRGRHRVRFQQGRILWRFLRGVGRRRRR

SEQ ID NO: 416 - protein, 87 aa, Zea mays subsp. mays
  peptide (1)..(87): Ceres Seq. ID no. 13622230
MLTKDPSIWIFVSAITMRVLVEFSIAYLVLPPFPDRRPIARDRCSPRRVFTSLISKESTYRSSRRSKATASAMSNPSIKACTKSAHF

SEQ ID NO: 417 - protein, 57 aa, Zea mays subsp. mays
  peptide (1)..(57): Ceres Seq. ID no. 13622231
MLPSQGLHVLDFEGVHIQVIKTQQGDGISNVEPKHKSMHKVRTFLKVAHVRCVLPCL

SEQ ID NO: 418 - DNA, 959 bp, Zea mays subsp. mays
  misc_feature (1)..(959): Ceres Seq. ID no. 14305533
acctatatttgttaagtttcaggcagagagaaagatagaggagcaaacagcaactccagaagatgagtctccctcgccgccgccaccttgtcctgctcgcctgcctcctggtcttcctcgtcttcgccgcgtccgcgtcgacgagttccgccgaggtggccccgaagcgtggcggtggacttcgtgcggcggtcgtgccggtcgacggagtacccgcgcgtgtgcgagagcacgctggtcccctgcgcggctggcgtggggcgcagcccgcgcctgctggcgcgagcggcgctggtggttggcgccgaccgcgcgcgcaactgctcctcctacatccgcggcggcggcggcggcgcgatgaaggactgcgcggagctggcgcgcgacgcggaggagcggctgcggcagtccgcggcagagatggagcggatgggccgtgccggcacaccgcgcttcgcttgggccctcagcaacgtccagacctgggccagcgccgcgctcaccgacacctccacctgcctcgactccctcgcccagcagtcccgcggtggcaaggacagcgacgacgccgtcagggtgaagaggagggtggtggccgtcgcgcaggccaccagcaacgcgctcgggctcgtcaacaggctccagccggcgccgcaccggcggcgtctcctgtgactcttgtagcagcagctagccacggaaatctttgatggttcctcgttctcatccatgtcgacatcatccgtcccctgcatctccttctccaattgccatgtatgcgtgtatgtatgggtatggtatgcgtgtatgtatggactacggatcgatcagctttctcgattgcgtggttgtcgttgtctatctgtagtaactctgcagctgggatcactcaattcccgctagtggttgttcaggattatgctcaagtttatgcgtagtaaatagcaaaatctttgatt

SEQ ID NO: 419 - protein, 215 aa, Zea mays subsp. mays
  peptide (1)..(215): Ceres Seq. ID no. 14305534
MSLPRRRHLVLLACLLVFLVFAASASTSSAEVAPKRGGGLRAAVVPVDGVPARVREHAGPLRGWRGAQPAPAGASGAGGWRRPRAQLLLLHPRRRRRRDEGLRGAGARRGGAAAAVRGRDGADGPCRHTALRLGPQQRPDLGQRRAHRHLHLPRLPRPAVPRWQGQRRRRQGEEEGGGRRAGHQQRARARQQAPAGAAPAASPVTLVAAASHGNL

SEQ ID NO: 420 - protein, 119 aa, Zea mays subsp. mays
  peptide (1)..(119): Ceres Seq. ID no. 14305535
PIFVKFQAERKIEEQTATPEDESPSPPPPCPARLPPGLPRLRRVRVDEFRRGGPEAWRWTSCGGRAGRRSTRACARARWSPARLAWGAARACWRERRWWLAPTARATAPPTSAAAAAAR

SEQ ID NO: 421 - DNA, 720 bp, Zea mays subsp. mays
  misc_feature (1)..(720): Ceres Seq. ID no. 15226033
acgagaccattrcctagamcatcctaatcsaaaacttccatcgccggccctttttccgtgcacaaaggcgtgtgtgtgcgtatatatatacacatacacacactgctccatgccaccgttgtagcaagttctcccatctagcaacaccataatcgcaggagaatcgctgctccaccagactcggtttcctcttgcttcagcgtcaaaatcatggccgcagctggcaagtcgtcgtcggccatggaggagacggttgcggcgacggccgccgcgcgggggcggcgcggcggccaccgtcgccctcgtcatcctytacctcgtcggctgcagcgcctacaagaacgcgcaggccgccgccatcttcggacgccgcaagtattagctagctagctgccatgttagtttttttttgcgcttttttttctttattgtcatgtgggttgtggattatggattgcgtatgtgtgtcccccctggtggagagaagcatttgtagcggtggcgtggtgtgtgtttccggacttggttcatcatggtagtgtgatacatgtgtaagattagttactttaattactaattgtgctgttttccaaaamaaaaaaaaaaaaaaaaaaaaaaaaaaaaaaaaaaaaaaaaaaaaaaaaaaaaaaaaaaaaaaaaaaamggaaaaaaaaaaaaaaaaaggtttatcgawaccgccaacctcaagggggggcccgg

SEQ ID NO: 422 - protein, 59 aa, Zea mays subsp. mays
  peptide (1)..(59): Ceres Seq. ID no. 15226034
  misc_feature (35)..(35): Xaa is any aa, unknown or other
MAAAGKSSSAMEETVAATAAARGRRGGHRRPRHPXPRRLQRLQERAGRRHLRTPQVLAS

SEQ ID NO: 423 - protein, 49 aa, Zea mays subsp. mays
  peptide (1)..(49): Ceres Seq. ID no. 15226035
  misc_feature (25)..(25): Xaa is any aa, unknown or other
MEETVAATAAARGRRGGHRRPRHPXPRRLQRLQERAGRRHLRTPQVLAS

SEQ ID NO: 424 - protein, 47 aa, Zea mays subsp. mays
  peptide (1)..(47): Ceres Seq. ID no. 15226036
MLVFFCAFFSLLSCGLWIMDCVCVSPLVERSICSGGVVCVSGLGSSW

SEQ ID NO: 425 - DNA, 1020 bp, Zea mays subsp. mays
  misc_feature (1)..(1020): Ceres Seq. ID no. 12588648
attgttgttaacaaattggtatcaggggtcgtagatcctgttttccagtgccttattcattattacatcggttgattcgagcaacggattggtctggattgatctcgggtgcgtcagtgagctgctgattcctcgtggtctcctataattctgtccacgctcggtcgatttgtggtgaattaggtctggagccgcatgagatccaccattcccacttcactagatttcgccagaggttggggcaatggattcgaacatgaaggtgctccttgatgagatgaaggcgatgcacgattcggtcgaccatctacagggttctctcacgcaacggatggagggcgtcgagaaatccttgggagacccattccagtccctggagtcgaaggcgacgacatttggagagtggcaacccgtgtcgaggcgtcgccgcgtcggtggacgaacttcgcgaggaggtcagcgtgcttcacaagtcggtgatcgagtggtgctcaattcctcacacccagcggcgcatcaccaatgatagcgccgttgggcaccccgatgacaagcattaccgggagtctgcgtttgggtctgtctatacccactcgcataccccggtcacgagtatgacacctgagccacctcctaaagtgcatatctctgatccacatgctaatatgagtgatctgcatgagcgatccgatcaatatcattctaagggtggtcatcgtcgatttcattcggacaatttaatgtccagccaacttcccaaattgagtttccccaattttgatggttctaacccccaaattgtggattaaacgtagtgaagactattttgatttgtaccaagtagctcctagtatatcgattagagttactacaatgcatttttctggtgctctagccctctggttacaatcggtagaggaatgccttagaagtatggcttggcttgaattttgttccatactccttggacgttttggtcatgatcagcatgaaattttggtccggcgatttttgcctgtc

SEQ ID NO: 426 - protein, 93 aa, Zea mays subsp. mays
  peptide (1)..(93): Ceres Seq. ID no. 12588649
MDSNMKVLLDEMKAMHDSVDHLQGSLTQRMEGVEKSLGDPFQSLESKATTFGEWQPVSRRRRVGGRTSRGGQRASQVGDRVVLNSSHPAAHHQ

SEQ ID NO: 427 - protein, 89 aa, Zea mays subsp. mays
  peptide (1)..(89): Ceres Seq. ID no. 12588650
MKVLLDEMKAMHDSVDHLQGSLTQRMEGVEKSLGDPFQSLESKATTFGEWQPVSRRRRVGGRTSRGGQRASQVGDRVVLNSSHPAAHHQ

SEQ ID NO: 428 - protein, 82 aa, Zea mays subsp. mays
  peptide (1)..(82): Ceres Seq. ID no. 12588651
MKAMHDSVDHLQGSLTQRMEGVEKSLGDPFQSLESKATTFGEWQPVSRRRRVGGRTSRGGQRASQVGDRVVLNSSHPAAHHQ

SEQ ID NO: 429 - DNA, 1604 bp, Zea mays subsp. mays
  misc_feature (1)..(1604): Ceres Seq. ID no. 15180071
cattctcatcactctgcaatattcgggtatctcacataaagtttttattgcagttctatttccttttctcatgctgtgcatctttcttatttttgttcaaacaatataatgataagttcatttacttattactgtgattgtttggagcagcacacatgttattataagtcaaattttaagtcaaattattctcgacacgtgattcggttcatggcctatagtaaaaaggatagtttacagtaataacatgtgtgctgctccaaacattatgaggatagtaagtcagttcatttttagtttagaattggctctctcttatttttggtcaaattctagaatgatcagatgctcgacaatacttattattgtgattgtttgctcattttcagttcatggcctgtcttattttttcccctacaagtcatctacgacagtttgccagtagcactaaatcttttaactgtggtaggctatgagtttcatgcttcacattttcatagcagtagcaataactcttttatgtgactcgaaatatgaccactacataccacgttcggttaggaaatcatgttgcagtgtttcttgttacaacctggtaatgtggatgctacattttaaattagttagtgacctaaataatgatcttattcaactaactttatcttattttgtagccttgtgcttctttctactgagttgtcttgtaccaactaaaaatagaggtattttatctcaggttctctactatgtgtaatctcatatcaagattaatgagtatcgtgatcgtataattttgaatcctatcaacccatatggcaaggcaaagaaaatgacagtggacatcattctagattttacaaaatcaaaggagcaaccagacatggctgtcatgatctaagatacttcaacgtgattggatcgaacccaaacatatgactaggagaagctccaaggccactttgtcaagggtctctgcaatgcacctactggtgcatgatttactggaggttgtgcgcatgaatgtgccacacattggtatgggggttggagttgaagcaggtgattttcaccaacattggtttgcgaactggagttgaagcaggttattcatttgatgaaagtgtgcgtataatattatctcaaatcccagtcgctgcttgaactgttttgttgtccctatggcaggagacatgattgttattcctatcatgtgcacactgcctcctcgctgtcatttgtcgtcactctcgtagtcctgataccggagcatggttgccaggggagagcagtccaaggcaaatttgccatgttggagcagtcacaggagccaaggggctgcagtcacaggtcctgctagccaggatggagcaatcataggacctcctagcagtccaaggaaaatttgcgaggtggagtagttgcaacttttgaaacccacgtgataacatgctcaagcgttcgtatgataaaaaagatggcacataatcaaaagaagatctcatgttctgcgtttgtgaacctgtttgtattttttgaacttgttttgtgaacctctatttgtaaacctgtaaaatctgaggttgtgaatagatttgggtaacttc

SEQ ID NO: 430 - protein, 93 aa, Zea mays subsp. mays
  peptide (1)..(93): Ceres Seq. ID no. 15180072
MSFMLHIFIAVAITLLCDSKYDHYIPRSVRKSCCSVSCYNLVMWMLHFKLVSDLNNDLIQLTLSYFVALCFFLLSCLVPTKNRGILSQVLYYV

SEQ ID NO: 431 - protein, 90 aa, Zea mays subsp. mays
  peptide (1)..(90): Ceres Seq. ID no. 15180073
MLHIFIAVAITLLCDSKYDHYIPRSVRKSCCSVSCYNLVMWMLHFKLVSDLNNDLIQLTLSYFVALCFFLLSCLVPTKNRGILSQVLYYV

SEQ ID NO: 432 - protein, 65 aa, Zea mays subsp. mays
  peptide (1)..(65): Ceres Seq. ID no. 15180074
MCAAPNIMRIVSQFIFSLELALSYFWSNSRMIRCSTILIIVIVCSFSVHGLSYFFPYKSSTTVCQ

SEQ ID NO: 433 - DNA, 1554 bp, Zea mays subsp. mays
  misc_feature (1)..(1554): Ceres Seq. ID no. 15179135
aatttttcttgaagttaatggagccgagctacatcacgtccgccctccccctctctctccctctccctctctcgacgacacaccaggccaccacgcacatgctttgtcccatggatgccgaccacctcatggtattcaagaccatgctcgccgtcaggtggtagtcccggcgagcgagatctccccactccaggctctctcccatcgctcgctgccgcctcatgttgtttgcggccgtgctcgccaaccgcggcacggaggcgtcgatccgaccgggagcccttcgcaatggacaaagccttcctcctctccggcaatgagggcatcgtcggctcgtcgctaacgtgagcacgtggcagaccctgctgcccccatccttcttcatcttcactaagtgaggaactctctcgacccccttccccacccttcttgtcttcggagttcggatggctggagaacacggtgtttggtcatggcttctagaaggtggtgttttgcatttaaaaaggaaaaaattggagcataatccaaagctttgtttgcagatggggaagaggtaggagtagctcagcagtaggatggagtggccaggacagctcggtgcccacccgtcttcatcgatcgggaccctcttcccctctagcgagctattcccagtttcgagaacaagattaaaatagcttcgtaggcttttatgtggtttagatttgcatatctatctctcaccattaaagcacaaccagatctggtagcttcagctccaaacaacaagaaacactgagagctgtgaagagtctgagatggcttatgtaagccccgcgactgatgatacatcaacagatctagatactgacgagaagaaccaaatgggactcccttctggaaggtcatcagcttcaagtgcggcttcgctgcatcagcgccaaccgcaatcagacattcatagtcatgagtaccatcagctttctcttttgcttatgttagccagcctgacttctattttccacccccttgtatgtctggtggacacgcagatggccaaaccagagtaccaggctatggagaccggacgagagtccaaggagaccaccccgcgattcgtcaacgtctccgggatggcgaagccgcaacccgacgcctccctgtcctttttgttacctccggacgccgctgccgaggggctgcatgacatgattctgaatgctcgcgacgaccttgatgttttatctccgtggtcggtgggggcgtcggcgtgtggtgtaggcagatgagggaggcgacgatgttcttctgtggtgacccatcgacgccgcagtgggtcgaccaacaccatcaccacatggagattcacagggctctcttctgaagcagctagcaaacaagagtatcagtggtggtgtagctgttgttctagctgaaacgaacaagtaagagatggagatggacatagcaaagctagaagttggcttcatgggaacatctgtaatatgtaggagtgacgctcctctaattctagcagacttgaggaaggtataatattcataaattattgtt

SEQ ID NO: 434 - protein, 156 aa, Zea mays subsp. mays
  peptide (1)..(156): Ceres Seq. ID no. 15179136
MAYVSPATDDTSTDLDTDEKNQMGLPSGRSSASSAASLHQRQPQSDIHSHEYHQLSLLLMLASLTSIFHPLVCLVDTQMAKPEYQAMETGRESKETTPRFVNVSGMAKPQPDASLSFLLPPDAAAEGLHDMILNARDDLDVLSPWSVGASACGVGR

SEQ ID NO: 435 - protein, 134 aa, Zea mays subsp. mays
  peptide (1)..(134): Ceres Seq. ID no. 15179137
MGLPSGRSSASSAASLHQRQPQSDIHSHEYHQLSLLLMLASLTSIFHPLVCLVDTQMAKPEYQAMETGRESKETTPRFVNVSGMAKPQPDASLSFLLPPDAAAEGLHDMILNARDDLDVLSPWSVGASACGVGR

SEQ ID NO: 436 - protein, 113 aa, Zea mays subsp. mays
  peptide (1)..(113): Ceres Seq. ID no. 15179138
IFLEVNGAELHHVRPPPLSPSPSLDDTPGHHAHALSHGCRPPHGIQDHARRQVVVPASEISPLQALSHRSLPPHVVCGRARQPRHGGVDPTGSPSQWTKPSSSPAMRASSARR

SEQ ID NO: 437 - DNA, 1395 bp, Zea mays subsp. mays
  misc_feature (1)..(1395): Ceres Seq. ID no. 13587423
ggcggtttcgaaaaacctttttttttttttttttcttttttttttttttttttttttttttttttttttttttttttttttttttttttttttttttttttttttttttttttattcgatattgaagttatggggtaggtcgcgtaatcaagaactgaagttaaagattttgctacacacctagatatatgtatctagataaaaacattatttgaaacagagagaatacatgtaaacactggaaaataggacatatattcctgttgatatagttgctctggaatacactacagtgatcatggagtaacccatgcaccttggaataattggctcactgtttttcccaagatccattccaaatctgactgggaaactggtatcttgctggcgacatgagaaatcgcctcccttcctcctttgtaaccacattcaggaacaacataggggaagtcacttccccacattactcgactggctccatagtgagatatcacactggaaagaagctgagcagtgtcttcatatggatatgcttctcttgttatgcggaaaagagcactgtatttgacataaacctgtgggaatctggataagcttagaaatgaagagaatgccttctcttcttcatcgttcgttggtggcttgcagaaagccatatggtcaagaataacggtagttgcaggataatccctacacagttcctctatttcttgaatatatggaccaactcccttcatcgtcattattccaagtggtactccaagttcccctgccttcgaaaataatgaccttccaacctcattggtcatcttttgaccagatggccataagtttgggttgaacctcacagcacggtatttttcttgtacaatcagatgttcaagctgtttaatcccagtcccatcgtctgcaggattcgcaagacagcaaccaacgaacttggatgggtatttcttcaacacactagttaccaacgaatgatcaaacatatgattaataggttgaacaataacagccccgtccactccagcttcactcatacactcgagtaagaagtcggcgtcgccacgcagcgtgggttcctggcctgggaagtacgggtactcctccttggcctgctgtggcgtggcccagacgtgcaggtgggagtcgatgaccttgcaggaggaagaagcggccatggcggcggcaatggtggtggtggcggtggagaggagcagccgcctccttgttgctgtggtcgcgaaagagaggaggtcgtgagaggcggtagtggcgcgggggcacaggaaccggcacggggacggggcaaccactggtgatgatgacgataaagccatagagtgcctgccgccgagtactgcgctccacttttcgattaggatgttctaggta

SEQ ID NO: 438 - protein, 85 aa, Zea mays subsp. mays
  peptide (1)..(85): Ceres Seq. ID no. 13587424
MHLGIIGSLFFPRSIPNLTGKLVSCWRHEKSPPFLLCNHIQEQHRGSHFPTLLDWLHSEISHWKEAEQCLHMDMLLLLCGKEHCI

SEQ ID NO: 439 - protein, 66 aa, Zea mays subsp. mays
  peptide (1)..(66): Ceres Seq. ID no. 13587425
MRNRLPSSFVTTFRNNIGEVTSPHYSTGSIVRYHTGKKLSSVFIWICFSCYAEKSTVFDINLWESG

SEQ ID NO: 440 - protein, 60 aa, Zea mays subsp. mays
  peptide (1)..(60): Ceres Seq. ID no. 13587426
AVSKNLFFFFFLFFFFFFFFFFFFFFFFFFFFFFFFFYSILKLWGRSRNQELKLKILLHT

SEQ ID NO: 441 - DNA, 680 bp, Zea mays subsp. mays
  misc_feature (1)..(680): Ceres Seq. ID no. 15178593
aatggatgtaacagcagtggcagcatcaccagcaacagcacctcttctggcgcctagaggaggaaggagacagaccagaggtgctctggctctaatcgtggctgctgtctgtcgctgcctactcgtactccgcgctgtggaggtccgtcatggagaaggacctcggggaccgaaacgacccggccctcgccatctggccggcggtggcgtgcgcgctcagccgcggggacgggaacgtgggcggcctcctgcccctgagcccgccgcgcccgtgctggccctcgtcctcgtcctcgtcgtccgcgccctcctcgtcgtcctcctccaccaccgcgtggtccggggccagcagcggcggcaggtacgcggtggccagcgcgctgcacgacgcccgccgccgcgaccacgcccgcagcacgcgccgccgcttgttgaacgggttctccggcttcgcgatctccttggcggccgccgtcgcagccgcctccgccaggctcgtgaacgacttggacttgcccgcgtagaagttggacaggccccgcctacgaattcgttcctcggttagttcggtgttcaaggattatatattattactattctcattatagggcaagaaagagaggatcagcagggaaatgcattgctgctgtcaaaaccaaaacaaaaaaaaaaaaaaaaaa

SEQ ID NO: 442 - protein, 187 aa, Zea mays subsp. mays
  peptide (1)..(187): Ceres Seq. ID no. 15178594
MDVTAVAASPATAPLLAPRGGRRQTRGALALIVAAVCRCLLVLRAVEVRHGEGPRGPKRPGPRHLAGGGVRAQPRGRERGRPPAPEPAAPVLALVLVLVVRALLVVLLHHRVVRGQQRRQVRGGQRAARRPPPRPRPQHAPPLVERVLRLRDLLGGRRRSRLRQARERLGLARVEVGQAPPTNSFLG

SEQ ID NO: 443 - protein, 124 aa, Zea mays subsp. mays
  peptide (1)..(124): Ceres Seq. ID no. 15178595
MEKDLGDRNDPALAIWPAVACALSRGDGNVGGLLPLSPPRPCWPSSSSSSSAPSSSSSSTTAWSGASSGGRYAVASALHDARRRDHARSTRRRLLNGFSGFAISLAAAVAAASARLVNDLDLPA

SEQ ID NO: 444 - DNA, 1234 bp, Zea mays subsp. mays
  misc_feature (1)..(1234): Ceres Seq. ID no. 13598886
cacaaaagcatcacaattataatatcattcacaactagatcatttacagatagctagctagataattcacaaaagctccagagatgatcagtcactaaagcaccacagcgacaccactccagcttaaagcagttcaaaagcccacaactatatcactaatgtttcatatcactccagctattgttcaaaagcccacaactacatctttttcttggctctcagtctacagttgagtttggagctcttgcacctttactgaaatagagcttgtcttgaaggagttctaaaggacaacattgtaaataagttaacttgagctcggcaagacatgggaaacaaattgtgtagaagacatcacaaactgtccatcttcatccggtgttgcaaccgttgctaccatatcatcaatagctttctgaatagtttcactaaatcttttcttcttgctataatgcatctccttgaaaagataaattgcacttggttgggtatctttatattttcttgcccgcagatcaccattgtggtcattcccatactgatcgcatatcattttgatttgcagttaccagccacaatgtcacactcagcaatgcagatctctattcctttttggggtttactccgtgttaattgagatgcttcttgaaacagggtggtgtaatgaaattgcctgcaaattcatgacaaatctaagcctaaggtgtgcctttccagcagctgcttcaaatgctttggacggaacctgtagataatgtgttcttatctactttcttgctggcgcgtgaaatggatgatgggtcgggggcatctcgcgagatgccagcaacggactccgacacgaaccattgccagaagtccatcaccgtcgtggcgaagtacttcctagctgagttgatctccgccaccgccgccgggtggtccaccagagcgacgaagatcgcccataccggcggtgctgaacgccgctggagcaggaggcagaggcgagccgcgaggcgggggaggcgatgggtcggaggtgaagccgttggagcaggaggcggcggcgctaaatcaccaagagcagcagatccgaagggagcatgggagcaagcgagtagccaacgacgcatggcagatgaccggagcccggagcgagcagcatactgcgcggggctggaggcagggcgagggcgcgatacggctagggttgagggcggaggcggcatggtggcgccgtcgagagaagggg

SEQ ID NO: 445 - protein, 168 aa, Zea mays subsp. mays
  peptide (1)..(168): Ceres Seq. ID no. 13598887
MLWTEPVDNVFLSTFLLAREMDDGSGASREMPATDSDTNHCQKSITVVAKYFLAELISATAAGWSTRATKIAHTGGAERRWSRRQRRAARRGRRWVGGEAVGAGGGGAKSPRAADPKGAWEQASSQRRMADDRSPERAAYCAGLEAGRGRDTARVEGGGGMVAPSREG

SEQ ID NO: 446 - protein, 148 aa, Zea mays subsp. mays
  peptide (1)..(148): Ceres Seq. ID no. 13598888
MDDGSGASREMPATDSDTNHCQKSITVVAKYFLAELISATAAGWSTRATKIAHTGGAERRWSRRQRRAARRGRRWVGGEAVGAGGGGAKSPRAADPKGAWEQASSQRRMADDRSPERAAYCAGLEAGRGRDTARVEGGGGMVAPSREG

SEQ ID NO: 447 - protein, 138 aa, Zea mays subsp. mays
  peptide (1)..(138): Ceres Seq. ID no. 13598889
MPATDSDTNHCQKSITVVAKYFLAELISATAAGWSTRATKIAHTGGAERRWSRRQRRAARRGRRWVGGEAVGAGGGGAKSPRAADPKGAWEQASSQRRMADDRSPERAAYCAGLEAGRGRDTARVEGGGGMVAPSREG

SEQ ID NO: 448 - DNA, 721 bp, Zea mays subsp. mays
  misc_feature (1)..(721): Ceres Seq. ID no. 12588845
attttcgccccaggcgcagccgcgcgcaggcaggagtttcggttcaattcccgagccgagccgagctcaccctgcgtgcgatgggccgcagggggagtggtggggaagaccatcggccgcagcaggagcaggaggagcagcgcgcggcggtgccgaggcgcggccgctggttggacgaggagcggccgcacccgcaccagcccgcggcggcggggtggaggtgccggtcctgcgcggcggcggcgatcgcggactgcgtcgcgctggtgctgcccgtgcgcggtcgtcgcgctgctggccctggcgctcgtcagggcgccgctcgcagtgggccgccggctccggatgcggaggcggtccgcgctgcgcaggaagcgggtgcgcgacgtcgcggccaaggttgcgccgagggccgcgcccggcgcgggcagcgggatgacgccgctggacccggcggccgccgccacgccggtgcggcagcagcagcagcagacacagacgcaggcagaggtggagtaagttgtctgttgatgatttactgtttcaaacaagaatagcagcatcacttatgagcagccagcctgaagcttgtcttggttttatcactctgtaaactgatttgctctagcgacatgtcttggttttatcactctgtaaactgatttgctccagcgacatgtggttcttacatttgaaaccctcctgaacgcatactgtagac

SEQ ID NO: 449 - protein, 184 aa, Zea mays subsp. mays
  peptide (1)..(184): Ceres Seq. ID no. 12588846
FRPRRSRAQAGVSVQFPSRAELTLRAMGRRGSGGEDHRPQQEQEEQRAAVPRRGRWLDEERPHPHQPAAAGWRCRSCAAAAIADCVALVLPVRGRRAAGPGARQGAARSGPPAPDAEAVRAAQEAGARRRGQGCAEGRARRGQRDDAAGPGGRRHAGAAAAAADTDAGRGGVSCLLMIYCFKQE

SEQ ID NO: 450 - protein, 172 aa, Zea mays subsp. mays
  peptide (1)..(172): Ceres Seq. ID no. 12588847
IFAPGAAARRQEFRFNSRAEPSSPCVRWAAGGVVGKTIGRSRSRRSSARRCRGAAAGWTRSGRTRTSPRRRGGGAGPARRRRSRTASRWCCPCAVVALLALALVRAPLAVGRRLRMRRRSALRRKRVRDVAAKVAPRAAPGAGSGMTPLDPAAAATPVRQQQQQTQTQAEVE

SEQ ID NO: 451 - protein, 158 aa, Zea mays subsp. mays
  peptide (1)..(158): Ceres Seq. ID no. 12588848
MGRRGSGGEDHRPQQEQEEQRAAVPRRGRWLDEERPHPHQPAAAGWRCRSCAAAAIADCVALVLPVRGRRAAGPGARQGAARSGPPAPDAEAVRAAQEAGARRRGQGCAEGRARRGQRDDAAGPGGRRHAGAAAAAADTDAGRGGVSCLLMIYCFKQE

SEQ ID NO: 452 - DNA, 1055 bp, Zea mays subsp. mays
  misc_feature (1)..(1055): Ceres Seq. ID no. 15178624
gacctgatttctcctgtgctggctttcaaggtagaaaagaagtcttttgttccatcatggccttaccaactccagcgcctattttggttgacgagaaccaacagataaatagaggtaagagggccaatggaccaagggccaaagggctgaagccatccgagaatcctggcaatcaagggaggagagctcttaaggatttgtccaacttctctaaaggcactggtttgaaggacacttccaccctgaaagagaagtcccagcagaaaactcgtagtaatgtggccaacactattaaaggcaatgctttgaaggacaagcccatcctgaaagagaagtccacccaggaacagaggtcaaaagctcttaagaacccaatgaaaattttagttgatgaagagatcaaaatgtgccatgagtgggctaaggatggggtggagggatttcactcaacacaaaataattctcagaagttggataaggatctgctagacaaacgtgtcaagaagaaagtggcggcagtaaactcagccttgtgtggttggccagatacagtatttgattctctaatgtatccatctatggaggttgctgagcttttttatgaacaaaacgtgctggaggtggaacctgagattctcccggacatcagttggcgtctctctagttcagtagatggtaaagcaaagattgctgaaggccgtcttaccgatgatgagcttgaccagtaccattctttggagaacaatccaattatttttgagctgagagacgagccagcgatcccgcagctgggagtgtattgaagaatctgtgccagctggacagaaagctctgtttccttgctgcttgctctggagtctggagttgtctagtctagaatgctagtaggtcttgaccctggtgttttccccagctatgttctggtgatgtaggatttcagtttgagtactggtaccacttccagctgaagcgacagcgttatgcctgctgatgggtgatggttgtggaacagcggcgatataattataatattttcaacaaaaaaaaaaaaaaaa

SEQ ID NO: 453 - protein, 266 aa, Zea mays subsp. mays
  peptide (1)..(266): Ceres Seq. ID no. 15178625
PDFSCAGFQGRKEVFCSIMALPTPAPILVDENQQINRGKRANGPRAKGLKPSENPGNQGRRALKDLSNFSKGTGLKDTSTLKEKSQQKTRSNVANTIKGNALKDKPILKEKSTQEQRSKALKNPMKILVDEEIKMCHEWAKDGVEGFHSTQNNSQKLDKDLLDKRVKKKVAAVNSALCGWPDTVFDSLMYPSMEVAELFYEQNVLEVEPEILPDISWRLSSSVDGKAKIAEGRLTDDELDQYHSLENNPIIFELRDEPAIPQLGVY

SEQ ID NO: 454 - protein, 248 aa, Zea mays subsp. mays
  peptide (1)..(248): Ceres Seq. ID no. 15178626
MALPTPAPILVDENQQINRGKRANGPRAKGLKPSENPGNQGRRALKDLSNFSKGTGLKDTSTLKEKSQQKTRSNVANTIKGNALKDKPILKEKSTQEQRSKALKNPMKILVDEEIKMCHEWAKDGVEGFHSTQNNSQKLDKDLLDKRVKKKVAAVNSALCGWPDTVFDSLMYPSMEVAELFYEQNVLEVEPEILPDISWRLSSSVDGKAKIAEGRLTDDELDQYHSLENNPIIFELRDEPAIPQLGVY

SEQ ID NO: 455 - protein, 142 aa, Zea mays subsp. mays
  peptide (1)..(142): Ceres Seq. ID no. 15178627
MKILVDEEIKMCHEWAKDGVEGFHSTQNNSQKLDKDLLDKRVKKKVAAVNSALCGWPDTVFDSLMYPSMEVAELFYEQNVLEVEPEILPDISWRLSSSVDGKAKIAEGRLTDDELDQYHSLENNPIIFELRDEPAIPQLGVY

SEQ ID NO: 456 - DNA, 1014 bp, Zea mays subsp. mays
  misc_feature (1)..(1014): Ceres Seq. ID no. 14305836
acaaattttccagctcactcagcgtttctctctgctcgcctcggcctccaactccggccgtggtggccaccggaagcgcgtctcccggccccggctcagcggtctgcgttctccctgctctcccaagctatgcgcccctgtcctgttccctgtgcgcgctgttcctgctcgctttggcgtccacgccatgaagccctgcgctcgtcgcggcagactccagtcctcctctgccgagcagcttgcccagccttcttctccctacacgccggagctcgcccagccgaccgaagctctaagctccagccatggcgcgtcctcgctccctcttccctgctcgccggttctccttgccgagctcccctacgtgctgagctctctgctgcggctttcctttccccaagctcctccagccgcgcagtccagctgcttcttcctcctcctggcgttcttcctgtgccatgcgccctgcccatctcccagttccagctgccgcatgcgcagctgctccttctgcccagccgccccggatcttgctcggccatagcaagttcctccctatcctctgctcgcgggctgctccagtcggtcgcgcgtccagcttgcccagtctgcacgccacgctctcttgtcgtggctttctgcttcctcgtcgctcgtagcgttctgttgttcctgcgcgtgctgccgcgaagctccctgttcagttcgcctccgtcacgttatcgtgctcgcgaaactgctcgcagtcaatatcaagtccgtgacgcccacgttggacacggtaaaacgctgtgtgtgctggtgtccgaactcgccctggtcatggcgtttggtaccgtgccgtgctttttctctacgcacgtcctcctgttagctgtcgcgactgccgtcaaatcatcggagtcgttcaacttgccgatcacatcttggtcggtcgtcgatttcctattcgtcatggtacaacactgttattaaatccggtctccaacccgccatggcgtttgtcacaaaaag

SEQ ID NO: 457 - protein, 324 aa, Zea mays subsp. mays
  peptide (1)..(324): Ceres Seq. ID no. 14305837
TNFPAHSAFLSARLGLQLRPWWPPEARLPAPAQRSAFSLLSQAMRPCPVPCARCSCSLWRPRHEALRSSRQTPVLLCRAACPAFFSLHAGARPADRSSKLQPWRVLAPSSLLAGSPCRAPLRAELSAAAFLSPSSSSRAVQLLLPPPGVLPVPCALPISQFQLPHAQLLLLPSRPGSCSAIASSSLSSARGLLQSVARPACPVCTPRSLVVAFCFLVARSVLLFLRVLPRSSLFSSPPSRYRARETARSQYQVRDAHVGHGKTLCVLVSELALVMAFGTVPCFFSTHVLLLAVATAVKSSESFNLPITSWSVVDFLFVMVQHCY

SEQ ID NO: 458 - protein, 281 aa, Zea mays subsp. mays
  peptide (1)..(281): Ceres Seq. ID no. 14305838
MRPCPVPCARCSCSLWRPRHEALRSSRQTPVLLCRAACPAFFSLHAGARPADRSSKLQPWRVLAPSSLLAGSPCRAPLRAELSAAAFLSPSSSSRAVQLLLPPPGVLPVPCALPISQFQLPHAQLLLLPSRPGSCSAIASSSLSSARGLLQSVARPACPVCTPRSLVVAFCFLVARSVLLFLRVLPRSSLFSSPPSRYRARETARSQYQVRDAHVGHGKTLCVLVSELALVMAFGTVPCFFSTHVLLLAVATAVKSSESFNLPITSWSVVDFLFVMVQHCY

SEQ ID NO: 459 - protein, 180 aa, Zea mays subsp. mays
  peptide (1)..(180): Ceres Seq. ID no. 14305839
QIFQLTQRFSLLASASNSGRGGHRKRVSRPRLSGLRSPCSPKLCAPVLFPVRAVPARFGVHAMKPCARRGRLQSSSAEQLAQPSSPYTPELAQPTEALSSSHGASSLPLPCSPVLLAELPYVLSSLLRLSFPQAPPAAQSSCFFLLLAFFLCHAPCPSPSSSCRMRSCSFCPAAPDLARP

SEQ ID NO: 460 - DNA, 765 bp, Zea mays subsp. mays
  misc_feature (1)..(765): Ceres Seq. ID no. 13598976
acggctctcgtttccgcccgcgccacccgccatgtcgtccccgccgcgggggcagcccgccaccgccgccgtgccggcggtcgcggccgccacgtccccgcagttgcctgcggcgtcccacacgctcccccgcgcgttcctcgccacatcctctccccgtgccatagtggcagcaccggcgcccccgctattcaccggtcggccgctgaaccctaacccaccggcccacggctcctccgtgccccacggcatcctctaccccgtcctgaaatccgcctccacgtccaactccgcggccgcggccgtggagttggacgtggaggcggatttcagactttcgtttgggttcttatacgaacaggaattgtcctgtgtgatgtcgggcattgtattaaggctatttttgggttcaaactcatctagaggtccttttgtgtttgtacagtatattactgtaggcaaccatgaaaaccaaaggtttaggctgacctacgtttaggcctcatttctgatacggctccggagcgagcaaatgcagtgccgtagaaggtgatatcagtcgtatgcatgcctgtttcttcgtctcttgtactgtaacatgtcttaaatttacctagtgatggcgcatgtacttctgtcgatctgtaccattgttgctgttgaagacaaagtgcgccdaacaaaaaaaaaaaaaaaaaagcttatcgataccgtcracctcgaggrkgstcccgatacccaattctgcctataaagatgcccatt

SEQ ID NO: 461 - protein, 165 aa, Zea mays subsp. mays
  peptide (1)..(165): Ceres Seq. ID no. 15222474
RLSFPPAPPAMSSPPRGQPATAAVPAVAAATSPQLPAASHTLPRAFLATSSPRAIVAAPAPPLFTGRPLNPNPPAHGSSVPHGILYPVLKSASTSNSAAAAVELDVEADFRLSFGFLYEQELSCVMSGIVLRLFLGSNSSRGPFVFVQYITVGNHENQRFRLTYV

SEQ ID NO: 462 - protein, 155 aa, Zea mays subsp. mays
  peptide (1)..(155): Ceres Seq. ID no. 15222475
MSSPPRGQPATAAVPAVAAATSPQLPAASHTLPRAFLATSSPRAIVAAPAPPLFTGRPLNPNPPAHGSSVPHGILYPVLKSASTSNSAAAAVELDVEADFRLSFGFLYEQELSCVMSGIVLRLFLGSNSSRGPFVFVQYITVGNHENQRFRLTYV

SEQ ID NO: 463 - DNA, 676 bp, Zea mays subsp. mays
  misc_feature (1)..(676): Ceres Seq. ID no. 13589383
aatagcccaatgcgctgaatagcgcagcatcctttcccttctcccccaccctcggcctcgcttccagccatccgccgcggctcgtctccgtctcccggctcctcggcgtctagctcgtcaacgcgcgcgtccgccgtcggctcctccgaccggcgtcccaccacagggggaatacagatcgacgatccgctgggcttgcaaacatgtatatcccgagtgaagcgcaacaagagtacctacttcattcaatgtgaaccaacagagacagctttgagcatcaaacagaagttgcactcgctgatagatcaacctcctagtagtcagcagttggtcttgtggcctagcagtgatgtgcttgaagactcaaagactttggcagatcaaaaggtggataacgattccattgttgcattggcnctaagaaaagatgacggtgagtttnaggaagttttcatcgctaggccggaggatttcatgtcatcatcatgataaagattagtccatcatttntacaaagggaccnctgcgcgttnttggagtggaccgtcgctctatgctggttnttntagaatntgggatgtggcttgcttgtccctttgggaggaaaaanaaaatcttttatgtgagatcccnaacaaccggtggggatgatattaagctttgatttnncgctccc

SEQ ID NO: 464 - protein, 36 aa, Zea mays subsp. mays
  peptide (1)..(36): Ceres Seq. ID no. 13589384
  misc_feature (4)..(4): Xaa is any aa, unknown or other
  misc_feature (5)..(5): Xaa is any aa, unknown or other
  misc_feature (7)..(7): Xaa is any aa, unknown or other
  misc_feature (19)..(19): Xaa is any aa, unknown or other
  misc_feature (27)..(27): Xaa is any aa, unknown or other
MLVXXEXGMWLACPFGRKXKIFYVRSXTTGGDDIKL

SEQ ID NO: 465 - DNA, 713 bp, Zea mays subsp. mays
  misc_feature (1)..(713): Ceres Seq. ID no. 13586483
acctagaacatctaatcgaaaaattgagagagagatcaccgtcgaaaagcagtctcccaattccaccgaataactaataacatctcctcgagcgcgaggccggcttccttggaccaatccagcagcaagcgacccggccagcaccagcagccatggagatgaagaaggtcctctgcgccgcgctcgtcgccgccgcctccgccaccgccgtgctggccgaggtcgcctccgagtcgccctccgaggcgcccgccggcgcggccgccggcgcggccggcggtgcggctggcccttccgccagcgccgccgccgccgccgcagtgcccgccgccgcggcgctcgtcgtctccttcctcgcctccttcctccactgagcgacgtaccgcgcggagtgcgggaaacctgggatggagcatcgtgtttggttcacccgattaataattaattaatcgttgttttatttatttatttattgcttgcggttgcctaattatgtgatcgtctgttgttccttccttcgttccttccttggtgatgtgtgggtcgccaagggggtttcgtttctgtaatcctgcctgatcgatgctaatactatgatcccaatttggtttttgcgaaaaaaaaaaaaaaaaaaaaaaaaaaaacaaaaaaaaaaaaaaaaaagcttatcaataccgtcaacctcaagggggggcccggaacccaattcgccc

SEQ ID NO: 466 - protein, 73 aa, Zea mays subsp. mays
  peptide (1)..(73): Ceres Seq. ID no. 13586484
MEMKKVLCAALVAAASATAVLAEVASESPSEAPAGAAAGAAGGAAGPSASAAAAAAVPAAAALVVSFLASFLH

SEQ ID NO: 467 - protein, 71 aa, Zea mays subsp. mays
  peptide (1)..(71): Ceres Seq. ID no. 13586485
MKKVLCAALVAAASATAVLAEVASESPSEAPAGAAAGAAGGAAGPSASAAAAAAVPAAAALVVSFLASFLH

SEQ ID NO: 468 - protein, 40 aa, Zea mays subsp. mays
  peptide (1)..(40): Ceres Seq. ID no. 13586486
MIPIWFLRKKKKKKKKKQKKKKKSLSIPSTSRGGPEPNSP

SEQ ID NO: 469 - DNA, 707 bp, Zea mays subsp. mays
  misc_feature (1)..(707): Ceres Seq. ID no. 13586574
atggcccccctctacctcctccaccttgccgtttgtggcctccgcaccgccccaacgtcgacacctccgtcctccccctctactcccagcgcaccaccgccgcgtatgcgctatcccacccgatggacgtgttgccgcctctgcagcacgccctgtcgctgccgaccccgcccagccatgcatttggagtttacaatgtggagacatggtttatccaccggacggcgaggttggtgcgcggatggcgagggaggacctccactgggcctactccacacctcttcctgtctaccgaggtcgagcacatggaggacctgctccgctgtcgggcactcctgagccagcgactacaaaatccactctgccgtgatggcatgggaggctggcaagtcgattctttgtatatagttagtagtacaaaactatatgctatgagggtccggagaaattgacgatgaggagcggatcatactgggcaagtttttttggtggagtgggctggccgtgactgtgactctgtgagtgtgtagcgaggagggtacctgggtactagaatggctatagtctactgctgtgccgtactcggctgcacatgtattttgtgatgtgtcgtattgtataccaaagtgccatgttgctgttaatgacgtgagagaaaaactgtaagtcaccatttggatcctttatttcagggctcgtttgtcggc

SEQ ID NO: 470 - protein, 149 aa, Zea mays subsp. mays
  peptide (1)..(149): Ceres Seq. ID no. 15220797
GPPLPPPPCRLWPPHRPNVDTSVLPLYSQRTTAAYALSHPMDVLPPLQHALSLPTPPSHAFGVYNVETWFIHRTARLVRGWRGRTSTGPTPHLFLSTEVEHMEDLLRCRALLSQRLQNPLCRDGMGGWQVDSLYIVSSTKLYAMRVRRN

SEQ ID NO: 471 - protein, 122 aa, Zea mays subsp. mays
  peptide (1)..(122): Ceres Seq. ID no. 15220798
WPPSTSSTLPFVASAPPQRRHLRPPPLLPAHHRRVCAIPPDGRVAASAARPVAADPAQPCIWSLQCGDMVYPPDGEVGARMAREDLHWAYSTPLPVYRGRAHGGPAPLSGTPEPATTKSTLP

SEQ ID NO: 472 - protein, 112 aa, Zea mays subsp. mays
  peptide (1)..(112): Ceres Seq. ID no. 15220799
MAPLYLLHLAVCGLRTAPTSTPPSSPSTPSAPPPRMRYPTRWTCCRLCSTPCRCRPRPAMHLEFTMWRHGLSTGRRGWCADGEGGPPLGLLHTSSCLPRSSTWRTCSAVGHS

SEQ ID NO: 473 - protein, 109 aa, Zea mays subsp. mays
  peptide (1)..(109): Ceres Seq. ID no. 15220800
MDVLPPLQHALSLPTPPSHAFGVYNVETWFIHRTARLVRGWRGRTSTGPTPHLFLSTEVEHMEDLLRCRALLSQRLQNPLCRDGMGGWQVDSLYIVSSTKLYAMRVRRN

SEQ ID NO: 474 - DNA, 1079 bp, Zea mays subsp. mays
  misc_feature (1)..(1079): Ceres Seq. ID no. 13586524
gatttctcgatacacaccgaaattcgaatcgcccgcctgccgagccctcgcccccacaccgccgatgccctccaagcggccttccccgcacgccatggacgaagccgtctccgcctccgctgccgccgcgcgcctccgcgcctccaccccgcgctccaagaaacgcacctcccgctccaagtcccgcggccgctcccaggatcgccgccgctccccgaaccctaaccctagctcccgtcgcgagcgcgccgcggaccacggctccgccgcgccctcgcgcaagagcgaccgcaagcagaaccgctccttcccggattctgccacgctcgccacggccatggcctcggtcgccgccgcctcggccccgtcgtccgaggccatggcctgggtttcgtggtcatctgcttgcttttcgccaggagcctggtcaagaagaaggatggtgattactgatgggagggagagcacggaaggagaatgtggacaaaggcattgtgggggcatggtatggcattttgatggtagggttgtgtattttgtttcttcaaggtggtgagtggaatacagagggggtgttttttggctcttcttcctctggccatgtgagggtgccatcccccccatgatggcagagagaggaaaagaggtggcaagctgctgttcaggaaagaagctgtccacttctggggctattttgattctcagctgaaattggtagacgagctcggggctgtcgtcttagcctctcctgcttagggttctaggagtacattgattctcttgtatttttttgacccccgccaaatgaaaaatacctgttaggtctaggctgaacgtacttagtctcttgtttaaggttgcaggagcgggttgggtgtctatttggttggtctgttatggaaaacgaacttccagatgctctggaaccagattttaactctagggtttggtagtagttggtgctaccgccattggttaactggtcgctagcctttctgtatggacattgctgacctggtaaccacacagctgtgctgtgcagctgttctcttcgtttgacctgttgcagctattcgtcg

SEQ ID NO: 475 - protein, 184 aa, Zea mays subsp. mays
  peptide (1)..(184): Ceres Seq. ID no. 13586525
ISRYTPKFESPACRALAPTPPMPSKRPSPHAMDEAVSASAAAARLRASTPRSKKRTSRSKSRGRSQDRRRSPNPNPSSRRERAADHGSAAPSRKSDRKQNRSFPDSATLATAMASVAAASAPSSEAMAWVSWSSACFSPGAWSRRRMVITDGRESTEGECGQRHCGGMVWHFDGRVVYFVSSRW

SEQ ID NO: 476 - protein, 163 aa, Zea mays subsp. mays
  peptide (1)..(163): Ceres Seq. ID no. 13586526
MPSKRPSPHAMDEAVSASAAAARLRASTPRSKKRTSRSKSRGRSQDRRRSPNPNPSSRRERAADHGSAAPSRKSDRKQNRSFPDSATLATAMASVAAASAPSSEAMAWVSWSSACFSPGAWSRRRMVITDGRESTEGECGQRHCGGMVWHFDGRVVYFVSSRW

SEQ ID NO: 477 - protein, 153 aa, Zea mays subsp. mays
  peptide (1)..(153): Ceres Seq. ID no. 13586527
MDEAVSASAAAARLRASTPRSKKRTSRSKSRGRSQDRRRSPNPNPSSRRERAADHGSAAPSRKSDRKQNRSFPDSATLATAMASVAAASAPSSEAMAWVSWSSACFSPGAWSRRRMVITDGRESTEGECGQRHCGGMVWHFDGRVVYFVSSRW

SEQ ID NO: 478 - DNA, 631 bp, Zea mays subsp. mays
  misc_feature (1)..(631): Ceres Seq. ID no. 12634374
ctcaaccagccgttccaagtggtactgctgctactcatgctctctgcttgcatctgctgaaacacttgtctcctgctcccgctcgctgctggggggcgcaggctaaatccgtgcatttcgtagtgtaatgatcgaagtcctttggtgcctggctctggctggctgcatctgcatgcaggtggtccccaagtcgctggcgccgttcctcccggggacgacggtgccggcgacggtgacgtggcacgggtggtccctgggagatgcggttcacgggggggcggcagatccagcgcctggaggccgggtggcggggcttcgcgctggacaacggactgaagctcggcgacgggtgcgtcttcgaggtggtggacggcagggcggagcgcgtggtgttcagggtgcaggtgctccgcgccgacatccccgcggagatccgggagcgggccggcgggtacactccgtccagccccatcctcatcgactagctagctcattgctcacctcatctcatcagctgctggtctgtatccccccgtgcggccgtctgccactgttactgcagagggtgagagtgcaatccgatttttttgcattttagtccttcctcggaaaaaattcacgtttgaaccct

SEQ ID NO: 479 - protein, 156 aa, Zea mays subsp. mays
  peptide (1)..(156): Ceres Seq. ID no. 12634375
MIEVLWCLALAGCICMQVVPKSLAPFLPGTTVPATVTWHGWSLGDAVHGGAADPAPGGRVAGLRAGQRTEARRRVRLRGGGRQGGARGVQGAGAPRRHPRGDPGAGRRVHSVQPHPHRLASSLLTSSHQLLVCIPPCGRLPLLLQRVRVQSDFFAF

SEQ ID NO: 480 - protein, 141 aa, Zea mays subsp. mays
  peptide (1)..(141): Ceres Seq. ID no. 12634376
MQVVPKSLAPFLPGTTVPATVTWHGWSLGDAVHGGAADPAPGGRVAGLRAGQRTEARRRVRLRGGGRQGGARGVQGAGAPRRHPRGDPGAGRRVHSVQPHPHRLASSLLTSSHQLLVCIPPCGRLPLLLQRVRVQSDFFAF

SEQ ID NO: 481 - DNA, 958 bp, Zea mays subsp. mays
  misc_feature (1)..(958): Ceres Seq. ID no. 13624545
agctattatttgggcagacgagcagcggcgctgtcgcagacgcagagcatcccacggttgtcagtttgtcactcactcggtccagcgctcacgagtcacgagtcacgacccacaactgacgatcgtccatgttcggcggcgtcgatggcgctagggcgctgcggcgagccggcagtttcccacggccaccgcccccgccggcgacggcgaggcacattctctccaggagcgagtcaatcaagaagaagagcggagccgccaagcggtcgaagcgggcacgcgtgcgcgcggggctcgccgccgctctgcaggagctcaggctcgccggccggaagcacggggccagaagccggggagccggggcgttgtcagaagctgtcagcgccggcgccggagccgcggggccgcgggctagcgatgacgtccaaggaggaggctgctgcgccgctgctcccctgcatgtgtccgacgttgccgaggcgcaggcgagcagaggagcagcagccaccgctggtcgtcgtcgcgtgaacgcagcaggcggctggacgacgccgctgctgcttgtagcggtgctagccctggcgtgcgtggtggcgctcggcaggacgccggccgtttgctgctgcacctgtgcggcatggctgtgccgcggcccttgtgcggttcggcctcgacggacgggcgccaccggagcagcgagccctctgctgcagcgcggtgcagcgtcagatgcctgtggctgtgagcttaacattgcacatgtacgagcaggtgattagcatcagacgtgttgtttgtcactcatggaccgtttggttctaccggcttcgcatgaatgttgcaggcctcgtaatttagctagagtcgtgttgtatgtttaaagttagttgcaggtgtttatatatattcagttgtgtgtttactatttaatgcgaggagtgaaaataatagtacctgt

SEQ ID NO: 482 - protein, 216 aa, Zea mays subsp. mays
  peptide (1)..(216): Ceres Seq. ID no. 13624546
MFGGVDGARALRRAGSFPRPPPPPATARHILSRSESIKKKSGAAKRSKRARVRAGLAAALQELRLAGRKHGARSRGAGALSEAVSAGAGAAGPRASDDVQGGGCCAAAPLHVSDVAEAQASRGAAATAGRRRVNAAGGWTTPLLLVAVLALACVVALGRTPAVCCCTCAAWLCRGPCAVRPRRTGATGAASPLLQRGAASDACGCELNIAHVRAGD

SEQ ID NO: 483 - protein, 175 aa, Zea mays subsp. mays
  peptide (1)..(175): Ceres Seq. ID no. 13624547
SYYLGRRAAALSQTQSIPRLSVCHSLGPALTSHESRPTTDDRPCSAASMALGRCGEPAVSHGHRPRRRRRGTFSPGASQSRRRAEPPSGRSGHACARGSPPLCRSSGSPAGSTGPEAGEPGRCQKLSAPAPEPRGRGLAMTSKEEAAAPLLPCMCPTLPRRRRAEEQQPPLVVVA

SEQ ID NO: 484 - protein, 127 aa, Zea mays subsp. mays
  peptide (1)..(127): Ceres Seq. ID no. 13624548
MALGRCGEPAVSHGHRPRRRRRGTFSPGASQSRRRAEPPSGRSGHACARGSPPLCRSSGSPAGSTGPEAGEPGRCQKLSAPAPEPRGRGLAMTSKEEAAAPLLPCMCPTLPRRRRAEEQQPPLVVVA

SEQ ID NO: 485 - DNA, 915 bp, Zea mays subsp. mays
  misc_feature (1)..(915): Ceres Seq. ID no. 13586631
gagctttatgcttgtactactaataaatgactcattgggctgatacagacaagatgatgctaaccgaaacaaattccatggaatccaaatataaaggcgcagaaaacccaacacagaatgcagtaagatctaagcaaggactcgtatttaaatttagcaccacagcaatctttcatcaaacctcgaccacgggacactgccttggactggtgaaagggaaatcacaagagcacacacacagaatcaagaacgtagcgcttgcaggaacacgcggacagcgatcaaataattaagcgcgcgcgagcgacggacgtggtagcagtacgtgtcagaagccacggcggagtcaccgggtctcctcctcggcgcgcctcgcggcgccggagagcgcggcgagcaggttgaggtggtggtgctgcgcctgcgcctgcgccatcgggacgtacgccgccgcggccgcggccgacgccgcctgcgcctccagcggcgagaagccccaggcctccgtggcccgcggcgccgccggcagcgcggcccagaacacggaccccgcggcgtcgccttcctcgcgcgggcgcttgacgaggacgacggtggcctgctgctgctggtggtggtagtgggaggaggaggaggacgtggacggcgcgccgtcgatgccctcgagcgacaccaccggcacctcgtcgctgaagcggtcgtgcggcaccttggggcgctcgtcctcctcgcgcacgaacgacgcgcgcagcttcgtctccccctccgccgccgtcgggaggaacggaacagcgctgatgctcacgggagccatggtgccagcagctgctctgcgtacgtacgtcctcctcctcctcgtcgacgtacgcgccgccgggccgggatcgtgatgctgcttctgctgctgtataccac

SEQ ID NO: 486 - protein, 88 aa, Zea mays subsp. mays
  peptide (1)..(88): Ceres Seq. ID no. 13586632
MTHWADTDKMMLTETNSMESKYKGAENPTQNAVRSKQGLVFKFSTTAIFHQTSTTGHCLGLVKGKSQEHTHRIKNVALAGTRGQRSNN

SEQ ID NO: 487 - protein, 79 aa, Zea mays subsp. mays
  peptide (1)..(79): Ceres Seq. ID no. 13586633
MMLTETNSMESKYKGAENPTQNAVRSKQGLVFKFSTTAIFHQTSTTGHCLGLVKGKSQEHTHRIKNVALAGTRGQRSNN

SEQ ID NO: 488 - protein, 78 aa, Zea mays subsp. mays
  peptide (1)..(78): Ceres Seq. ID no. 13586634
MLTETNSMESKYKGAENPTQNAVRSKQGLVFKFSTTAIFHQTSTTGHCLGLVKGKSQEHTHRIKNVALAGTRGQRSNN

SEQ ID NO: 489 - DNA, 943 bp, Zea mays subsp. mays
  misc_feature (1)..(943): Ceres Seq. ID no. 13622803
agaaaacaccgctcatccctcctaaacggatagagcaggcgctcctagaaaattcccagccttatcctgtgcatgtgttcaaatccctggaaacctgtgcgtctcctctgatgcgcgttcagctcctcctctcagctcatgcacgccaacttccaggcctttcaccactgccaatcaaatctctcgctcgacgctggtcacacgcacgcccagccgagctcctgcttccctctcccgcggtgcctggcttcctccaagcccgcccccaaccacaaccacgccctggtccgcgctccagccctccccatcctcttcttgctatggtgcccagccgagctctatccccttcctgccatggccgacgcccctccctgctgcagctcgatgccctcccctgcagcaagcagtgccctcccctttctgcagcaagtgggtgcccccagcccctcctttgttcccatggccggccacctctgctgctcccatggtgatctctaaatctctttttgttttactagttcttgttaataccctgctgatgtgaggttttatgtgtgttgatgtgtgcgatatggagtaaaatccttggagaattaggtgcagaaaaggccgtacaaggagtgcgctggggagaaggtgcccaacattaccagcgagtgcgttggcctgcgggagacctacttcaactgcaagaggggccaggttgacatgcgggcccgaatacgcgggaacaagggatactagtgatgtgcctgcaatatccacaatcagttttggtttctagccatgcttctgtgacattgaggtgtaatgataacatggtttagtttgcccgtgttctgtttttgataggtgaggggaactcacaacacacgtggcttcaattgatgaggggagtgcattcatgtctacattatattacatttgatgttccctctgtttt

SEQ ID NO: 490 - protein, 162 aa, Zea mays subsp. mays
  peptide (1)..(162): Ceres Seq. ID no. 13622804
KTPLIPPKRIEQALLENSQPYPVHVFKSLETCASPLMRVQLLLSAHARQLPGLSPLPIKSLARRWSHARPAELLLPSPAVPGFLQARPQPQPRPGPRSSPPHPLLAMVPSRALSPSCHGRRPSLLQLDALPCSKQCPPLSAASGCPQPLLCSHGRPPLLLPW

SEQ ID NO: 491 - protein, 126 aa, Zea mays subsp. mays
  peptide (1)..(126): Ceres Seq. ID no. 13622805
MRVQLLLSAHARQLPGLSPLPIKSLARRWSHARPAELLLPSPAVPGFLQARPQPQPRPGPRSSPPHPLLAMVPSRALSPSCHGRRPSLLQLDALPCSKQCPPLSAASGCPQPLLCSHGRPPLLLPW

SEQ ID NO: 492 - protein, 119 aa, Zea mays subsp. mays
  peptide (1)..(119): Ceres Seq. ID no. 13622806
MHANFQAFHHCQSNLSLDAGHTHAQPSSCFPLPRCLASSKPAPNHNHALVRAPALPILFLLWCPAELYPLPAMADAPPCCSSMPSPAASSALPFLQQVGAPSPSFVPMAGHLCCSHGDL

SEQ ID NO: 493 - DNA, 1053 bp, Zea mays subsp. mays
  misc_feature (1)..(1053): Ceres Seq. ID no. 14309627
  misc_feature (1)..(1053): Ortholog of  Ceres SEQ ID NO 14302111 as cited in SEQ ID NO 68773
aaaagcaaaccgagctattaacggacgagaaacacccaacgccgtggaggtggaggcgcctagtacactatactagtagcgggtgtggtacctgggctgggcctgggcctggatcttgggtcccctccccgtgttagtacccaggcccgaccttattgacgagcgcgagcgcgttgctggtgacctgcgcgacctcgacgaccttgccccggatggcggcgcgcgtgccggcgtcgacggcgcgggacgagaggccgtcgaggcaggtgtcctcgtcggtgagcgcggcgctgcaccaggtctgcacgttgctgaggtgccacctgaacgccggcgtccccgcgcggcccatcccggcgccgcccatctcctgcgccgcgtcgcggaggtggcccacgctgtccgccagattgtccaggcagtctcgcacgggacctgccgacgccgacgccgacgccgatcccgaccccttcttcgcgcctttgccgttgctggcgccgcacaggcggcccacgtacgccgacgcggcgcgcgcgcggtccgcgctcaccgacagcgcggcgcgcgccagctcccgcgggctccgcggcggcggcgacccgccgtacgacgccaggctctgctcgcacaccgacgggtactgcgtcgtgcggcacgacttgcggacgaagtcgctggctgccggcgacgcggcggacacgagccccgctgcggcggcggcggcggcggcgagcagcaggaggaggggggcagcggcagcgacactgcgcgggtgagccatgattgattgtcttggtgagctgcgctgagctggtgcggtgtgcggggtgtgtgtgctgtgcttgtgcagcagggcaggcaggtcacggagtcacagtggagagagtggtggctgcttcgcttgaatgattgaatgcctattgtaatcacccacctagctgtgtctgcttatatagggagatttggaaatatgtgctgttttcggagatgatttttttagaaagcaaaaaaaaacggaggcagtagtgttatgctatatttctctcattttgc

SEQ ID NO: 494 - protein, 187 aa, Zea mays subsp. mays
  peptide (1)..(187): Ceres Seq. ID no. 14309628
MAARVPASTARDERPSRQVSSSVSAALHQVCTLLRCHLNAGVPARPIPAPPISCAASRRWPTLSARLSRQSRTGPADADADADPDPFFAPLPLLAPHRRPTYADAARARSALTDSAARASSRGLRGGGDPPYDARLCSHTDGYCVVRHDLRTKSLAAGDAADTSPAAAAAAAASSRRRGAAAATLRG

SEQ ID NO: 495 - DNA, 651 bp, Zea mays subsp. mays
  misc_feature (1)..(651): Ceres Seq. ID no. 12635272
agagattaatgttctagacaataacaatagaggtggaagaaacatagataagagaatacattaggtagcttgagatacgagtacaacaatatacataaacaagggagagaatcagccaaagaagctaggatcgtagccattgctagaagtggccaagacatagtaagcaacgatgtgaccaatagaaccccaagcaagaacatcgacgatgttgaatccaacagggtcgttcgatttcaagaggctaacgtattccttggcacgatcatctccggcttcgaaatgggttttgccgttctgctccggaacctgtttggccacattctctctctggaagttgaagaagacgaaccggccaaggaagagggagagaccagtgctgaggcttataacgacggatgggctgagctcggctctcacgacggcggaggaagatcttcttccggcggtggtggatagcttgggtaaggaggaggaggaggagccaccgaggcggagaggacggaggccgtggaatgagatggagttcgggtttttctgggagattacagtggagaaagttgagggtgtgagcaaagcagatgcgcttgtcgacatgttatcttcttcttcttttggagagctttagcgaaagagagaatgagtggtttt

SEQ ID NO: 496 - protein, 139 aa, Zea mays subsp. mays
  peptide (1)..(139): Ceres Seq. ID no. 12635273
MLNPTGSFDFKRLTYSLARSSPASKWVLPFCSGTCLATFSLWKLKKTNRPRKRERPVLRLITTDGLSSALTTAEEDLLPAVVDSLGKEEEEEPPRRRGRRPWNEMEFGFFWEITVEKVEGVSKADALVDMLSSSSFGEL

SEQ ID NO: 497 - DNA, 1071 bp, Zea mays subsp. mays
  misc_feature (1)..(1071): Ceres Seq. ID no. 13600601
cctagaagttgttctttatggccattatttcttacaaaagacgaatatgtttacacagggtgttacaacacagagaaactgatggtaccaagagaaacaaacaagattgtaggatacaagagaatgggaaaccaacataaaacaccatgtgatgaatacgatatatgatcatctcagtggaacttgaggctggtcaagacattgttgttgacgggatccgccaaatgatcaagaaggttctggtaaggccccacaccggtcactagtccctgcacaaaatagcctaggatggcgagcattgccagtctaccgttcttgacctccttgagtttcaactccttcatcgacttctcgtcttttccaaacccaagagggttgaagaatggtccaccggggtaagccgggtcacctgaacccgcgaaacctttctctagacccaagaagtattgtttacccatagatcctgggttgtaccagtcctgcaacctcctgtgctcggcaaatcccatcaaagccatctcgagaacaaagagtgtgtaagggtctgcccagtagctgtatgtccctgcaggtggaatcacaccggtttggaaccagggaagagcagtgtctgcaggaatcagaccggcctttcctagaatctcaggtgcaatagctccagctgcacccaacatagcgaacctcccgttgatgatctctccgtaggctagccatctcggctcgatgaagcctccagtaccctctgggtctgaaagaccaagcggatcgaatccaaagtcgccaggtaagctgccatccaagtaagagagactctgtgatgatgcaaaccacaattgcctgtttgctccttgcttggcaggtggagttgaggcagccttaacaaccaaggaaaccttcctctgtgatacggacacagctggttttgcgccgaatatctgtctagcagtctgaacagaggaagtaagtgaagaagacacaagcgcttgtgctgccattctttgcttaaactcttctcttcagtcaccaagggacgatgattattgaataatggtctgcagggaacctagcgtt

SEQ ID NO: 498 - protein, 55 aa, Zea mays subsp. mays
  peptide (1)..(55): Ceres Seq. ID no. 13600602
PRSCSLWPLFLTKDEYVYTGCYNTEKLMVPRETNKIVGYKRMGNQHKTPCDEYDI

SEQ ID NO: 499 - protein, 40 aa, Zea mays subsp. mays
  peptide (1)..(40): Ceres Seq. ID no. 13600603
MAIISYKRRICLHRVLQHRETDGTKRNKQDCRIQENGKPT

SEQ ID NO: 500 - protein, 36 aa, Zea mays subsp. mays
  peptide (1)..(36): Ceres Seq. ID no. 13600604
MASIASLPFLTSLSFNSFIDFSSFPNPRGLKNGPPG

SEQ ID NO: 501 - DNA, 784 bp, Zea mays subsp. mays
  misc_feature (1)..(784): Ceres Seq. ID no. 13599640
aaccctccgggcccggcgacacaaggcaaggaaaaaaaaggatggctctccggcgcaacgccggatccctcgcgctccgcgccgccgcctacctccgccgccaccgtccccatcctcctcccccactggccctcgccgcccccgctcccactcccatacgctccccgctggccccgcctttccggcacttcgctgctccgcctggtactcagaccaataggaagcgaggcaaggaggaggacgatgccagcgcgggcccgcgcatgaacaacgccatcgccgctcccttcgtcaggctcgtcatggatgaaggccacaacattctcccccggcatgaagccttgcagcttgcgatcaggatggacatggacttggttgaggtagcgacttgctacaaaggcatcaacacaaacatgaaggtagccaacatggaactcgcaatgctgcccgaatctgataatggccaaggacgacttgatcaaacaatgatcaaccctgccgcagaaactcggaactgctaggcaggctacattcagatcggccggtggataacgctctggtcagggacggcgctgttgtggtttcaggcggcaaggtgaagcaacgggtggcgctgaagctgctgcagcacaaaaagtggagagagctggagttggagatggagctcaacgtgtagaaatatgctgtcaagttgtaacttctaatctgaaatctgaaattaaaattacctccctgctgtcagacgatactgcatgcgggttttatccaataatttgtttggcct

SEQ ID NO: 502 - protein, 172 aa, Zea mays subsp. mays
  peptide (1)..(172): Ceres Seq. ID no. 13599641
PSGPGDTRQGKKRMALRRNAGSLALRAAAYLRRHRPHPPPPLALAAPAPTPIRSPLAPPFRHFAAPPGTQTNRKRGKEEDDASAGPRMNNAIAAPFVRLVMDEGHNILPRHEALQLAIRMDMDLVEVATCYKGINTNMKVANMELAMLPESDNGQGRLDQTMINPAAETRNC

SEQ ID NO: 503 - protein, 159 aa, Zea mays subsp. mays
  peptide (1)..(159): Ceres Seq. ID no. 13599642
MALRRNAGSLALRAAAYLRRHRPHPPPPLALAAPAPTPIRSPLAPPFRHFAAPPGTQTNRKRGKEEDDASAGPRMNNAIAAPFVRLVMDEGHNILPRHEALQLAIRMDMDLVEVATCYKGINTNMKVANMELAMLPESDNGQGRLDQTMINPAAETRNC

SEQ ID NO: 504 - protein, 88 aa, Zea mays subsp. mays
  peptide (1)..(88): Ceres Seq. ID no. 13599643
NPPGPATQGKEKKGWLSGATPDPSRSAPPPTSAATVPILLPHWPSPPPLPLPYAPRWPRLSGTSLLRLVLRPIGSEARRRTMPARARA

SEQ ID NO: 505 - DNA, 722 bp, Zea mays subsp. mays
  misc_feature (1)..(722): Ceres Seq. ID no. 13599549
agcttttttttttttttttttgaaaataaaaacgagtgtttcaacgcacacccgaatagtccattattattaagtcgagaagcaagagtatgcaacgatacattgaaaaagcaagaaacaataccaaaaacacacgaactttattgggaaccaacagagaaaagtagcgattcataaacctgatcatggatccagccatagtcccttatagaattaagtggatggtgcaaggagagggcgaatcaagttaggaacatgagcctggtgatcctcaagacgacccttaacactgtctccatcccagcgaacaagtgttggcactccagtgaccttgaagcgaggatcgactctccacggatgcatcggattcctccacgtcggcctatctcccgcgtaagcccgaataacattcacttcctccgctgattcctctagagtcttgtatatcacaggctcagctctaacgcaatcaggacaccagctgcggttggtggtgggatcattgttggcgaggaagaggatgaaattgattttgttacggtttgattcatcagatttcaattcttccaacaccttctccaaggttgagggatctgcgtccaccttcttcacactcatttttattcttttctctacaacactctcgatttcgatttcgatttcgatttctttaccaattttagttggactgctctccttaaattgaggcccgtgtttgattc

SEQ ID NO: 506 - protein, 61 aa, Zea mays subsp. mays
  peptide (1)..(61): Ceres Seq. ID no. 13599550
MKLILLRFDSSDFNSSNTFSKVEGSASTFFTLIFILFSTTLSISISISISLPILVGLLSLN

SEQ ID NO: 507 - protein, 58 aa, Zea mays subsp. mays
  peptide (1)..(58): Ceres Seq. ID no. 13599551
SFFFFFFENKNECFNAHPNSPLLLSREARVCNDTLKKQETIPKTHELYWEPTEKSSDS

SEQ ID NO: 508 - protein, 56 aa, Zea mays subsp. mays
  peptide (1)..(56): Ceres Seq. ID no. 13599552
MSLVILKTTLNTVSIPANKCWHSSDLEARIDSPRMHRIPPRRPISRVSPNNIHFLR

SEQ ID NO: 509 - DNA, 1015 bp, Zea mays subsp. mays
  misc_feature (1)..(1015): Ceres Seq. ID no. 13599568
gaaaatgataattatatattccattcagtgaaaagaacaaatacgacaatgaaaagcagtacacttcgattcctcgtattggctctgaaggctaaaccgcgaggctaacttattcaatcttattacaactgcatgcgagcttagctagaagcttgaatacgtgtcttctgctgaacaattattaaatctcattggcatgcatatatcaaattatatactcatcatttcagggcaagctcccagggattaagacccaccagcgaacttggacttgagaagttcgacgaccccggcctccacccttagtgccttggtgagcaccggcgtggggattggcgggttggaaccgaagagcatgagcggcacgaaaacgatgccggggttctggctgttgaaggaaacaaccatgtaggcctctgtcttaccaacgttgaactggaagtgcatgagcccgcgtgggatgaggaacgtctctccagcacgcaccaccctagagtagagcttgtttccggagtcgaggcttccgaggattccaacgaggagctcacctttcatcaccatgccgatctcggtcccgcgcgggtggacatgcggcgggttggtgcctcccggcgcgaagtccacacggttcatggacacacccagcgtgttcgtaccgggccactcggccacgtcgagctccgtcacggccgagccattcggggtggacgtgttgccggccttggccagcttggtcgagaagaggaagtcgtcaccggcctccgacatgggcttgcatggatgcccgttcacagagaccgccttgccgtcgaggtcagcaacgcagaagtcttggagagggtcagggtcggaggccaggacggccggagcaagcagcagcatggcaaacaggctagcccctaggtttttggagtaacccatggcttgctatgtagcaagcttagctagcactgatcagctagagtttgttgatcaagagtgcttcactggtggttgcagcaaagctgtggtggat

SEQ ID NO: 510 - protein, 118 aa, Zea mays subsp. mays
  peptide (1)..(118): Ceres Seq. ID no. 13599569
MPISVPRGWTCGGLVPPGAKSTRFMDTPSVFVPGHSATSSSVTAEPFGVDVLPALASLVEKRKSSPASDMGLHGCPFTETALPSRSATQKSWRGSGSEARTAGASSSMANRLAPRFLE

SEQ ID NO: 511 - protein, 104 aa, Zea mays subsp. mays
  peptide (1)..(104): Ceres Seq. ID no. 13599570
MRRVGASRREVHTVHGHTQRVRTGPLGHVELRHGRAIRGGRVAGLGQLGREEEVVTGLRHGLAWMPVHRDRLAVEVSNAEVLERVRVGGQDGRSKQQHGKQASP

SEQ ID NO: 512 - protein, 94 aa, Zea mays subsp. mays
  peptide (1)..(94): Ceres Seq. ID no. 13599571
MDTPSVFVPGHSATSSSVTAEPFGVDVLPALASLVEKRKSSPASDMGLHGCPFTETALPSRSATQKSWRGSGSEARTAGASSSMANRLAPRFLE

SEQ ID NO: 513 - DNA, 700 bp, Zea mays subsp. mays
  misc_feature (1)..(700): Ceres Seq. ID no. 13587227
gccactctttcatagatatataaagatacattaaaaacagataacacacacgcatatatattaagcttaatatcaagttgttacatacgataatatatagagaaatcatagagatcgcgaaatatcatattcatatgatcatttccactttcttcgtccgaacatgccatgcttgcctcgtttgcctccaaacatgccgtgcttgccacgcttatgcttccctccaaacatgctgtgctttcctcgcttgtactttcctccaccgaaaaaccctttcttgtacttaccaccgtgatggtggccataaccaccatgatggcccgcgtggtgacttcccattgcagccgccgcagctgttgccgctccagctatcaatcccccgactcctcctccaagacctggacggtgaggaccagggtaaccggcgggaggataagcaccaggaggaggtggataagctgcaggtggatagccctgcggagggtaaccctgtggagggtacccttgctgagggtaaccatgcggtggtggataagctcccggcggaggaggaggataagctcccggtggatacccatggccgggatgattatgatgtgaaaagaatcctttgtcttgttcgtgatgcttgtctttacccattctgatttgaaatcaagaggcagaaagataagaagatttatatgaaaaacttttcgat

SEQ ID NO: 514 - protein, 170 aa, Zea mays subsp. mays
  peptide (1)..(170): Ceres Seq. ID no. 13587228
MIISTFFVRTCHACLVCLQTCRACHAYASLQTCCAFLACTFLHRKTLSCTYHRDGGHNHHDGPRGDFPLQPPQLLPLQLSIPRLLLQDLDGEDQGNRREDKHQEEVDKLQVDSPAEGNPVEGTLAEGNHAVVDKLPAEEEDKLPVDTHGRDDYDVKRILCLVRDACLYPF

SEQ ID NO: 515 - protein, 143 aa, Zea mays subsp. mays
  peptide (1)..(143): Ceres Seq. ID no. 13587229
MLASFASKHAVLATLMLPSKHAVLSSLVLSSTEKPFLVLTTVMVAITTMMARVVTSHCSRRSCCRSSYQSPDSSSKTWTVRTRVTGGRISTRRRWISCRWIALRRVTLWRVPLLRVTMRWWISSRRRRRISSRWIPMAGMIMM

SEQ ID NO: 516 - protein, 128 aa, Zea mays subsp. mays
  peptide (1)..(128): Ceres Seq. ID no. 13587230
MLPSKHAVLSSLVLSSTEKPFLVLTTVMVAITTMMARVVTSHCSRRSCCRSSYQSPDSSSKTWTVRTRVTGGRISTRRRWISCRWIALRRVTLWRVPLLRVTMRWWISSRRRRRISSRWIPMAGMIMM

SEQ ID NO: 517 - DNA, 1171 bp, Zea mays subsp. mays
  misc_feature (1)..(1171): Ceres Seq. ID no. 13599444
agccatacgaatatgtttgttattattattttttaaatccagccaaacaattttcccggaaagcgcaagaaaatataaacaagaacatgacgaccaaagctaatccaagtttcaatgtctcgacttaaagtaagcagttccaggatcgatcacgataatggacaaaatagtcattttgagagaaacggatggaacttactatatagttccttgttttcacttcttcgagctaggctccaagttcatcgcttgaaggttaagcaacagatcgttggagctcaggtacaccttgttagctgattttgcaatggtctgagcaatctctcttgcagcttcgatctttctcagagttatgaatgcctcattgtttgcaattgcttgtcctataagttgagcacttttagcttctccctccgcacggataacagcacttctcttgtcttgctcagctttctccacaatgaacttggcacgttcagcttcctgagcagcgacttgctttgcctcgattgcagctgtgaactctttgccaaaagtgagagtcgtgatggagacatcatcaagagcaatgtcgaagttcgaagctctctccgtcagaatcttgcgtatctctctgctcacagcttctctctgagtgatgagctggcttgcattgtactgagccaccacagccttcagtgtttcatggatgatggaagggagaaccctttcactgtaattctcgcctagggttcggtaaatatgaggcaaacggtcacccatgggacgtgtgagaaccctaagtccaattttgatcgtctgaagatcatgactaccagtgctgctctcaacaagatagggtcgtgcacggacgtcatagatgattggcctctcaaaccatggcaacataaagtgcgtaccttccgggtacaccttttccttgataccggttaatcggttgaacatgacggcacgatgcccaccctcgacattgtagaggctgttagtgatggcgtagacaccgaggccaccgataacgctgaccttgagaagcgcggagagagcaggagatccagggatgttcggcactttgttgaaactcatgatcttagatcagctcttaatcaccggtgaggctagggtttaggaaggatcacgatcggagatagtcggcgaagaagcttagggtttt

SEQ ID NO: 518 - protein, 63 aa, Zea mays subsp. mays
  peptide (1)..(63): Ceres Seq. ID no. 13599445
MRQTVTHGTCENPKSNFDRLKIMTTSAALNKIGSCTDVIDDWPLKPWQHKVRTFRVHLFLDTG

SEQ ID NO: 519 - protein, 61 aa, Zea mays subsp. mays
  peptide (1)..(61): Ceres Seq. ID no. 13599446
MSRLKVSSSRIDHDNGQNSHFERNGWNLLYSSLFSLLRARLQVHRLKVKQQIVGAQVHLVS

SEQ ID NO: 520 - protein, 52 aa, Zea mays subsp. mays
  peptide (1)..(52): Ceres Seq. ID no. 13599447
MPTLDIVEAVSDGVDTEATDNADLEKRGESRRSRDVRHFVETHDLRSALNHR

SEQ ID NO: 521 - DNA, 819 bp, Zea mays subsp. mays
  misc_feature (1)..(819): Ceres Seq. ID no. 13599448
ccaggagacaacaataacgaccaaaagcaaattacaattcagtaaaaaaaatgttacaaaggaaaattttattaaacaaaaaaaaaagatgaaattccccaatttgttttcgtgttcattactttcacatcaccggagggtttcctccgtcgccggaactccgactcataccttcagtaatcgacgcgagcttctgaagattcagtttaatcacagtatcagcaaacaaacgcgtatcctcctccgtgttcccctccggcacatccacgacgtacgattcaagaacaacggtccagatccgtccatctctctcgaatccatgaaccgtcgtcaccgacttgtaattcctcagcctgtgctcgcctccggtgatgctaaaccccgtcaccctccgctcgtcgtcgaggagatcgagcctctccctcgacgtgttcgccggaaggccgctgatcacgtccacgtagcgcgtgcaccccactcgcatctcgaatccttcttcgacggagcatcttttgatgaagtgtttgtaaatctggggacgatcgaagcgtctcacgacggaccagacggtttcgggaggggactggatgcgttgggcgaggagggaggagcagcgaccgggaccgagttggtaggtgtggaactcggtgattgagtcggttagctcggcgaactcgtcgtgagtcagctcggaaggaatcatttggtgatggagagtagtggttgtgtgagtctcttgttccccttctctgattggctctgaatctgccattggtgtcgaatttaaacttgcttccaatttggggtcgaatcgaagag

SEQ ID NO: 522 - protein, 217 aa, Zea mays subsp. mays
  peptide (1)..(217): Ceres Seq. ID no. 13599449
QETTITTKSKLQFSKKNVTKENFIKQKKKMKFPNLFSCSLLSHHRRVSSVAGTPTHTFSNRRELLKIQFNHSISKQTRILLRVPLRHIHDVRFKNNGPDPSISLESMNRRHRLVIPQPVLASGDAKPRHPPLVVEEIEPLPRRVRRKAADHVHVARAPHSHLESFFDGASFDEVFVNLGTIEASHDGPDGFGRGLDALGEEGGAATGTELVGVELGD

SEQ ID NO: 523 - protein, 188 aa, Zea mays subsp. mays
  peptide (1)..(188): Ceres Seq. ID no. 13599450
MKFPNLFSCSLLSHHRRVSSVAGTPTHTFSNRRELLKIQFNHSISKQTRILLRVPLRHIHDVRFKNNGPDPSISLESMNRRHRLVIPQPVLASGDAKPRHPPLVVEEIEPLPRRVRRKAADHVHVARAPHSHLESFFDGASFDEVFVNLGTIEASHDGPDGFGRGLDALGEEGGAATGTELVGVELGD

SEQ ID NO: 524 - protein, 111 aa, Zea mays subsp. mays
  peptide (1)..(111): Ceres Seq. ID no. 13599451
MNRRHRLVIPQPVLASGDAKPRHPPLVVEEIEPLPRRVRRKAADHVHVARAPHSHLESFFDGASFDEVFVNLGTIEASHDGPDGFGRGLDALGEEGGAATGTELVGVELGD

SEQ ID NO: 525 - DNA, 911 bp, Zea mays subsp. mays
  misc_feature (1)..(911): Ceres Seq. ID no. 12635907
ggcagagcagcatcagttgatctttgcgtttgagaagtccatctctggatgctgagacatgaacttcttgagaatgtcttgcttctgtagctcatcactcgttggaagacccatctgcttttgcctttgatcaaacatcatcttctcaacagtggagcgagtttcagggtcaaggtcagctaatttactgttctccggttcaaccttctgagtatcgatctcaggctcacctttcacacagcatttccaccactccatctgatcttgcttagtcaacagaatcgaaatcatcttttgatcctcgatattccagtagcagtcatcaggcttcacagatcggtagagttctccatcgatgattggatcctgtcccttgagaccaagcttaagacggttctttttgatctcgtatacaacagagcgtgctttagtgccagtaggaactggaatgttaacagtaacctcctggagagtctggacccatgagtagttctcaaggtcataaccatttcctttgttaggagcaatgggggaagcttcttgtttcttctcctccacttgaattggctctgagcttgaagcagccgtggctggcttcacgctctccttctccacaggcttcttcttctcaacactctccttctcagctttcttctcggcctttccaagcttctccttcgccgccctaaccgcggcggagatctcctcctcagcggagggtttcttgagaaaatcgctctgttcggcgagaaagtcgaacactttctccaagaaacttgatgggttcgaggaatcgagcgtcgccctgaagggcaggatcctggggcgggtgctgctttcgtcttcaacctcggagatgatcgccattgtggagggggttttcgtttctagggttttgctgttgaccagct

SEQ ID NO: 526 - protein, 44 aa, Zea mays subsp. mays
  peptide (1)..(44): Ceres Seq. ID no. 12635908
MIGSCPLRPSLRRFFLISYTTERALVPVGTGMLTVTSWRVWTHE

SEQ ID NO: 527 - DNA, 2130 bp, Zea mays subsp. mays
  misc_feature (1)..(2130): Ceres Seq. ID no. 13599656
aaacttcgcgcgccacaaacttctacgcctatactacgccatgcatatgcagttcattcacccaacgcttatcccgtaaggctataaagcacatgcgaaagacgttcattcactctgtaaggcgttcttgttcttcacccaacgcttctcgcacgggggtcttctattgaccattgaagaaaaacattgactggagatagcatctggaatatatgaatcgagtataaatgaaattagtcacgtatgttggtattcaatatttgttcagacgaactaggtctgaaaatctgggcaattccagattctcatgtgagatgataaaaacgtcataattatttgctaagtttaatgacctacgtcagtttctgcgtactaaaaactattcgctagttgagtcgttccggcatattcaaaattattagctacagttgttcctgcatgcgccagattctcatgtgagatgataaaaacgtcataattatttgctaagtttaatgacctacgtcagtttctgcgtactaaaaactattcgctagttgagtcgttccggcatattcaaaattattagctacagttgttcctgcatgcgtctaatgtccttcggtgaacttgtctgtcattatcatttaaaaacgtatctagatgcattatggaagatttttagtttcctttgttatatttgagaagttatatattgtatataccgagagatgcacctgtgtattatttgttgtagcttcgaatgcgagacgtatggttgcagtcattttattgtagttagtttaactgctgtgccatatgaagattaactgctctgccatattaactgcatgaagattaactgcatgtgccatatgaagacctcctgcctcatcacggtgtttgtatataagatcaactgcagtgcctacacggtggactgagtatttgtatgatgcgaaggtcactgttcagcatcgtcagtatgaaatggctatggccttcaaagctttctttcttggtcaccggacagggaagaaattttctgctcaagctcacaattagatactagacataactcagataagagcttgttcaacttgcactatagttcatttgagtacttacctattattgatctctcttgagttgaagctaggtttcaagtatctcctaaggtttataggtgaaaaccagggatttttttttgcactacaatctgtgacgttttaatacttgattactagttgttcatgcattgctattgtattcgcatatcccctaggtttaagagcaaggtttaagagcctttctaacaaggtgactcaatgatgtctcaaatttaaaatactacatttaaagtgttcaggtcgccaaaaacaaattgtgcttctacatttaagctttaatcatgtattttaggaagtaaattatattattagaaaaaatgtttagaatgatgtagaaaacatggatagagccttagtccgagagtagtatatttggatcttaatgtgcccgaaatttataaaatagggcactgttggagctgtttttactgatttgctctatattttaagatagggtactgatttaaagcacggttgtagttgttttaaatacaacatttcaaatttccacttatacacaatgttagcttatttttaccgtccgcgtggaagctgcattgacgttgaggctggcggcagtgcgggcggcagcgtgggcgagaagaggccgctgccgcccgcgcgcggacgaggcggacgagaggccagcaccgggcgatggcgctcgcgcccggcgagagcgagcagtatcgcctcgctctcgcccgcgctggagcgtccgtccgggtgagaggcgggcgagagggaggcgaggcactggcggggcgagagcgcgggtgagagcgacgtggcgtgatctgattggtccacgtgtcgcgatctgattggtccacgtgtgctagccgttgcaactagccgtttttgaccgtttggagtccaaaaatttcgaaaaaaattgcaaaaaatcacaaattttatccctaattcctctatatattatgttgtgtgttttctgagcgttgaaataaatccgcgtgaattaaaaaaaaaaaaaaaaaaaactcgagggggggcccggtac

SEQ ID NO: 528 - protein, 69 aa, Zea mays subsp. mays
  peptide (1)..(69): Ceres Seq. ID no. 13599657
MLAYFYRPRGSCIDVEAGGSAGGSVGEKRPLPPARGRGGREASTGRWRSRPARASSIASLSPALERPSG

SEQ ID NO: 529 - protein, 55 aa, Zea mays subsp. mays
  peptide (1)..(55): Ceres Seq. ID no. 13599658
TSRATNFYAYTTPCICSSFTQRLSRKAIKHMRKTFIHSVRRSCSSPNASRTGVFY

SEQ ID NO: 530 - protein, 44 aa, Zea mays subsp. mays
  peptide (1)..(44): Ceres Seq. ID no. 13599659
MHYGRFLVSFVIFEKLYIVYTERCTCVLFVVASNARRMVAVILL

SEQ ID NO: 531 - DNA, 1813 bp, Zea mays subsp. mays
  misc_feature (1)..(1813): Ceres Seq. ID no. 13599900
attattaagtcccatgacatttttttggcctgaatgcctgatacactttctaatagcattaaagctgccacaatatctaaggttgtaggttgatgattatctaaagttgatgagtctacttctcgtcaggttgttcaccatgccatgcccacacaatatcttctagtgccggtctcatgctttggttcataaagttatgatactcaaggatgtcaccattgattttcttgatctccacgagatgataatttggtgtgatttgaaatatctcagcatttatagacatcacaccttttattcctgatttggcagcttccatattcaacaatccaccagtttttgttataaccttcagatccaggctctttgcaacctccattagctttgtgataattgtcatagctgtgttggtagacataaatttagactccttgtttgagttctcaaatataccagagagatcaaacccgttagacagggagatgatatcaaaagcattcaaaatagtcagtttctctgccgctgaattacactcgaccatattgctatttaaggaattcaaagccaaatccatgtcactaggcacataatctctcgttgtagaatcaaacaatcttgcatcaagaccaattctaaaccaaggatgagtccttatttcttcaatagatattcgtctattagggtttggatgaaggatgcgccgcagaagctttcgaacatctgaagaaaaccaacttggccatttgagttctgctttgcaaattttcttatacatgtccatcatgttcttgtcttggaaaggaagatagcccgccaacaacacatagaggatcactccacaagcccatatgtcagcttttgcaccatcatatcctttttgactaattacttctggagcaacatatgcaggagtcccacaaattgtgtggagtaacccatcttttctcttgcagtttggaagtgcactcaaaccaaagtctgaaatctttaagttgtgacttccgtcaagaagaagattttcgggctttagatctctatgataaacttgtctagtatggcagaagtcaacagcactgatcaattgttggaaatatgtacgagcaacatcttcttttaaccttccacgttgaacctttttgaacaactctcctcccttgacatactctatcacaaaatatatcttggttttggtagccataacctcatacaattggacaatgtttggatgttttaccaacttcatcaccgaaatctcttgaattatttgatccataagaccacacttcttgatcttatctttgtcaatcaccttgatagcaacgctttctgaagtcttaacattgcgagcatggtaaactttggcaaaactcccttttccaagtaactttcccatctcatatctctgcattagaatattctctttctcagccatcttctcagtgttctactttcaaacttgaataagttggcgatgaacaacaatgacgtataagatgctggtaattataagtgaccagcaattttaaccatctccacctagaaagaaaccagagacgatggttgagctacaactcgcggccccattatgtgtgtgtgcatgaggcaattgttgtgcatatatttgcagtccaatgtcatcgagatcaagtaaagtacaactatgtttgtgtatcctgccaatttccaggcaaggtactccatcatgcaaccacatctttctgcatccctttgatattttggacctctgactggaagcaaaatactgatcccgggcgatccaggcaacgcggaggagccgctcccgaagtcagat

SEQ ID NO: 532 - protein, 49 aa, Zea mays subsp. mays
  peptide (1)..(49): Ceres Seq. ID no. 13599901
MQESHKLCGVTHLFSCSLEVHSNQSLKSLSCDFRQEEDFRALDLYDKLV

SEQ ID NO: 533 - protein, 38 aa, Zea mays subsp. mays
  peptide (1)..(38): Ceres Seq. ID no. 13599902
MSSRSSKVQLCLCILPISRQGTPSCNHIFLHPFDILDL

SEQ ID NO: 534 - protein, 37 aa, Zea mays subsp. mays
  peptide (1)..(37): Ceres Seq. ID no. 13599903
MRRRSFRTSEENQLGHLSSALQIFLYMSIMFLSWKGR

SEQ ID NO: 535 - DNA, 2492 bp, Zea mays subsp. mays
  misc_feature (1)..(2492): Ceres Seq. ID no. 14308929
atgcaaaaccatggggtcggctgtgcgaggtgccagacggtttgtgataggtcaccaaaccgttcacgtgtaggtcaccatgaaacagataattatgatcttctctacgggtccatggaccgtccgcgtgtagatggcaaactgtctgcactggcgcagagggctttccgtagaacctagaccttgcctcctaggaggaaccccatcatggagaagagatcatagggttgcttcgagatcagtacgccacccaaagtgcctctagacgatgtagagtagaagagatgtgaagatggagattgcgaaactacaactaaagttatgctacttctactcctaaggcatgataatatagatagataagttcgattggattacatacatacatacgtacatacatacacacacacacgcacgcacgcacgcacacacacacacatacatatatacatacctacatacagtttgtatatttggagccttgacttccaataactagaggaagccctggctcaacggtgccatccggttcagatgcaccaggttcggaaggctataaaaacacccctaggacgtcaaggattaggttttagcaggggtggcagttccctcaggcgagcgagcggcagcgacaatcctaagggccagtggtggtggcgccccaaggagggcgatcgacgatgacgctccagaaggatcgagcgacggtggcgctcccctaggatcaagcgacggcagcgctcccccaggaccgagcgatgaccgatggcggtggtcccccaggaccaagtggtgaccgacggtggcgctccccaggatcgaggatctaggaggcgcacatgcggcgatggatctgggagacacacacgcagcgatggatctgggaggcacgcgcgacatcggctcctcggaggcgcatgccccggagtggcgcccgctggcatctcacctccggcgatgacactggcattccctaggcgcgagcggtggtggatcgacggccctgtttttatgcgattatgtatacatatttatgcaacatcaataggtttttatgatacatttttgattcatggctctccttccatcttatgtatgtttatgatatttctattcacattttatgtaaacgtttgttgttttttacgtagtgtaccgcaatgcatgaataacttccacatgtagcataattagtattagtatatatcataaactatttctaacgagcctaactgcatggctgttggagagatcctatattcatgtacgaaataaagcattgaaaatcatatttttgtttcatgcatgccaacccattttctttcaactcacattcttgtcatcctaattttgtgcgcatgcaacagaaaatatattttgtacacagtgtaccgcagtgcataaataccttcaccgtgtattataattagtctcagtatatatcataaactagttctaacgagtctagatgtatggctgttgaagagatcctatactttcaacgcactattactctttcttgctagagttagagacagaccggaggaatgaaaggtgttaatgaaaggagagagttgcagagagagactaagggagagaggagacaactagatagggttttgtaggggacgatgaaaaattcaccatgttgtatagagaccaagggagaggagagagagaccaaggaagcatgttctagtagagaaagaccattttccatagctctatctagagaggtggacgatgaaactgtagatgttgtcattagaaataatatcacatgaaggatcgtgttcaatttctcatgtggctgaataagaacagtaaggataaagttacattcatagatgaatctgtatttagacttgccaactgataattagtggattgattatgttgttactgtttatttgaccaattttttatagaaatttcatataaataggagaaaaggtattaaagttgctaatggtctcgaaatttacattgaaggtattgtagacattgcgtaagaactagatggtggctccattctacaaatgagtgatattttatttatgacttccatgataaggaatctaatttctatatcatgttcagatgataataatattcattgtcattttagaaacatatattgccattacataagacaagctctatttactttcctattatgcctcttcttttatgaatatatgtaatgtaatcgttaagcatagaatcaatcatcattgaaattgtggtactatagtttatgccatatttcaaggaggagaatttaatgattattaaaagaagaatttttcagtcatgatattttttagattttgacaattgcatggactgcattaagaaaaagtatgtgaaacaaattaagaaagatattaaacaaagcgctagagttttagaaattcacacatatatttatagtcctttccttgcaaaaaatatgtagatgatttagtttttattatatttactgatgattt

SEQ ID NO: 536 - protein, 139 aa, Zea mays subsp. mays
  peptide (1)..(139): Ceres Seq. ID no. 14308930
MAVVPQDQVVTDGGAPQDRGSRRRTCGDGSGRHTRSDGSGRHARHRLLGGACPGVAPAGISPPAMTLAFPRRERWWIDGPVFMRLCIHIYATSIGFYDTFLIHGSPSILCMFMIFLFTFYVNVCCFLRSVPQCMNNFHM

SEQ ID NO: 537 - protein, 75 aa, Zea mays subsp. mays
  peptide (1)..(75): Ceres Seq. ID no. 14308931
MTLAFPRRERWWIDGPVFMRLCIHIYATSIGFYDTFLIHGSPSILCMFMIFLFTFYVNVCCFLRSVPQCMNNFHM

SEQ ID NO: 538 - DNA, 1848 bp, Zea mays subsp. mays
  misc_feature (1)..(1848): Ceres Seq. ID no. 15227301
tagtcccccccccccccccccataattggtataagagcaagtgtaataagataatataagtgtaatgtataagttgtcacattaaatttatgttgagacggagagaatgttaagacggaggacagaaaagataaataagctataaactcatagaaaaccaacacttcaactcgaagaaaataagatgcaccatatgttaatggttttatatgtaagactaatagtatacgagtaaattgctagattttttatatgagtgatatgatagtagcctataactaggggtggtaatgattcatggtccaaatagtttttcacgattttttgacctttaattaattttagttaaaaataaatagaaatagagctcgatctaaatacgatgtaatccttaaataaactttatagtgtaaaatttaaagactaactccacccttacatataataactagcaacctgctaaattattagccatcctctaacgttgttttccaacagcttaacaacaccattatgcgatatgtgacctacttttggggaaaaaaaagaaacatatctacgcctatgttcatattctcctccaaacataaaaagaaaggcaacgagataatgccgtcccacatggcatgggaccacccgtcattttcacaagcaaccttgaactgaagcgaaagtggcgaacccggagggcatatctggcattcctaattcttgtaggcccttgcttacgagcgcagccacccaatagcaaccacagctgaggctgcggcctctgtgccatccaggggtcggcatcagcctctctccctcgctctctctgactcgtcgcggcataaacaaacaaaccaaacaaagcaaagcaaaggcaaaaccccacctccaccacacctcgtcgtttgcttttcctcggtgcgggcggtgcggcacaagcccccagaccggttgcctccattactgagctgtgcgtgcgtggtggctgtctgccttgtggcggcgccggtcatggtgatggtggagatggacggtggcgtgggaggaggaggaggaggagggcagacgccggcgccacggcggtggcgcctggcggacgagcggtgtgacctgcgcgccatggagacggactacgtgcggcggtttcaccggcacgagccccgcgaacaccagtgctcctccgccgtcgccaagcacatcaaggcgcccgtccacctcgtgagcgcctgcctctcaacctccctctcgcgtgccgctgaatcaaatatcaatctccgctattgcttgctgccgctatgctttttctccgtgccgtgctgtatgtatccacgttccatggcggcgagcagggtgttcgtgccgttgcccagtcgatccgccgcagagacatcgtttccaccggttattggtttctccttttgtttggccccggcccgcccgcccgcccgccggtttcggattggtgatgcgctgctccttgattaggaaagacgccgacttgttacgagtcagcgagtcacccactcgtttggcccgtttcttctcagttgggaacatggatgcctgatttggagagagagaggccgtcttcaaccggccctgctcgtttctcttatcgccccttctttttttttttcacgcgattggttgggcggatccattgctgtgctgattgctcggaggacggacccacgtcgctttcgctcaaagctaagatttccatctcctgccaagaagcctgtgaattttttcctgcatccttcgtccgtccagcttttgctccagactgaggctttctctaagagatgaacatgggggatgcatgattggtggcaaaggcaaataatgcacacaaag

SEQ ID NO: 539 - protein, 157 aa, Zea mays subsp. mays
  peptide (1)..(157): Ceres Seq. ID no. 15227302
MVMVEMDGGVGGGGGGGQTPAPRRWRLADERCDLRAMETDYVRRFHRHEPREHQCSSAVAKHIKAPVHLVSACLSTSLSRAAESNINLRYCLLPLCFFSVPCCMYPRSMAASRVFVPLPSRSAAETSFPPVIGFSFCLAPARPPARRFRIGDALLLD

SEQ ID NO: 540 - protein, 155 aa, Zea mays subsp. mays
  peptide (1)..(155): Ceres Seq. ID no. 15227303
MVEMDGGVGGGGGGGQTPAPRRWRLADERCDLRAMETDYVRRFHRHEPREHQCSSAVAKHIKAPVHLVSACLSTSLSRAAESNINLRYCLLPLCFFSVPCCMYPRSMAASRVFVPLPSRSAAETSFPPVIGFSFCLAPARPPARRFRIGDALLLD

SEQ ID NO: 541 - protein, 152 aa, Zea mays subsp. mays
  peptide (1)..(152): Ceres Seq. ID no. 15227304
MDGGVGGGGGGGQTPAPRRWRLADERCDLRAMETDYVRRFHRHEPREHQCSSAVAKHIKAPVHLVSACLSTSLSRAAESNINLRYCLLPLCFFSVPCCMYPRSMAASRVFVPLPSRSAAETSFPPVIGFSFCLAPARPPARRFRIGDALLLD

SEQ ID NO: 542 - DNA, 2085 bp, Zea mays subsp. mays
  misc_feature (1)..(2085): Ceres Seq. ID no. 13623233
aggatcccccaggttatcggaacctcggaaagcagtttatcaggccccgttccccgttccccgtcctccatcctcagtcccaggtctcttctagttctgtcgttctctggccaaggcatttccgtgcaggacgtacgtcccgaggatgcagactcgcaaccctgaccagccttccccggacccacgcgagcgggacaccgagcagacgacgtctacaaggcggaagcgacgcaagtatactgctgtagcttggtacgttcagcattcatttggtttgtcctgttcagggagtttgcatcaagccgaatattgctgcaaaccgatgatggctgtgcctgcaactgcatgcggtggactgtagctagggcctaatggtcgagtgcttcccaagctaactccaggcgattgcgcagttctgaatgcagaagacggaaactcaaatgcatcccagactcaaaagaatcaagctgtgagagatgcatatccaaggggcatcatgcttgcgactacgatgcactctatcgtgagcatagagactcacagaaagtgaagagcaacaggtaaatgagcctactagagcattagttattgctgtcctgatgtttggctaatgactatggcaaaagctccgcaacagttgctgctctccgtcaagatgtcaagttcctacgcgataccctgagcggcttgataacaacggtccaagcaaatgccgaacccagtgatggaaatacccgacctcagagccagccgttagacacccatcaagcggttcccatctcaatgcaatcacggcggccgagctctccagctcctgaagctgtgacattcgtggcagggaccccccgttctgacgcctctgggattgatgtcgctcctgtgagtcaaaagttgcccacctgaagaagtcatgcagatagtacaagggaagcgagatttctgacagaactcaagccgcgacatgtcacctctccacactcgcttcggggtggcccagcagagcctcgcttcataggtccaacccgatcagcatacagtctggaggttggggaacgtgctctttctcgtctgggtatacctgtttttgatatgcctccacccagtggccaggaatcgccggcagaatccccgcgacagccttctggcaatactgaagaccagttctgggaaacctgcgatgcagccgagttcacgcggttgatcaccatctatcaggaagagatcgagtcggtctacccgtgcttgaacacaggctcgctgatcaaatatgcaccggccattccagaactgggacgcatgccggaggacgagattcgcaagacaatcgagacccgtcgcctgtcacttacagttaaagacgtgcatctcgccaaacttgccatggccacaacaattgtcatcgaaggccatggaaagagtgaaaagagttccaagcttgttgaacctgtggaacgcagcttgttaagcattctggagccgagccgagagctgaaagacttgcaactgttcatagccttggtaagttgctgctacgccgtcatcgatgtggaagtgtatcaggcctcactaacccatgttcaatctcacgagatagagcgtatactacttccattctgacgaagaccttttggcctggcgaaccatcggtctcgccgcccgagaggcattagtacttggccttcaccggagaggtaccttgatggaatcgttcagcgttcctgaagagcgcgacgcagcgataagggttttctggactatctatgtcttggatcgtcgatggagtttcgggaccagcttgtcctttgccctcgtcgatcgagacatagaccctgaacttccagaaccagtaggtcattccctctacccacaaagtgacaaagtggaatatcgagtataatcgctgactcagttgcgcagggagaggactgtgcctatttgcagtgtatggtcgggtacggtcgactttgctcaacattatgggatgccctggtgccctttggccagcgcaatcccggcggtgatgtggattcactcatgaaggagctcgacatcaagacacaggagtggctcgagggggggcccggt

SEQ ID NO: 543 - protein, 175 aa, Zea mays subsp. mays
  peptide (1)..(175): Ceres Seq. ID no. 15219369
MPPPSGQESPAESPRQPSGNTEDQFWETCDAAEFTRLITIYQEEIESVYPCLNTGSLIKYAPAIPELGRMPEDEIRKTIETRRLSLTVKDVHLAKLAMATTIVIEGHGKSEKSSKLVEPVERSLLSILEPSRELKDLQLFIALVSCCYAVIDVEVYQASLTHVQSHEIERILLPF

SEQ ID NO: 544 - protein, 106 aa, Zea mays subsp. mays
  peptide (1)..(106): Ceres Seq. ID no. 15219370
MPEDEIRKTIETRRLSLTVKDVHLAKLAMATTIVIEGHGKSEKSSKLVEPVERSLLSILEPSRELKDLQLFIALVSCCYAVIDVEVYQASLTHVQSHEIERILLPF

SEQ ID NO: 545 - DNA, 2446 bp, Zea mays subsp. mays
  misc_feature (1)..(2446): Ceres Seq. ID no. 13599880
caacagttatggtcaatcacagggtcctaactatggccaacctcaatacccgcaacatgcgcctcagcagaactacagccatgggtatggtgatcctagatacaatgctccccctccgaaccagcagtactatggtcagccgccaatgggcccgcagcaaggctatcctcaacagccagatccctatgctaggcctccatacagtggacctggtcaatggcctcccaggggtgctccggctgcagatggctcttaccaggcgccagctgcatcttatgggccgccttctcagcacccttctgcttatgggcaaacgtacagtgcagcaactggatctgatggatatgctcaacagggttacccacagcagggtgggcaggcaccagctccatatggtcagagtgcaccagcagctccaggctatcctcagcagcaaggtggctatgcacagtacccacagacccaaccagcatatggtgagcaagcagctcaaaccaatgcgagctatgggtaccagggagctccagcagatcctaactatggaagtgcctacccacagccaggatatggtcctcctggtcaggctactggtcaggctggttatgcctcctcagcagccagccagcctgcgtatggccaggcaggatacacccagccgcctacaaatcctccaggttatgagcagtctgcggcaccagcaacaacccagagcggctatgctgcgcccccagcaaatccacagcagcctgctgcagcaaaaggggtctcgccacagcctggtggtggtgctgctgcatatggtgctggtgggcagtggacagcatgaccctcctcgaacctcaaacatggctcgctggtagcaatatcgtgctcaatatttgcaccttccggatgcatccttggttatcggaagagattgtgtaactccttgattagtgatacttggcatctctgtagtagcacctactagtagttcgttggttaactgtgacaataaacatcctaattcctattcacttcgaatcaaacttcgcagcttgccaagtaatttttttggatttgtgtttattcatgtaaaatagttactggtttggctcacagaatgatgattctgtttctgcagttcattcaaatttggttctgatggatgttaaacctagtgatgacaatttaacccgcaaatctgaaattagataggtgcgtgtatgtgtgaagattttgacccgtggttgcaacccatacctaacctgaagtttcgtgggtgttagatgcgggtttttatttcaacctgtatttgacccgaaattcaacccgtatttgaccccaaatttggtttactccttattttgcgcaataatgactaaagatacaatagtaattattttcaattagtgacttggttaatgattcatgaagtgttttgttggtgcttaacgtaaggtttaaatccataaatataactcaattattgctggtatttaaatacttataactaaattattgcttgaaagtgtataatgagtaaaacccacgggtgatcttaaacccactcgaaacctgatggatttggatgtgggtttaaatttgcacccgcgtgtgcgatcgcgggtgagtttaggtagatttcacgagtttgatcgcgaacatggtttttctccaccgactcaaatctgattcattgtcatccctagtcaagccgaacatactatccctagtcaagccgaacatactgttgctcttgcaatgtgagaagcgttatgtacatatggatcgattagcggttgattgcaactatagtaagatcttgtccagtagtttatccatatggtcacctaaaatactgttttgcacctaaaatattgttttgcacggtagaccgcactgttcgcagagtggagtttaaaataggagatcataaggaaactgtaccattgtcgaatagtattctactccctctattttcgaatatttgttagctgctagtttatttttgaactaaaacacgataaataaaaaaactaaggaacatactactaagattgtctcaacgggtaatctaaaataggggtcacaaaattgtagatgacattgtttgatgctgtttgtagagtaaagtttgaaataggagacacgatagggaatctgctagagatagcctaaggtcttgatcggttatttccatgccatatgaattggagggaattggaaaaaaataggaaggattttgatttgttatggatttaagtccatccgatcttctccaatctatatgaattaagataaaaatgaacatatgttgagtgtgggggtgaagtagatggtgagggttcccatgctccaagtagatggtgagggtgaagtagaatgtgggtggtgaccccactccaaattgatggtgagggtgaagttgaagatgtcgatggtgattctcgagggggggcccggt

SEQ ID NO: 546 - protein, 285 aa, Zea mays subsp. mays
  peptide (1)..(285): Ceres Seq. ID no. 15218898
TVMVNHRVLTMANLNTRNMRLSRTTAMGMVILDTMLPLRTSSTMVSRQWARSKAILNSQIPMLGLHTVDLVNGLPGVLRLQMALTRRQLHLMGRLLSTLLLMGKRTVQQLDLMDMLNRVTHSRVGRHQLHMVRVHQQLQAILSSKVAMHSTHRPNQHMVSKQLKPMRAMGTRELQQILTMEVPTHSQDMVLLVRLLVRLVMPPQQPASLRMARQDTPSRLQILQVMSSLRHQQQPRAAMLRPQQIHSSLLQQKGSRHSLVVVLLHMVLVGSGQHDPPRTSNMARW

SEQ ID NO: 547 - protein, 283 aa, Zea mays subsp. mays
  peptide (1)..(283): Ceres Seq. ID no. 15218899
MVNHRVLTMANLNTRNMRLSRTTAMGMVILDTMLPLRTSSTMVSRQWARSKAILNSQIPMLGLHTVDLVNGLPGVLRLQMALTRRQLHLMGRLLSTLLLMGKRTVQQLDLMDMLNRVTHSRVGRHQLHMVRVHQQLQAILSSKVAMHSTHRPNQHMVSKQLKPMRAMGTRELQQILTMEVPTHSQDMVLLVRLLVRLVMPPQQPASLRMARQDTPSRLQILQVMSSLRHQQQPRAAMLRPQQIHSSLLQQKGSRHSLVVVLLHMVLVGSGQHDPPRTSNMARW

SEQ ID NO: 548 - protein, 275 aa, Zea mays subsp. mays
  peptide (1)..(275): Ceres Seq. ID no. 15218900
MANLNTRNMRLSRTTAMGMVILDTMLPLRTSSTMVSRQWARSKAILNSQIPMLGLHTVDLVNGLPGVLRLQMALTRRQLHLMGRLLSTLLLMGKRTVQQLDLMDMLNRVTHSRVGRHQLHMVRVHQQLQAILSSKVAMHSTHRPNQHMVSKQLKPMRAMGTRELQQILTMEVPTHSQDMVLLVRLLVRLVMPPQQPASLRMARQDTPSRLQILQVMSSLRHQQQPRAAMLRPQQIHSSLLQQKGSRHSLVVVLLHMVLVGSGQHDPPRTSNMARW

SEQ ID NO: 549 - DNA, 2630 bp, Zea mays subsp. mays
  misc_feature (1)..(2630): Ceres Seq. ID no. 13599765
ctagtccccccccccccccctcgtccttagttacgtcctctcttccctttaccaactccagacggaccatgcctcttctcgatgcccaaacctctccttccggcagcgataccaccctttccactctttccaccccggccaccccggccaccatcaaaccctcccctgcccctgaatgcaccacctcttgcgccgccacgctcccttccaggactcatcttactcttcaccgccgcaacaacatcctcatccatctcctcatcctcgtcatcacctcccctgcggttcgagaacttcagcttaccgccacgaccacgtttggcaacatccttgcccttgagagcagcaacgtaagcgcccacccctgagtgctctgggtcgactgctctgccgtcgacgtccatatcttcgtcgtcgtccttgccgaggatgagcttgccgtcgagatcggtcttggcctttgtcttagtgggtttgcgttgcttcatgggcttcgtggaggagatgttggccattgccttcttgtcgagcaagtcaagcggctcgtcttcgtcttccatgatatatgtgttgccgcccttctgggacttcttgggccggaaggaaacctcgttgtcggagccgtcttctgagtcactgctgtaaagtgcctggtcgtactcgttctcgtactggcgcttaccggctgcgccatcctcgtcatcactgtcatcgtgtctgttgcgggcaccttccttcttcttcttagcctgatccctgactttacgaatgttcgcgaggatcttcttgccgtcctcaggggcatgctgatagatgttgtcgtagccaaagcgacgaaccatgcgctccagaatgtgcttgacctttgccctgaagtgacccttgtgctccgaactccatgtgaccaggttcgggacgagcgtcgacagacggggaagcatgagatcgacaggcaggctgatgacgcagactttgacgaacccaagacagctcttgacaatctcacgattgtttgatgtcaggaacaggtccattgtctgcacgagatcagaaagagtctgctcgctcaacgagttgcggaactcataaagcagccggctgatggccgtgatcgatgcggaaatcatgtgtggcgtgctacccgccaaaccagcgctcaccattgtgatgaactcctcgatattggctgtgccgtttggggcgtcagccgacatgtgaggcaccttcgtgttgtcgatcgttgcgccattggcctctaccatgcggttgcccatcttcacaagcaagtcgtacgctgtttccctggcgcgctcgttattctccttgcagcagataacgacctcactaagcacagatgggatgaagtgcaaggagtcgtcggcggtgaaggggagcagcgccatgatcgcggagagtctgtcgcggcgagcaggggtagagaccttgtccgtgctggagacaataagggtctgaagctcggcatttcgctccttgagggcgagcttgccgagcccggagtcagcaagacggggaataagcttgtaagccttcttttgaagctgtggctcttcttgcttggtgatgatgacggaggcaatttcaaagagcgctgaaaagctctctcggggaaggtagacggagatggtgatgacgagatccataagggtctgggcggtagatggcatatggtccttcttttggccagcttccttcttgtcggctccagcgggcttggagagctcgggaaccagcatttgactgaccctgtcgaatgtgtccatgatctcttgggagggcgtgatactgaggaaggtgttaatggtctggagaatgaggcctctgctattgggaagagtctgagtgtaaacattgaaaagcacagccagcatattgccggcatagcttccaaggagggcaaggttcttgcgtgcagcttcccgcctgacgcggctctggagaagcaaatcttcttcctctgaaccgtcgatctcggcgatggccttgttagactcaatcaacgtcttgagtgccctgcagacatccaggcgcaaatccacctgcttgtaaaggaggtttgcaatcatctcggcgaatgactgatcgaaggcatccgcaagatccaggggcagatcacagtaacccggcagaattgaccagatttgttgcaccagagtctcgtaaatctttacctccatagttttctcagcctgtccgtgatcgagcaccttctggaacatcagttcactgagggggaccatttcagttttgaagtggttgaggttggtgttgctggtatagtcgcgcaggatagggaacatccacgcacggccaggttggcccttaacaggcttcgctaagttgagaggcagaacgttgagcacagcctcggggcccatggcgcggacagccttgccaataacctcatcggcttccttcttgctctggaaggatgagttctctcggagttcaccgaccgtcttggttacacccaagaggatagggtatgatcgccagcgaagagcatcgaacatggctccgaagacgccaaaggtttgtagccatgctgcctggtattgaacggtcagaagcgcctctgaggccttcgcgatcttctcgagggggggcccggt

SEQ ID NO: 550 - protein, 121 aa, Zea mays subsp. mays
  peptide (1)..(121): Ceres Seq. ID no. 15219239
SPPPPPSSLVTSSLPFTNSRRTMPLLDAQTSPSGSDTTLSTLSTPATPATIKPSPAPECTTSCAATLPSRTHLTLHRRNNILIHLLILVITSPAVRELQLTATTTFGNILALESSNVSAHP

SEQ ID NO: 551 - protein, 99 aa, Zea mays subsp. mays
  peptide (1)..(99): Ceres Seq. ID no. 15219240
MPLLDAQTSPSGSDTTLSTLSTPATPATIKPSPAPECTTSCAATLPSRTHLTLHRRNNILIHLLILVITSPAVRELQLTATTTFGNILALESSNVSAHP

SEQ ID NO: 552 - protein, 97 aa, Zea mays subsp. mays
  peptide (1)..(97): Ceres Seq. ID no. 15219241
MVLLLASFLLVGSSGLGELGNQHLTDPVECVHDLLGGRDTEEGVNGLENEASAIGKSLSVNIEKHSQHIAGIASKEGKVLACSFPPDAALEKQIFFL

SEQ ID NO: 553 - DNA, 3211 bp, Zea mays subsp. mays
  misc_feature (1)..(3211): Ceres Seq. ID no. 13599858
ttctcattttcttcaactgtacagactttcaagaggaagggatctgatctagatcctcgaagttatatatctggaaaacaggctcttcagatatcgaacctcctttatataaatgttgttaatcagcttccagcatttgtttcatttgagttgtgtttactgcctagctctccatccaacaattgatatcttactgactggtggtcgagattcaatttgcagggtatgatctctcttgcaatcacaccttatgaaaaaaatcattgcatttaatggtcacttggttttgcttgggttatatatacatgtgtgggacatcagaacaaaagtatgtgtttctgctttaacaggacatgacaacattgtatgttcagtgtttgctcggcctatggtaagaatgcattttaacctgtcaagttcacgattcaccacaatattttcggccaaatggtacacaatatttcatgatgtagttttatttggagtcactccctcagttaaccaatggattatttgaagcagtgtctctgttctgtagatactttgcttctttgaaaatacctgccatcaattgttttactaaagtttagagtgtaataataaggcaaatgagcaaccttgatagaattcatatgccatcagtagttttaccatttaagctacactattttaaaatatatttttgctatggtaagtactcttatgtgtcctgctttactgttcatccattctcaagtatactctttgatcttttgatatgtgtgcaggcccaaaacatctgcaatttattttttgataagtcctccaagatttggttagttgcttcatgctttctctttttctctcttaatacttagctcaattttgttcatactggtatgtttgatctgtgatatactgctatgagcaaccttaattttgtattgccttacaaatgatttttagctgtcgcttgccaagtataggtcatattgtgggtagtcacaccaaaactaaaactaatggcaattggtttgcaataggcagtgctctttctgttagctctggatgtcacggcaatgaacaaacacgttgagtatgatagtgatgctaaaattattgcaatcgattgaagccctaccatgtggcaaccattgatccatgcccaaaatgtgcctgccactggtgttcttatcccaacactcgatcaacatgcaagtagaaatgaagcctagagccaaatgatgcgagaggagtatggtctagacacgagccagttcacataaacccttcagacccaagcaggtaccagcagaatggcacgccagctaaagaaaggtgtcatggtgttgttcaaacttcgagtggtgtgtggaatagaagaatcccaattcccaaccatattatttgtcacgcttggtatgtcttctatataaatgttctatgcacctgtaattttattgtgaatgaggaactgttagccattgacatcattttttgtgttttwagggagtttgtttattgttgccaatctcgaccttttttcatgtagctctatttaaccttgatgatttactcaaatatatgtaagatttggttgtgccatgaagtgagatgatattgatagatctcttttgctttgtgtacatcagaaatgagttagattctagatttcttgagatggcaaaacttcccattgggttttcagccaatgtgaaaagaataagctggtgttccattggtgttaaatggcagtgactctatgattcaattttatgtgccatatctttctgctatccaactatttgcagatatattgagacatgcctcaagaaatagtttatttagagcaactaaaccagccaaattagtgtctgctaccaatatgttgcattttccccatgacagatatgataccagttttgattgaatcaccttcatattttcatctaaatcattttttgttgtatctctctacctgtttgagtttgccggtaggtacaggggaaatacgacaacatcatcgcggcggtgaagagctactacatgtcgatgagcggtacactaccaatagtgtcggtgaagagctaccaatctgaatgaatggtttcaagtgtgagagtgagcaatgagcttggtgcaagacacccaaaatatgcttatttctcagtgtgggcagtgactgcaatctctatactaatatttatcattcttgccattgtgatcctctacctgtgcaactacaccagctacatgttgcatgttcacatatgcacttttgtattagtaatatctcttgtatagtgcttttctcctctttatatccatgaagtaaaactcatttctctctcaaatagaaatgaaaaaatgattttgtttccctttccaagtggttcagttcctgagcaagtggcgttgtttatgttcatggccatgtgaatgggtctccaacataatacttgtctaatactcaagatctgatgccctattttgttagcagaaagattgatagattcacttttgtttctaatccggtcccctattttggtattgggtctcccaagggagtcatattataaggagaacatggaacaggaaaaactcttcttgccaaggttagtgttctgtcttacaagcatataatatgccaatatattgcttagtattgctgggcaagcttcgatcctcattgatatgtgttttgtctatgtttatctgaattacacattcatttttctactttcagttttcaaatgtacttgggtagtgtttaactgaaactgtctgcagactgtggctaactcaacattgcaactttcttgcatgttgttggtagtgagctcattcaaaagtaccttggggtgccgtcctccaccttggcatcacacccacctcccccgatgaagactcggtacacgacctggcgcgcactcgccatatcccctccgtgcaaacaacatttgtctatgtttatccaaagaatgattagttttagcaaaaatgattagattagtgtatggttgtcgccaactcgccatgtttgcttgtcattaataattatttattgactctttagaaataatttgtgtgacattgataatatttgttccacataagttcaatcaatttgggtcaccgtatttataacaaaaaaaaaaaaaaaaaaaactcgagggggggcccggtacccaattcgctgtttaaacacaataaagttggaackggagggggg

SEQ ID NO: 554 - protein, 88 aa, Zea mays subsp. mays
  peptide (1)..(88): Ceres Seq. ID no. 15219289
MKKIIAFNGHLVLLGLYIHVWDIRTKVCVSALTGHDNIVCSVFARPMVRMHFNLSSSRFTTIFSAKWYTIFHDVVLFGVTPSVNQWII

SEQ ID NO: 555 - protein, 82 aa, Zea mays subsp. mays
  peptide (1)..(82): Ceres Seq. ID no. 15219290
MSNLDRIHMPSVVLPFKLHYFKIYFCYGKYSYVSCFTVHPFSSILFDLLICVQAQNICNLFFDKSSKIWLVASCFLFFSLNT

SEQ ID NO: 556 - protein, 74 aa, Zea mays subsp. mays
  peptide (1)..(74): Ceres Seq. ID no. 15219291
MPSVVLPFKLHYFKIYFCYGKYSYVSCFTVHPFSSILFDLLICVQAQNICNLFFDKSSKIWLVASCFLFFSLNT

SEQ ID NO: 557 - DNA, 2001 bp, Zea mays subsp. mays
  misc_feature (1)..(2001): Ceres Seq. ID no. 15224654
atattgcatttaatgcgtcgtcagatgtcagataaagccagtcgcggacggtctggtcgtgcaccttgacggtccgcgaggacgctataattcatttggctgaacccgtcaccttcgggtttttcggttcctcacctaccggacggtccgcgcctgagcccggacggtccgcgcgtggtctcggacggtgcttgctcttccatcggacagtccgcagtagagacacatgtttttgcattggttctgtccgagggttatttaggtgtcgcggacggtccgcgcttggcctgattttccaaaaagcttctcctgtccggaataatctacggtattccggacagtcgatttagtataattgtaaatgaacctttggcacctgtagaacatatgatctagagcaaaccagttagtccaattatttgtgttgggcaattcaaccaccaaaatcaattaggaaaaggtgtaagcctattttccttttagagtcctccatcgcaacactggctctgtgcttggagtgggactcggcagcggtggctgactcgcccagttggttggcggaacgacagccaatggcaccgcgtcgcgtctggcgactgcggtcctcctcgtatcggggaccagatgcggaggtgagttccagcgtcgaggcggtccccaacggcgaggacccatcgggatgcgtcggggcggtgctatccgcccgtcaacaagatcttgcattgctcggtcgagtgcacggcgcagagaagaaattttgaagatgccatggcgagaggcttcaatcgagtcgtcgttcacggcggcgacaatgtggttcaccacaaattcgcgctggtacatagccattttcttaccgttctttctcccatgtttgtctcttcttcttctggcgagagcgggtgctgataacatgttagaaaacaaagaaaactgaagcaaatgatgcgtgtgttatttccattcgatggtggtgtgtatttatacatagtgaaacgacagaaaacttgtctgttcgccatggacggttttctcgtcgtagaagagggagagggagagggatatggatgcgtgttccggaacaggatttacattaaggaatattattaacactaatcctattaactaatgaccgtcgatcttgattaatctccacctttgatattgagtgtgtttcttcctccggattgcttacgtggacaaaatcatttttccttaacatatttgaccagcaacaataaaattgtgtgcgtcaatatatgcatgctacacgcgcgccattattagtccggccggccatgcgtcgttatgctggttctattaatttgtgcatcgatattatacctgctcttaaatcatcgttagaaaaaataattaattcttcaatatctcttatccccaagctttctgagcaaccattgaccattcacaatcatcgataagcatatggagtatataatgacatataagtccattatatatatgtccatactctagctagttggatcactctagctggcagccatagtcgtcattatcgtctcaaatggctgacaaagcggttagcttattatatgttatataaaaaaatagggtcataaccattataattatcattatttgatttgactcgcacaaacgccatgtgattctatttctatttcgtcaacaagaggtacacgcataaatgaatcattattagagccatgtgatcctagtaggccctcactagttttaatgatttataacaacccaagatgtgcggaagccaacgattaaacgatgtacatacgaaggcgaagctaggaagcttcggctccaatgtcagtacgcaacgacaagtgagcgagggaaaacctggagacttgctcaacacatctgcaaaaggaaaagacaatgatgcccctacaagatcatgtagtctcaatgtatagaatgttgtactcctactcgtcactataaatagaggaacaatgccatgttgacaaacaccttttcttt

SEQ ID NO: 558 - protein, 85 aa, Zea mays subsp. mays
  peptide (1)..(85): Ceres Seq. ID no. 15224655
MRRGGAIRPSTRSCIARSSARRREEILKMPWREASIESSFTAATMWFTTNSRWYIAIFLPFFLPCLSLLLLARAGADNMLENKEN

SEQ ID NO: 559 - protein, 62 aa, Zea mays subsp. mays
  peptide (1)..(62): Ceres Seq. ID no. 15224656
MAPRRVWRLRSSSYRGPDAEVSSSVEAVPNGEDPSGCVGAVLSARQQDLALLGRVHGAEKKF

SEQ ID NO: 560 - protein, 60 aa, Zea mays subsp. mays
  peptide (1)..(60): Ceres Seq. ID no. 15224657
MHATRAPLLVRPAMRRYAGSINLCIDIIPALKSSLEKIINSSISLIPKLSEQPLTIHNHR

SEQ ID NO: 561 - DNA, 1819 bp, Zea mays subsp. mays
  misc_feature (1)..(1819): Ceres Seq. ID no. 15225023
aaccgcgggctctgcgacattgcccaggccgagtcgctccgctacaagcttctcggtgaactcgccgtgagaaggttatgctcttgaccgtgcatctttactgttgtagtcactctcacagcaggctcggctttttgctgtgccagaccctgtgttctaactctaaggtgacgaaattgatcaccccctccattgcattttatagttagtgggagggacttattactcttccattgctcaagtgttggagggttatgtacttctgaactaggtaaattttggagatagttattttagttgtgttttgtgcatgtcatctataaagcaaataggttaccgtgtaccaactttgtgtcggaagatgactatatcacctgtgccaactggtagtgtacctctgagaagctttggtcataggcttctgagatatttatggttggccacattacttgtctgtttgtttgtttttgtatgttttgagcttgttttattattgattattactgattactgatatgtgaatctttaattgctaaaatattcttgttagtatgcttggcacggcaccttttgtttacctctagtatttaatctttactaaattggtttgtttgattttcagggcatgttatggtgttctcttatttgtcatcgagagtggtactaagggctgcgaggtgtgagttccacaaataaaaaccattccagtttttgtttctatctcgctgcaccatgttatcctgacaatttttgctagtgtgctatttaaactgatggaacaattacagaacactttcctttgtcgaaattcatgagtgaattgttaacctagtatggtcctgcaggatagtgtgtatcagctttgcgctgttttgatgcgtcttttgctgaaagtgtttcctgctatatcaatctgagttaaatgggcagttgggttaagcatatctgctttctccgacaatcattttcctcacatgtactcaggaagttatttttttgcgttctatatgctgctgtcatctgttttgttggttagctttgtcagatatatttgtttcaacggcaagttagtgtaggctagagttgaaacccaacaaaaaccatatgtcaaggttaaagcgataggctaaatctttggtatatttcatcctttcaaatctcttactgctttatgtcaacttcgaccttcctctatctctctttttattgctattgtgacttgaaagatgttagaacaggtattctacatttatgttcttctcatccggattgccatatgttttcttcagttctgcacaactagttgctctgcaggatagtgtgtatcggctttgtgctaacttatatgcattttgtgccgtaagtgtttcctgctatatagactgaaggaaagtgggcagttgggttagacttgtatcctgtcttttccaacaatcattttcctctcatgtgacataatacatttgttcttggaaactagtttttgaattgctgtcttagcatttacatgtttagctgctttattatactgtatgcatccaggggtatggaatatggtctgttgcatgtgctttttcctggtatgcaaagcatgtagtttgaattccatgggttgtgttatatgtttcgctatctaagtcagcttcatctgaaaatgataagcagatcagtttcaattggaacatgccaagctgaagcgatactcacctgcaaggagcgtcttctctgtgtactgcgtcgaagctttacctttttatgtaaattacgctgtaaatgtacagttcctctggacactgaatttctaagggctttttttttt

SEQ ID NO: 562 - protein, 67 aa, Zea mays subsp. mays
  peptide (1)..(67): Ceres Seq. ID no. 15225024
MSSIKQIGYRVPTLCRKMTISPVPTGSVPLRSFGHRLLRYLWLATLLVCLFVFVCFELVLLLIITDY

SEQ ID NO: 563 - protein, 66 aa, Zea mays subsp. mays
  peptide (1)..(66): Ceres Seq. ID no. 15225025
MFRYLSQLHLKMISRSVSIGTCQAEAILTCKERLLCVLRRSFTFLCKLRCKCTVPLDTEFLRAFFF

SEQ ID NO: 564 - protein, 55 aa, Zea mays subsp. mays
  peptide (1)..(55): Ceres Seq. ID no. 15225026
MISRSVSIGTCQAEAILTCKERLLCVLRRSFTFLCKLRCKCTVPLDTEFLRAFFF

SEQ ID NO: 565 - DNA, 1810 bp, Zea mays subsp. mays
  misc_feature (1)..(1810): Ceres Seq. ID no. 13600199
  misc_feature (1752)..(1752): n is a, c, t, g, unknown, or other
  misc_feature (1754)..(1754): n is a, c, t, g, unknown, or other
  misc_feature (1790)..(1790): n is a, c, t, g, unknown, or other
  misc_feature (1791)..(1791): n is a, c, t, g, unknown, or other
gtccccccccccccccccatctacaatggaggagcatgcaattactgaccgtgagcttccgattgagggtcttgatcaaccactgtcagattttggaaatgatccggagttgttttctgaagcacagcctgtttcttcccatggtcaaggtcagggttggctcagtgaggggggtgacaaagctgaggtcgtggatgcttccattagcaatgatgttgtggtagtagcagagaacacctgcactgatatctctcttggggatattgagcagtttctcatgcaaatatctgatgatcagcaaaacgatgaattgttctcagatttatcaacaccacttccaaaattgcagttccagtgcgatgatcgtcaggtttggcttgatgccgaaatgggacatgaagtttatgctgcggatcctactgccagcagtggtgctgttgtaactgcagaatgcactgtcacagaacttccacttggagatcttgaagggcttctgctgcaaatagccaatgaccagcacatggtcgaatcccaatcagatctttctgcaccaactccacatcataacttcaatcaggctgacattggggatttacatgaatctcatggtgctcgggttggtaatctttcttgtatagttcaggaaagcacattttgtgaaccacggactgaaccaagtgatcaatttccacagtctaatgtaaccaatttgccatttagcggagaagcaaattcttctgaagggaccagtgtggcacattctgtgtcaggtttgatcagttaccacagtcaagatgctgatgaagagttccttgaaatcaacgatttctttgatctggaggatgtaggtcagaatgcaaattgtatgacaactgagtacatgatgtctgcaacaaatgggatgtttgacaatttggaatactctgatgcttcttcgtttctacctgggtcatttgacacagttggattggtagctgaaaatcaatattttgataccgattacagtggaattcaaaaccagggatatcaaaatacaaccgaagtaaggacatataatcaggctgctcttactgtgcggagccatatgaagcatgatcatgtagtcttatcctcgcatgcatcaggcactctgaatatccatgcggcaaatgagctacataaccagagctccacatcttcacaatcatggttcaatgcggctctatcagccttgttggactctgtacctagtagtccagcattagctgctgaaatcgaaaacactgttatcaacagaacactccagcgcatctctagcttccgaccacatcaaactgcaggtgaagaaaacacttttatcaacagaacacttcagcacatctctagcttcaggtcacagcaagcaacaggggaagaaccaggcacccctagtattcaggttaccagaggtggcaggmtgatgttcatatctctactggttatacttgcttctgttatatggacctttacttcaggctccgccctcaacttttgcaagggtttatggaaatcctcttctacgtgacagattaagtgggaacctggtgaccttgtcctctgtaaattttttggtcctcggtaccatttatggtttgaatatcatttccctttcaaaagggtgaagaggtagaaacattttgagggtggtaatatgattataggttgtagagcctatttaaaacggtaaaatgcaagggggaaaagcatatctgatggtaatatttgaaactaatngnttactgttctcatttgtatttkgacagatatatgtnntgaatgcaattaacctatt

SEQ ID NO: 566 - protein, 513 aa, Zea mays subsp. mays
  peptide (1)..(513): Ceres Seq. ID no. 15218917
  misc_feature (479)..(479): Xaa is any aa, unknown or other
SPPPPPSTMEEHAITDRELPIEGLDQPLSDFGNDPELFSEAQPVSSHGQGQGWLSEGGDKAEVVDASISNDVVVVAENTCTDISLGDIEQFLMQISDDQQNDELFSDLSTPLPKLQFQCDDRQVWLDAEMGHEVYAADPTASSGAVVTAECTVTELPLGDLEGLLLQIANDQHMVESQSDLSAPTPHHNFNQADIGDLHESHGARVGNLSCIVQESTFCEPRTEPSDQFPQSNVTNLPFSGEANSSEGTSVAHSVSGLISYHSQDADEEFLEINDFFDLEDVGQNANCMTTEYMMSATNGMFDNLEYSDASSFLPGSFDTVGLVAENQYFDTDYSGIQNQGYQNTTEVRTYNQAALTVRSHMKHDHVVLSSHASGTLNIHAANELHNQSSTSSQSWFNAALSALLDSVPSSPALAAEIENTVINRTLQRISSFRPHQTAGEENTFINRTLQHISSFRSQQATGEEPGTPSIQVTRGGRXMFISLLVILASVIWTFTSGSALNFCKGLWKSSST

SEQ ID NO: 567 - protein, 505 aa, Zea mays subsp. mays
  peptide (1)..(505): Ceres Seq. ID no. 15218918
  misc_feature (471)..(471): Xaa is any aa, unknown or other
MEEHAITDRELPIEGLDQPLSDFGNDPELFSEAQPVSSHGQGQGWLSEGGDKAEVVDASISNDVVVVAENTCTDISLGDIEQFLMQISDDQQNDELFSDLSTPLPKLQFQCDDRQVWLDAEMGHEVYAADPTASSGAVVTAECTVTELPLGDLEGLLLQIANDQHMVESQSDLSAPTPHHNFNQADIGDLHESHGARVGNLSCIVQESTFCEPRTEPSDQFPQSNVTNLPFSGEANSSEGTSVAHSVSGLISYHSQDADEEFLEINDFFDLEDVGQNANCMTTEYMMSATNGMFDNLEYSDASSFLPGSFDTVGLVAENQYFDTDYSGIQNQGYQNTTEVRTYNQAALTVRSHMKHDHVVLSSHASGTLNIHAANELHNQSSTSSQSWFNAALSALLDSVPSSPALAAEIENTVINRTLQRISSFRPHQTAGEENTFINRTLQHISSFRSQQATGEEPGTPSIQVTRGGRXMFISLLVILASVIWTFTSGSALNFCKGLWKSSST

SEQ ID NO: 568 - protein, 421 aa, Zea mays subsp. mays
  peptide (1)..(421): Ceres Seq. ID no. 15218919
  misc_feature (387)..(387): Xaa is any aa, unknown or other
MQISDDQQNDELFSDLSTPLPKLQFQCDDRQVWLDAEMGHEVYAADPTASSGAVVTAECTVTELPLGDLEGLLLQIANDQHMVESQSDLSAPTPHHNFNQADIGDLHESHGARVGNLSCIVQESTFCEPRTEPSDQFPQSNVTNLPFSGEANSSEGTSVAHSVSGLISYHSQDADEEFLEINDFFDLEDVGQNANCMTTEYMMSATNGMFDNLEYSDASSFLPGSFDTVGLVAENQYFDTDYSGIQNQGYQNTTEVRTYNQAALTVRSHMKHDHVVLSSHASGTLNIHAANELHNQSSTSSQSWFNAALSALLDSVPSSPALAAEIENTVINRTLQRISSFRPHQTAGEENTFINRTLQHISSFRSQQATGEEPGTPSIQVTRGGRXMFISLLVILASVIWTFTSGSALNFCKGLWKSSST

SEQ ID NO: 569 - DNA, 802 bp, Zea mays subsp. mays
  misc_feature (1)..(802): Ceres Seq. ID no. 13600216
ttgggtaccgggccccccctcgagtttttttttttttttttttgcatgaaaagattaattgcataacagttttttttcttacattcaccagtaaaagtggtattaagaatgcatttcaccgaatgaatatgacaggcccccacaaataagagctgacagaacagagaaaataaaaggttacactccgtgtgggcggacaccatttacagctgaaggtcatcaagtgtcaattcttctactgacatcaactttaattttgtgatgaactggggaggatcatcaaggctagatgaaccaaggatgatgtctcgcttcagcttggatgaaagcttgtgtgcagcacgtaactctgatcgagtagcaccgcctattacaaaaacaaatatacgctgaccaagtttcctgaagtcactggaggcatgcttcaacacagaatcacttgaatatccatcatcagagccacgaggtcttgcccatgtgccacctgttcgtctggatcgcattgagtgagcggggcttgttcgggcagagttactggttggcagtccatgaacagtaggactagggtcattcatacagttatattcatcttttggcagctcacctttgctaagattttcaatcaattgctccaaaatagggtaaaatcgagagagtgcccatgttgattcttcccctgttcgctcttttcgatttgtgtgtttcttcttgtgaacatnaaatttcagtgtaaaaccccctactgaagactttttggtatcaggcccacataagcaacgcatattatttacagcaatcatgt

SEQ ID NO: 570 - protein, 48 aa, Zea mays subsp. mays
  peptide (1)..(48): Ceres Seq. ID no. 13600217
GYRAPPRVFFFFFLHEKINCITVFFLTFTSKSGIKNAFHRMNMTGPHK

SEQ ID NO: 571 - protein, 43 aa, Zea mays subsp. mays
  peptide (1)..(43): Ceres Seq. ID no. 13600218
MNWGGSSRLDEPRMMSRFSLDESLCAARNSDRVAPPITKTNIR

SEQ ID NO: 572 - protein, 39 aa, Zea mays subsp. mays
  peptide (1)..(39): Ceres Seq. ID no. 13600219
MNSRTRVIHTVIFIFWQLTFAKIFNQLLQNRVKSRECPC

SEQ ID NO: 573 - DNA, 767 bp, Zea mays subsp. mays
  misc_feature (1)..(767): Ceres Seq. ID no. 13599983
ttgggtaccgggccccccctcgagttttttttttttttttttttaaaactgatcaccaccatcgttttattcttcatcagtaactaaacagcagagcagaatgcagcaaaatagtctcgccaattttgttccccccaactcaactaaacagcactccgttacaaccgaacaaatgtttcaaatgttctacgaaaactgcccaaaacgtcataacttcgacagctaatggggactaccgacaacggatggtttttaacgtaaatctccctcaccaatgggtgctaaaacgtaacaacaaacagcatgtgcgtccggggattctctctctcgcgcgcgtattctctcaactcccccctctctaccgtgttaggcccgcttgttccaagacttgcctcggtaggatttctgcttcgtcctccgctgcgatacgtagtccgcctcctcctggaacgggtttggcccgccaaagtcttgctttgacctccgcaccttcttcgtcttccctcggtcgtactcctcgtcccactcatctaagatgtagccaccgctcttgcgtttggactgcggctcagcgacctttatatttggcacgtctacatcatcccaacgcggaacggtagcttccatcaggtccgttgcgcgaatactggcaggctgggtcgctaccaacttagcatccgtggaagggctcggatcagactttggaacgtcggcgctgcaagaaggtgcacctgtgccagcaccgacacgggctccgtcgaccttgt

SEQ ID NO: 574 - protein, 124 aa, Zea mays subsp. mays
  peptide (1)..(124): Ceres Seq. ID no. 13599984
MVFNVNLPHQWVLKRNNKQHVRPGILSLARVFSQLPPLYRVRPACSKTCLGRISASSSAAIRSPPPPGTGLARQSLALTSAPSSSSLGRTPRPTHLRCSHRSCVWTAAQRPLYLARLHHPNAER

SEQ ID NO: 575 - DNA, 683 bp, Zea mays subsp. mays
  misc_feature (1)..(683): Ceres Seq. ID no. 13600225
gagtttttttttttttttttttctttttttttttttttttttttttttttttttttttttttttttttttttttttaacccgggctccccaaaaaaaacaaaaaaggcttcgaaaaacgggccaaaacttttctattcaagttccccaaaaaaaacgagccaaagggcttcgaaaaacaaaccaaaacttttctattcaggttccggggaacataccctggaacccctcttaagcatacatagcaaatatcaaagggccccccccccctctggggggatgggcccccaaagctgatcagggaaacttttctactaaagaggcccccccagggggaggaaaatttgggacccatcagggccgcttctgggaaaaagccccaaaacccgcgttcttttttcccttctggagaagcccaacttccccctttttcttttcttggcccatcttcaaagccttaaaaaggcccccctgcttgcgagacttgaaagcagtaccaaaatcatcctcctcccccccccctgggtaacgggcaccccccccacgatcggacggagaatcatcttttgcattcggggatttaccggctccctggtttgacaaacaaaaaaaagcaacgccctcaatttccttcttcagttcatcgaggaattgcttctcaagaatccccagtttcctctttttt

SEQ ID NO: 576 - protein, 97 aa, Zea mays subsp. mays
  peptide (1)..(97): Ceres Seq. ID no. 13600226
SFFFFFFLFFFFFFFFFFFFFFFFFNPGSPKKTKKASKNGPKLFYSSSPKKTSQRASKNKPKLFYSGSGEHTLEPLLSIHSKYQRAPPPSGGMGPQS

SEQ ID NO: 577 - protein, 76 aa, Zea mays subsp. mays
  peptide (1)..(76): Ceres Seq. ID no. 13600227
VFFFFFFFFFFFFFFFFFFFFFFFLTRAPQKKQKRLRKTGQNFSIQVPQKKRAKGLRKTNQNFSIQVPGNIPWNPS

SEQ ID NO: 578 - DNA, 1728 bp, Zea mays subsp. mays
  misc_feature (1)..(1728): Ceres Seq. ID no. 13635680
agcgcgagtgccactggaaattcccgaaggtagcaagttcgtggtggagtcctctggtgcaccggacatgtccggtggtgcaccggacactgtccggtggcacaccggacagtccggtgcgccagaccagaggtgccttcggttggccctttttgctcctttgttgaatccaaaacttggtctttttattggctgagtgtgaacctttaacacctgtataatctatacacttgggcaaactagttagtccaattatttgtgttgggcaattcaaccaccaaaattatttaggaactcggtgaaagcctaattccctttcaatttccaccgcccactttgaaatcctacccgaggcctctcggcactggatgatctcccccagggggaaggatgacaccacagtcacagggtagtagtgttgcaacttccgccgcgtcagaatcaccgcgtacagcagcttctgaatttgtgggtagcggatcttggtctcggacagtacctcactgatgaagtagaccggcctctggacgggcaaagtatgcccttcttctcgtctctcaaccatgatcgcgacgctgaccacctgagtggtagcggcgacgtagatcaagagggcttctccggcagcggggggcagcaagatgggcgcgttcatgaggagcgccttcaggttcccaagggcttcctcggcctcaggggtccaagtgaagcactcggcctttcttaagaggcggtataggggtaggcctctttcgccgaggcgcgagatgaagcggcttagagccgcaaggcatcccatgaccctctatacgcctttcaagtccttgatgggccccatgttggtgatggccgtgattttctctgggttggcctcgatgccccgctcggagatgatgaaccccaagagcatgcctcgggggactccgaagacgcacttctcgggattgagttttaagcctttcgccttgagacaccggaatgtcgtttcaaggtcggaaaggaggtcggaggctttcctcgtcttgactacgatgtcatcgacgtaagcctcgaccgttcgaccaatgtgttcgccgaacacgtggttcatgcacctttggtacgtcgcacccgcattcctcaaaccaaatggcatagtaacgtagcagtacatgccaaaaggtgtgatgaaagaagtcgcgagctggtcggactctttcatcctgatttggtgataccctgagtaggcatcgaggaaagacagggtttcacacccagcagtggaatccatgatttgatcgatgcgaggcagagggtagggaaccttcggacatgctttatttagaccagtgtagtctacacacatccaccatttccctcctttctttctcacaagcacagggttggcaagccattcgggatggaatacctctttgatgaaccctgcagccatcagcttgtggatctcctcgcctatggctctacgtttttcttcgtcgaatcggcgcagaggctgcttcacgggtcgggctccagctcggatgtccagcaagtgctcggtgacttccctcggtatgccaggcatgtccgagggactccacgcaaagacttcgacgttcgtgcggagaaagtcgacgagcactacttcctatttggggtccagctcggagccgatccggatctgcttggaggtgtcgttgctggggtcgagagggatggatttgaccgtctccgctgggtcgaaattgc

SEQ ID NO: 579 - protein, 134 aa, Zea mays subsp. mays
  peptide (1)..(134): Ceres Seq. ID no. 13635681
MGAFMRSAFRFPRASSASGVQVKHSAFLKRRYRGRPLSPRREMKRLRAARHPMTLYTPFKSLMGPMLVMAVIFSGLASMPRSEMMNPKSMPRGTPKTHFSGLSFKPFALRHRNVVSRSERRSEAFLVLTTMSST

SEQ ID NO: 580 - protein, 130 aa, Zea mays subsp. mays
  peptide (1)..(130): Ceres Seq. ID no. 13635682
MRSAFRFPRASSASGVQVKHSAFLKRRYRGRPLSPRREMKRLRAARHPMTLYTPFKSLMGPMLVMAVIFSGLASMPRSEMMNPKSMPRGTPKTHFSGLSFKPFALRHRNVVSRSERRSEAFLVLTTMSST

SEQ ID NO: 581 - protein, 109 aa, Zea mays subsp. mays
  peptide (1)..(109): Ceres Seq. ID no. 13635683
MEYLFDEPCSHQLVDLLAYGSTFFFVESAQRLLHGSGSSSDVQQVLGDFPRYARHVRGTPRKDFDVRAEKVDEHYFLFGVQLGADPDLLGGVVAGVERDGFDRLRWVEI

SEQ ID NO: 582 - DNA, 552 bp, Zea mays subsp. mays
  misc_feature (1)..(552): Ceres Seq. ID no. 12594094
tgtattcgaatcatacttagtggtggacgcctaaggatcaggacgtggtgcctcccgcactggtccgcggctgctggagcagctgccacggctggcatcgcagtggtcttgttaacctcaagagccaaatgattcagctgagtttcggtctcatattggtggagctgttgtatctgcagcaaagttggttactacaatgctggaacagtggagtttattgtggacactctttctggggagttctacttcatggagatgaatactcgactccctcctcccctcctagatcctgtgatctgctacgaagctgccatcaacgccctcctccccctctccgctcagctcctcctcgctctttcgtagaggagaggatttcacactgatgcaagcgctcatcaaggcagatttctggcttctgtttttctcgtctaccagataatcaagaaagattttagtattgcaagatttgctcagatgatgcggaggttaaatttctttgtggcattctgttgcattgggcatatataatagagcatgagatcattgtcaagg

SEQ ID NO: 583 - protein, 84 aa, Zea mays subsp. mays
  peptide (1)..(84): Ceres Seq. ID no. 12594095
MIQLSFGLILVELLYLQQSWLLQCWNSGVYCGHSFWGVLLHGDEYSTPSSPPRSCDLLRSCHQRPPPPLRSAPPRSFVEERISH

SEQ ID NO: 584 - protein, 43 aa, Zea mays subsp. mays
  peptide (1)..(43): Ceres Seq. ID no. 12594096
CIRIILSGGRLRIRTWCLPHWSAAAGAAATAGIAVVLLTSRAK

SEQ ID NO: 585 - DNA, 2050 bp, Zea mays subsp. mays
  misc_feature (1)..(2050): Ceres Seq. ID no. 13600268
ctttattgtgtttaaacagcgaattgggtaccgggccccccctcgagttttttttttttttttttttacaataatataattttcattcatatgaaaatatagaaagagtacatattacataactgggtgttcgagtgcagaacttattattacattaccgggaggcaaaacatcctccccaaataagtttagtgtttttcctcctaattgggcaccacctttgagcagaaacagcagaacttggttgtttcatcacctacaataacatgggttcgaaaaccatgaggtcaaagtgtacttttgcaagtcttacccgtgaaaggaaaagactatcaaggatatgctgccttttaggaatcaaggtaaagctcataaaaattcaaagactctgtttgcagaaaagcttactatgagtggatccttaaaaatccatttttattatcaggttaagtagttacctacatctagagttctttctatcctagatcaggcacttggcctatactagtcgtcttttatcatcccatcagttcactggattgctacatgtaagtcagtgaccaagtcttcatgttcgagaagtaacggcgatctgaatcgattaagacccagctggggatctccaaccgcatgatatatgtagcacttaacccttgcatatgtcaactcgccaccgggtttctcaaaaccagaatggattcacgccaaccaagagcacatatacaccaccgtccagcctcttgccacggagggtacacgctactctcaccatctctccactcctattgcatggtggcctttctggtattggtccgatcgaggaaaagcttacccatgacgaggcatgtggccagttaaaagatcctcgatcatcaagcctacatcgattcggtccttaatcaactcagacagagacactacaccgagacttccttctcgtgcaagtaacacacccggtctcgtctttatcatttacaacccaaagtttggtacctaacagaggtacatcttttcagatgttgaacccatcacggccatgatggattcaccgtcatcagtcttttctttgtaaaattcccatcctatatgaagcatcaccttttgtttaaaacaaaacattttgttttctacagcaaagctaagcattagaaaactttatgtaaatcaagtgacaaggaatggtaatcagttccaaggaagggaatgcatcaattgtttagcacacaactcctaccacctaatgcatcatataaggtgataaagtttttaaaacatcaaggaaaggggataatgcaccggggcttgccttgtgttgcaggaggttctgggtctactccacagatgtcgaagtagaagttattctcggctggaggattctcagcttgagcgacaacttcttcttcaatcacagtttcttcctcattttctatacatgacaatacatgtatatgaatgcttatgtgatgtcatgaatatgcagttacataatagaaacatactaagttgtatgttgaatacaactttgcttcatggtacacactaatcactagggtttcctaagttgatattctatcagtattaagcagataaacactaggaggctagttattgggtttgtgatcaaacagtgtccaaatcacttcaaacttcacccacagtcttcaatcatcatactaggcctacccaaaaagttttaccatttttggagttactaaattatttctaaaattctaaaaggcttggtttgaactcctttaaaggctacataattctaggtttgggataaaaatcttggaactatttttattaaatactatatgattttttggagtctggtaaagttggtctcatgattttaccaattttttactattttctacaaatctcctaatctgctagtaaaaagaaaaagagaaaacatgaatattgttgggccaattctggcccaaaccagcccgcgcacaggggaaacatgcgcgcgcccgcgctcgcggctttgcatagaggcctatggcgttttaaataactggtaaagaatccctaagcacta

SEQ ID NO: 586 - protein, 79 aa, Zea mays subsp. mays
  peptide (1)..(79): Ceres Seq. ID no. 13600269
MSTRHRVSQNQNGFTPTKSTYTPPSSLLPRRVHATLTISPLLLHGGLSGIGPIEEKLTHDEACGQLKDPRSSSLHRFGP

SEQ ID NO: 587 - protein, 75 aa, Zea mays subsp. mays
  peptide (1)..(75): Ceres Seq. ID no. 13600270
MIYVALNPCICQLATGFLKTRMDSRQPRAHIHHRPASCHGGYTLLSPSLHSYCMVAFLVLVRSRKSLPMTRHVAS

SEQ ID NO: 588 - protein, 54 aa, Zea mays subsp. mays
  peptide (1)..(54): Ceres Seq. ID no. 13600271
MDSRQPRAHIHHRPASCHGGYTLLSPSLHSYCMVAFLVLVRSRKSLPMTRHVAS

SEQ ID NO: 589 - DNA, 2109 bp, Zea mays subsp. mays
  misc_feature (1)..(2109): Ceres Seq. ID no. 14313467
ccccccccccccccccccccctcttggaaggaattccagtcttccatcaggctatggataagcaagagcaccctgaatcctcccaagatcccccgccggagttgtttgagcccctcaccatgaagaagattccagcaccatcccttgaagtcaaggaagaagctgcaagcaccctgccagcaccgtcgccctctgaggagctacaagagccagtccagcttgaagaagagttcaaccccgtcttgccatctcagttgccgctagaagaagtcatcaacattagctccctcttaacccatccaggagatgtctcagattgaagttgtgtgcaagccttgccagaagagaagctgcctggtctaaagttagttatgcccagtcctctgcatgcgttgggtagtgaagtttttcttcactttggctagagccctgcatgtatgagagttaatcatgtagactcgtgttttgaaaaactctatttgtgtggccccctagggcatttcaaaatgaacttcgcttgatgttttctccccttttgagtgcatatgtgatgctttaacgttagtgctcataagttgcatttaacatagttctcaattcaggagccaagcaatagtagttatgcttagcccccgaatctgagtagaccgtgctttggaaaaactctattcttcccttattcaaaacatttgatttgtctgtgcttatcattgctgagcttgtgtgttttctttcgttttaagaaaggttttctctaaaaacatagatcacaaattagagctaatcctcaccttatgcttccattctcatcttaacccttctcaagagaaaagcaccttacccaagaagatactaggaagcttacccttgaagcctggaataagctacagaggaacctatccagtcactcagtcaaaaggaccgaccgtgaaaatcaaagcaccgcccctgagtcaaattaaacagaaaaagaggacagaaggagttattaccatacagagaggcaaagattcttggaactagggaccacaaacatcagggtcattgaccccaccactcacccgtgccccccgcacgcgtgtcccatctccaaccaccacccacaccccttttttgcagcgcactaccgccccacccccacccctttgcagcgcacccactgccaccattactgccagcaacaccatcccccctccatcgcacttgttgccttgtgtcacctgctccatcaccaccactccgcaaccgagcacccccactcgcctataaattcccccaccagttccctcaatccccacctcactcaaagcaaaacagtcccgataaaatcccctctgccaaatcgcaagtaactccattttccactccctcgcccctgaaatcacaatgcttggtgattcttgggttgaagactgttgtacatggttcatagtcttcggtttcctcttctgtatgatggtaatactctttgatagaatcctctagtgggaagagcaaagagaaataaagggtcagtgagaagagaaaagaagacagcgaagagaagatgagaagaaggttgtcccaaagtcaaccctgtgtcagtcatctctccgtagcctgctcaagcagcaacagcagaagaaggccccgtaacacccttgttatgaggtacttcaaggagttcaaatccccaagattcaagagttctaccctcattctttttaagtggggtagtgttctagcaaggttcctgctatggagaaaaagaagaaggcctatagcaagcttgtggaggaccagatcatcaaagcttataagtttctggatgagaagtggtcacccaagttctgttgatgaagcaccagaagaccaatcaaggaaggaatccatgtgggagttcgcaagagaagtttgagtgttggcatcgatgcttcttcaataagctagttgccaagtgaaagctagaagcctgaagatgatcttgagtagccagaatcagcgtttgcaatcagcagccggatgctccgcaagggccagaatttgttgaagttccatctcctcgaagagttgcaaagtgaagatatgtagctgaagtaaagctatacccataacccttctaagccgaat

SEQ ID NO: 590 - protein, 88 aa, Zea mays subsp. mays
  peptide (1)..(88): Ceres Seq. ID no. 14313468
MDKQEHPESSQDPPPELFEPLTMKKIPAPSLEVKEEAASTLPAPSPSEELQEPVQLEEEFNPVLPSQLPLEEVINISSLLTHPGDVSD

SEQ ID NO: 591 - protein, 116 aa, Zea mays subsp. mays
  peptide (1)..(116): Ceres Seq. ID no. 14313469
MRRRLSQSQPCVSHLSVACSSSNSRRRPRNTLVMRYFKEFKSPRFKSSTLILFKWGSVLARFLLWRKRRRPIASLWRTRSSKLISFWMRSGHPSSVDEAPEDQSRKESMWEFAREV

SEQ ID NO: 592 - protein, 105 aa, Zea mays subsp. mays
  peptide (1)..(105): Ceres Seq. ID no. 14313470
PPPPPPLLEGIPVFHQAMDKQEHPESSQDPPPELFEPLTMKKIPAPSLEVKEEAASTLPAPSPSEELQEPVQLEEEFNPVLPSQLPLEEVINISSLLTHPGDVSD

SEQ ID NO: 593 - DNA, 694 bp, Zea mays subsp. mays
  misc_feature (1)..(694): Ceres Seq. ID no. 13600014
gatctatggttctaggttgatcttggtcttgcagtcgggattgccataagactggtgtccacgctgaggtgagcggtacgggtgctgagtcccaacgggagcgggggaaccaccatccaggtgacgacgctccgcgcgctcagcccgcagcagggcgatctcagcacgagccctactcagctcgtctaatgcatggtccagctccgtgtttagcacggcggctaggttgactttgctgctcaacctaggattgccctcaccgacaggtgagacaatcacgcctcctgtgctgccagatggacggcgggggtaatacttcaggtcaaggccgtcagctgccccaccgaaaactgagcagtagtgtgaaagcgcacgccgtgcagcatcttgcatggctgcctcagctgagtcccgctcagagatagaatagtgctctgagcagacctcagccccctggagattgttctccggacggcgcaccaagcaggtcgcctcccagcggtccgggtagaccccgcgactatgctggtagaccacacagcgatactcgatggaccaagtacgccggttaagtgcccgacgtagcagggtgtcgagcgcgtcgtggaagtgacacccgcgagcagcgtcgcgagtgatgggtcgagcaacccatccttccggctcatggttagcagagaagtcggtgtcgtgg

SEQ ID NO: 594 - protein, 42 aa, Zea mays subsp. mays
  peptide (1)..(42): Ceres Seq. ID no. 13600015
MDGGGNTSGQGRQLPHRKLSSSVKAHAVQHLAWLPQLSPAQR

SEQ ID NO: 595 - DNA, 983 bp, Zea mays subsp. mays
  misc_feature (1)..(983): Ceres Seq. ID no. 13587275
gcggcggtgttgacccacccacccgttcctcccccaccccatcagcgctggaggcggcggtgcgtaagtcccccggacccttcggcggcggcggcggcgcgcggttatgccgagaggctcccaggtttcatcatcgtgctctgctggagttatagcattttcagcaaggatatggagtacaccccctgcacagcaagttcctctgtatcccacatctcgctgctcgaggaagttcttggctggaggttttgtctttacggagacttcctggtcatctcttttgtcaactgcacttgaggatcaacccacgcttagtgactgccttgcctggtcccatgctgtcagacattagagttgcccagtgattacactattacagtgcagctgtagcacatttatttgagcatggtggatctgtttctctggcaacattccagtaatctttgtcttggtgctaatcagccagcagaagttaccatcaagacatctttggacacttggatctaacgcttagagctttgccttcgcatataggctctaggtttgggttttcgttttctgctagctttcttctactctaccactgtaagttttcagtctgatcggtccaaagtttggtgtgtattggttacgctgtccttcaccagccttcactttgcatggcgtgaccttagagaagacgtgttcaagattttgttgtcgcaaaagcatgggaatagcatacatagctttgagaggagtctccagtgactttggtgttgtaacatccaaagacactcctgttatacatatatgagtcctgttttttactatacaactgttctgaaataagggcagttctgtgcaccaccagcgaataaaatggagagatatacaattatcaacgaagttggtgatggaacatttgggagtgtttggcgtgcaaccaataaggaaagcggtgaagtggttgcgatcaagaagatgaagaaaaagtattattc

SEQ ID NO: 596 - protein, 98 aa, Zea mays subsp. mays
  peptide (1)..(98): Ceres Seq. ID no. 13587276
AAVLTHPPVPPPPHQRWRRRCVSPPDPSAAAAARGYAERLPGFIIVLCWSYSIFSKDMEYTPCTASSSVSHISLLEEVLGWRFCLYGDFLVISFVNCT

SEQ ID NO: 597 - protein, 81 aa, Zea mays subsp. mays
  peptide (1)..(81): Ceres Seq. ID no. 13587277
MPRGSQVSSSCSAGVIAFSARIWSTPPAQQVPLYPTSRCSRKFLAGGFVFTETSWSSLLSTALEDQPTLSDCLAWSHAVRH

SEQ ID NO: 598 - protein, 50 aa, Zea mays subsp. mays
  peptide (1)..(50): Ceres Seq. ID no. 13587278
GGVDPPTRSSPTPSALEAAVRKSPGPFGGGGGARLCREAPRFHHRALLEL

SEQ ID NO: 599 - DNA, 1066 bp, Zea mays subsp. mays
  misc_feature (1)..(1066): Ceres Seq. ID no. 14305282
ttcacccttctcgctaaaatgtttggtttgcttttaagtaatgtagacttgccatggctaagctagagatgacatgtgtgtcttgttttataagttcctttatctagtgatgcgatataggagttccttagacattgacgcttatgtcctctatcaaatttgtgttatcagtgatgcttgtgtgtgatcaataggagaactaataaaaagtcgtgtccaaataaataaaatgtgcgtgcttgtgatgttatttttctgttgcgtaaatatataaaatgatgtcatctttttaatggtgttaatgttgatcgccgataaagcgtagataactaatgttaacgtgtagttgcctacggtgtcttccaatttaaatgtttagttcgccactatgtctttctatatctgtgctacttttgtgctcctttcattatattcatacatatgcaccttgcatctcatttaggactgagacaggatgatcgtgcaagtgatgtggtgccacccacaagatgcagtcggtggacgacctcaagaatggacttaaccagtggatgctcgccaagcgagtacctcccccagcaaacactatctaagtgtcaaattaaaggcaagccccggttttatgcataaccgttatatatgctattttactgcacttaatgattataggtttgtactgtgcacttaagtgtaggagttacctaaaaccctagttgcattaactcaggattccatttgagatggacactagtatgctaggtcgagtaggtgctttactaattagggatctcggtagaagtcgagtgatttttctagcactcgcgcgaggtcaggaattggtgtatccaattttatatcgtaatgatgatggtctgtggacaacgatccatggggatgcgttgtctacgagacggaaattggaataaggattaaggtgtggtaccgtgtgtcaagcgtttgaacgtactaaacatatgccgagaaatatggtaaatcggtaagcctagtacctgagtgaacctggcatcagattgccctcctcacgcgacctgagacgtggtctccc

SEQ ID NO: 600 - protein, 62 aa, Zea mays subsp. mays
  peptide (1)..(62): Ceres Seq. ID no. 14305283
MHLASHLGLRQDDRASDVVPPTRCSRWTTSRMDLTSGCSPSEYLPQQTLSKCQIKGKPRFYA

SEQ ID NO: 601 - protein, 61 aa, Zea mays subsp. mays
  peptide (1)..(61): Ceres Seq. ID no. 14305284
MDTSMLGRVGALLIRDLGRSRVIFLALARGQELVYPILYRNDDGLWTTIHGDALSTRRKLE

SEQ ID NO: 602 - protein, 57 aa, Zea mays subsp. mays
  peptide (1)..(57): Ceres Seq. ID no. 14305285
MLGRVGALLIRDLGRSRVIFLALARGQELVYPILYRNDDGLWTTIHGDALSTRRKLE

SEQ ID NO: 603 - DNA, 743 bp, Zea mays subsp. mays
  misc_feature (1)..(743): Ceres Seq. ID no. 12589502
cagctacgtaggccccccccccttttattaatattgtataaacatatgattggaacaaatgcccatgtgagataagccttgtttagcctctgttgatacttggcgtcttctattaaagctgcacgctgaaaacaatcatgtaacacaaatacgagtgtttgtctgaatcgtatggatgttagaaattgttcccgtggatttattgtgatagtattaatcttgtttctggtctattttttgctgtggttaatcaattattgtttggaaattaatatgcactagcactatctatcccgatgtattcatttctaattatggtaaaaaaaaagactcttgagttaacgttactcacattttttgcttgcagcttcaaatcaacgaccaacgttttgaggatgcagaggaggaacaggagagccatgaaaataatggacattagaaacagagacatgttcctcgagagcatcatgtgatttattttgttgtaaatcactaccgatgcagctcggtttgcctactgtttcatctacactttctcttcctttttccttgatgttataggattaacatcactgggtgactttctggaattgcatcgatggttccttttggtgagaaaaggtcttgctgctggtcaagaatgtaacttgtagagcatgatgttgaatcgtgtgaaattagttcagtacttttgatctaacaaatagaaggtcgaattgggaaaggagataaaaaaaaaaaaa

SEQ ID NO: 604 - protein, 58 aa, Zea mays subsp. mays
  peptide (1)..(58): Ceres Seq. ID no. 12589503
MYSFLIMVKKKTLELTLLTFFACSFKSTTNVLRMQRRNRRAMKIMDIRNRDMFLESIM

SEQ ID NO: 605 - protein, 52 aa, Zea mays subsp. mays
  peptide (1)..(52): Ceres Seq. ID no. 12589504
MVKKKTLELTLLTFFACSFKSTTNVLRMQRRNRRAMKIMDIRNRDMFLESIM

SEQ ID NO: 606 - protein, 36 aa, Zea mays subsp. mays
  peptide (1)..(36): Ceres Seq. ID no. 12589505
MDVRNCSRGFIVIVLILFLVYFLLWLINYCLEINMH

SEQ ID NO: 607 - DNA, 1474 bp, Zea mays subsp. mays
  misc_feature (1)..(1474): Ceres Seq. ID no. 13599079
gtaatcaggaaaaacgaaattgatatatctatatatggtagtactgtacaagaggtagctagccgctcatgcagatagcgaacccaaaagactatatagctatcaaagtatatatgtttaagacaccactactatagtatatatattttacaaatatgaaacattatccaaatataaaacccacgagtaaccaccatctggtacgtcttgagacttgatgtgtaagtaactcacgaaccagtgggcccgcgcatcgactcgcttcgccacgtacactggcagctctcgatgcagctagcaacgaagtagctggtgcagggcgcacggcgtcatcgatcaacgagagttgaagagggacgacgaatcgacgacctgctggcgctgggcgccggcggagtcgatcatcatggtgggggacgaccaggcggccgtgtggtcccagatgccggcggcttcgtcgaacacctcgggaggcacctcctggaagccctgcaggccgaagtcctcagccttgggcagccgcgtcatgaagtcctcgaagtcatctgcctcctgatgcagaggagccgccgccagctcgcgcaacatctgctgatggcgctgcatcgccatcgtggtggtggtggtgtcgtcgacgtggcagccctggacggcagccatcatcacgccgcacgaagacggcggcggcggcggcatttggaacgtcgtctggtggtgggtgtacgtgggcgaggttgccgcggccgccatggtcaccggcgacgagttggagttggagttggagtcggagttggacgacgacgcgtcggcggagcagcaggatgagtgcaccatcatcataggcgccgccatggagggctgctgctgctgcaggtactggtggtggcggctgtgcccgccagcagcagcagcagcagggccagccacggtgtcaggggacggagacgccacgattgccggtcctcctcctgcagccgccgagggaggaggtagctgcaggttgaggcgcgcacagtctccgtagagcgccctggcggcggcgtcgtaggcgcgcgcggcctcgagcgcgctgccgaatgtgccgagccagagacgtgcgccgcggttgggctcgcggatctcggccacccacttgccccaggtgcgctggcggacgccccggaaagggcactgctggttgtccggcccgcccttgcccttcatgcaccccttgcgcgaccggcgcagcgggcagcacttgcggccgccgggcttgctgccgccgccgttctggtgctgctgctgctggtgcgtacgttgctgctggtggacctgtgagtgatggacgaactgctgctgttgctgtcgatgcaccaccggcacctccacggcgacaggcggcgccaaccgatccatctggagtagcttcgtccacagatcgatatggcgaccggcgatggatgctaacaatgcaatccttgcctggtgtgtgcct

SEQ ID NO: 608 - protein, 132 aa, Zea mays subsp. mays
  peptide (1)..(132): Ceres Seq. ID no. 13599080
MCRARDVRRGWARGSRPPTCPRCAGGRPGKGTAGCPARPCPSCTPCATGAAGSTCGRRACCRRRSGAAAAGAYVAAGGPVSDGRTAAVAVDAPPAPPRRQAAPTDPSGVASSTDRYGDRRWMLTMQSLPGVC

SEQ ID NO: 609 - protein, 91 aa, Zea mays subsp. mays
  peptide (1)..(91): Ceres Seq. ID no. 13599081
MVTGDELELELESELDDDASAEQQDECTIIIGAAMEGCCCCRYWWWRLCPPAAAAAGPATVSGDGDATIAGPPPAAAEGGGSCRLRRAQSP

SEQ ID NO: 610 - protein, 89 aa, Zea mays subsp. mays
  peptide (1)..(89): Ceres Seq. ID no. 13599082
MQRSRRQLAQHLLMALHRHRGGGGVVDVAALDGSHHHAARRRRRRRHLERRLVVGVRGRGCRGRHGHRRRVGVGVGVGVGRRRVGGAAG

SEQ ID NO: 611 - DNA, 469 bp, Zea mays subsp. mays
  misc_feature (1)..(469): Ceres Seq. ID no. 13586889
ttctctctgcccaagccccccgccaccagcccaccaccactgtacagcacaccactcctcgtctgctccctcaacaccctctcctctccctccttcaatgcgagaagctccgtcggcgtgcgagctctgaagccatggtagccggcgccgggaacccggggcgtcctgtcgcggttcttgccctcctcctcctcgccgccgccgcgccgcccggtgcctgggccgggtccgcggccgtgaacggggaccgcctccgggcagagcagatccggaagcaggcctcggacgcggccgcatccgctgccgcgctcgccgcggcgtcgcgccggctccacctggaccgcgcgcgacacctccgcctcctctcctcgctccaccgcaacctcaccaacacgctccgcgccctctccgtagccgccgacttcgcctcggacccttcctccggcaacgtatcgtcctcccgccagct

SEQ ID NO: 612 - protein, 155 aa, Zea mays subsp. mays
  peptide (1)..(155): Ceres Seq. ID no. 13586890
LSAQAPRHQPTTTVQHTTPRLLPQHPLLSLLQCEKLRRRASSEAMVAGAGNPGRPVAVLALLLLAAAAPPGAWAGSAAVNGDRLRAEQIRKQASDAAASAAALAAASRRLHLDRARHLRLLSSLHRNLTNTLRALSVAADFASDPSSGNVSSSRQ

SEQ ID NO: 613 - protein, 111 aa, Zea mays subsp. mays
  peptide (1)..(111): Ceres Seq. ID no. 13586891
MVAGAGNPGRPVAVLALLLLAAAAPPGAWAGSAAVNGDRLRAEQIRKQASDAAASAAALAAASRRLHLDRARHLRLLSSLHRNLTNTLRALSVAADFASDPSSGNVSSSRQ

SEQ ID NO: 614 - DNA, 1007 bp, Zea mays subsp. mays
  misc_feature (1)..(1007): Ceres Seq. ID no. 13599087
acggtatcgataagcttttttttttttttttttaagcgcaaagccaaatttaaccaagttctagtgattaaaaagtcatacaatgttcagagatgataattctagcgcttatagtagttgttgagtcaaccgacatggtcatacaaatttatagagtacatcagtaattgaagagctacggaacgcttaaataaaaacagagctgcaaatgttttagcggtttggttatatgtacacaaaagcattcatgctccaaaagtgatgatgctcatcataggtatgcaaaatagttacctgagtttccagagttggcagcgtgaagatgtcacagagttcttaaagtccccagcgtgaagaacaattggcttttttcacagagctcgtagaggtagcagcataaatatatccttcaacgacaacctgagttcccagagttagtagcgtgaagttgtcccagagttcccagcgtgatttcgtgaacaacaattggccttttttgtcacccaaagtagtagcgtgaagatgtccttcaatcataacattcgatgccgatggtggtgcagttggagcaacgcgcgatagtgacggccaaagacgaagatgatgaaggccggtatggatcagcgaggagttgtagtggctgacagcggagctaccgatgccgatgtgcggcgtgggtgtcgaggaaagcattggcggcactgacgtcgaactggataaggttcttcaatacacaacctccagtcgaaaatgtaaggggaaagggcatttttccggatggattctggtgaagaacacgaaccctaaagccacaaaggcgagaaaaccctgaacaaaacgatgccgccgaagcggatgagcagaatgtgcggcggccgtgagagggaggaagaaacggcggagagatcgaggatgagagggaactgtagcacggagcggcagagcgcgaggacgaagaggcaacggagagagcgacaacgaagataatctgtagcgcgggggcgaat

SEQ ID NO: 615 - protein, 57 aa, Zea mays subsp. mays
  peptide (1)..(57): Ceres Seq. ID no. 13599088
MPMCGVGVEESIGGTDVELDKVLQYTTSSRKCKGKGHFSGWILVKNTNPKATKARKP

SEQ ID NO: 616 - protein, 55 aa, Zea mays subsp. mays
  peptide (1)..(55): Ceres Seq. ID no. 13599089
MCGVGVEESIGGTDVELDKVLQYTTSSRKCKGKGHFSGWILVKNTNPKATKARKP

SEQ ID NO: 617 - protein, 48 aa, Zea mays subsp. mays
  peptide (1)..(48): Ceres Seq. ID no. 13599090
MPPKRMSRMCGGREREEETAERSRMRGNCSTERQSARTKRQRRERQRR

SEQ ID NO: 618 - DNA, 723 bp, Zea mays subsp. mays
  misc_feature (1)..(723): Ceres Seq. ID no. 13599149
gaaccaaaactaagtttatggataaaaatacattttaagatttttaaaacctatatgacaccacctctcatattacacagtacgacattttatccaacaaagctgctacagctgcggctcgttatctttacaccgcgttcttgttagctgtttccgccgcggcaccagtagtcacggcaccaccacggccgctctggctctcgcttccgccgccaccgtcgccgtcgcttcgctgcttgagatcacggaagacccgcgagctctcctcgaagatgtgcgcgcggcggtcgtagtcggtgggccggcgcccctcgtcctcccccatgatggccgcctcctccagcacctccagctcttcgggcgccagcccggcctcctccgcctgatcgaccgccgacgccggcccgtccttgcgcggctcgacgggctccgtcgtcccgcctccgcgcggcgtgtttgcgcgcaagcgccgcgcgggagccgcgcgccagacgcagacgcggctcgtcgtggtggcccgggcctggcacgccgtggccgcgcgcgcgcggggtacctccggctgtggccgcgcgggggccaagcacgagcggcaaacgggttgcatgtctcgggagtcgggacagggccagcgggcgccgggggatcggtgaggtgatgcggcaggttcgtcgggaacggtgaacacacgatttgggttcggactttgggtgcagagccggt

SEQ ID NO: 619 - protein, 48 aa, Zea mays subsp. mays
  peptide (1)..(48): Ceres Seq. ID no. 13599150
EPKLSLWIKIHFKIFKTYMTPPLILHSTTFYPTKLLQLRLVIFTPRSC

SEQ ID NO: 620 - protein, 30 aa, Zea mays subsp. mays
  peptide (1)..(30): Ceres Seq. ID no. 13599151
MTPPLILHSTTFYPTKLLQLRLVIFTPRSC

SEQ ID NO: 621 - DNA, 1276 bp, Zea mays subsp. mays
  misc_feature (1)..(1276): Ceres Seq. ID no. 12590542
ctcatatttccctattattatataatgatacatgcgcactttttacatagacttccggctgaccaactcccacctcgataaaagagctataccaacgtagggtgacaaagtaggcatgtacatgtacatatctcaaaagagatctgacatctcaaaacagacccaaaaaaaaactgctcgcttcattctctctcactaatctaactttgacccctaagcatcccaggctgctcctcagcactgggtggtggtggtgctcatctgcttcctgttggccagagaagagaagaccctggcagtcttcaccttcttcaccagaagcccccatttgtcgccatcatcgccgcccttggcagccgccttatcctgctcctgctgcttaaacctcatgcagagcggggtgttgcagcggtcggtacggtcgcagagcgcggagtggaggcggagcagctgccacatgcgctggcaccgcgcgcagctcttgcggtggcactgggagaagtggcggatgagcagctgcaggccccggcacgtggcgtagcgcgcgcacggcgccggcgccggcgcccgccccgccgggccgacctccgtgcatccctccgtgcagatgtggtccaggcagtccatggcctcgctcagctccatgtacacgcgctgctccgcgcgcttccgccgccacttgcgccgccgcatgtcggcctcgtgcaggcgctgcaggacgtggagctcctgccaggggtcgttctcctgcaggaagcgccaggcctcggtgcgctccacggccgcgaactccttggccagcagcctggcgcagcgcaggtgcaggcgcggcgcgtcgcagaggccggccagctgcagcacgtccaccaccgagtccgcggtgaggcgcgcgccgatggcgccctcgcacgcccgcttcagccacggcacctggtacgcgtgcgccagcaccagcacctgcaccgcgtgctcctccatgtcgtcatcctcatcctcgccgcaccaggacagaggaatgcgcggggatcctccggcgcccgcccgtcgtgacgacgtcgacgtcggcggcggccgggtcgccggcgccggcgcggttgccgagccgcggtgcctcgcacatctcgttgtctggcgagaggtggtggaatggaagggaacgagccgggggcgtggggggataaaaaaaatatctgcggaaaaggtccggggcgcggcgggggcgggagacgtcgcagttgcttgcgttgcgtgctcttgtctgggtagccaggccaat

SEQ ID NO: 622 - protein, 223 aa, Zea mays subsp. mays
  peptide (1)..(223): Ceres Seq. ID no. 12590543
MWSRQSMASLSSMYTRCSARFRRHLRRRMSASCRRCRTWSSCQGSFSCRKRQASVRSTAANSLASSLAQRRCRRGASQRPASCSTSTTESAVRRAPMAPSHARFSHGTWYACASTSTCTACSSMSSSSSSPHQDRGMRGDPPAPARRDDVDVGGGRVAGAGAVAEPRCLAHLVVWREVVEWKGTSRGRGGIKKISAEKVRGAAGAGDVAVACVACSCLGSQAN

SEQ ID NO: 623 - protein, 217 aa, Zea mays subsp. mays
  peptide (1)..(217): Ceres Seq. ID no. 12590544
MASLSSMYTRCSARFRRHLRRRMSASCRRCRTWSSCQGSFSCRKRQASVRSTAANSLASSLAQRRCRRGASQRPASCSTSTTESAVRRAPMAPSHARFSHGTWYACASTSTCTACSSMSSSSSSPHQDRGMRGDPPAPARRDDVDVGGGRVAGAGAVAEPRCLAHLVVWREVVEWKGTSRGRGGIKKISAEKVRGAAGAGDVAVACVACSCLGSQAN

SEQ ID NO: 624 - protein, 211 aa, Zea mays subsp. mays
  peptide (1)..(211): Ceres Seq. ID no. 12590545
MYTRCSARFRRHLRRRMSASCRRCRTWSSCQGSFSCRKRQASVRSTAANSLASSLAQRRCRRGASQRPASCSTSTTESAVRRAPMAPSHARFSHGTWYACASTSTCTACSSMSSSSSSPHQDRGMRGDPPAPARRDDVDVGGGRVAGAGAVAEPRCLAHLVVWREVVEWKGTSRGRGGIKKISAEKVRGAAGAGDVAVACVACSCLGSQAN

SEQ ID NO: 625 - DNA, 854 bp, Zea mays subsp. mays
  misc_feature (1)..(854): Ceres Seq. ID no. 14306335
ctctctgttaattccggggagcaccagccaagctcctcccctgcggctcgcctccctcacggcgccgcctgctccccattgccgacctccactccagcacctgagcaagcgctcctgaggtcatcttccccatcttcctctagtgccggccgccaggtcatcttccccatcttcctctagtgccggccgccaggtcgtcttccccatccctcccatggcgccctcacctctgctcctcccagcgccctggctctgttcaaccttcacagtgagctcgccctcagccatggcggatgccgcctccacctcccccttggtgctcgccgagctcgccctcagccctgccgcgcccctgctttctgttcccagtgcgccctctgttctgttccaatcgttctccacgccgtgttcccccatggctccccttgcctctccggtcagcactagcccgaacggtacagcagcataccggtgccaaacccgtgtccgcgacgctcgccaagtgctcgatgaaataccgcagtgagctccacctcgacctgtgcagccccaacccgcgacgtcgcaacacccttgccctccgtcgatgtcgcgcttcgcgcattgctcctcgacgaagagccagaaccgtggtagacatgcatgcgcaatccgaactaattttacctggttgttcgctttatgtgattgtagtttgctctaattacgtgtggtcgatggcgtgaatatgtgtgtgaaaatgtaagcacatactctcatgcttaacaaaacaatccaaaatattaccatatatggttgcaacagcagagtgccaaacaatggaaatcaaaatcgacttacttcttcgtgtgctt

SEQ ID NO: 626 - protein, 143 aa, Zea mays subsp. mays
  peptide (1)..(143): Ceres Seq. ID no. 14306336
MPPPPPPWCSPSSPSALPRPCFLFPVRPLFCSNRSPRRVPPWLPLPLRSALARTVQQHTGAKPVSATLAKCSMKYRSELHLDLCSPNPRRRNTLALRRCRASRIAPRRRARTVVDMHAQSELILPGCSLYVIVVCSNYVWSMA

SEQ ID NO: 627 - protein, 103 aa, Zea mays subsp. mays
  peptide (1)..(103): Ceres Seq. ID no. 14306337
MAPSPLLLPAPWLCSTFTVSSPSAMADAASTSPLVLAELALSPAAPLLSVPSAPSVLFQSFSTPCSPMAPLASPVSTSPNGTAAYRCQTRVRDARQVLDEIPQ

SEQ ID NO: 628 - protein, 79 aa, Zea mays subsp. mays
  peptide (1)..(79): Ceres Seq. ID no. 14306338
MADAASTSPLVLAELALSPAAPLLSVPSAPSVLFQSFSTPCSPMAPLASPVSTSPNGTAAYRCQTRVRDARQVLDEIPQ

SEQ ID NO: 629 - DNA, 1184 bp, Zea mays subsp. mays
  misc_feature (1)..(1184): Ceres Seq. ID no. 13600595
cattgaagatgactggggagtactattaaatcaaccttatagcatctatggaatcatgtatacatgatacattatgggaaattacgtagcagtaatccttacatgagaggaggttgatgcaaactgtataatgcatgccttttaccaaagtagaatgtgttcagctcaccatattcatcaataggagcatcatagtcgtagctagttgcaatgaatggaccaccagctgtgcgcccaaaatttgttccaccatgatacatgtaataattaacaaaagagccacccttctgaataaacttggccacaccatatgctagatcctctactggtctatgtggaactggaataccaaatcctgtataccaagatgtccaagcctcagtccacattgtaggcttgtgaggtttgtttggggagaaccagtcacaataaaatccattgcaagtattaataattggatccggggcatcatcttctttgcacatgacccatggaacacttgtgttgagcgcaaccgccatgttagctgcccatgacgcataggccttggcgggctctccctgatcccactccaagggcccaaattcattctcaatctgggaaagaattattggccctccctgccattcaaagagcccttcggacttcatcatgtcaacgatctttgtggtgaaattctgcatctcagccttgaacggttcattatcagtcctaaagctaatgcccgggacatacttgagccaaacagggaaaccaccgaaattccactcggcgcagacgtaggggccaatgcggaggtgcacgtagagtccggcctgcttcaccagcttgatgaagtgcaccagatcataccgaccctcgaagtagtactgtcgacgggagggctcatggccgttccagaagacgtacgtctgcacgacgtcgaggccgccgtccttggccttctgtatcagatccggccacatctcggggacgctccttgggtagtggatggagccggacatcaggatccggcgctggccgttcaccacgacggccttgcggtcgtaggtgacggccgccgacgccgcggcggcgagcacggcaaccgcgaccgcgaccgcgacggaggccaggcccgctggcgccgcgggggccatggagcggggaggagaggaaagggagggagggagggaagtgaaaag

SEQ ID NO: 630 - protein, 99 aa, Zea mays subsp. mays
  peptide (1)..(99): Ceres Seq. ID no. 13600596
MAVPEDVRLHDVEAAVLGLLYQIRPHLGDAPWVVDGAGHQDPALAVHHDGLAVVGDGRRRRGGEHGNRDRDRDGGQARWRRGGHGAGRRGKGGREGSEK

SEQ ID NO: 631 - protein, 67 aa, Zea mays subsp. mays
  peptide (1)..(67): Ceres Seq. ID no. 13600597
MWNWNTKSCIPRCPSLSPHCRLVRFVWGEPVTIKSIASINNWIRGIIFFAHDPWNTCVERNRHVSCP

SEQ ID NO: 632 - protein, 60 aa, Zea mays subsp. mays
  peptide (1)..(60): Ceres Seq. ID no. 13600598
MPFTKVECVQLTIFINRSIIVVASCNEWTTSCAPKICSTMIHVIINKRATLLNKLGHTIC

SEQ ID NO: 633 - DNA, 1349 bp, Zea mays subsp. mays
  misc_feature (1)..(1349): Ceres Seq. ID no. 13599520
cagagaatgttacggtcttacggatatagaacaggttcatataacagagcagaacatatcacaaacattttgtgaaacttacgtttctccaaaagacaaactaatctcaggttgctaaggtttcaacttaagtaactacgctcatgttaatccacgatcagcatactaaattctgcgactcttagctgctttctcccatatatccgcaatgatactagggcattcccgtttcagttgctcataccctttactggccaccacatcaccaattatattagaagagttcataaactcaatgcaagcatctttgagctggctgcaatggtgctggtcggctagagccagcgtggtcgccacagtctcggcacaaagaacctcgcacagcttgctctcgcacatcaatttcatcctttccatggcatacctatctgcagcgacaagcaaatgcctaagcatttcttcatactcttcatcattcaggtcatccatcggaggcaacgaatccttgtagatgaagtgaagcagtcctctgaaagcagcaggctgcatatcttcaacagttatgttgtgcctttttttgtccctcattggcccgtagaactctgccctgaagaccgctgaacgcatcgcgaggattatcttatgagctgagaaaaccgcatgcttcacattgaaagatacatcagccccctctgtggcctccagcaagctactgagattatcaaacagatcggacggcggcacttggaccacaacattcgtcttggcgtcctccacctgcgcctccttgaacttgatcactgtaagattgcactggatgccaagaatgtcgtccacaatccactctccaagctcactcttcctccggaatttggtaaagccccagctcacggctgcattgtcacgggtgtcaaaaatcgacgggtctacctggctagggtttggccgggcataaggccgcggcggcggagccgctgtggcctggtcgactagccagatatcgtagagcaccctcacctccgtgttctcggtcttgagctcgaggtaggccgacacccagccattgctgtcttccctgtcgccgtcggggtagaagcggacgcaccagtcgtagccgccgacggcgaaggtagcggaccggatgaacttgccgacgccgaagcccctgtgcaggctgtacccgtcgatcttgaagacgtgcgacccgtgcgcagtctccggggcgcaggtcgaggcggtcctcgtcagtgagctctcggacgcggccatcgctggcctctggtggggcagcaactaagcgcggcggcggcggcggcggcgggatggggaaattttttggggctggggat

SEQ ID NO: 634 - protein, 110 aa, Zea mays subsp. mays
  peptide (1)..(110): Ceres Seq. ID no. 13599521
MLHIERYISPLCGLQQATEIIKQIGRRHLDHNIRLGVLHLRLLELDHCKIALDAKNVVHNPLSKLTLPPEFGKAPAHGCIVTGVKNRRVYLARVWPGIRPRRRSRCGLVD

SEQ ID NO: 635 - protein, 100 aa, Zea mays subsp. mays
  peptide (1)..(100): Ceres Seq. ID no. 13599522
MILGHSRFSCSYPLLATTSPIILEEFINSMQASLSWLQWCWSARASVVATVSAQRTSHSLLSHINFILSMAYLSAATSKCLSISSYSSSFRSSIGGNESL

SEQ ID NO: 636 - protein, 71 aa, Zea mays subsp. mays
  peptide (1)..(71): Ceres Seq. ID no. 13599523
MQASLSWLQWCWSARASVVATVSAQRTSHSLLSHINFILSMAYLSAATSKCLSISSYSSSFRSSIGGNESL

SEQ ID NO: 637 - DNA, 794 bp, Zea mays subsp. mays
  misc_feature (1)..(794): Ceres Seq. ID no. 13599189
cgagaagaataataactttctgttggtttgtgccttcaacaaaatcatttattccaaaaagtccaacacaattacgaaaaggaaaaataaaatcattttctaatttattccatcatttgtagtagtaaaaaagagactttcactcatcatcagcccgagagagctgcgttcatagcactgtgaacttcgacaccaatctgtgcttctgctttctcaagatctgttgtggcagaagcaagtttctgtgtaaactcagctaaacccttttggacttggcttgcgtcgatgttctcaagcggcacggcctcaaccgcgataatgtcagcaacggaatttgcgtggagaaatgcaaatccactgctcacaaagtatttcttgatgtcagtaccttcgtggacggacatgataccgggtttgagctcagcgattgttggaacgtgtccaggcaaaacacccatttgtcctgttgtcgcgggaatgatgaccatgtcgacctctttcccggaaagctcagatgcgtaagggaggacgaaattgacggtgagcttcgtcggaatcgaggaagcagtcgatggacgaggcttcatgaaggaagaaggagtctgcggcgggtccatgttcggtgcgactttcttccatgcctccacgaaactcgaatcgatcgtcgacgggacttccgttgaaaacgcacggtttgtcgccgatttggcggtgatagatcgggagacgaggcgagaagcttgtctgaacatggcggcgatttggtggtgatgatgatgctgagaggaagagag

SEQ ID NO: 638 - protein, 78 aa, Zea mays subsp. mays
  peptide (1)..(78): Ceres Seq. ID no. 13599190
MFSSGTASTAIMSATEFAWRNANPLLTKYFLMSVPSWTDMIPGLSSAIVGTCPGKTPICPVVAGMMTMSTSFPESSDA

SEQ ID NO: 639 - protein, 67 aa, Zea mays subsp. mays
  peptide (1)..(67): Ceres Seq. ID no. 13599191
MSATEFAWRNANPLLTKYFLMSVPSWTDMIPGLSSAIVGTCPGKTPICPVVAGMMTMSTSFPESSDA

SEQ ID NO: 640 - protein, 61 aa, Zea mays subsp. mays
  peptide (1)..(61): Ceres Seq. ID no. 13599192
MKEEGVCGGSMFGATFFHASTKLESIVDGTSVENARFVADLAVIDRETRREACLNMAAIWW

SEQ ID NO: 641 - DNA, 1031 bp, Zea mays subsp. mays
  misc_feature (1)..(1031): Ceres Seq. ID no. 13587596
caggaaaaacgaaattgatatatctatatatggtagtactgtacaagaggtagctagccgctcatgcagatagcaaacccaaaagactatatagctatcaaagtatatatgtttaagacaccactactatagtatatatattttacaaatatgaaacattatccaaatataaaacccacgagtaaccaccatctggtacgtcttgagacttgatgtgtaagtaactcacgaaccagtgggcccgcgcatcgactcgcttcgccacgtacactggcagctctcgatgcagctagcaacgaagtagctggtgcagggcgcacggcgtcatcgatcaacgagagttgaagagggacgacgaatcgacgacctgctggcgctgggcgccggcggagtcgatcatcatggtgggggacgaccaggcggccgtgtggtcccagatgccggcggcttcgtcgaacacctcgggaggcacctcctggaagccctgcaggccgaagtcctcagccttgggcagccgcgtcatgaagtcctcgaagtcatctgcctcctgatgcagaggagccgccgccagctcgcgcaacatctgctgatggcgctgcatcgccatcgtggtggtggtggtgtcgttgacgtggcagccctggacggcagccatcatcacgccgcacgaagacggcggcggcggcggcatttggaacgtcgtctggtggtgggtgtacgtgggcgaggttgccgcggccgccatggtcaccggcgacgagctggagttggagttggagtcggagttggacgacgacgcgtcggcggagcagcaggatgagtgcaccatcatcataggcgccgccatggagggctgctgctggtggacctgtgagtgatggacgaactgctgctgttgctgtcgatgcaccaccggcacctccacggcgacaggcggcgccaaccgatccatctggagtagcttcgtccacagatcgatatggcgaccggcgatggatgctaacaatgcaatccttgcctggtgtgtgcct

SEQ ID NO: 642 - protein, 89 aa, Zea mays subsp. mays
  peptide (1)..(89): Ceres Seq. ID no. 13587597
MQRSRRQLAQHLLMALHRHRGGGGVVDVAALDGSHHHAARRRRRRRHLERRLVVGVRGRGCRGRHGHRRRAGVGVGVGVGRRRVGGAAG

SEQ ID NO: 643 - protein, 76 aa, Zea mays subsp. mays
  peptide (1)..(76): Ceres Seq. ID no. 13587598
MALHRHRGGGGVVDVAALDGSHHHAARRRRRRRHLERRLVVGVRGRGCRGRHGHRRRAGVGVGVGVGRRRVGGAAG

SEQ ID NO: 644 - protein, 49 aa, Zea mays subsp. mays
  peptide (1)..(49): Ceres Seq. ID no. 13587599
MVGDDQAAVWSQMPAASSNTSGGTSWKPCRPKSSALGSRVMKSSKSSAS

SEQ ID NO: 645 - DNA, 1744 bp, Zea mays subsp. mays
  misc_feature (1)..(1744): Ceres Seq. ID no. 15179131
tgaaggaaaagggtaggttaaacaaaattagtccaaaattatgattccagtacttataagaatgcagttataatttccaatgtattaggagttataattttgcataaaatgggtgctcttcatgatgccacaaacaaaacagacaccaataatcaggcaataccgtaaaataaacagtagtagacttaccctctttgtggcctctgcttggcattctcgttcatattactgtttaaggtattttattctttgtgatttgtagtgatgacaacattaatgagttcttgatgaacatgggcactttgtgttgtgcatatgccatcttcggatagcagatgaacttctgatgaagatgtgcctgaacatatctgttcttcctgccatgcattttaccataatatgtttctttgaaatatgttaataagtgcaatgaaaagattttatggctgctttgctccttaaaatggtgcctctgccatgaacgattgtttttaaaataaatgctacgattaactaccttcttgtcatcatctttaaagattgtcagattcccgtataagcatctgttgcagcagctgcaacgaacaagccatatactgcttgttatcaagttttttgtttctccaaaatattccatgcgatcattcttgcaatggtttatgtttagtattttgttgccttaatcttggatttcctgcaaacttacaatggcggttcttttgtacatgttgaacaagtattcctaaactgtactgtatataaggtaagattgaatgttagtattctgttttcttcatggtatctagtatttttgtattataattgattatctatatgtttgctaaaacatgagttgttgggagttctgtacaaaggaatctggtctatatttatggtcgtctacatgccacttccagtccattctaataatattttttatttgagtttttgagtgatttctttcatggcttggagtaagaaatacagtttattacaaaaatcatcttcaggatgaagatatcgaataccttgtgtaaccaatcgctaagcctcaagccagtactattggaagtgaattagatggatctgaccctgatgatattgatgaagacatagaataagtcgacgatgatgatgaggggaccatagattagccttcatcctcgcacggaaccaagcggaagagagatgatccctcgccagacccaactaccaatcaagaattacgaggatctccttcgttgtgttggtcgctgaccaggaggcaaaaacatagagggaataagcgacagacaggcacggcgaggcatacctgggacggtctggacacggacagcttgtggtgactcctgcggaggctgccagcaagactgaggaagagtaggcggagtgaagaaggaggcgtcgcggtgcgcggcggaggagctcatggcccgcgcgacgaggacggtggtggtggtgatggagaaccacacctgccccaggcccacatcgacggcctcacggaccgtgagtacaacaacctcgatgcctccgaccccaactccctagagatctttagtgccacagccatggcactcatggcacgcacattaacccagcgggaggagagtcggggctacacacgggttattgccggagggagcgcgctggcggcttgagcgaggccgccggcttccgcgcgacgccctgctcatccggtggaggcggctgcgagcggagaggttagggattagggcaaggt

SEQ ID NO: 646 - protein, 60 aa, Zea mays subsp. mays
  peptide (1)..(60): Ceres Seq. ID no. 15179132
MLRLTTFLSSSLKIVRFPYKHLLQQLQRTSHILLVIKFFVSPKYSMRSFLQWFMFSILLP

SEQ ID NO: 647 - protein, 46 aa, Zea mays subsp. mays
  peptide (1)..(46): Ceres Seq. ID no. 15179133
MMPQTKQTPIIRQYRKINSSRLTLFVASAWHSRSYYCLRYFILCDL

SEQ ID NO: 648 - protein, 45 aa, Zea mays subsp. mays
  peptide (1)..(45): Ceres Seq. ID no. 15179134
MPQTKQTPIIRQYRKINSSRLTLFVASAWHSRSYYCLRYFILCDL

SEQ ID NO: 649 - DNA, 1138 bp, Zea mays subsp. mays
  misc_feature (1)..(1138): Ceres Seq. ID no. 15225613
ttttttttttttttttcatgccaaaattcaaatcaaatcatattcaaataaagaaaaaggtaaactactcagagttcattctgatcagtgttcactggccactggggatcccgacaccactgcagtgtgccgggccggggggcgggctacgactacgatcgatcacgtcgcgccaacgccaaggaagtcgaagaagggcagggcggcgagctttccacatccgccgccgccgtcggaagccgctgcaggcgacggaacggagcgaagcatgatgcagcgcagcagtggcgaggccgaggaggagccgaggaggcacgcgcacgtcgtgccgtcgcacgagctctggctctgtcgccggcggtggaagtggaagcaggggacggcggcggcgcacacggagcctagggaggagaggtcggtgccggaggaggtggacgatgcggactcgtcggactcggacccgccgttgccgtcgccgcacgagcggggtcgggtggccttgccggcgcggaacggcaggggagatggtgcacggtggtggtgggcggcgggtgatgacgacgaggagggcttgcgtcggcgcggcggcgcgccggtccgctcccgctgcctgcgcgccgtgaggacgtgccagtggttcttgacggcgttgtcggtgcggcctgggaagaggcgcgcgatgagcgcccacttgttgccgtgggcgcggtgcgccgctaccagccgctgctcctccgccgccgagaacgggcggcggttcacccgcgggtccagctggttgaaccaccgcagccggcagcttttccctgatctgccgtggagtttgctggcgatgaggttccagttcttggggccgtacagcgccacgaggtccttgagcttggcatcctcggctggccgccagtggcctctcgcgtgcccagcgcggctgtcgtcatggccgtgggtctcttgtgcctcatggagcgcagacagagcggcggccaccggtggagcggccatttgggacctagtcgcagtcgcagacggaggagagtggtggagtagagtgctgcaaagtttagatggcggatcttgcagagcgttgctagctctctctgtcagcttgtgttggatggacgagtgcctagccttttag

SEQ ID NO: 650 - protein, 378 aa, Zea mays subsp. mays
  peptide (1)..(378): Ceres Seq. ID no. 15225614
FFFFFHAKIQIKSYSNKEKGKLLRVHSDQCSLATGDPDTTAVCRAGGRATTTIDHVAPTPRKSKKGRAASFPHPPPPSEAAAGDGTERSMMQRSSGEAEEEPRRHAHVVPSHELWLCRRRWKWKQGTAAAHTEPREERSVPEEVDDADSSDSDPPLPSPHERGRVALPARNGRGDGARWWWAAGDDDEEGLRRRGGAPVRSRCLRAVRTCQWFLTALSVRPGKRRAMSAHLLPWARCAATSRCSSAAENGRRFTRGSSWLNHRSRQLFPDLPWSLLAMRFQFLGPYSATRSLSLASSAGRQWPLACPARLSSWPWVSCASWSADRAAATGGAAIWDLVAVADGGEWWSRVLQSLDGGSCRALLALSVSLCWMDECLAF

SEQ ID NO: 651 - protein, 289 aa, Zea mays subsp. mays
  peptide (1)..(289): Ceres Seq. ID no. 15225615
MMQRSSGEAEEEPRRHAHVVPSHELWLCRRRWKWKQGTAAAHTEPREERSVPEEVDDADSSDSDPPLPSPHERGRVALPARNGRGDGARWWWAAGDDDEEGLRRRGGAPVRSRCLRAVRTCQWFLTALSVRPGKRRAMSAHLLPWARCAATSRCSSAAENGRRFTRGSSWLNHRSRQLFPDLPWSLLAMRFQFLGPYSATRSLSLASSAGRQWPLACPARLSSWPWVSCASWSADRAAATGGAAIWDLVAVADGGEWWSRVLQSLDGGSCRALLALSVSLCWMDECLAF

SEQ ID NO: 652 - protein, 288 aa, Zea mays subsp. mays
  peptide (1)..(288): Ceres Seq. ID no. 15225616
MQRSSGEAEEEPRRHAHVVPSHELWLCRRRWKWKQGTAAAHTEPREERSVPEEVDDADSSDSDPPLPSPHERGRVALPARNGRGDGARWWWAAGDDDEEGLRRRGGAPVRSRCLRAVRTCQWFLTALSVRPGKRRAMSAHLLPWARCAATSRCSSAAENGRRFTRGSSWLNHRSRQLFPDLPWSLLAMRFQFLGPYSATRSLSLASSAGRQWPLACPARLSSWPWVSCASWSADRAAATGGAAIWDLVAVADGGEWWSRVLQSLDGGSCRALLALSVSLCWMDECLAF

SEQ ID NO: 653 - DNA, 833 bp, Zea mays subsp. mays
  misc_feature (1)..(833): Ceres Seq. ID no. 14305544
aaaaagtgaacgagctctcagtctctcagactctcacacactctagctgctgctctctcccactgtctcgccgtcttgctcaaacgcagtgcccggtggtctggtcggtcgctctctcgacccatgggagttggccggggttcctgctccagccactgaagacgcggcggcggctcctgctcatggcaggagctcaatgcgccacagggccgcgcgccgcgccgctcctcctcgtcctcgtcctcgtcctgtgcggcttccttgtgctgctcgtgcctacgtctcggcgcggggacgacgacgagacagaggagttccccgtcgcgtcttccgcttcgtcgtcgtcgtggcactggcacgccgctgatgggcgccgccgtgccctgccgcggccggccgccgcgacgtggccgtggcgccccgcccagccccgggcgcgcgggaggtggaactccgcggggcaggacggcaagcacgaggtccccagtggccccaacccggactccaatcggtagccgtagccagagaggtgggtggtcgtgaactccgatccgccgtctgtgtttgtttcggcgaacggcgaccaagctccctccctgtcccctgctcctgctcctggaggccggtcgtctagctaggcctggccgtcgtatcgctcctccatgcttcttgctgctccgtgctggagccagtacgtgcgtcgtttgcttgctgtgttgtatcttcttcttcgccgttctcttcgttagagaatgaacatgaccatcatctgacgcatgcattgctcaattctcgtccaaccgacgattgattggtgacctggaatcaggagc

SEQ ID NO: 654 - protein, 170 aa, Zea mays subsp. mays
  peptide (1)..(170): Ceres Seq. ID no. 14305545
KVNELSVSQTLTHSSCCSLPLSRRLAQTQCPVVWSVALSTHGSWPGFLLQPLKTRRRLLLMAGAQCATGPRAAPLLLVLVLVLCGFLVLLVPTSRRGDDDETEEFPVASSASSSSWHWHAADGRRRALPRPAAATWPWRPAQPRARGRWNSAGQDGKHEVPSGPNPDSNR

SEQ ID NO: 655 - protein, 110 aa, Zea mays subsp. mays
  peptide (1)..(110): Ceres Seq. ID no. 14305546
MAGAQCATGPRAAPLLLVLVLVLCGFLVLLVPTSRRGDDDETEEFPVASSASSSSWHWHAADGRRRALPRPAAATWPWRPAQPRARGRWNSAGQDGKHEVPSGPNPDSNR

SEQ ID NO: 656 - DNA, 922 bp, Zea mays subsp. mays
  misc_feature (1)..(922): Ceres Seq. ID no. 13586110
ttaactattttctccacatgtttgtgctatggacttcattactcttacgagtgcatgttgcttttgcaacgcataagatgttgacttaaatccgaaactatgtggtatgtgaatacaaggttggcacacttattatgtatttaaatttatattggctgtactgtttacatacaacttcatattctacacttagtgtatttttagcctctatctgtaaactatatcatgtattcagctgtctctctctgggaggaggacgatgagcaggaagcggaagaagaaagtggggcgtcggccgccgaccgtcaggccaacaggataagcaaggggtagaagggcaagggcaggccgacgtgctacatgaggagcaagcgctcggagctgcgacgtgtctggtgacatccaggtggacaggaaccgctctttcatctacgtcagcgggatagaaagggagtggaggaccaggccatatgcgtgctaccacgaccccgtggccatggcccacatccgcgagtacaccctcaagccgctctcggagccggcggtggcgcccgtgtgcaccaggaacaactctgtccctggcttcctcttctccaacggtggcttctccggcaacctgtagcacggctacacagatgtgctggtgccatttgttcatcaggagtcaggacgcaccagttccggggcgggtgcagctcttgctcagcgggatgaaggtatgctgggtgggcaagctccactctattcttccagcgacgtggacaatgaccaagaggtgcactgcttccaacagatcgtggtcggcgccaccttacacagggacatgggcgtggacccacgccgctcgccgggccacctaaactcttcgtcacaagctacatatttgtggaagctatgacttgactacaaacttatatcaatc

SEQ ID NO: 657 - protein, 129 aa, Zea mays subsp. mays
  peptide (1)..(129): Ceres Seq. ID no. 13586111
MRATTTPWPWPTSASTPSSRSRSRRWRPCAPGTTLSLASSSPTVASPATCSTATQMCWCHLFIRSQDAPVPGRVQLLLSGMKVCWVGKLHSILPATWTMTKRCTASNRSWSAPPYTGTWAWTHAARRAT

SEQ ID NO: 658 - protein, 74 aa, Zea mays subsp. mays
  peptide (1)..(74): Ceres Seq. ID no. 13586112
MCWCHLFIRSQDAPVPGRVQLLLSGMKVCWVGKLHSILPATWTMTKRCTASNRSWSAPPYTGTWAWTHAARRAT

SEQ ID NO: 659 - DNA, 516 bp, Zea mays subsp. mays
  misc_feature (1)..(516): Ceres Seq. ID no. 13637257
aacatgcaccagatcgccttttgattcatgggtttcacagggcaccgcattttgctcataggccttgcatatatacatggggatttcatgccacactttacagtgctgcatagccatacatgcatcgatccctagctctttgcttgccgcggatttctcctgctcatacaacacaagccatgaggggtttccagctgctactcatcatagtggcattgcttgccggggagttgcactgcgcaagagcagcatcagcagcagatgcaccggaggctgcaccacagtcccccgaagcaccaacagcagatgagcaaacgccaccgcagcgcctgggccaacatcaccacctccacctccacgacgtcggggatcaccacatcgacggccaccagcaccgacggatcagcaggatccagcaccgccaaggttggtcgtgccaccacaggaacctcctgcaccggcaccacctggaatgacgatcaaccgcactacgggctgtactacactccttgtact

SEQ ID NO: 660 - protein, 118 aa, Zea mays subsp. mays
  peptide (1)..(118): Ceres Seq. ID no. 13637258
MHRSLALCLPRISPAHTTQAMRGFQLLLIIVALLAGELHCARAASAADAPEAAPQSPEAPTADEQTPPQRLGQHHHLHLHDVGDHHIDGHQHRRISRIQHRQGWSCHHRNLLHRHHLE

SEQ ID NO: 661 - protein, 98 aa, Zea mays subsp. mays
  peptide (1)..(98): Ceres Seq. ID no. 13637259
MRGFQLLLIIVALLAGELHCARAASAADAPEAAPQSPEAPTADEQTPPQRLGQHHHLHLHDVGDHHIDGHQHRRISRIQHRQGWSCHHRNLLHRHHLE

SEQ ID NO: 662 - protein, 85 aa, Zea mays subsp. mays
  peptide (1)..(85): Ceres Seq. ID no. 13637260
MHRRLHHSPPKHQQQMSKRHRSAWANITTSTSTTSGITTSTATSTDGSAGSSTAKVGRATTGTSCTGTTWNDDQPHYGLYYTPCT

SEQ ID NO: 663 - DNA, 964 bp, Zea mays subsp. mays
  misc_feature (1)..(964): Ceres Seq. ID no. 15226037
aattcccgtccatcagctcgcagtcgcaccagcgaccagagcagcagaccaagcaagcgcgagggagagaagagacgaagaagaaaagccggagctctgccgagcttagtccccggaggcggcgaccggcggcgcgtaaccatggagcgggcggaggaggcgcagcccgccgccgagcggagggcgccctcgacggcgccgtcggcgcgggtgtcgatctgggagtcggtacgcgcgtgcggggtgtgggggaaggagctggacaaggccgagctgcggaggcaggtcgtcatgccacgctacctgcgccgggccgtgacagccgcctccccacgcccgcttacccgactggccgcacaagatgcccacagtggcccccatcgcgcccacccgctccccccatccaccgcgacctcagccgccacgccgacgccatccccgtcctctagcgcgttgtcgccgtcgtcacaccgccaaaggtgcctgccccctgctaccgaggtcgacgaccagcagcggcaagctgccgagctcgacgacacgcacgccatgcttggccatatggacgagtccatcgcctgctacgagaaggggctccagatccagatgtccgcgctcgatgagcgcaatccctgcctccctgagacctgcaggtgattgacaaggtttaggaggaaacttccaaaagccggtcaagtatggagtgcttaacatcactttggcaacttatatttttttacatgtttgctttgtttgttaacaacataatttatgggctgacaatgtgatcatgtattctttctggtagtcttcgtgtcactgcttgcagttgcaggggagggatcatggctttcttttattttccatgtgcaatgtttaatttaggtgatgaactccaaagcttatcccattgttttctagcaagagctaagcaatactggatggagaacatttatctttttac

SEQ ID NO: 664 - protein, 218 aa, Zea mays subsp. mays
  peptide (1)..(218): Ceres Seq. ID no. 15226038
NSRPSARSRTSDQSSRPSKREGEKRRRRKAGALPSLVPGGGDRRRVTMERAEEAQPAAERRAPSTAPSARVSIWESVRACGVWGKELDKAELRRQVVMPRYLRRAVTAASPRPLTRLAAQDAHSGPHRAHPLPPSTATSAATPTPSPSSSALSPSSHRQRCLPPATEVDDQQRQAAELDDTHAMLGHMDESIACYEKGLQIQMSALDERNPCLPETCR

SEQ ID NO: 665 - protein, 171 aa, Zea mays subsp. mays
  peptide (1)..(171): Ceres Seq. ID no. 15226039
MERAEEAQPAAERRAPSTAPSARVSIWESVRACGVWGKELDKAELRRQVVMPRYLRRAVTAASPRPLTRLAAQDAHSGPHRAHPLPPSTATSAATPTPSPSSSALSPSSHRQRCLPPATEVDDQQRQAAELDDTHAMLGHMDESIACYEKGLQIQMSALDERNPCLPETCR

SEQ ID NO: 666 - protein, 148 aa, Zea mays subsp. mays
  peptide (1)..(148): Ceres Seq. ID no. 15226040
FPSISSQSHQRPEQQTKQARGREETKKKSRSSAELSPRRRRPAARNHGAGGGGAARRRAEGALDGAVGAGVDLGVGTRVRGVGEGAGQGRAAEAGRHATLPAPGRDSRLPTPAYPTGRTRCPQWPPSRPPAPPIHRDLSRHADAIPVL

SEQ ID NO: 667 - DNA, 670 bp, Zea mays subsp. mays
  misc_feature (1)..(670): Ceres Seq. ID no. 13598909
gagcttgatacaaacaagttcattccacgtatgacgcgccgatcgagagtatcattctttcgtagtgtgctacaaccttcgtccttcatgtcgatggcctatatagctatacgactagctagttgtcgtagatgcggcactcctcggagtccgggttgtccttgcagtacttctcgagcgggtcgttggcgttggtctccttgaggctgtcgcgggcgtggctggccgtggcgctgagctcctccacctcgtcccacgccgccgcgcactcggcgtcgcccttctggtcgtccgcgcacgtctcctccgcctgcttgatgctctccgacaccttgtcggagatctccggcggcgtggccggcccgctggaccgcacggcgaccaaccgcccgccgccgcggcgcgccgccgcggggaaccagacgacgcgcttggcgcccgccctcctcgggacgacgatcagcacgtcgccgccgcccgccgccgcgaaggtcgtcgtcgtcaccgggacagagaggctcgccaccgtcgacgccgccattattattcctgtcttggctagcttatagcttcctgcgtcacggtcacgatcgaacgaactcgatcttctgcgtgtgtgatcgtcgtcgggtgggtgtggtgtagtgtagtgtagtgcttcgcggttggc

SEQ ID NO: 668 - protein, 145 aa, Zea mays subsp. mays
  peptide (1)..(145): Ceres Seq. ID no. 13598910
MRHSSESGLSLQYFSSGSLALVSLRLSRAWLAVALSSSTSSHAAAHSASPFWSSAHVSSACLMLSDTLSEISGGVAGPLDRTATNRPPPRRAAAGNQTTRLAPALLGTTISTSPPPAAAKVVVVTGTERLATVDAAIIIPVLASL

SEQ ID NO: 669 - protein, 83 aa, Zea mays subsp. mays
  peptide (1)..(83): Ceres Seq. ID no. 13598911
MLSDTLSEISGGVAGPLDRTATNRPPPRRAAAGNQTTRLAPALLGTTISTSPPPAAAKVVVVTGTERLATVDAAIIIPVLASL

SEQ ID NO: 670 - DNA, 2309 bp, Zea mays subsp. mays
  misc_feature (1)..(2309): Ceres Seq. ID no. 15227305
ggtcaaacagtccgagacaggagcagacgtctggctataatggtcgaacggtccggctataatggtcgaacagttcgcaaacggtcagaagcagcaacctcagaccatcggaccacaacgttccaaaacaagtgttaggaaacaaaacactactaagacgtctggacgactcagtagagtcggccctacttttgatcagttgtttgccaaatatatgaagaaggtcgttccacacaaccggccaataaaacaaacaaagtcaaaagggcgatctgtgcgaaagcaaaagccgactaaaccgactcaaacggtagcacaaccaagaccgccttgtcatcctcctccagggatagcgtggtgcttctcggtctatccatcgtcgatgtgttgtcctactcatgcgtggggtggtaagacgatgaatccgtattactggtccaattcatttgcttatttgggctggggggcaccacaagtttttgcctattgaaaggatgatcaggcaaacatggttgaagaggatgcaatctgaaacgacctctgtgcattaaagttccatcaagtatttatattatccgatcgcaagagccgatgacttgcatcaagcagagtccttacttcgggaacaaagtagctcatgaggtcaattgtttctgaagttttcgctggtgctttggttcgccaagctccaccaaaaggcaggggcatatgttgaccaccaaaatgagcggacggttcgacccttgggcccggacagtccgcgtgccccgagattagattaattcaggtgtttatccttatctcgtgcgtggttatccatctaatcatgtgagagttgttggctatctcttaggaataggtccagacctccccctctataaatataaaggggtacagtcgattgagaaccctagaacacattccaatcgaaccaattactttatttacctttcctgccttaggagtagatgtagtgtagttctagttgtagtcttccgcatatccacctccacccctattcaactctacgttgtctagatccgtcctgaggtggcctgccgaccccaggacaaccctatgatctttacccctcctgaggggcaagatctacttcgtctacttcaatcaagatctcttcctcgaattgatctcttaatttctaggcgactctacgtcatctggagacgccccggctgacctgctgacccagagcaccctaaggtatctcccccaggggacgagatctaggtcatacaaggagaagaagacgaccctgcgccatcgcggactgtccggactgcgcgcagtgaaggcgccgcttctaccgccaggttgcggactgtccgacctagagccgcggaccgtaagcacctcccgcggcgagcactgccaggcgacccgtcgcaggccgccgccactgttcacctcgtggagccgaacccaaggtattgctcatcacgaggtcctagggttcgttgctgtttggtcccaaatatgtggtgaccatcatagaggtgttgccccacatttaggataaccactttatttgatcctacatcatctaaaggtgccaagtaccaccaggcggttcattatagtgtttggtgaccaaaaagacaccaacagatacatgagcagaatagtcatattggtgctgcaactatatatagtccgagacattgattttgtccctcaacatttaaaatgggcacgttagtcctaaaaaatttcatttaggttcaattttatcgtacaacaatcaaagtgatcatgaatccttatcctgtgtactttggctcaaattcttattctaactaactgtatttttctactacttatgaaggctgcaagaatagcctgcctctaacttgttctgccacctgccatccgtgaatctggaccgttcgcctcaatcatgcgcgatccaaccgtcctccgccccgtccccgcaccctccccctccccttgcgatacggtagccgtcgtcccagcccgcggccttcgccaaccacccccaccctcgcgcccacccatcgccgcatgggcaccccttgaccccggcgagacaccgccccactcacccataggcggcagcatccacgtggccgatccacctggcgacgcgccctcctccgcccccgacatggtacgagacccagggttgatcctccgcaccgttgaccccaaccgcttcaccctttgtggcgagcagcatctcctcccccagtcaccgacaaaaagcgagtgggtgagcagctcctcctgcaaggcgaatatgtgggcgcagtccaccgccaaatctacgacgt

SEQ ID NO: 671 - protein, 142 aa, Zea mays subsp. mays
  peptide (1)..(142): Ceres Seq. ID no. 15227306
MVEQFANGQKQQPQTIGPQRSKTSVRKQNTTKTSGRLSRVGPTFDQLFAKYMKKVVPHNRPIKQTKSKGRSVRKQKPTKPTQTVAQPRPPCHPPPGIAWCFSVYPSSMCCPTHAWGGKTMNPYYWSNSFAYLGWGAPQVFAY

SEQ ID NO: 672 - protein, 131 aa, Zea mays subsp. mays
  peptide (1)..(131): Ceres Seq. ID no. 15227307
MRDPTVLRPVPAPSPSPCDTVAVVPARGLRQPPPPSRPPIAAWAPLDPGETPPHSPIGGSIHVADPPGDAPSSAPDMVRDPGLILRTVDPNRFTLCGEQHLLPQSPTKSEWVSSSSCKANMWAQSTAKSTT

SEQ ID NO: 673 - protein, 91 aa, Zea mays subsp. mays
  peptide (1)..(91): Ceres Seq. ID no. 15227308
MKKVVPHNRPIKQTKSKGRSVRKQKPTKPTQTVAQPRPPCHPPPGIAWCFSVYPSSMCCPTHAWGGKTMNPYYWSNSFAYLGWGAPQVFAY

SEQ ID NO: 674 - DNA, 2283 bp, Zea mays subsp. mays
  misc_feature (1)..(2283): Ceres Seq. ID no. 12638191
ataagcactcgatgcaaacaggctagaaaaaccactcttggtccttgtggagccaaagcgacttctggagagcctgctgcagctgctcatgaagctggactgtctggagttgaggcgaaggaaccaagaatggaagctgtctgtcttctgccattctggcctttggtttcgcctgcagcacatcactgtggccaatgcagctgcaatcactgccaaagaaagacctatgccatttagtatcctcttaccaagttgtgagcttgtttttggtgaaaataggccatctaagctgtttgcttggttgcttattttcatgacttcaaggccattaaggatggcatcagtattgctggagtcggttgtgcttgggccaacctgcactagaagggtggagttgatgatgctggatgagtccacgataaagtcctggtagtaggctactgcaaggcccattgtcaagcttgagaggtcaaggttggatacacccatcatgccatttatgtagacatcgaagtagaggctattgagtgccttgcttataatatcacagaaatgtaggcggatgaggtacttgaatcctggctctgcttccatttcccaagttatgttgaatcttgcttgcgaggtatttgttgatgctgactgctgtgccgttgagtatatatttgctggagcaatgagcggtgtgactgtcttgtcatcagggtacttgatagttctaggaggaacccaagccacctgtgctgctgcctcaagcttcaaaaaaggtgcatctggtaaccaggtcctgcccagtgtgtcgttgaaggctgtcacaagtgcaccccccatgttcagtctgtagactacctgcaatgcattgttggagatgtcaaactgttctagaggaggcaggccaatggtggtatttgggattagggtgggtggtgccaagacaacttcaatagcattgatgaatgctattgagtccttctttgggatgaaaatgatcttcaaggtgtctccctgtgttacaacaatatactccttaaggacggggttaggaggactggctatgaaggagaagtcatggagaagaaccatattgtcagtgaacacagagaatgttgctgaggtgaggttgtattgtttgtcagggataggcaagaagtagagacggatccaatggcggccaggctgcgagacaaagaagctataagtcgaaacatcagagaaaactcttgcagacaggtaaagtggggataatggtgaagcagcagttggagaattgttagctgtaatcttgatgtccactggggtggacagaaaagataccgactctggatcagagcggaatgtcttgccatcatcaagctgcacagaactggatgccccgcagctaatgagatagttgtcctgaggtacaaacggacccttctgtgatgcaattgcattggtgctggctatgctagtgataccaaggatggagaggatgatcaacatcggtactctcttccactcaagcatgcttctggtcatctatgttgatgttggcatcagaagcaccagtatgtagcaaaactgattggtggtttctcatagggaggaaagtggtctcgggctttgaagagaggaacagggtgcagggatggatgagatctttagttcgcttttggagggaatggattgattactgagatataaggtattggttgagcgcacgtccagatgagatcaggctgcaacttaaatagtatgtcaaacggtctattccgagctcctatacttctgacacgtggacgtcgaaatattatttgaaaagggagcttgcaggacaatagctgcaaagtacaatagacaggctggagtaacttaagcatagctatctttttaacaaaagaagaatagctgtatcatgctggtttattcaagtaggttgagatttggaatctgtgagttcttttctggcgatggtttgttgtaccgtactaatggaggaactaaccaatctaactaccagttggttcttggatgtttacccagctaatggcttaagcatggtaacccaaattgacagtttgaaaagaggttagtttgtcaaacacagttttgagggatgaccattattgtcttagattccagtgcccaattattgctgtaatcaacataactatcttgacacaattatctcggtcaccatgtttgtatagcttttcccttccatggatctggtttgatctcaaaaaaaaaaaaaaaaaaaaaaaaagaaaaaaaaaaaaaaaaaaactcgagggggggcccggt

SEQ ID NO: 675 - protein, 114 aa, Zea mays subsp. mays
  peptide (1)..(114): Ceres Seq. ID no. 12638192
MKLDCLELRRRNQEWKLSVFCHSGLWFRLQHITVANAAAITAKERPMPFSILLPSCELVFGENRPSKLFAWLLIFMTSRPLRMASVLLESVVLGPTCTRRVELMMLDESTIKSW

SEQ ID NO: 676 - protein, 94 aa, Zea mays subsp. mays
  peptide (1)..(94): Ceres Seq. ID no. 12638193
MSNCSRGGRPMVVFGIRVGGAKTTSIALMNAIESFFGMKMIFKVSPCVTTIYSLRTGLGGLAMKEKSWRRTILSVNTENVAEVRLYCLSGIGKK

SEQ ID NO: 677 - protein, 93 aa, Zea mays subsp. mays
  peptide (1)..(93): Ceres Seq. ID no. 12638194
MRYLNPGSASISQVMLNLACEVFVDADCCAVEYIFAGAMSGVTVLSSGYLIVLGGTQATCAAASSFKKGASGNQVLPSVSLKAVTSAPPMFSL

SEQ ID NO: 678 - DNA, 2085 bp, Zea mays subsp. mays; identical to SEQ ID NO: 542
  misc_feature (1)..(2085): Ceres Seq. ID no. 13623233

SEQ ID NO: 679 - protein, 175 aa, Zea mays subsp. mays; identical to SEQ ID NO: 543
  peptide (1)..(175): Ceres Seq. ID no. 15219369

SEQ ID NO: 680 - protein, 106 aa, Zea mays subsp. mays; identical to SEQ ID NO: 544
  peptide (1)..(106): Ceres Seq. ID no. 15219370

SEQ ID NO: 681 - DNA, 1085 bp, Zea mays subsp. mays
  misc_feature (1)..(1085): Ceres Seq. ID no. 12590227
ccccccccctatgagctgtgatcttgcatttttctatagtttcagttaggatgccctgttactgtgatattagtggcaaacaataacatgtgaatacaatctatttaccttgtttcatttttcaattacatgcgatatacctacatacgctattacagatctaaagaacattttgagggtgcataaagcataattgcagcagatacttttgttgaagtagtcatctaatttgtactattctgcaagtactggttccgcttggaacagccggcagccccagcacaataaacagtgctgggcaggttttaaaagcagcaaaaactttagctttattccccagcagcttgtctatctccagcagccttatcacatctcctgtttcaagctctactatgtaaacaatgcagtctacagtgttttacacgactatatacatgacctgctgggcctacgcttacaaacagggccactgttttttgtgaatctctagtcgttggaacttcctcacggttcttcatagctatgtctagtttactactttatggacccaatcaagccaattcgcaagttggtgtaactgtcacaattaactcttttctggaaaacagaacagaaaacttccatttatattttctggtattatttcctttgtattttcttattaacggtgtgttcaaccatgtgttttggcgctcacaaaagccacttgagcttgccgccccatccactgttgctgcggcacaatcgacaggaactgccccaagaaaaccactcagattgaggttgacgactttggggaaaccgaagccagctgaaggaactacctgaatcgaattgcccaggagccaaaattacctagagttcgcttttccttgtattgagtcaaggatctgtggaagcgctttggcaccgcgagttcaaatgaaagggaaaatgaaaaaaaaaacggagaccacctgacgtaaatgagtgcaattgtaataaattgtgtgtagtacatagctgagttggcataaatgtacgctgtggtacgttttcttgacgacttagctacgcttgttaaacgggaatggatatcatcttcg

SEQ ID NO: 682 - protein, 101 aa, Zea mays subsp. mays
  peptide (1)..(101): Ceres Seq. ID no. 12590228
MSSLLLYGPNQANSQVGVTVTINSFLENRTENFHLYFLVLFPLYFLINGVFNHVFWRSQKPLELAAPSTVAAAQSTGTAPRKPLRLRLTTLGKPKPAEGTT

SEQ ID NO: 683 - DNA, 699 bp, Zea mays subsp. mays
  misc_feature (1)..(699): Ceres Seq. ID no. 14305573
aaatttatatcagtgaggcaaaatgttgtcaaatttaagatcaagccaggttcagattctggtgcttctgacagcagaataaaaagaatctcgtctttcttgtttcacccatttttcccgcttgcactttcgattcagcagacttatatgcagccaactgttctcaacatccatttcaggagatagaaaaggtataacggttgccctaggtgtatctatgtcattagtgaacttgcagcattgctcgcggcaaaattttggccatatgtactctctagtagataagctgacagatgttacagtaggggataagatccattgtctggcggtgagaatggctagtttgatttctcttccaaaacaaagtacaaaatgcaaatgggctcaatattcatctattgatgtggcttcatgggctcatcagtcatcattgcggcttcacagtgttgatctatgctttcatatgcctagctcggagtgtcagatgtgcttgttattggatttgaggcataaggacacgtatattggatggcatggagttggtatattggatgcttcatgcttgaggcgagggtgatctaagctgcgaatttgttttcgaggatatataggaaatatagcattacaaatagttttgagttgtcatattatgatgaagtaactactatttactgaaactgttatgcaaagataataatc

SEQ ID NO: 684 - protein, 119 aa, Zea mays subsp. mays
  peptide (1)..(119): Ceres Seq. ID no. 14305574
MSLVNLQHCSRQNFGHMYSLVDKLTDVTVGDKIHCLAVRMASLISLPKQSTKCKWAQYSSIDVASWAHQSSLRLHSVDLCFHMPSSECQMCLLLDLRHKDTYIGWHGVGILDASCLRRG

SEQ ID NO: 685 - protein, 103 aa, Zea mays subsp. mays
  peptide (1)..(103): Ceres Seq. ID no. 14305575
MYSLVDKLTDVTVGDKIHCLAVRMASLISLPKQSTKCKWAQYSSIDVASWAHQSSLRLHSVDLCFHMPSSECQMCLLLDLRHKDTYIGWHGVGILDASCLRRG

SEQ ID NO: 686 - protein, 80 aa, Zea mays subsp. mays
  peptide (1)..(80): Ceres Seq. ID no. 14305576
MASLISLPKQSTKCKWAQYSSIDVASWAHQSSLRLHSVDLCFHMPSSECQMCLLLDLRHKDTYIGWHGVGILDASCLRRG

SEQ ID NO: 687 - DNA, 905 bp, Zea mays subsp. mays
  misc_feature (1)..(905): Ceres Seq. ID no. 14306000
ccactccactccactcaccaaacccaacccagagcagacaagcgtccaaggtccaaccaaagcaactgagctgcgagtccgggaagcctgagagacagaggagaagcgcacaggcaccgctcgccggcgagaccgacgatgggcctcctggaacaccccctggaggccgtcgctttccgcctctactccctcccagtaccggaggcctccgcggccacgggcgccgccgccgcctggacctgcctcgcggcggcggtcctggcagccgccgcgggcgtttggcgcctctgctggtccccgtccccacccccgtccgccgccgttgccgccgccgcgaatgcttcgggctcggatcggtctcacgtggcggaggcgtcgccggagacgtcccggcgggcgccggagccggccgcggccgcggcggcgacgcccaaggagcggtacacggcgtactaccgcgacgtcgggtgctgctgctgcggcggaagcgatgacgaggaggacgacgcggaggagcggggagacggcgacgtgttcctttcggacgacgacgggccgacgacggatcctttcgggtgggagtgggaggtggtgaggtcgctgcagcctcctctcagcccggcggcggagacgacggggaggaggtaccggaggagcccgacgacggggctcggcggcagcgtggtgcagctgtgggaccagggcgccgtgcgcggcctgacgcccgcggcgcgcccgcggccgagggcccgggtagtcgtcggcaccgtcgtctcggccttctgaaaacatatccggcgtccaaatgtgcaataaaactgagccttttcgtgggaagaaagaagagataagattattacgcagttgtaaatatgaatctatctatctatggtttcgcattctgt

SEQ ID NO: 688 - protein, 215 aa, Zea mays subsp. mays
  peptide (1)..(215): Ceres Seq. ID no. 14306001
MGLLEHPLEAVAFRLYSLPVPEASAATGAAAAWTCLAAAVLAAAAGVWRLCWSPSPPPSAAVAAAANASGSDRSHVAEASPETSRRAPEPAAAAAATPKERYTAYYRDVGCCCCGGSDDEEDDAEERGDGDVFLSDDDGPTTDPFGWEWEVVRSLQPPLSPAAETTGRRYRRSPTTGLGGSVVQLWDQGAVRGLTPAARPRPRARVVVGTVVSAF

SEQ ID NO: 689 - protein, 163 aa, Zea mays subsp. mays
  peptide (1)..(163): Ceres Seq. ID no. 14306002
TPLHSPNPTQSRQASKVQPKQLSCESGKPERQRRSAQAPLAGETDDGPPGTPPGGRRFPPLLPPSTGGLRGHGRRRRLDLPRGGGPGSRRGRLAPLLVPVPTPVRRRCRRRECFGLGSVSRGGGVAGDVPAGAGAGRGRGGDAQGAVHGVLPRRRVLLLRRKR

SEQ ID NO: 690 - DNA, 654 bp, Zea mays subsp. mays
  misc_feature (1)..(654): Ceres Seq. ID no. 13586839
cccctctgcgcacttcgattgcctgagcatttggccccagagaccaactccattccttgtttttctcttccttttccctcgaggatctcgatgtcattagaagaagcatatgctttagtattaccgtctcacatcagtgacgaactcgacgtctacacgtatcattttcaagtccgtttttggattggtgttaaaacctcacatgcaagtatcttgacatccatggcagataaagaacactagtcccggcggtggcgccgccgcggaggcagcgagcaaggagaagcaggccgccgtccggtcgggcgagagtgaccgggactgcgagctcatggggctcatgtggctgctgcagcgcaacgccacgcgctacggagcgacggccacggccgtcatccaggcgctgatggccgtggacgaggcgtccgccgcgggtgtcgcggtggcggcagacgcggggccggccgcggcgtgctcgctgcccgtggacgacatgcccctcccggccgaatacgcgcaggtcggcggggccagcgacgcgcctcgcggcgtctgctgcttcttctgcctgctcgtgctgttctccgttctaagcttccgctccgtgtactcgctgtagcaattttgtggttcaattgaagttcgttatatgct

SEQ ID NO: 691 - protein, 95 aa, Zea mays subsp. mays
  peptide (1)..(95): Ceres Seq. ID no. 13586840
MGLMWLLQRNATRYGATATAVIQALMAVDEASAAGVAVAADAGPAAACSLPVDDMPLPAEYAQVGGASDAPRGVCCFFCLLVLFSVLSFRSVYSL

SEQ ID NO: 692 - protein, 92 aa, Zea mays subsp. mays
  peptide (1)..(92): Ceres Seq. ID no. 13586841
MWLLQRNATRYGATATAVIQALMAVDEASAAGVAVAADAGPAAACSLPVDDMPLPAEYAQVGGASDAPRGVCCFFCLLVLFSVLSFRSVYSL

SEQ ID NO: 693 - protein, 80 aa, Zea mays subsp. mays
  peptide (1)..(80): Ceres Seq. ID no. 13586842
PLCALRLPEHLAPETNSIPCFSLPFPSRISMSLEEAYALVLPSHISDELDVYTYHFQVRFWIGVKTSHASILTSMADKEH

SEQ ID NO: 694 - DNA, 652 bp, Zea mays subsp. mays
  misc_feature (1)..(652): Ceres Seq. ID no. 14306152
aaaaagaaagggcgtgggtggtctccagaggcgtcttcctcctgttcatcctcggcccgcgccgctgtgtccatggtccatgggccgcctccctcgcgctcccccgcacagtacggtcctctgggaggtcgccttcggtcgtggcccagggtgtcacgcgcgacgagtcggcgcgtggtggagggtcgtcttctgctgcttctggctggattcctgggctattcaacagagaaagagggagcaaaaaatggtggtccaaggaagcaagctaatccgaaagatagcaagtgaagcgtttggccgggcgtttgggtggtgcccgagagacaggcgaatttctgggtgatcaatgctggaatatggattctggagttggagatagcctttcttttggttgatgtcttgaatcagggccttttgttttgcgcctgtctgtcgtgatctggttgtaaataagaaagtcttatgctactagtcgcaggtcgaactttatcttctatcctaggccctctacttatctaggttgatagtgtaaggtgtctagatagggatctgacctagttgctatctgtcggatcgtttgatcacgatggatgtcgttgttctaaactttcgtatttcctaatgaaatagtgggcttcgccccttcgtc

SEQ ID NO: 695 - protein, 114 aa, Zea mays subsp. mays
  peptide (1)..(114): Ceres Seq. ID no. 14306153
KRKGVGGLQRRLPPVHPRPAPLCPWSMGRLPRAPPHSTVLWEVAFGRGPGCHARRVGAWWRVVFCCFWLDSWAIQQRKREQKMVVQGSKLIRKIASEAFGRAFGWCPRDRRISG

SEQ ID NO: 696 - protein, 96 aa, Zea mays subsp. mays
  peptide (1)..(96): Ceres Seq. ID no. 14306154
KKKGRGWSPEASSSCSSSARAAVSMVHGPPPSRSPAQYGPLGGRLRSWPRVSRATSRRVVEGRLLLLLAGFLGYSTEKEGAKNGGPRKQANPKDSK

SEQ ID NO: 697 - protein, 89 aa, Zea mays subsp. mays
  peptide (1)..(89): Ceres Seq. ID no. 14306155
KERAWVVSRGVFLLFILGPRRCVHGPWAASLALPRTVRSSGRSPSVVAQGVTRDESARGGGSSSAASGWIPGLFNRERGSKKWWSKEAS

SEQ ID NO: 698 - DNA, 1154 bp, Zea mays subsp. mays
  misc_feature (1)..(1154): Ceres Seq. ID no. 13599162
cctttcccccctccagttccaaatttatgtaatgaagatgagagttttgctctggcaacaatacacgtcgtacgcgccgtgaagcaagcaatgatgatggctggctggtacctgattcccctgagctcgtcgaagaagcggaggtcgaacacgtcgccgaggcccgcgaagaggacgacgccggcgaggcggtggtgctcgatgtgtccgagcgccacgttgcgctggtggtgccgctccctgcccgcggcggcgtcggcggaggtgaagttgtccttgtaggtcaggtggcggtacatgagccccgtggcgcgcagcagccgcgccgtggccggcgcgtccggggcggcctccaccaccacccacagcagcggcggcgccaccagacgcagcgcgtgcgccgcccgcgtcagcgcggcggcgcgctcgccggtcgccgcgggcgtcgactccgtcgtcgtgacgaccaccaggagcgggcgcggggacgccgggtcgcgcggcaggccgccgccccccgcgtcgtgcgccagcaggctccggttcacggccccggcgccgcccgccggcagcgcccggaccacgtggctgctgcccacccggccccccgccgccgccgccgcggacgtccagtcggacacggacgacggcgcgaagccggtgaagaagcccatcacgaagcagagggaggaatgcagcagcgccttcttccacagctgcgacccctgcttcttgccacgggcaccggcggcgtgatccgtggacgaccccatcacagaagccagcaagcacaacgccgcctgcctagctccaccaccagctcccggaggctggcctcgtgccgcttaatctgcgtcgcgacgtgtcgaagctggctatgtaagctagcttagctagacgaccgcagcagcaagcggcagccaagcggtggtggggactggggaggcaagcaaagtttggtagtggtggtggtttaaaatgggcgggaggtggcgagcaggggagcggagctgcggaggagagccagcgaggggagccggtgtcgggttggtgtcacgctttttttcctttatatatcccagacgcagcagcaaatgtaaatcattaggtggcgtgcgagtttagtgacgcactaatgctaacacttcccgacc

SEQ ID NO: 699 - protein, 152 aa, Zea mays subsp. mays
  peptide (1)..(152): Ceres Seq. ID no. 15222533
MSPVARSSRAVAGASGAASTTTHSSGGATRRSACAARVSAAARSPVAAGVDSVVVTTTRSGRGDAGSRGRPPPPASCASRLRFTAPAPPAGSARTTWLLPTRPPAAAAADVQSDTDDGAKPVKKPITKQREECSSAFFHSCDPCFLPRAPAA

SEQ ID NO: 700 - protein, 93 aa, Zea mays subsp. mays
  peptide (1)..(93): Ceres Seq. ID no. 15222534
PFPPPVPNLCNEDESFALATIHVVRAVKQAMMMAGWYLIPLSSSKKRRSNTSPRPAKRTTPARRWCSMCPSATLRWWCRSLPAAASAEVKLSL

SEQ ID NO: 701 - DNA, 785 bp, Zea mays subsp. mays
  misc_feature (1)..(785): Ceres Seq. ID no. 13498916
  misc_feature (1)..(785): Ortholog of  Ceres SEQ ID NO 13598367 as cited in SEQ ID NO 62113
gcattgctcacagccttacctgatccttgacaattctgctccctcgccgccgccgccgccgtccgcccgtcgtcgctgcgcttcggtacccgcgaagcaaggccccgcctcccgtgtacccgccgccgaagaagggagaggagcagatgaaggcggggaggaagaacctgcggcgggcgtgcgacgagggcgccgccgtcacgctcgccgagggagagagcatcatgcaggtcctcacgctgcgcggctccaacgtcatcgaggtgatggacggcgtgggcgtcaggtccctggccttgttccccgccaagttccagaagagcttctggatcaagaacgggagtttcgtggtcgtggatgccagcgggagggaccaggcgctggaatcggggagcaagatcgcgtgcgttgtctcgcgagtcctcttccacgaacaagttcggggccctgcagaagtctggtaactggccggccattttcaactcagctccgactccgaatgaagcttcagaggcgggagcagaagcacaggctgcccaggttgacgaggaaccagactccgatgaagaagacgacgatcttccaccacttgaggcgaacacgaacaggaataggccgtatgaattgtattctgattcagacagtggttctgacgcttgaaaagtaccaaggccatccatcctgtgcgttttgtctccaaggtatcccgatgtgtgaatggaatgagtggacctggattcttatgtgccatgtcatgtatgttagttagcatgctgtcattctgc

SEQ ID NO: 702 - protein, 255 aa, Zea mays subsp. mays
  peptide (1)..(255): Ceres Seq. ID no. 13498917
HCSQPYLILDNSAPSPPPPPSARRRCASVPAKQGPASRVPAAEEGRGADEGGEEEPAAGVRRGRRRHARRGREHHAGPHAARLQRHRGDGRRGRQVPGLVPRQVPEELLDQEREFRGRGCQREGPGAGIGEQDRVRCLASPLPRTSSGPCRSLVTGRPFSTQLRLRMKLQRREQKHRLPRLTRNQTPMKKTTIFHHLRRTRTGIGRMNCILIQTVVLTLEKYQGHPSCAFCLQGIPMCEWNEWTWILMCHVMYVS

SEQ ID NO: 703 - DNA, 1420 bp, Zea mays subsp. mays
  misc_feature (1)..(1420): Ceres Seq. ID no. 12382051
  misc_feature (1)..(1420): Ortholog of  Ceres SEQ ID NO 12636782 as cited in SEQ ID NO 362
  misc_feature (1)..(1420): Ortholog of  Ceres SEQ ID NO 15224654 as cited in SEQ ID NO 557
aacaattattctcaacgcctcttgaactttcttgactaggtattccctctctctctcgtcaactgcgctcaccctgcgctccggaacctggtagctgtcgcccgttccgtcggctcttcctcccagcgcactgcgcggccccaagctacagatcttgctcttagcgccctgcgcggccctgagctacaggttcttctccactgtcgcctgttccgtcagctattcctcctagcgcactgcgcggccccgagctacagatcttcctcctagcgccctgcgcggccccgagctacaggctatttgtgttgacgacatcttcagaaccttggtgaagctttgaagaattagtggcctatacaagaccaaggaatcttgtcctttctttgcgacatgagtacgcgcaacagttatcatctacccaccacctatccaaggagattatatgttctacaggtgccaaaggttcatctataactataccagatcgactgtccggaataccgtagattattccggacaggagaagctttttggaaaaacaggccaagcgcggaccgtccgggcccttgcggcggaccgtccgcgacacaaggatgcccttcggacagaaccaatgcaaaaacacaagtttccactacggactgtccggaggaaaagcaaagaccgtccgagcccacgcgcggaccgtccggcctcaggcgcggaccgtccggtcggtaagaaaccgaaaaacccgaaggtaacgggttcggagaaatgaattataggggcctcgcggaccgtccggggtgctcgaccggaccgtccgcgactggctctgtctgacatctgacgccgcattaaatgcaatatagccgttgatatagccgttactgctgaccgttgcattttcagccgttgatctacagggggcggaccgtccgcaccaggagggcggaccgtccgcgctcagcagaaaggcccaacggctaggaagtggttggtggctataaatacaaccccaaccacctccattcacttcatccaagcattccaaccttcaacattcaatacaagagctagcaatccattccaagacacattcaaagcctccatctctccaagtttcataattgagaaaagagatcattagtgattagtagcttgagagagaaagtgatccgtgtgttgtttgtcgctcttgtcgcttggctttttcaatcgtgctttcttgattctttcattgggatcaatctcacttgtaattgatacaagagacaccaaacttgtggtggtccttgtgagaactttgtgttccaagtgattaagaagagaaagctcactcggtcgagggaccgtttgagagagggaagggttgaaagagacccggcctttgtggcctcctcaacggggagtaggtttgcaagaaccgaacctcggt

SEQ ID NO: 704 - protein, 105 aa, Zea mays subsp. mays
  peptide (1)..(105): Ceres Seq. ID no. 12382052
MFYRCQRFIYNYTRSTVRNTVDYSGQEKLFGKTGQARTVRALAADRPRHKDALRTEPMQKHKFPLRTVRRKSKDRPSPRADRPASGADRPVGKKPKNPKVTGSEK

SEQ ID NO: 705 - DNA, 910 bp, Zea mays subsp. mays
  misc_feature (1)..(910): Ceres Seq. ID no. 12355936
  misc_feature (1)..(910): Ortholog of  Ceres SEQ ID NO 15174225 as cited in SEQ ID NO 61862
  misc_feature (1)..(910): Ortholog of  Ceres SEQ ID NO 13597898 as cited in SEQ ID NO 64705
acgagtcagacggccacacttgtcagcaaagcgccggaaaccaaaccacgcaccgccgcctcggctagctaacacgtacactagcagtgatccccatggcaatgctgccgcgtccaacggcgctcgtcgcagcggtggtggtggcgtcggcgctggtgctcgggatggcgtcggcgcaggggccggccgccgcgcccgcgccgggcccggcgcccgggatcagcgacgagtgcttcaacgcggtgctgaacatgtcggactgcctgacgtacgtgacggcgggcagcaaggcgcggcacccggacacgccctgctgcccggagctggccggggctgctcgagtcccaccccgtctgcctctgccagctgctgggcggcggcgccgagtcctacggcgtcagcgtcgactacaagcgcgcgctcgcgctcccggggatctgccgcctcaccgcgccgcccgttagcgcctgcgcagctttcggattccctatccccgagggattggtgcctactgcggcgcccatggcaggcctctctccatcttctatcggcccagatgtgcctgccaacacgccgacgggctcagccaagtcccccgcgggacgcgtcaccgccgccggaggcctcgtcgccctcgccgcgctacccgtcgccgtcgcggccgggatcatgttctagagcatctaccggtcgtcttagactttgtgatttcttcgtcatcattcttcttacagcacacacatgtttgtgcattatggtactagttcgttaattcacgtacaaacagctagctgttccaggcacgagattcttccggatttgtttccttgtaataattccccttgagcgtgtgtttggtatgtttctacaattctactacggagcactgtatgcatgcagttcaatctcc

SEQ ID NO: 706 - protein, 256 aa, Zea mays subsp. mays
  peptide (1)..(256): Ceres Seq. ID no. 12355937
RVRRPHLSAKRRKPNHAPPPRLANTYTSSDPHGNAAASNGARRSGGGGVGAGARDGVGAGAGRRARAGPGARDQRRVLQRGAEHVGLPDVRDGGQQGAAPGHALLPGAGRGCSSPTPSASASCWAAAPSPTASASTTSARSRSRGSAASPRRPLAPAQLSDSLSPRDWCLLRRPWQASLHLLSAQMCLPTRRRAQPSPPRDASPPPEASSPSPRYPSPSRPGSCSRASTGRLRLCDFFVIILLTAHTCLCIMVLVR

SEQ ID NO: 707 - DNA, 482 bp, Zea mays subsp. mays
  misc_feature (1)..(482): Ceres Seq. ID no. 12345924
  misc_feature (1)..(482): Ortholog of  Ceres SEQ ID NO 12588648 as cited in SEQ ID NO 425
tgaagtgggaatggtggatctcatgcggctccagacctaattcaccacaaatcgaccgagcgtggacagaattataggagaccacgaggaatcagcagctcactgacgcacccgagatcaatccagaccaatccgttgctcgaatcaaccgatgtaataatgaataaggcactggaaaacaggatctacgacccctgataccaatttgttaacaacaatagtggggaagagggaaggacatgaagaacgagagcaagagtggtcggcaagacaggagggaggacgataggtatccatctctatatccgtcatttacagtcttctctaaaaaattctatcctctatatctccttcctctccaataacgtcctctaaattacatcctctatactcaaatacctatattagagacattttttttattttttgtacatacgtatttgtcatactctcaaatatattgtacatattttagttttgct

SEQ ID NO: 708 - protein, 41 aa, Zea mays subsp. mays
  peptide (1)..(41): Ceres Seq. ID no. 12345925
MKNESKSGRQDRREDDRYPSLYPSFTVFSKKFYPLYLLPLQ

SEQ ID NO: 709 - DNA, 1399 bp, Zea mays subsp. mays
  misc_feature (1)..(1399): Ceres Seq. ID no. 12368873
  misc_feature (1)..(1399): Ortholog of  Ceres SEQ ID NO 15169045 as cited in SEQ ID NO 58372
  misc_feature (1)..(1399): Ortholog of  Ceres SEQ ID NO 13597361 as cited in SEQ ID NO 63638
  misc_feature (1)..(1399): Ortholog of  Ceres SEQ ID NO 13595945 as cited in SEQ ID NO 68157
acccatggcactggcatccccctctctccctctccccaccacaccacctccctcctcacaagccatagccgccgcctctttctgtgcttgccctctcgccatcttcgagtacgacgagaaggcggtgatggagctggacgagcaggccttcctggaggagatcctctccctgcggagggacgcctgggactgcaatgccatgggggacttcttcgccccggccgccatggactgcaccttccaggaccgccaccaccaggcgcccaccgtcagcgtcctccccaccttcaccgcctcctacgcccagccgcagccgcagccggcggcggcgcccggcttcgactgcctcagcgaggtctacggcgccgccgcgttcggcgggcccaatgctggtgactacggcggcgagatggggttccttgacgtcgtcgagcccaaggcggcgtcggcggcactggtggacggcgccgcgggcctcggggcctgcaaggtggagcccggcctggcggagagcggcggcgcgttcggcgctggcagctggcgctgcgccgccgccggccctggcgtccaagaagaagagggtcgaggggatgccgtccaagaacctgatggccgagcgccgccgccgcaagcgcctcaacgaccgcctctccatgctacgctccgtcgtgcccaagatcagcaagatggaccggacgtcgatcctgggcgacacgatcgactacatgaaggagctgctggagaggatcaagctgctgcaggaagagatcgggcagcagcaggaggaggcgccaggcatgctcagcgtcttccgggagctcaaccccaacgagatggtggccaggaacacccccaagttcgacgtggagcggaaggagggcggcgacacccgggtggagatctactgcgccgccaagccggggctgctgctgtccacggtgagcacgctggacacgctagggctcgacatccagcagtgcgtcgtcagctgcttcaacgacttcggcatgcacgcctcctgctccgagatgcagagggaaatgatcagcgccgacgcgataaagcaggagctgttcaagaacgctggctatggcggaggctgcttgtagaggggcatgtcatcatggcatgggaggaagaagaagaagaggcagcaataaattaatcttaagcagctgtgggagcagcagtagtagtatcagttcaggtccagtagcggaaaaggcaggcagggcaaagatttgggaggcctttttgcaatccatctcccccatcataacccacttcgatctatccatgttagcagtacgtgtccgtccgtcctatagcatcatgcaggatgcaaaggttgccctgtgctgctgaatctttctcctatatactattctatttaattaac

SEQ ID NO: 710 - protein, 387 aa, Zea mays subsp. mays
  peptide (1)..(387): Ceres Seq. ID no. 12368874
PMALASPSLPLPTTPPPSSQAIAAASFCACPLAIFEYDEKAVMELDEQAFLEEILSLRRDAWDCNAMGDFFAPAAMDCTFQDRHHQAPTVSVLPTFTASYAQPQPQPAAAPGFDCLSEVYGAAAFGGPNAGDYGGEMGFLDVVEPKAASAALVDGAAGLGACKVEPGLAESGGAFGAGSWRCAAAGPGVQEEEGRGDAVQEPDGRAPPPQAPQRPPLHATLRRAQDQQDGPDVDPGRHDRLHEGAAGEDQAAAGRDRAAAGGGARHAQRLPGAQPQRDGGQEHPQVRRGAEGGRRHPGGDLLRRQAGAAAVHGEHAGHARARHPAVRRQLLQRLRHARLLLRDAEGNDQRRRDKAGAVQERWLWRRLLVEGHVIMAWEEEEEEAAIN

SEQ ID NO: 711 - protein, 386 aa, Zea mays subsp. mays
  peptide (1)..(386): Ceres Seq. ID no. 12368875
MALASPSLPLPTTPPPSSQAIAAASFCACPLAIFEYDEKAVMELDEQAFLEEILSLRRDAWDCNAMGDFFAPAAMDCTFQDRHHQAPTVSVLPTFTASYAQPQPQPAAAPGFDCLSEVYGAAAFGGPNAGDYGGEMGFLDVVEPKAASAALVDGAAGLGACKVEPGLAESGGAFGAGSWRCAAAGPGVQEEEGRGDAVQEPDGRAPPPQAPQRPPLHATLRRAQDQQDGPDVDPGRHDRLHEGAAGEDQAAAGRDRAAAGGGARHAQRLPGAQPQRDGGQEHPQVRRGAEGGRRHPGGDLLRRQAGAAAVHGEHAGHARARHPAVRRQLLQRLRHARLLLRDAEGNDQRRRDKAGAVQERWLWRRLLVEGHVIMAWEEEEEEAAIN

SEQ ID NO: 712 - protein, 345 aa, Zea mays subsp. mays
  peptide (1)..(345): Ceres Seq. ID no. 12368876
MELDEQAFLEEILSLRRDAWDCNAMGDFFAPAAMDCTFQDRHHQAPTVSVLPTFTASYAQPQPQPAAAPGFDCLSEVYGAAAFGGPNAGDYGGEMGFLDVVEPKAASAALVDGAAGLGACKVEPGLAESGGAFGAGSWRCAAAGPGVQEEEGRGDAVQEPDGRAPPPQAPQRPPLHATLRRAQDQQDGPDVDPGRHDRLHEGAAGEDQAAAGRDRAAAGGGARHAQRLPGAQPQRDGGQEHPQVRRGAEGGRRHPGGDLLRRQAGAAAVHGEHAGHARARHPAVRRQLLQRLRHARLLLRDAEGNDQRRRDKAGAVQERWLWRRLLVEGHVIMAWEEEEEEAAIN

SEQ ID NO: 713 - DNA, 1243 bp, Zea mays subsp. mays
  misc_feature (1)..(1243): Ceres Seq. ID no. 12341642
  misc_feature (1)..(1243): Ortholog of  Ceres SEQ ID NO 13503485 as cited in SEQ ID NO 60800
ttccgagcgtgtgcttggtcaactgggccaccgcgcacaaaacccattgcagttgtagcagggactctttccccgtgccacggacgacaatgactgccgacgcggcgctcctcgccatcatcgtgccttcctcctcccgctacgcctcgtctccctcggcctcagcctggcgtccgggcgtcacggtactagctccagacgcgtccgccgttcctgtgccgctttggccgtcgcagccgcgctcctcgcagtcatcttcgccctcccgcgtgaccacgtccgggagtgcgccgctccgatcgcttctgtctccagtgccggggatgatgacggcggtttccgcgaggagctgcggttggaggtcgagcagcttaagcagcagctggcgcggcttgaatctctttgggatagtaaatcgaaagctgtggatgataaacttgattctttagaggaggataatggccgtgtaatgagagcaatggcactcgatgtccagtctctgatcaatgagcgggaaaatatcaagattcaggaatcattatgcagctcatattttggtaacagtatcaaggaaatggaaaatgaggttcaaattctaaaagatgggtcaagaaagatgaattctgatatatcatcagtagcaaaggacacgacagaaaaggtcgaagttttgcattcagctatcgagaaggttcaagttatagctgatgaatgggtcaagatgaactatactattaacagaatatggtcattcactaaggagacagagaaaagggtggaaggtctatattcagatttaatgaagggcttcaagcagacgaagagaaaagtgccgttctggagagactgatgatgctgtggacctgatgtttgaccactgtcattgacgacccgcttggaattgacacaccgaagctgctagcaacttaatccgcttccatccagtgtttatattttcgcgtccttagtgcttgtgagacgtcagtgcaaggttgtggttgatgagaccttgtgcgacccgacttgctaactgtttgcatgccgtcatggccccataatgggactatctctatctatagcagcttatctataattatatttaaattacactgtacaaataatacaatacagcccaaaacggtgtaaaacggtgtttttgtgaccatatggtgcaatgctgacattataatgtttgtagactgtaatttgaatatgagtaaagctcgagatagttttatgcgcc

SEQ ID NO: 714 - protein, 148 aa, Zea mays subsp. mays
  peptide (1)..(148): Ceres Seq. ID no. 12341643
PSVCLVNWATAHKTHCSCSRDSFPVPRTTMTADAALLAIIVPSSSRYASSPSASAWRPGVTVLAPDASAVPVPLWPSQPRSSQSSSPSRVTTSGSAPLRSLLSPVPGMMTAVSARSCGWRSSSLSSSWRGLNLFGIVNRKLWMINLIL

SEQ ID NO: 715 - protein, 126 aa, Zea mays subsp. mays
  peptide (1)..(126): Ceres Seq. ID no. 12341644
MRAMALDVQSLINERENIKIQESLCSSYFGNSIKEMENEVQILKDGSRKMNSDISSVAKDTTEKVEVLHSAIEKVQVIADEWVKMNYTINRIWSFTKETEKRVEGLYSDLMKGFKQTKRKVPFWRD

SEQ ID NO: 716 - protein, 123 aa, Zea mays subsp. mays
  peptide (1)..(123): Ceres Seq. ID no. 12341645
MALDVQSLINERENIKIQESLCSSYFGNSIKEMENEVQILKDGSRKMNSDISSVAKDTTEKVEVLHSAIEKVQVIADEWVKMNYTINRIWSFTKETEKRVEGLYSDLMKGFKQTKRKVPFWRD

SEQ ID NO: 717 - DNA, 1156 bp, Zea mays subsp. mays
  misc_feature (1)..(1156): Ceres Seq. ID no. 12368537
  misc_feature (1)..(1156): Ortholog of  Ceres SEQ ID NO 13595495 as cited in SEQ ID NO 56624
  misc_feature (1)..(1156): Ortholog of  Ceres SEQ ID NO 12608406 as cited in SEQ ID NO 58017
  misc_feature (1)..(1156): Ortholog of  Ceres SEQ ID NO 12590539 as cited in SEQ ID NO 0
  misc_feature (1)..(1156): Ortholog of  Ceres SEQ ID NO 13599397 as cited in SEQ ID NO 0
atcacgcactctgccagagaccaaactattcgtatcgtgcgtaggtgttgcttgctgttgcaacggaccatccatctagtgcttgcattgctgtcgcactcgctcagctatctccaccgctattggttgttgtttggttacccacgccctgctctctgataccagttgatagcagcagcagctagctataggttgtcagcaggatcgaccagatagatagcgcgcgcggatcggagttaacagcgctgcaggatggtgaagagcacgacgacgatgggggcggcgagctgcggcggcggcgtgctgccgctggcagtcgctgaaccacatcagcatcgtgtgccggtcggtggaggcgtcgctgcgcttctacacggatgtgctcggcttcgtccccatccgccgccccggctctttcgacttcggcggcgcctggctgttcaactacgggatcggcatccacctgctgcagtcggaggaccccggcagcctcccgccggagaagggagagatcaaccccaaggacaaccatatctccttccagtgcgagagcatggtggcggtggagcggcggctgaaggagatcggcatcccgtacgtgcagcgctgcgtggaggagggcggcatcaacgtggaccagatcttcttccacgaccccgacggcttcatgatcgagatctgcaactgcgacaacctccccgtcgtcccgctcgccggcgaccagcagcgcgcgccggccgcttgcaggcgggctccggcggcggtcaataccgtcaagcagcagcagcagggcagcgtggtgcctgcttcttccgctccggtcacgacggcggcggcgcagtgcatgccgtcggcggccacggcggcgcaagccatccgcgtcgccgaggagtcgtcgtcgcacatttcgtgcgcgtgattactagcttgttgacgacgacgccagcgcaaggattcggcgcggacggtgacgaagcaggcacgatggatcgacgagcgccgagtcacggccacaagaggcgtctctgtacatgcgcgtgcgtgcgtgcgtgggtgtaggtgctgtatgtgcagtgcactcaaactgcctagcttttttttagtaaagaataaacccatggtacggtgggagtgaagagactagtgcgtccactcc

SEQ ID NO: 718 - protein, 268 aa, Zea mays subsp. mays
  peptide (1)..(268): Ceres Seq. ID no. 12368538
MVKSTTTMGAASCGGGVLPLAVAEPHQHRVPVGGGVAALLHGCARLRPHPPPRLFRLRRRLAVQLRDRHPPAAVGGPRQPPAGEGRDQPQGQPYLLPVREHGGGGAAAEGDRHPVRAALRGGGRHQRGPDLLPRPRRLHDRDLQLRQPPRRPARRRPAARAGRLQAGSGGGQYRQAAAAGQRGACFFRSGHDGGGAVHAVGGHGGASHPRRRGVVVAHFVRVITSLLTTTPAQGFGADGDEAGTMDRRAPSHGHKRRLCTCACVRAWV

SEQ ID NO: 719 - protein, 261 aa, Zea mays subsp. mays
  peptide (1)..(261): Ceres Seq. ID no. 12368539
MGAASCGGGVLPLAVAEPHQHRVPVGGGVAALLHGCARLRPHPPPRLFRLRRRLAVQLRDRHPPAAVGGPRQPPAGEGRDQPQGQPYLLPVREHGGGGAAAEGDRHPVRAALRGGGRHQRGPDLLPRPRRLHDRDLQLRQPPRRPARRRPAARAGRLQAGSGGGQYRQAAAAGQRGACFFRSGHDGGGAVHAVGGHGGASHPRRRGVVVAHFVRVITSLLTTTPAQGFGADGDEAGTMDRRAPSHGHKRRLCTCACVRAWV

SEQ ID NO: 720 - DNA, 702 bp, Zea mays subsp. mays
  misc_feature (1)..(702): Ceres Seq. ID no. 13492969
  misc_feature (1)..(702): Ortholog of  Ceres SEQ ID NO 12329459 as cited in SEQ ID NO 20533
ctaatcgaaaataatcaaaaaaaagcgccaccaatctcgccttccgaggaaacccaccagcccaccacagacccgagcggaagaagccatgtccgggcgcggcaagggtggcaaggggctcggcaagggcggcgcgaagcgtcaccggaaggttctgcgcgacaacatccagggcatcaccaagccggcgatccggcggctgggcgaggaggggcggcgtcaagcgcatctcggggctcatctacgaggagacccgcggcgtgctcaagatcttcctcgagaacgtcatccgcgacgccgtcacctacactgagcacgcccgccgcaagaccgtcactgccatggacgtcgtctacgcgctcaagcgccagggccgcaccctctacggcttcggcggctaggctgatggactcctcgcgatgttctccccttctgcagatgcgacgttttctggccgtgcccacaagtcttgcggtcaagaaagtttcaggaactcttgttagttcatctctggctgtggtaggtttatctgaatcgtgagactagtaggtttatctgaatcgcgaggccaggtttacctgaatcatgaagcagtgatgaaattatgtgtgcatcggatgttggaaatcgagcttgtaatgcaatttgttactcttgatgcaaatgaatggtctggtcgttacttctgtagttacgattttg

SEQ ID NO: 721 - protein, 179 aa, Zea mays subsp. mays
  peptide (1)..(179): Ceres Seq. ID no. 13492970
LIENNQKKAPPISPSEETHQPTTDPSGRSHVRARQGWQGARQGRREASPEGSARQHPGHHQAGDPAAGRGGAASSASRGSSTRRPAACSRSSSRTSSATPSPTLSTPAARPSLPWTSSTRSSARAAPSTASAARLMDSSRCSPLLQMRRFLAVPTSLAVKKVSGTLVSSSLAVVGLSES

SEQ ID NO: 722 - DNA, 802 bp, Zea mays subsp. mays
  misc_feature (1)..(802): Ceres Seq. ID no. 12404484
  misc_feature (1)..(802): Ortholog of  Ceres SEQ ID NO 13594904 as cited in SEQ ID NO 52054
  misc_feature (1)..(802): Ortholog of  Ceres SEQ ID NO 13596179 as cited in SEQ ID NO 67842
aacggcagtcgtcacaccacgaaagcagcagcaaagtcatcagcaacccacgatcggtcgatcgatcgggtacctgctagcgaattcgatcgatcgggtacctgctgctagcgatagcagcagcagccagcagatcccgtcgtcgccggcacgatggccagcccgtcgtcgtcgtcgtcgtcagctctggtctcctcgtggtggttctagccgcggcggtggcgtgctccgcgacgcgccccgtccccgcgcggcagcgggcggcggcggcggaggaggaggtgagacggccggacacgctgcacgagggcacggtgctgatcccggggatggggcgctacgagatcggcagccactacatcccggacatcggcgggctggaccacagcgtccccgccgccacccacgggcagtacatccccggcgccgacgacacctgggtgcccaaccccggcttcgaggtccccaaccccttccgccccggcgcggccactccatgaacacgtacgagtacgaccccccaacgccggagaactcgatcgatcatatcgtctcgcgccgcgctgaataacgctacactagccgtgcttgtgcttgtgcttggctgctgaatgcaagcatgtcctttgttgtgtggtttaatttgtcccacgtacgtctgtgcagtgtttttgcagtttgtgctccagtgaagaagtgtgcacgcgcgatgcgtagaaagcgcatcagaactttgcatggcccggttggtagcagctgcttgtttctcggtcactactgttacaaataaaatttgctggac

SEQ ID NO: 723 - protein, 189 aa, Zea mays subsp. mays
  peptide (1)..(189): Ceres Seq. ID no. 12404485
TAVVTPRKQQQSHQQPTIGRSIGYLLANSIDRVPAASDSSSSQQIPSSPARWPARRRRRRQLWSPRGGSSRGGGVLRDAPRPRAAAGGGGGGGGETAGHAARGHGADPGDGALRDRQPLHPGHRRAGPQRPRRHPRAVHPRRRRHLGAQPRLRGPQPLPPRRGHSMNTYEYDPPTPENSIDHIVSRRAE

SEQ ID NO: 724 - DNA, 670 bp, Zea mays subsp. mays
  misc_feature (1)..(670): Ceres Seq. ID no. 13565500
  misc_feature (1)..(670): Ortholog of  Ceres SEQ ID NO 14312544 as cited in SEQ ID NO 0
ccaacgccgctcctgccatcaccttcttcgatcgatcgccttcgtcgtccccccacatccttcttgattgttatttctccaactcccaggccggcaggtcggaggacatgagcaaccagccaaccatggcggcggcccccgtgcgcgcttgggtgctggtgctggcgctggcgctggcgtgcgggctgctccagctccggccgtccgacgccgcggcgccagcccagccggttgcggtggcggcaacgatggtgtcgtcgggcgccgcgaagcccaagtgcgtgcccggcgccaagaacgacaaggcgtgccgcgtcggtgccgtgcacgacccggagaaccaggaggaggagggctccagcgtcaccctcaaggcgcccgccgccgcgcccgacgacagcgacggcagcgactacaacgaccccgacgagcccaacgacaaccagctcatcgtcgtcggccactgaagctgccgcgcgccgacccatggatcatgcatggagattcgactgggtggatggagtggaccggccggttaacggatctctcggtgctaattcgtgatcttgaccggtggaagcagatggggtttgcatgtttgtttcattcttgcattgattgttcgttgttaactagtgtatgatgaatcggtcgttaacgcttattaatc

SEQ ID NO: 725 - protein, 154 aa, Zea mays subsp. mays
  peptide (1)..(154): Ceres Seq. ID no. 13565501
NAAPAITFFDRSPSSSPHILLDCYFSNSQAGRSEDMSNQPTMAAAPVRAWVLVLALALACGLLQLRPSDAAAPAQPVAVAATMVSSGAAKPKCVPGAKNDKACRVGAVHDPENQEEEGSSVTLKAPAAAPDDSDGSDYNDPDEPNDNQLIVVGH

SEQ ID NO: 726 - protein, 119 aa, Zea mays subsp. mays
  peptide (1)..(119): Ceres Seq. ID no. 13565502
MSNQPTMAAAPVRAWVLVLALALACGLLQLRPSDAAAPAQPVAVAATMVSSGAAKPKCVPGAKNDKACRVGAVHDPENQEEEGSSVTLKAPAAAPDDSDGSDYNDPDEPNDNQLIVVGH

SEQ ID NO: 727 - protein, 113 aa, Zea mays subsp. mays
  peptide (1)..(113): Ceres Seq. ID no. 13565503
MAAAPVRAWVLVLALALACGLLQLRPSDAAAPAQPVAVAATMVSSGAAKPKCVPGAKNDKACRVGAVHDPENQEEEGSSVTLKAPAAAPDDSDGSDYNDPDEPNDNQLIVVGH

SEQ ID NO: 728 - DNA, 1032 bp, Zea mays subsp. mays
  misc_feature (1)..(1032): Ceres Seq. ID no. 12409749
  misc_feature (1)..(1032): Ortholog of  Ceres SEQ ID NO 12610267 as cited in SEQ ID NO 51993
  misc_feature (1)..(1032): Ortholog of  Ceres SEQ ID NO 13495070 as cited in SEQ ID NO 53216
  misc_feature (1)..(1032): Ortholog of  Ceres SEQ ID NO 12598241 as cited in SEQ ID NO 61025
  misc_feature (1)..(1032): Ortholog of  Ceres SEQ ID NO 13661333 as cited in SEQ ID NO 61620
  misc_feature (1)..(1032): Ortholog of  Ceres SEQ ID NO 13596812 as cited in SEQ ID NO 62283
  misc_feature (1)..(1032): Ortholog of  Ceres SEQ ID NO 13623021 as cited in SEQ ID NO 0
aatgtcaaaagaacccgcagcagggaagactgagagtctgggagatagagagaggagagggagggtttcctcaaagagaacccgaacccaaacccaaaccgaagcagagcacactagcgttccctcaccagggcgtccatcccagcagccatggcgatggcgtacaagatggcgacggaggggatgaacgtgaaggaggagtgccagcgctggttcatggagatgaagtggaagaaggtgcaccgcttcgtggtgtacaagatcgacgagcggtcgcgcgccgtgctggtggacaaggtgggcggccccggggaagggtacgaggagctcgtggccgcgctgcccggcgacgactgccgctacgccgtcttcgacttcgacttcgtcaccgtcgacaactgccagaagagcaagatcttcttcatcgcctggtcaccggcggcgtcgaggatcagggccaagatcctgtacgcgacatcgaagcaaggcctgcggcggctgctggacggggtccactacgaggtgcaggccaccgacccctccgagatgggcttcgacgtcatcagaggccgcgcgcaatgaggcccccgctgcgctctgctcctatttacgtacttacctgtgcgtgggcgtgttctcctactactcactgctcagtagtcagtagtcatctgcgttcgtgtgtgtgtgtgtgtgatcggccggatgctaattggcgttggtgtgctcccgtagcgatcgatgctgccaatctgacgaggcttcgcgtgtgtttgctttgctattttcggttctcgggagagatggtgcaggcgtggtgtgttgatgttgatgggtggagtagaagctcaggggagtggcagcggactaatgaaacgtccacctctgcgacgtagaattccactgaaaaaaaaatgctccagtgtaccataagctgcttcagatttgatcgtgttttctctcccatggtggcgtttctacctacatttttcttagaaaacacatttctagttactcgttcagttctgaatt

SEQ ID NO: 729 - protein, 297 aa, Zea mays subsp. mays
  peptide (1)..(297): Ceres Seq. ID no. 12409750
CQKNPQQGRLRVWEIERGEGGFPQREPEPKPKPKQSTLAFPHQGVHPSSHGDGVQDGDGGDEREGGVPALVHGDEVEEGAPLRGVQDRRAVARRAGGQGGRPRGRVRGARGRAARRRLPLRRLRLRLRHRRQLPEEQDLLHRLVTGGVEDQGQDPVRDIEARPAAAAGRGPLRGAGHRPLRDGLRRHQRPRAMRPPLRSAPIYVLTCAWACSPTTHCSVVSSHLRSCVCVCDRPDANWRWCAPVAIDAANLTRLRVCLLCYFRFSGEMVQAWCVDVDGWSRSSGEWQRTNETSTSAT

SEQ ID NO: 730 - DNA, 461 bp, Zea mays subsp. mays
  misc_feature (1)..(461): Ceres Seq. ID no. 1361708
  misc_feature (1)..(461): Ortholog of  Ceres SEQ ID NO 13655298 as cited in SEQ ID NO 68914
attctatcttgatatacatgtgctagaagaggtgtttaatatatttacatttttcatatcttgtgcagatattccggggactagcttatattcatactgtaccaggaatttgtcaccgagatattaagcctcagaatatcttggtggatcctctttcccaccaagtcaaggtttgtgacttcgggagtgctaaaatcttgattaaaggtgaagctaatatatcatatatatgctcacgctattatcgtgctcctgagctcatatttggtgcaactgaatacacaacatctattgatatattcagctggatgtgttcttgctgagcttcttcttagtcaaccattatttcctggggaaagtgctgtggaccagctggttgagattatcaaggttttgggcacccaacacgagaggaaattcgttgtatgaatcccaactatacagaattcaagtttcctcag

SEQ ID NO: 731 - protein, 41 aa, Zea mays subsp. mays
  peptide (1)..(41): Ceres Seq. ID no. 1361709
FYLDIHVLEEVFNIFTFFISCADIPGTSLYSYCTRNLSPRY

SEQ ID NO: 732 - DNA, 1431 bp, Zea mays subsp. mays
  misc_feature (1)..(1431): Ceres Seq. ID no. 12408933
  misc_feature (1)..(1431): Ortholog of  Ceres SEQ ID NO 13638441 as cited in SEQ ID NO 58066
ctctacggaacacacaccgtgtcgttctagcgttctcatcctccatccgcttgctcctgctccctcgagtcaaagcagtggatatggtggcgcgagcagcgagctagggaggctaggtagcagactagtgtcgctattaatcgtaccacgccgccgccgggaaattgcccttctccgccactgccactgaagctatactgtcgcagagagagcgcccaccacccgcggaccagacatctgcgatgaccactctggcgacggacacggcggtcgtggacacgggaggaggacaaggcgttcgaagaacgcggtggcggccgccgcggcgccgccggccgacgggccgcctgatgatggctggttcacggcgctggtggcgagcgtgccggcgcggacgncggaggaggtgcggctgcactacgaggcgctggtggaggacgtggccgctatcgaggccggccgcatcccgctcccgcgctacgctggggaggagtcgtccgccgcgacgccctagggctccggtgccgccggcccctccacgcccaaggacggaggaggagggagcgggcaccgacgcgaagaacggaagggcggcgtcggcgctgacgcggggaagagttgctctaaggccgagcaggagcggcgcaagggcgtgccgtggacggaagaggagcacaggttgttcttgttgggtctggacaagttcggcaagggcgactggcggagcatctcgcgcaacttcgtcatctcgcggacgccgacgcaggtggcgagccacgcgcagaaatacttcatccgcctcaactcgatgaaccgggaccggcgccgctccagcatccacgacatcaccagcgtgaccgccggcgaggtggccgcggccggcgcgcccatcacgggcgtncggcccgaccgcggcgggggcaaatgccgatggggccgggcggcatgaagcaccaccacccggttccgccgatgggcatgtacggcatgcgcccatgggccacccggtcgctgggcacatggtggcgccggcggccgtcggcacgccggtcatgttcccgccgggccatcactcgccctatgtcctgccggtgggatacccggcgccaccgaccaagatgcaccagtgatcgtctacgaccggcatttgcgcatctgcacaactgcattcctttgctcgttctttcttgatttcgttgatgatcttgtgtagccaaagctatctatatccatcctttcctcatctcccgggtctttgatttttgacgtaacatatagatgacttgagcgagtgcagggcaggcaggcgaataatgagtatcgctacttacaggaaggctcaaggaatgtgtaattagtagcagccttcctgggtgcaaatattcatcatttgtgcaactggggactgacagaatcccatttcccggatgc

SEQ ID NO: 733 - protein, 189 aa, Zea mays subsp. mays
  peptide (1)..(189): Ceres Seq. ID no. 12408934
  misc_feature (52)..(52): Xaa is any aa, unknown or other
MTTLATDTAVVDTGGGQGVRRTRWRPPRRRRPTGRLMMAGSRRWWRACRRGXRRRCGCTTRRWWRTWPLSRPAASRSRATLGRSRPPRRPRAPVPPAPPRPRTEEEGAGTDAKNGRAASALTRGRVALRPSRSGARACRGRKRSTGCSCWVWTSSARATGGASRATSSSRGRRRRWRATRRNTSSASTR

SEQ ID NO: 734 - protein, 153 aa, Zea mays subsp. mays
  peptide (1)..(153): Ceres Seq. ID no. 12408935
  misc_feature (16)..(16): Xaa is any aa, unknown or other
MMAGSRRWWRACRRGXRRRCGCTTRRWWRTWPLSRPAASRSRATLGRSRPPRRPRAPVPPAPPRPRTEEEGAGTDAKNGRAASALTRGRVALRPSRSGARACRGRKRSTGCSCWVWTSSARATGGASRATSSSRGRRRRWRATRRNTSSASTR

SEQ ID NO: 735 - protein, 152 aa, Zea mays subsp. mays
  peptide (1)..(152): Ceres Seq. ID no. 12408936
  misc_feature (15)..(15): Xaa is any aa, unknown or other
MAGSRRWWRACRRGXRRRCGCTTRRWWRTWPLSRPAASRSRATLGRSRPPRRPRAPVPPAPPRPRTEEEGAGTDAKNGRAASALTRGRVALRPSRSGARACRGRKRSTGCSCWVWTSSARATGGASRATSSSRGRRRRWRATRRNTSSASTR

SEQ ID NO: 736 - DNA, 1065 bp, Zea mays subsp. mays
  misc_feature (1)..(1065): Ceres Seq. ID no. 12402437
  misc_feature (1)..(1065): Ortholog of  Ceres SEQ ID NO 12610790 as cited in SEQ ID NO 56123
  misc_feature (1)..(1065): Ortholog of  Ceres SEQ ID NO 14315399 as cited in SEQ ID NO 57112
  misc_feature (1)..(1065): Ortholog of  Ceres SEQ ID NO 13596388 as cited in SEQ ID NO 62129
  misc_feature (1)..(1065): Ortholog of  Ceres SEQ ID NO 13655636 as cited in SEQ ID NO 63519
agcagctagcatacctgcgcgacggttttccccctcgccttggctatcgcggcgagcacctcggagtccagcacggcgctgccctgcccgtcccagttctgccctcccagcggcgagtaggccgcgacgtggatgcccctgtcggcgcagtacgccctgagcgtccgctgctgccacgccgggttcagctccacctggttcaccgcgggcgggaccgtggcgacggccatgaccccgtcgaggtgcctggtggtgaagttgctcacgccgatcgccttggcgaggcccagccgctggcactcctccatggcgcgccacacgcccgcgaggtccagcggcacggcgttctccttcctggtcgggagctcgggcggccccggtttcaggcacaccggccagtggatcagcggcgatagggacggactagcggcttacttgagtgtttcccggagggacggcagcacgaggtccgggtggttctgcgagcaccacagcttggacgtcacgaacagatcctcccgggaccgcagggtcccgcgccggagcgcctcggccacggcgtcgcccagcggcttctcggtgccgtacatggaggccgtgtcgaagtggcggaaccccacctcgatggcggagagcacgccgtccttgacggcctcgtgcaccagagggaacgacgccgtgcccatgccgaccatcggcatcgccgtcctcgcgttgcccgaccgcagggccacctcgggcaccaccgccgtcgtccccgcggatgccatgttcatagggtcagatgtggtgcgctgccgctgcagtacaacgtctagactagatgcgagagactgcttgagcggtgatgagcccatgccggtcgatttatgcactagtattgcaaacggccaaacgtggtggtggactctggactggtggacaggcgatgtggactcgatcgcagtattctagagtttttggcgtcacgagttaggctatctacagcggaccagaggttacctctatttcttctcatcattttttgcatcactcatcaatattgtgtcccctactttttcatct

SEQ ID NO: 737 - protein, 273 aa, Zea mays subsp. mays
  peptide (1)..(273): Ceres Seq. ID no. 12402438
MPLSAQYALSVRCCHAGFSSTWFTAGGTVATAMTPSRCLVVKLLTPIALARPSRWHSSMARHTPARSSGTAFSFLVGSSGGPGFRHTGQWISGDRDGLAAYLSVSRRDGSTRSGWFCEHHSLDVTNRSSRDRRVPRRSASATASPSGFSVPYMEAVSKWRNPTSMAESTPSLTASCTRGNDAVPMPTIGIAVLALPDRRATSGTTAVVPADAMFIGSDVVRCRCSTTSRLDARDCLSGDEPMPVDLCTSIANGQTWWWTLDWWTGDVDSIAVF

SEQ ID NO: 738 - protein, 241 aa, Zea mays subsp. mays
  peptide (1)..(241): Ceres Seq. ID no. 12402439
MTPSRCLVVKLLTPIALARPSRWHSSMARHTPARSSGTAFSFLVGSSGGPGFRHTGQWISGDRDGLAAYLSVSRRDGSTRSGWFCEHHSLDVTNRSSRDRRVPRRSASATASPSGFSVPYMEAVSKWRNPTSMAESTPSLTASCTRGNDAVPMPTIGIAVLALPDRRATSGTTAVVPADAMFIGSDVVRCRCSTTSRLDARDCLSGDEPMPVDLCTSIANGQTWWWTLDWWTGDVDSIAVF

SEQ ID NO: 739 - protein, 215 aa, Zea mays subsp. mays
  peptide (1)..(215): Ceres Seq. ID no. 12402440
MARHTPARSSGTAFSFLVGSSGGPGFRHTGQWISGDRDGLAAYLSVSRRDGSTRSGWFCEHHSLDVTNRSSRDRRVPRRSASATASPSGFSVPYMEAVSKWRNPTSMAESTPSLTASCTRGNDAVPMPTIGIAVLALPDRRATSGTTAVVPADAMFIGSDVVRCRCSTTSRLDARDCLSGDEPMPVDLCTSIANGQTWWWTLDWWTGDVDSIAVF

SEQ ID NO: 740 - DNA, 803 bp, Zea mays subsp. mays
  misc_feature (1)..(803): Ceres Seq. ID no. 12372455
  misc_feature (1)..(803): Ortholog of  Ceres SEQ ID NO 13599133 as cited in SEQ ID NO 0
accaacctcacctactgttctgggttgaaatcttgcggaaagtctgccaaaacaaaaaacaaaagtccttgcaggtggtttggcaggctaaacttgacgtttgcgttggcaggaagccgtggctgctgtaatctaatctgctgctgcaatctccgacccgtctcccagacttgactgtacctgaaaccactattgaaacaatcggtgagagcgagagagaaaattaaagagaaacccgacaaaaaccaaccaaccaagcagctctccgttccatatagccgctgcatcagatccattcaagaactagagccaagccaccaacaataaattcctctggccggcctgcctcatcagctcggttcaaaaaaaacaaaaaaaaaagaagtcgcagcggcagtagtaaactgcagtgacatacggagcactactgtactgtactgtagtaacatactactactgctgctgctcacagcaagaacaaggatacgataaaaaagaaccaaggcaaaaagctaaggtcctgtttgggaacaaagtttttgaaaaccacagtttttgaaatactatactatactttagttataacaataccgtagtttataataccgcagttttgaaaactgaggtccagagctaagtttagaatgccttaaaacaactatagtatttgcaatacttcagttttgaaaacagagattttacctagcttgccaaacaccattatgtatataatactgcagtatttgagaatactgcagtattcttccaaaactgcagaaaaactttgttcccaaacaccccct

SEQ ID NO: 741 - protein, 57 aa, Zea mays subsp. mays
  peptide (1)..(57): Ceres Seq. ID no. 12372456
TNLTYCSGLKSCGKSAKTKNKSPCRWFGRLNLTFALAGSRGCCNLICCCNLRPVSQT

SEQ ID NO: 742 - protein, 42 aa, Zea mays subsp. mays
  peptide (1)..(42): Ceres Seq. ID no. 12372457
QPHLLFWVEILRKVCQNKKQKSLQVVWQAKLDVCVGRKPWLL

SEQ ID NO: 743 - DNA, 926 bp, Zea mays subsp. mays
  misc_feature (1)..(926): Ceres Seq. ID no. 12404246
  misc_feature (1)..(926): Ortholog of  Ceres SEQ ID NO 13598076 as cited in SEQ ID NO 67320
gccacgattgcagagccagagcgagacgcgactgcttttctgcttcatccacattggtagctagctagcttacacgttcacgcatcgctttccgggccgtctccggtggtttagctcagcagagcggggaaggaagaagatgacctccgtgagcgcgaggcccgttggcgtggggtactgcttcggcggggcgaggtgccagccacggtcgcgggtgcgggtttcggccgcggcctcggcagtggccgcgcccgcgcccgcgatggcggcgacgatgtacgagctgctcgccgtcgagnanangncggggcccnncnagatcaaggnggcgtaccggcgcgccgcgcgncggtggcacccgnacgcgtgccccggcggcagccgaccgcttcatggcggcgcgggaggcctacnaggtgctgtccgaccccgagcgcaggcgcggctacgacatccagctccgctgcggcgcccacttcggcgacgccgggtaccgcgcggcacgccgcgccgggttcgccgactgggaggcgcagctgaccgggctgcagtggcgcgcggcggggcggcgcgggcgcgccggcggggagacttggggcagcaggatgcgccaggcggccgcgcagccgtccttgtagcggcgtcgccggtggctggcctttgatagttcatacttcgtagtactagtgtactaccctaccttcccctttcctcttcgacaatcgaatggcccgagaagctttaattgcgctgttctgcagcgttttctcttgccaacacgtcatcctcgtcgcactgttcggagtgcagacgagcttgaagtctagaagcagtngacattttccccccctttgnagtgtagtactgtcaacttttagttcccantcggttacatncggttcgnancctatctcagnattnttttg

SEQ ID NO: 744 - protein, 174 aa, Zea mays subsp. mays
  peptide (1)..(174): Ceres Seq. ID no. 12404247
  misc_feature (54)..(54): Xaa is any aa, unknown or other
  misc_feature (55)..(55): Xaa is any aa, unknown or other
  misc_feature (56)..(56): Xaa is any aa, unknown or other
  misc_feature (59)..(59): Xaa is any aa, unknown or other
  misc_feature (60)..(60): Xaa is any aa, unknown or other
  misc_feature (63)..(63): Xaa is any aa, unknown or other
  misc_feature (70)..(70): Xaa is any aa, unknown or other
  misc_feature (75)..(75): Xaa is any aa, unknown or other
  misc_feature (92)..(92): Xaa is any aa, unknown or other
MTSVSARPVGVGYCFGGARCQPRSRVRVSAAASAVAAPAPAMAATMYELLAVEXXXGPXXIKXAYRRAAXRWHPXACPGGSRPLHGGAGGLXGAVRPRAQARLRHPAPLRRPLRRRRVPRGTPRRVRRLGGAADRAAVARGGAARARRRGDLGQQDAPGGRAAVLVAASPVAGL

SEQ ID NO: 745 - protein, 133 aa, Zea mays subsp. mays
  peptide (1)..(133): Ceres Seq. ID no. 12404248
  misc_feature (13)..(13): Xaa is any aa, unknown or other
  misc_feature (14)..(14): Xaa is any aa, unknown or other
  misc_feature (15)..(15): Xaa is any aa, unknown or other
  misc_feature (18)..(18): Xaa is any aa, unknown or other
  misc_feature (19)..(19): Xaa is any aa, unknown or other
  misc_feature (22)..(22): Xaa is any aa, unknown or other
  misc_feature (29)..(29): Xaa is any aa, unknown or other
  misc_feature (34)..(34): Xaa is any aa, unknown or other
  misc_feature (51)..(51): Xaa is any aa, unknown or other
MAATMYELLAVEXXXGPXXIKXAYRRAAXRWHPXACPGGSRPLHGGAGGLXGAVRPRAQARLRHPAPLRRPLRRRRVPRGTPRRVRRLGGAADRAAVARGGAARARRRGDLGQQDAPGGRAAVLVAASPVAGL

SEQ ID NO: 746 - protein, 129 aa, Zea mays subsp. mays
  peptide (1)..(129): Ceres Seq. ID no. 12404249
  misc_feature (9)..(9): Xaa is any aa, unknown or other
  misc_feature (10)..(10): Xaa is any aa, unknown or other
  misc_feature (11)..(11): Xaa is any aa, unknown or other
  misc_feature (14)..(14): Xaa is any aa, unknown or other
  misc_feature (15)..(15): Xaa is any aa, unknown or other
  misc_feature (18)..(18): Xaa is any aa, unknown or other
  misc_feature (25)..(25): Xaa is any aa, unknown or other
  misc_feature (30)..(30): Xaa is any aa, unknown or other
  misc_feature (47)..(47): Xaa is any aa, unknown or other
MYELLAVEXXXGPXXIKXAYRRAAXRWHPXACPGGSRPLHGGAGGLXGAVRPRAQARLRHPAPLRRPLRRRRVPRGTPRRVRRLGGAADRAAVARGGAARARRRGDLGQQDAPGGRAAVLVAASPVAGL

SEQ ID NO: 747 - DNA, 561 bp, Zea mays subsp. mays
  misc_feature (1)..(561): Ceres Seq. ID no. 12344923
  misc_feature (1)..(561): Ortholog of  Ceres SEQ ID NO 13596416 as cited in SEQ ID NO 62177
aatagatccaggaaactgtgtgaaagctaagcttgatcccatgagtatgaaacaggccataaaaacctaggtattattatgcgcttgttaatactcgaacataattctttttgcgtgttcaaaaggatccaatatgttgtttgcatacatgttttagggagagagacccagtcaatgagaatcaaacaggtgacggaagggtaaatattacttaccaaaggatcaaacggattgccaactgtttccacaactcctacacccaaatatcttagcgtttcaactaactgcttgtatatgccttgatagcttgtgctgaccatttgctccttctcagtccctggggtgttctctaaattcgttttctcaaaactatcaaccagaggtaacaggctctggacaacttccacccgtatatttgatgtaaacttggcaccgtccttttcagcctgtttccggaaattctccagatcggcatttaagcgaataaatttttccttcccagaagttatttcagttgtaatactttcaagttgataagctactctactgttcactttttcc

SEQ ID NO: 748 - protein, 41 aa, Zea mays subsp. mays
  peptide (1)..(41): Ceres Seq. ID no. 12344924
MRLLILEHNSFCVFKRIQYVVCIHVLGRETQSMRIKQVTEG

SEQ ID NO: 749 - DNA, 986 bp, Zea mays subsp. mays
  misc_feature (1)..(986): Ceres Seq. ID no. 13498119
  misc_feature (1)..(986): Ortholog of  Ceres SEQ ID NO 13624545 as cited in SEQ ID NO 481
tcgaaaaagcagacgcagagcatcccacggttgtcactcactcggcccagcgctcacgagtcacgagtacccacaactgacgatcgtccatgttcggcggcgacgatggcgctagggcgctgcggcgagccggcagtttcccacgggcaccgcccccgccggcgacggcgatgcacatcctctccaggagcgagtcaatcaagaagaagagcggagccgccaagcggtcgaagcgggcacgcgtgcgcgcggggctcgccgccgcgctgcangagctcaggctcgccggccggaagcacggggccagaagccggggagccggggcgttgtcagaagctgtcagcgccggctccggagccggagccgccgcggggccgcgggctagcgatgacgtccaaggaggaggctgctgcgccgctgctcccctgcacgtgtccgacgttgccgaggcgcaggcgagcagaggagcagcagccaccgctggtcgtcgtcgcgtgaacgcagcaggcggctggacgacgccgctgctgcttgtagcggtgctagccctggcgtgcgtggtggcgctcggcaggacgccggccgtttgcctgctgcacctgtgcggcatggctgtgccgcggcccttgtgcggttcggcctcgacggacgggcgccaccggagcagcgagccctntgctgcagtgcggtgcagcgtcagatgcctgtggctgtgagcttaacattggacatgtacgagcaggtgattagcatcagacgtgttgtttgtcactcatggtctcaattctcatggaccgtccggttctaccggcttggcatgaatgttgcaggcctcgtaatttagctagagagcgtctgtgttgtatgtttaaagttagtggcaggtgtttatatatattcagttgtgtgtttactatttaatgcgtggagtgaaaataatagtacctgtaccagtctgtgtatggttattactccctctttccttt

SEQ ID NO: 750 - protein, 208 aa, Zea mays subsp. mays
  peptide (1)..(208): Ceres Seq. ID no. 13498120
  misc_feature (61)..(61): Xaa is any aa, unknown or other
  misc_feature (196)..(196): Xaa is any aa, unknown or other
MFGGDDGARALRRAGSFPRAPPPPATAMHILSRSESIKKKSGAAKRSKRARVRAGLAAALXELRLAGRKHGARSRGAGALSEAVSAGSGAGAAAGPRASDDVQGGGCCAAAPLHVSDVAEAQASRGAAATAGRRRVNAAGGWTTPLLLVAVLALACVVALGRTPAVCLLHLCGMAVPRPLCGSASTDGRHRSSEPXAAVRCSVRCLWL

SEQ ID NO: 751 - protein, 181 aa, Zea mays subsp. mays
  peptide (1)..(181): Ceres Seq. ID no. 13498121
  misc_feature (34)..(34): Xaa is any aa, unknown or other
  misc_feature (169)..(169): Xaa is any aa, unknown or other
MHILSRSESIKKKSGAAKRSKRARVRAGLAAALXELRLAGRKHGARSRGAGALSEAVSAGSGAGAAAGPRASDDVQGGGCCAAAPLHVSDVAEAQASRGAAATAGRRRVNAAGGWTTPLLLVAVLALACVVALGRTPAVCLLHLCGMAVPRPLCGSASTDGRHRSSEPXAAVRCSVRCLWL

SEQ ID NO: 752 - protein, 165 aa, Zea mays subsp. mays
  peptide (1)..(165): Ceres Seq. ID no. 13498122
  misc_feature (91)..(91): Xaa is any aa, unknown or other
SKKQTQSIPRLSLTRPSAHESRVPTTDDRPCSAATMALGRCGEPAVSHGHRPRRRRRCTSSPGASQSRRRAEPPSGRSGHACARGSPPRCXSSGSPAGSTGPEAGEPGRCQKLSAPAPEPEPPRGRGLAMTSKEEAAAPLLPCTCPTLPRRRRAEEQQPPLVVVA

SEQ ID NO: 753 - DNA, 1025 bp, Zea mays subsp. mays
  misc_feature (1)..(1025): Ceres Seq. ID no. 12346286
  misc_feature (1)..(1025): Ortholog of  Ceres SEQ ID NO 15180071 as cited in SEQ ID NO 429
atcactctgcaatattcgggttctctactatgtgtaatctcatatcaagattaatgagtatcgtgatcgtataattttgaatcctatcaacccatatggcaaggcaaagaaaatgacagtggacatcattctagattttacaaaatcaaaggagcaaccagacatggctgtcatgatctaagatacttcaacgtgattggatcgaacccaaacatatgactaggagaagctccaaggccactttgtcaagggtctctgcaatgcacctactggtgcatgatttactggaggttgtgcgcatgaatgtgccacacattggtatgggggttggagttgaagcaggtgattttcaccaacattggtttgcgaactggagttgaagcaggttattcatttgatgaaagtgggagagcagtccaaggcaaatttgccatgttggagcagtcacaggagccaaggggctgcagtcacaggtcctgctagccaggatggagcaatcataggacctcctagcagtccaaggaaaatttgcgaggtggagtagttgcaacttttgaaacccacgtgataacatgctcaagcgttcgtatgataaaaaagatggcacataatcaaaagaagatctcatgttctgcgtttgtgaacctgtttgtattttttgaacttgttttgtgaacctctatttgtaaacctgtaaaatctgaggttgtgaatagatttgggtaacttcatacaagtggtggaggcctggtggtaatcctggatgcatataaagcgaggcatgcaatatccatagcactcgtttgacagaaggcaacaccatcaaccttgtcctccacctttaaactagcatgagcaccatccttcttcacatttatattcatgtcccctatacgttcctcaaatacgtttgaaccatgtgtaccactatgtgaaccaactgagttcgtagactgatcaatgagtcaccttattgtggacgcagctctaaaaaatgttgtatctacaaatagattgtgtaaacg

SEQ ID NO: 754 - protein, 59 aa, Zea mays subsp. mays
  peptide (1)..(59): Ceres Seq. ID no. 12346287
MCHTLVWGLELKQVIFTNIGLRTGVEAGYSFDESGRAVQGKFAMLEQSQEPRGCSHRSC

SEQ ID NO: 755 - protein, 54 aa, Zea mays subsp. mays
  peptide (1)..(54): Ceres Seq. ID no. 12346288
MTRRSSKATLSRVSAMHLLVHDLLEVVRMNVPHIGMGVGVEAGDFHQHWFANWS

SEQ ID NO: 756 - protein, 48 aa, Zea mays subsp. mays
  peptide (1)..(48): Ceres Seq. ID no. 12346289
MKVGEQSKANLPCWSSHRSQGAAVTGPASQDGAIIGPPSSPRKICEVE

SEQ ID NO: 757 - DNA, 815 bp, Zea mays subsp. mays
  misc_feature (1)..(815): Ceres Seq. ID no. 12423754
  misc_feature (1)..(815): Ortholog of  Ceres SEQ ID NO 13581701 as cited in SEQ ID NO 51151
atcgccaaaccaaaacccacacgcatccagaggcaaagctggacaagaaaagcgccaggctgacagagagtccgttcctattctgcctggcgccatgatcatcgagaccctgaaagcgcgcatcctgcgcgtgctgaagccgccgacccgcccgccgccggcggcgcgggcgtggtgctgtacacgacgacgctgcgcggcgtgcggcgcacgttcgaggactgcaacggcgtgcgcgcgctgctggagagcctgggcgcgccgttccaggagcgcgacgtgtccatggaccgcggcctgcgcgaccagctgtgggccgcggccggggagaaggcggtgccgccgcgcctgttcgtgcgcgggcgcgacctcggcggcgcgggccaggtgctcgcgctccacgagcagggccgcctcgccccgctgctgccgtgcggagaggccggggcgagaagcaggtgcggcgcgtgcgccggggtcgggttcgtggtgtgcggcgcctgcgacggcagccggaaggcggggggagacggcggcgggcgctgccgcggcgggtgcaacgagaacggcctcgtcatgtgcccgctctgtctgtccatttagcggccgcgcagggcagggcagtggaaaccaccttcttcgtcgtctcgttctccgcttctgatcagtcgttattagaatttatgaagtgctccccttctcctcgcaggcggaagctgtgtccactccactgctgctggcctgggtcgatccatgtgtgtttcgagtgcttggttttgccatgtgtgtgatgtatatatatgctgctagtttgc

SEQ ID NO: 758 - protein, 220 aa, Zea mays subsp. mays
  peptide (1)..(220): Ceres Seq. ID no. 12423755
SPNQNPHASRGKAGQEKRQADRESVPILPGAMIIETLKARILRVLKPPTRPPPAARAWCCTRRRCAACGARSRTATACARCWRAWARRSRSATCPWTAACATSCGPRPGRRRCRRACSCAGATSAARARCSRSTSRAASPRCCRAERPGREAGAARAPGSGSWCAAPATAAGRRGETAAGAAAAGATRTASSCARSVCPFSGRAGQGSGNHLLRRLVLRF

SEQ ID NO: 759 - protein, 189 aa, Zea mays subsp. mays
  peptide (1)..(189): Ceres Seq. ID no. 12423756
MIIETLKARILRVLKPPTRPPPAARAWCCTRRRCAACGARSRTATACARCWRAWARRSRSATCPWTAACATSCGPRPGRRRCRRACSCAGATSAARARCSRSTSRAASPRCCRAERPGREAGAARAPGSGSWCAAPATAAGRRGETAAGAAAAGATRTASSCARSVCPFSGRAGQGSGNHLLRRLVLRF

SEQ ID NO: 760 - DNA, 689 bp, Zea mays subsp. mays
  misc_feature (1)..(689): Ceres Seq. ID no. 12354093
  misc_feature (1)..(689): Ortholog of  Ceres SEQ ID NO 13596689 as cited in SEQ ID NO 62728
acggctcaccggagtgtctccctcccctgcttgcagttcctgtccatgaagatcgccgcttccaacccggtggtgagcttcgacatcgtcgaggacctcttcggccggcagctgaagcagtcacgacgcagcccggcggcagccctgcccgcgatggctctgccgaccggccagctggagccttcctgccttcagatgagccacatgccgcagatgcatccatctgcagcggcaaactccaccggctttgggctggacatggtcgtcaacaacccgtacgcgcccgccggcgcgagctgccctgtccctgtgtcggctgccgcgtcggtatcggtggcggccggaccgtcgacgaccgagccgtgcctcaacgtgaatggcactgctgcctgggacattggctcccggaatttgttcggcggatttgttgcacagtttcagtcagtagaaagtgagtagctgcttcctgaagaccaagccagcagtcacttggcctcatgtgaaatgaaaaaaaaacacagtagtggttagatcagggcaaaataaacccctacggcccaacctgaacatgtttaaagttcagagtcataatggccgtacatgccatcacggaattcccaaactggcggacgatccaataactctaccaaaagatgagcacatcaaacaaaatttgactatgttcatgc

SEQ ID NO: 761 - protein, 152 aa, Zea mays subsp. mays
  peptide (1)..(152): Ceres Seq. ID no. 12354094
TAHRSVSLPCLQFLSMKIAASNPVVSFDIVEDLFGRQLKQSRRSPAAALPAMALPTGQLEPSCLQMSHMPQMHPSAAANSTGFGLDMVVNNPYAPAGASCPVPVSAAASVSVAAGPSTTEPCLNVNGTAAWDIGSRNLFGGFVAQFQSVESE

SEQ ID NO: 762 - protein, 150 aa, Zea mays subsp. mays
  peptide (1)..(150): Ceres Seq. ID no. 12354095
GSPECLPPLLAVPVHEDRRFQPGGELRHRRGPLRPAAEAVTTQPGGSPARDGSADRPAGAFLPSDEPHAADASICSGKLHRLWAGHGRQQPVRARRRELPCPCVGCRVGIGGGRTVDDRAVPQREWHCCLGHWLPEFVRRICCTVSVSRK

SEQ ID NO: 763 - protein, 137 aa, Zea mays subsp. mays
  peptide (1)..(137): Ceres Seq. ID no. 12354096
MKIAASNPVVSFDIVEDLFGRQLKQSRRSPAAALPAMALPTGQLEPSCLQMSHMPQMHPSAAANSTGFGLDMVVNNPYAPAGASCPVPVSAAASVSVAAGPSTTEPCLNVNGTAAWDIGSRNLFGGFVAQFQSVESE

SEQ ID NO: 764 - DNA, 1203 bp, Zea mays subsp. mays
  misc_feature (1)..(1203): Ceres Seq. ID no. 12406274
  misc_feature (1)..(1203): Ortholog of  Ceres SEQ ID NO 13658028 as cited in SEQ ID NO 60750
gcacgagaccattacctagaacatcctaatcgaaaaacagtaccgtctctgtcgaagaacacgtagtacaccgtatacggctgagcggttgtgtataaccatcgtcggatcactcactctctgacccttgggaacaggcacctgtagatcctggacatgaaggacctcttggccttccccttcccgtgtcgccgcgcgcgtggcggcgctgcgtggtcgggcgacgacagcagcttcggcggctgcacgggcggcgcgggggcggtcctggcctcctcccggtggcgcttcaccttctcgaactgcaccgtgaatccctgcgccgccatcgcggcgttctgctcgtcccacacgccgaacctcggcacggccgacggcttgttggggcgcggcggcagcgggggctgctggtggcgcggcggcgacggcgacggcgaggcggacgccggcctcggcgcaccgtggtggtattgggcgccgtggccgtggctgccgccttgtggctgcggcgggaagcttcggtcgctggtactgttgctggtgtacctgggctggtacggcctgggcggcgagaacttgctgccgcggctactggcctccgacgccgcgttgcttgctgctgctcccggtgcggcggtggtgcccgtggccggggtgcggatgctggtgctggtacgtccgatggtggggctgaggcgctggcgcgtgggcgtgggcgtgcgagcttggcggccgggagggcggcacgttcctggcgctgagattctcgtagtgctcgtaggggtcgaagtcgtagccagcagccggcgcgtggccgtgcgagctcggcgggcgggagggcacgttcctgctgctgaggttgtcgtagtgctcataggggtcgaagtcgccgtagccgtagccggcgccgggcgccggcgccctggcagcggcgggctggccgtgcgagctcggcgggcgtgacggcggctttctgctgatgctctcgtagtgctcgtacgggtcgaagtcgtagcctccgttaccgccggcagcgggggcggaaggcttgggagcggccgccggtggcgcagccggcggagccttgttgtctctcaccttctcgaagaagacggtgtagccgatgttctcggcgtcccacgagccgaacttgggcacgaccgcgtgcccggcctgcaatcaatctcaatgagcaattgctgt

SEQ ID NO: 765 - protein, 268 aa, Zea mays subsp. mays
  peptide (1)..(268): Ceres Seq. ID no. 12406275
MKDLLAFPFPCRRARGGAAWSGDDSSFGGCTGGAGAVLASSRWRFTFSNCTVNPCAAIAAFCSSHTPNLGTADGLLGRGGSGGCWWRGGDGDGEADAGLGAPWWYWAPWPWLPPCGCGGKLRSLVLLLVYLGWYGLGGENLLPRLLASDAALLAAAPGAAVVPVAGVRMLVLVRPMVGLRRWRVGVGVRAWRPGGRHVPGAEILVVLVGVEVVASSRRVAVRARRAGGHVPAAEVVVVLIGVEVAVAVAGAGRRRPGSGGLAVRARRA

SEQ ID NO: 766 - DNA, 1357 bp, Zea mays subsp. mays
  misc_feature (1)..(1357): Ceres Seq. ID no. 12407063
  misc_feature (1)..(1357): Ortholog of  Ceres SEQ ID NO 15226540 as cited in SEQ ID NO 58479
  misc_feature (1)..(1357): Ortholog of  Ceres SEQ ID NO 13596689 as cited in SEQ ID NO 62728
atcggtggctcacgaccgagctgctgaggcaaagcttgtcccgcagtccttcccttagccttaacactcggagttgatcccgtctccgggggaagcagctggtaataatggcgcggtgccaggggaccgttgagagcctctgccaggggctgctcgacctcgacgacgacaagttcggtgcaatgtgcagcgccttcggctacctccaggagtggccggacctgggtgccgccatgtgcggcgccaatctcgccgtgccgcctgccgtggcgacgccgagcgccggcgacggcaacgattcctcctcttgcagcgtcagcggcgggttgaggaagaggaggccggacgcgtacctcgatgccaagggtggtgcgaacggcatgaacaagagacccagagggaagcagcagccgtctggcctctctgagatcgcggcggcgcccgggaaagggaagcaggagaggccaaaggctggcaccaagaagaaggccgaggctgcggcggcggcggcggctgccggccagaagaccgactacatccacgtccgggcccgcctgcggccaggccacggacagccacagcctcgccgagcgggtgaggagggagaggatcagcgagcggatgcggtacctgcaggagctggtgcccgggtgcagcaaggtcacgggcaaggccggcatgctcgacgagatcatcaactacgtccagtccctgcagaagcaagtcgagttcttgtccatgaagatcgccgcttccaacccggtggtgagcttcgacatcgtcgaggacctcttcggccgccagctgaagcaggcgtgcggcccggcggccggccagctggagccgtcctgccttcagatgagcatgagccccatgcagcaggtagtgcacccgtctgcagcggcgggctccactggctttgggccgctggacatggtcctcagcaacctgtacgcgcccgccgccgcaagctgccctgtgtcggctgccccgtcggtctcggtggccgccggaccgtcgaccatcgagccgtgcctcaacgtgaatggaactgctgctgcctgggatattggctcccagaatttgttcagcggatttgatgcacaatttcagtcggtagaaagtgagtagctgcttcctcaagaacaagccagaagttactttgccgcctcttgtgaaatgaaagaacacaatagtggttagatcagggtaaaaatgaaccccccaacgccaacctgaacatgtttaaagctcagagttcataatggccgtaacgtgccatcacagaaaactcaaactggctgccgatcaaataactccaccaaaaatgagcacatcaaataaaattttgacttgt

SEQ ID NO: 767 - protein, 330 aa, Zea mays subsp. mays
  peptide (1)..(330): Ceres Seq. ID no. 12407064
MARCQGTVESLCQGLLDLDDDKFGAMCSAFGYLQEWPDLGAAMCGANLAVPPAVATPSAGDGNDSSSCSVSGGLRKRRPDAYLDAKGGANGMNKRPRGKQQPSGLSEIAAAPGKGKQERPKAGTKKKAEAAAAAAAAGQKTDYIHVRARLRPGHGQPQPRRAGEEGEDQRADAVPAGAGARVQQGHGQGRHARRDHQLRPVPAEASRVLVHEDRRFQPGGELRHRRGPLRPPAEAGVRPGGRPAGAVLPSDEHEPHAAGSAPVCSGGLHWLWAAGHGPQQPVRARRRKLPCVGCPVGLGGRRTVDHRAVPQREWNCCCLGYWLPEFVQRI

SEQ ID NO: 768 - protein, 305 aa, Zea mays subsp. mays
  peptide (1)..(305): Ceres Seq. ID no. 12407065
MCSAFGYLQEWPDLGAAMCGANLAVPPAVATPSAGDGNDSSSCSVSGGLRKRRPDAYLDAKGGANGMNKRPRGKQQPSGLSEIAAAPGKGKQERPKAGTKKKAEAAAAAAAAGQKTDYIHVRARLRPGHGQPQPRRAGEEGEDQRADAVPAGAGARVQQGHGQGRHARRDHQLRPVPAEASRVLVHEDRRFQPGGELRHRRGPLRPPAEAGVRPGGRPAGAVLPSDEHEPHAAGSAPVCSGGLHWLWAAGHGPQQPVRARRRKLPCVGCPVGLGGRRTVDHRAVPQREWNCCCLGYWLPEFVQRI

SEQ ID NO: 769 - protein, 288 aa, Zea mays subsp. mays
  peptide (1)..(288): Ceres Seq. ID no. 12407066
MCGANLAVPPAVATPSAGDGNDSSSCSVSGGLRKRRPDAYLDAKGGANGMNKRPRGKQQPSGLSEIAAAPGKGKQERPKAGTKKKAEAAAAAAAAGQKTDYIHVRARLRPGHGQPQPRRAGEEGEDQRADAVPAGAGARVQQGHGQGRHARRDHQLRPVPAEASRVLVHEDRRFQPGGELRHRRGPLRPPAEAGVRPGGRPAGAVLPSDEHEPHAAGSAPVCSGGLHWLWAAGHGPQQPVRARRRKLPCVGCPVGLGGRRTVDHRAVPQREWNCCCLGYWLPEFVQRI

SEQ ID NO: 770 - DNA, 575 bp, Zea mays subsp. mays
  misc_feature (1)..(575): Ceres Seq. ID no. 12416865
  misc_feature (1)..(575): Ortholog of  Ceres SEQ ID NO 14312605 as cited in SEQ ID NO 0
gtatggaggtccatatggtgcctacgggtcatatggtggtgcctatggaggtggtgcgtatggtgctccaggagggtatggtgggggaggatatggcagctacggtggtgctggaggcatgggtgggggtggcagcactggtggtcggggatccagcagataccacccttatgggaaatgatcatccattctctgtgtttctctaggatctgataataaagccatacctttcctcgtttctgctactgagaaaatggaacatcccattcgtcttgttgaatcagcggcatntggacatttttttccttggaacttgcattgcacatcaaagattctatagtctatagtcgctgaaccctgaaccgcccccaccccgagctttctgtagaagctgcagctgaaattctcgtagtctggcatgagccttagaatgcccttgaaactattatctttgtggttaacattatggtgtcatggaacagatgtacgttgttgtaacattcactcactgatcagagacttgctatctctgcatatgtggagagaagctttgcaaatgattgactgatactatt

SEQ ID NO: 771 - protein, 70 aa, Zea mays subsp. mays
  peptide (1)..(70): Ceres Seq. ID no. 12416866
VWRSIWCLRVIWWCLWRWCVWCSRRVWWGRIWQLRWCWRHGWGWQHWWSGIQQIPPLWEMIIHSLCFSRI

SEQ ID NO: 772 - protein, 67 aa, Zea mays subsp. mays
  peptide (1)..(67): Ceres Seq. ID no. 12416867
MEVHMVPTGHMVVPMEVVRMVLQEGMVGEDMAATVVLEAWVGVAALVVGDPADTTLMGNDHPFSVFL

SEQ ID NO: 773 - protein, 63 aa, Zea mays subsp. mays
  peptide (1)..(63): Ceres Seq. ID no. 12416868
MVPTGHMVVPMEVVRMVLQEGMVGEDMAATVVLEAWVGVAALVVGDPADTTLMGNDHPFSVFL

SEQ ID NO: 774 - DNA, 1338 bp, Zea mays subsp. mays
  misc_feature (1)..(1338): Ceres Seq. ID no. 12386460
  misc_feature (1)..(1338): Ortholog of  Ceres SEQ ID NO 15177758 as cited in SEQ ID NO 57504
  misc_feature (1)..(1338): Ortholog of  Ceres SEQ ID NO 12614814 as cited in SEQ ID NO 68816
  misc_feature (1)..(1338): Ortholog of  Ceres SEQ ID NO 13624040 as cited in SEQ ID NO 0
agtgcaagccaagcattctcctcacacacgtacttccgccagcgcagctagctagctgttctcttcttgccatcatctctcgtctgtgatcgaacgccggcgcgcggccagcatggagatgatcgacgcggagctgcgtcttggcccgcccgggagcaacaacagcgacgtcgtcgtcaccgtcgtgccgcctgcagcggcgaggaagccggcggcgccgcgcgccggcgccggcttcggcggcgaaacggccgtcctcgtcggtggtgaagagcgacgcgtccgggacgggcgaccatgacgacgacgccgcaccggcctccaaggtgcgggcggtggggtggccgccggtaagagcgtaccggaagaacgcgttccacgcggcggcggaggcggcgaggaggaccaataataagggcgaggagctgcagggaggcggccgcctgtacgtgaaggtgagcatggacggggcgccctacctccgcaaggtcgacctgcggacctacggcggctaccgggagctgagggacgcgctggacgcgctcttcggctgcttctcctcctcctcctcctcggccgacggcggcagccagttcgccgtcgcctacgaggacaaggacggcgacctcatgctcgccggcgacgtgccctgggagatgttcatctgctcctgcaagaagctgaggatcatgagggggtccgaagcaagataaccaacgcagcgaggatgcaaagaacatgttggatgcatggcatgcatggaggtccagctagctatggtccgtccaactcatgcatgggacagagcacagagggagagagagagacagaaaaaaaagggaggtctttatatcggccatccaatggaattggaggcgcggcgtagggtatatacctgcacagggatcggaggccccatgcatgcatgcgcgcgtcgtcgtgttctacggccagcccagccggctcataccatacacaccatggacatgcacatgatcagatggagcatggaggtgatggttcaaggatcacggcggcgtagtacgcgtcacgccgtgtctcccgccatcagtcaggcggacgtgctgctgtggacggctgactgggacgtgcatgcatggcagatcggagattattcagccaagtagtagcatcggtgaaaagctactaccacctaggattttttttttttgtgctgtgcacgctagttagctcatatgctgtagtttcatagctagcttgtgcttgctagcctatctgtaactttgagttcctcttttgtaagtgacctgggcccatgtatattagttcattctaggggtacgtgcagccgcaccc

SEQ ID NO: 775 - protein, 132 aa, Zea mays subsp. mays
  peptide (1)..(132): Ceres Seq. ID no. 12386461
MACMEVQLAMVRPTHAWDRAQRERERQKKKGGLYIGHPMELEARRRVYTCTGIGGPMHACARRRVLRPAQPAHTIHTMDMHMIRWSMEVMVQGSRRRSTRHAVSPAISQADVLLWTADWDVHAWQIGDYSAK

SEQ ID NO: 776 - protein, 129 aa, Zea mays subsp. mays
  peptide (1)..(129): Ceres Seq. ID no. 12386462
MEVQLAMVRPTHAWDRAQRERERQKKKGGLYIGHPMELEARRRVYTCTGIGGPMHACARRRVLRPAQPAHTIHTMDMHMIRWSMEVMVQGSRRRSTRHAVSPAISQADVLLWTADWDVHAWQIGDYSAK

SEQ ID NO: 777 - protein, 123 aa, Zea mays subsp. mays
  peptide (1)..(123): Ceres Seq. ID no. 12386463
MVRPTHAWDRAQRERERQKKKGGLYIGHPMELEARRRVYTCTGIGGPMHACARRRVLRPAQPAHTIHTMDMHMIRWSMEVMVQGSRRRSTRHAVSPAISQADVLLWTADWDVHAWQIGDYSAK

SEQ ID NO: 778 - DNA, 1383 bp, Zea mays subsp. mays
  misc_feature (1)..(1383): Ceres Seq. ID no. 12387170
  misc_feature (1)..(1383): Ortholog of  Ceres SEQ ID NO 13586843 as cited in SEQ ID NO 0
atcggcatcggaatcggcgttgccacttccaccgcttctgctccccttcgccctgcttcatgttccgcgattcccttcgcacaccctcccgctgccgccgctgttctcctaccacccgtcctcccgcgctgggtagcggtactaatttaggatctgatacactttctgtgcggaagcgcggtcctgctaaatccgtgtgccggggttccagattgcaggagcttgccttgtagcgtcgggttatgctggttgcagcgagtggctaagcagagatccagtcgcggcgcgctgcttgcttgcttccaaccctgggtgcttgtgctactctttcaagctcgtgatctcatcatgggcaatgcagcatgctcgttcttactagttactaagtttatttatccatacaacccatgttataagttgggtcaggaactcaggatacggatactgttatgcagctgtgcaggcagggccacagaacaagtttgtttgtacacagactcaagaaatggaaaacaaattcttgttatttgggaaaacaacttcttgttatttgcgtttgcacaccattttgagttgatttcatccactgaagactaaagagtgaagtaataaggtcgtgtacacttgattttcccctcctctggttggttgcacaggaccatgatctggtcgttgagccgaggtcattcaccggttccactcagcccagcagaccggatgtaaggccatcgtcttcatcgtccagcgataatgccagggcacataattcaggtaaagtatgtatgttgtggacatccatcattttcttctgtcacagttgctgcactacctgtgctttgctgggcacttgataatgttgccagattccgaaggcttaactttgccggatcctctttctataggagatacctggaagagccttgtctttggctgggtaaacacaaataatactacgctgagcctcctcagttcaaatgctgaaagcgccttgggttttcttcactgttctcgtggcgcggtagcataattcagacattcatgtactgggagctgagggattagtacgaggccatttatgctgttttgctgcatgcgttgaagccgatgtatcatgctgctcccgtgacatccagacgccccgttcctccttccagacgcccatttctgggatccaaatatggtggctctggtagggtggtttaagatcatgtatctgctgctgaatagctgagctgcccgggttgtctgcacagaacttagcacagccgctgtgttcttatgtaatgctgcagcagtgcgcgggataagttttctgcagaaaaatagcattcattgtatttgtctggaacgtatgatcccaatttgataactgtagcttctgct

SEQ ID NO: 779 - protein, 82 aa, Zea mays subsp. mays
  peptide (1)..(82): Ceres Seq. ID no. 12387171
MGNAACSFLLVTKFIYPYNPCYKLGQELRIRILLCSCAGRATEQVCLYTDSRNGKQILVIWENNFLLFAFAHHFELISSTED

SEQ ID NO: 780 - protein, 82 aa, Zea mays subsp. mays
  peptide (1)..(82): Ceres Seq. ID no. 12387172
MYVVDIHHFLLSQLLHYLCFAGHLIMLPDSEGLTLPDPLSIGDTWKSLVFGWVNTNNTTLSLLSSNAESALGFLHCSRGAVA

SEQ ID NO: 781 - protein, 76 aa, Zea mays subsp. mays
  peptide (1)..(76): Ceres Seq. ID no. 12387173
RHRNRRCHFHRFCSPSPCFMFRDSLRTPSRCRRCSPTTRPPALGSGTNLGSDTLSVRKRGPAKSVCRGSRLQELAL

SEQ ID NO: 782 - DNA, 548 bp, Zea mays subsp. mays
  misc_feature (1)..(548): Ceres Seq. ID no. 12340454
  misc_feature (1)..(548): Ortholog of  Ceres SEQ ID NO 13600405 as cited in SEQ ID NO 392
aacccttgtgtcgtaccctccggatcgaatcctagacgacgcgaccggcacggcggcggcgcacagccccgacgacgaccctccccgctgccttctccccgatctctacgacaccaattatagatggggaaggtgaacctcctccctcttgggatccggcaccaactccaaaagttctacactcagatgagacaggcgaggttaaggttcgacgactcctcgagggacatgccaagaactatcaagttacattgttgtttattttccctgtcttattgggaagcaaagtattggaaaaaaactgcatttagttgatgatccactagattttaggctatgtcccactcgagtctttatactgtggtgttgtctcttgttatgcaatgttccctgcatgatttttgtttttggcatgtctacaactggttcagctgttcggctgctcattatggttgcagtcaaccataagattgttgtcttagcacctttgatatgtcgtagcaaaaactgctagttcactctttgatatgtctagattgaaccagtcc

SEQ ID NO: 783 - protein, 63 aa, Zea mays subsp. mays
  peptide (1)..(63): Ceres Seq. ID no. 12340455
MGKVNLLPLGIRHQLQKFYTQMRQARLRFDDSSRDMPRTIKLHCCLFSLSYWEAKYWKKTAFS

SEQ ID NO: 784 - protein, 44 aa, Zea mays subsp. mays
  peptide (1)..(44): Ceres Seq. ID no. 12340456
TLVSYPPDRILDDATGTAAAHSPDDDPPRCLLPDLYDTNYRWGR

SEQ ID NO: 785 - protein, 43 aa, Zea mays subsp. mays
  peptide (1)..(43): Ceres Seq. ID no. 12340457
MSHSSLYTVVLSLVMQCSLHDFCFWHVYNWFSCSAAHYGCSQP

SEQ ID NO: 786 - DNA, 1580 bp, Zea mays subsp. mays
  misc_feature (1)..(1580): Ceres Seq. ID no. 12345160
  misc_feature (1)..(1580): Ortholog of  Ceres SEQ ID NO 13600268 as cited in SEQ ID NO 585
ctgtcgcgtccctgtcttcttccctgggttgacgccgcggctgtgccattcttaattgggtacgatccagtgttaggaattcgtcgtggcgtcgagtggtgaggagatgggaagtaggtcagtcttcggtcagatccgatggtgtaacagcaaggcccgtgcgacacttgctaaatgtctgatagaaagcctgaaccaaaaatcatcaccgatctcgtggtttcgagtttgatttaattatggtacgctagctgagaatcgtatgaagcaaaggacaaggatcaaagctaagtcgaccacaagatgttgttaagcgtgggcttctttgcatggtgatactggtaggcaaacctgaagatggatagacggagcaagtatcagaacaaaggctgatcatcaagtgatcgatgtcaaacaacactaacctagtgttcttccaggcaagccccggtgcatgcaaccccttccttgtgtttttaaatgatttttacacactttaagtctagcgaaatgtgcattaggtttatatgagttgcttggaaaccctttaatgcattggctaccttgaaatccaatccttttatagataattctggtgaagtatcaaatattgtttacaaaaattgcttagccctgcgtagaggtaaatcttgcggatagagtttgtcctttgcactaatgcctagctcaggtttatcctgaggaaggatggcttctacctgcaagaatattttcattgcgagcgtggtgggatcttactgcaaagttccctataatggtcttttcatcctcaggaacacaaacaattctaagggtggaagtacttaaatcgagacttgggctaggaacaggtgatgttctacccaggttgattaaggattatagagaatgtaggcctgatgatcgaggaccttttaactggtcacatgcctcatcatgggtaagctttgcctcgggcagactaataccagaaaggccaacacacaatgggagtggagagatggcgagagtagcgtgtaccctccatggcaagaggctggactgcgatgtatctatgctctcggttggcgtgaacccaatctggtcttaagaaacccggtggcgagttgacatatgcaagggttaagtgctacatatgtcgggtgattggagatccccagccgggtattaattgattcggatcgttgttacttctcggatatgaagacttggtcactgacttgcaatctaagtcattgatggaatcataatgagcaaaaatcatgttgtattgattaaagtgatgatgaaattagactagatgcaaacaaggtttattaatacttaatctaacattaaaatgttgaaagtaaggattcattttagtaagctttctgcaaactattaatgttgattcttgctaaaagcctttccttgatctccaaatccagcatatccttgagagtctttttttttagtcgggtaagtcttgctgagtacttgcgtacttaggcttttattcccattgttgctggaggttacgagtcactttgattgtgattggtattaagcgccagtgggcatggccttcttataagact

SEQ ID NO: 787 - protein, 104 aa, Zea mays subsp. mays
  peptide (1)..(104): Ceres Seq. ID no. 12345161
MVFSSSGTQTILRVEVLKSRLGLGTGDVLPRLIKDYRECRPDDRGPFNWSHASSWVSFASGRLIPERPTHNGSGEMARVACTLHGKRLDCDVSMLSVGVNPIWS

SEQ ID NO: 788 - protein, 57 aa, Zea mays subsp. mays
  peptide (1)..(57): Ceres Seq. ID no. 12345162
MGKLCLGQTNTRKANTQWEWRDGESSVYPPWQEAGLRCIYALGWREPNLVLRNPVAS

SEQ ID NO: 789 - DNA, 1404 bp, Zea mays subsp. mays
  misc_feature (1)..(1404): Ceres Seq. ID no. 12340650
  misc_feature (1)..(1404): Ortholog of  Ceres SEQ ID NO 12563124 as cited in SEQ ID NO 57104
  misc_feature (1)..(1404): Ortholog of  Ceres SEQ ID NO 13598373 as cited in SEQ ID NO 62185
  misc_feature (1)..(1404): Ortholog of  Ceres SEQ ID NO 12584664 as cited in SEQ ID NO 62232
  misc_feature (1)..(1404): Ortholog of  Ceres SEQ ID NO 15169537 as cited in SEQ ID NO 64197
agggaaatatctacatctcgtctgcgccgccgctgggatttattagggttctacttctagcccgggccgactccactccaatccaatcctggggcgagcgactgcctccttccctcgatctattccccatcttgtcctccctttgctaaaaataacgaggcagaggcatcttcgatttgacgtgcgcttcctcttcctcgctcgctctcggtcgcagtgatggctgatgtcgacgagtaccgttgcttcattgggaacctgtcctggtcaacgactgatgaaagcctcaaggatgcgttcagcaaattcggcaacctcactgaggcaaaggtggttcttgacaaattttcaggacgttctcgtggtttcggctttgtaacttttgatgagaagcaagccatggaggatgctattgagggaatgaatggactggacttggacgggaggaacatcactgttgataaagctcagccacaaggacctggtagagaccgtaatggtgaccgtgattatgaccgcgagcgtggatctcgttatgaacgtggtcgtgactatggtggtgggcgtgcaccgcgaggtggtggtggtggtggtggtggtggtggtgactgcttcaagtgtgggaaacctggtcattttgctagagagtgcccatctggggatggtgggagaggggacagatatggtgggagagatgacaggtatggtggcggtggcggtggcggtcgttcctgatgaagtggttcaagtggacggtggcccagttcgagcgcctcaacaacttcgacaactgcgagttcagggtcatgcagctgggccccggcggggagtactccctcctcgttcaccacacccaggaggagctccagcagtggggcatgtcgccggagatgatcgccgaccagcagtggcgcgcctccgccaaccgccgctgctgggccgaggagtgctcctccttcatcgacaccttcttcgaggagcctacggctcgtcggagacctcctcctcggacgaagacgangcagaggacaaggaggaggagaccaagctgctggagcaactataactggtttcatccacatccaatccacccattcgcctcgtcctttgaaattctctccattggattggatcttataccatgtgggaagagcggagcagtgatgctgcattcagtcatcgctgatccctctcttattcgaaaacagtctgtagcatgttcataatagctattagctagaactagaaatgattcgagggcaatttcagaaaatgctaaagaaacatatgctgtatctcaaggttttagctctgacatgattctgtatgttcctagatataagaacgcatacattctctattcaaaataaaatgctcagaggagataaatttgtctcgatcgct

SEQ ID NO: 790 - protein, 213 aa, Zea mays subsp. mays
  peptide (1)..(213): Ceres Seq. ID no. 12340651
  misc_feature (199)..(199): Xaa is any aa, unknown or other
MDWTWTGGTSLLIKLSHKDLVETVMVTVIMTASVDLVMNVVVTMVVGVHREVVVVVVVVVVTASSVGNLVILLESAHLGMVGEGTDMVGEMTGMVAVAVAVVPDEVVQVDGGPVRAPQQLRQLRVQGHAAGPRRGVLPPRSPHPGGAPAVGHVAGDDRRPAVARLRQPPLLGRGVLLLHRHLLRGAYGSSETSSSDEDXAEDKEEETKLLEQL

SEQ ID NO: 791 - protein, 189 aa, Zea mays subsp. mays
  peptide (1)..(189): Ceres Seq. ID no. 12340652
  misc_feature (175)..(175): Xaa is any aa, unknown or other
MVTVIMTASVDLVMNVVVTMVVGVHREVVVVVVVVVVTASSVGNLVILLESAHLGMVGEGTDMVGEMTGMVAVAVAVVPDEVVQVDGGPVRAPQQLRQLRVQGHAAGPRRGVLPPRSPHPGGAPAVGHVAGDDRRPAVARLRQPPLLGRGVLLLHRHLLRGAYGSSETSSSDEDXAEDKEEETKLLEQL

SEQ ID NO: 792 - protein, 184 aa, Zea mays subsp. mays
  peptide (1)..(184): Ceres Seq. ID no. 12340653
  misc_feature (170)..(170): Xaa is any aa, unknown or other
MTASVDLVMNVVVTMVVGVHREVVVVVVVVVVTASSVGNLVILLESAHLGMVGEGTDMVGEMTGMVAVAVAVVPDEVVQVDGGPVRAPQQLRQLRVQGHAAGPRRGVLPPRSPHPGGAPAVGHVAGDDRRPAVARLRQPPLLGRGVLLLHRHLLRGAYGSSETSSSDEDXAEDKEEETKLLEQL

SEQ ID NO: 793 - DNA, 1553 bp, Zea mays subsp. mays
  misc_feature (1)..(1553): Ceres Seq. ID no. 12414807
  misc_feature (1)..(1553): Ortholog of  Ceres SEQ ID NO 15178624 as cited in SEQ ID NO 452
atgaagacaaacattcaccgagccgaccgttgccttccccccaactcccagccccagcgtcaactgactacactcgctgactcgctcccccggttccccttctctgctcgccatcttttgctctccgcttggctcgtcaatcacctcctacgctccacacgccgccggcanctacaactgcttctgccgtggttacagagaagaaggggttggggagaagacatcctaaatcaattggatctgggagtatcagatctaaaaagtcaggttttcatcaaggtagaaaaagaaacttttctgtccggtcatggctttcccaactgcagcagctgttttgcttaatgagaacatgcagattcataaaggaaacagggttgatgacaccaagtgccaaaccactgaaatcatcagccaaacctgagagaaaggctcttcaggatgtgtctaacattcctaaaggcactgctttaaagaacagatccacagtcaaagaggggtccgccttgaaagaaaggcctgcactccacaatgtgtctaacaacctcaaagagaggtccatccgaaagagaggcctcctcttcaggatgtgtctaacacccgcaatgagaggtccatcctgaaagagaaatctgccctgtgtagccatgaagctattaagaacccagtgaatatttttgctgatgacgaagagatcaaacggtgccatgaatgggctaaggatgggatggagggcactcacttcactggaaatgattctcagaagttggataaagatgtgcaacacaaacgtatcaagaagaaagtggcgaaagttacgtcagcattgtatggctggtcacatgaggtatatggtcatgtgatgtttatggctatggttcccaagttttctgaagaatcgaaagagctggagctggaaccagagattcttccagacatcactaggtgtatgtctacctcaggcaagagggatgatgcaccaagcgccaaacggctgaagcctaagcttcaagaaccgaaggctcttcaggttcaggatttgtctaacactgtcaaagggagcccttctctgtgcagccatgaagctgtgaagaacccagtgaaaatattcactgttgaagagaccaaaaagtgtcatgaatcggctaatgatgtgtcggagggcactcacttcacaggaaatgatcgtcagaagctggataaggatgtgcaaggtgacaaaacacagctggttgaagattctcctactgatgatgagcttgacgactacccatttttggacaacagtcctgttaagtttgagctgaaagatgagtcggtgattccagatattggagcaatctgaagtgatagtgtttgtgcgattgttctgtagcaatctatgtagtacgatgtttagtacatgttgtttgttctgtagcaaactatgtagtttgagctgaaagatgagtcagtgcctcatcgggtacttttgagtaccgtagcggttgtcaagtttcatgctctcctgaaacatccttcgcaactcgcaagtgaaactctggtttatgccctgg

SEQ ID NO: 794 - protein, 205 aa, Zea mays subsp. mays
  peptide (1)..(205): Ceres Seq. ID no. 12414808
MEGTHFTGNDSQKLDKDVQHKRIKKKVAKVTSALYGWSHEVYGHVMFMAMVPKFSEESKELELEPEILPDITRCMSTSGKRDDAPSAKRLKPKLQEPKALQVQDLSNTVKGSPSLCSHEAVKNPVKIFTVEETKKCHESANDVSEGTHFTGNDRQKLDKDVQGDKTQLVEDSPTDDELDDYPFLDNSPVKFELKDESVIPDIGAI

SEQ ID NO: 795 - protein, 160 aa, Zea mays subsp. mays
  peptide (1)..(160): Ceres Seq. ID no. 12414809
MFMAMVPKFSEESKELELEPEILPDITRCMSTSGKRDDAPSAKRLKPKLQEPKALQVQDLSNTVKGSPSLCSHEAVKNPVKIFTVEETKKCHESANDVSEGTHFTGNDRQKLDKDVQGDKTQLVEDSPTDDELDDYPFLDNSPVKFELKDESVIPDIGAI

SEQ ID NO: 796 - protein, 158 aa, Zea mays subsp. mays
  peptide (1)..(158): Ceres Seq. ID no. 12414810
MAMVPKFSEESKELELEPEILPDITRCMSTSGKRDDAPSAKRLKPKLQEPKALQVQDLSNTVKGSPSLCSHEAVKNPVKIFTVEETKKCHESANDVSEGTHFTGNDRQKLDKDVQGDKTQLVEDSPTDDELDDYPFLDNSPVKFELKDESVIPDIGAI

SEQ ID NO: 797 - DNA, 1061 bp, Zea mays subsp. mays
  misc_feature (1)..(1061): Ceres Seq. ID no. 12348852
  misc_feature (1)..(1061): Ortholog of  Ceres SEQ ID NO 13663373 as cited in SEQ ID NO 60935
ccttaccaatcaataaaaccattcccaactgagatttgaagcctaaggccgatggggatggaggcgagatgcggtgacctggccgtagctgccggcgcccgcgtccggcgcccgctacaaccgcgggacaccaacgtggcggcgtccacggtagtggtcggcaaggctgcgccgaagcccaaagctcatccaaagggggcgacgaggcccactttgccttcgctgccgccggcaccgctgttcccggtggtgaagccaaccccgcccgtgaaggaccagtgcgacgcgtctgttgcgggcgtggccgaagtgtcgctggcggaggagctcgagagggcgcgggagcggcgcgctcggctccgcgcggcgcgggaacagacggaacgggagatggtgagccgtgccgagacgatggagcgagcgacggcggagtgggagcgccgcgcggaggaccagcgaaggctcgtctcggagctcatgcgcctcatcggggtgcctgaggtgtacacgcctgtggaatcactgagatccaaggaagagaggaagcgaagggtggccaccattggtcgttccgggtcgactggctccatctcgacagcatcaacagtgcaggctgatgttggagcaaaagcctgcagtgatcagcaatccgaggatactggagggataatagagacggcaaaagcaaccgagatcacctcctgattttgtgcaattggttccattttcaactgaaagcagagttgcttgtggctttgtttttcaattgatctccatccccattcgacgttatgggtgaagggatgaaggccgagcggtcgaggcgtcaagtgaagttgcggaccattggatgagtcgagtggcgatcagcgagggcaaggagccgatgaaattgtagggggtgggtggatggcgatggacttgtggggtggatgaccagctagattgagtgaatgtgcttaaagggttgagagaggtagagttagttaggtagtgtttggttcaaaagtataccaggacaaccattctattccagtattgagcttgtttggttcgattct

SEQ ID NO: 798 - protein, 217 aa, Zea mays subsp. mays
  peptide (1)..(217): Ceres Seq. ID no. 12348853
MGMEARCGDLAVAAGARVRRPLQPRDTNVAASTVVVGKAAPKPKAHPKGATRPTLPSLPPAPLFPVVKPTPPVKDQCDASVAGVAEVSLAEELERARERRARLRAAREQTEREMVSRAETMERATAEWERRAEDQRRLVSELMRLIGVPEVYTPVESLRSKEERKRRVATIGRSGSTGSISTASTVQADVGAKACSDQQSEDTGGIIETAKATEITS

SEQ ID NO: 799 - protein, 215 aa, Zea mays subsp. mays
  peptide (1)..(215): Ceres Seq. ID no. 12348854
MEARCGDLAVAAGARVRRPLQPRDTNVAASTVVVGKAAPKPKAHPKGATRPTLPSLPPAPLFPVVKPTPPVKDQCDASVAGVAEVSLAEELERARERRARLRAAREQTEREMVSRAETMERATAEWERRAEDQRRLVSELMRLIGVPEVYTPVESLRSKEERKRRVATIGRSGSTGSISTASTVQADVGAKACSDQQSEDTGGIIETAKATEITS

SEQ ID NO: 800 - DNA, 490 bp, Zea mays subsp. mays
  misc_feature (1)..(490): Ceres Seq. ID no. 13564932
  misc_feature (1)..(490): Ortholog of  Ceres SEQ ID NO 13663935 as cited in SEQ ID NO 67600
cttggacccgaggtaagaccgcccatagaattttcatttcgccgcattattttttttcccttctcactccctccttcggtccttcgccttcctcatgtccccgactctccgatactagtcgagtagtccggtacatcacaccgcctcgcaccgcggccatgttgacaccgcgcgtcctcaaggcttcgctgctccgctgcttgcgcgctaccgccgagctgcctccgttgcggcgaccccggatcctacctgtgcgggtttaccattccagaggctattctagtgggggaagctccaagtatgataggccaatgagacagttttctgaacagaatgagtcaacctctcagccattaatatattacattgctccatctgctctgcttgcttttgctgggatagccacatttgttcattacaatgatgagaggcgtgcagttcccttcgctaaagtaccaggacagaccaatgttcccaaaagatgtactac

SEQ ID NO: 801 - protein, 162 aa, Zea mays subsp. mays
  peptide (1)..(162): Ceres Seq. ID no. 13564933
WTRGKTAHRIFISPHYFFSLLTPSFGPSPSSCPRLSDTSRVVRYITPPRTAAMLTPRVLKASLLRCLRATAELPPLRRPRILPVRVYHSRGYSSGGSSKYDRPMRQFSEQNESTSQPLIYYIAPSALLAFAGIATFVHYNDERRAVPFAKVPGQTNVPKRCT

SEQ ID NO: 802 - protein, 110 aa, Zea mays subsp. mays
  peptide (1)..(110): Ceres Seq. ID no. 13564934
MLTPRVLKASLLRCLRATAELPPLRRPRILPVRVYHSRGYSSGGSSKYDRPMRQFSEQNESTSQPLIYYIAPSALLAFAGIATFVHYNDERRAVPFAKVPGQTNVPKRCT

SEQ ID NO: 803 - DNA, 1488 bp, Zea mays subsp. mays
  misc_feature (1)..(1488): Ceres Seq. ID no. 12411210
  misc_feature (1)..(1488): Ortholog of  Ceres SEQ ID NO 14302919 as cited in SEQ ID NO 20338
  misc_feature (1)..(1488): Ortholog of  Ceres SEQ ID NO 13595497 as cited in SEQ ID NO 51127
  misc_feature (1)..(1488): Ortholog of  Ceres SEQ ID NO 14306765 as cited in SEQ ID NO 53275
  misc_feature (1)..(1488): Ortholog of  Ceres SEQ ID NO 14314046 as cited in SEQ ID NO 59316
ccccctctcctcctctagcttctccttctctctctctccttcctggaccattctctctatctcctttctctctctacacatactcagacgagcagaagcagctagggacaccataggcaaactacttcagcaagaaattaaactatctcctacgcaagatcagaagaaactgtgtatggagcaagaagaggttggcctcgccctgggcctctccctcggctccggccaccaccaccaggagctcaagccccaacatccgtcgcatccgtgtgcggcgttgttggagccttctctgtcgctcagcggcccggcgaccaaggatgatggcccgaccgcaccggtgaggaggttcgctgccgtgaagagggagctgcagacgatggaggggaacgacgacgaggccaccggcaggggtacttgtctactcagtggcgtcgtcggcggtggttactgccgacgacgacgaagggtgcaacagcagccggaagaagctgaggctgtccaaggagcagtcggcgctgctggaggaccacttcaaggagcacagcaccctcaaccctaagcagaaggctgctttggccagacaactgaacctgagcccaaggcaagtggaggtttggttccaaaacagaagagccagaaccaagctgaagcagacagaagtggactgcgagattctcaagcgctgctgcgagacgttaacagaggagaaccggcgtctccaccgcgagctccagcagctccgcgccctcagccacccgcacccccacccggctgcctttttcatgcccaccgccgctgccgctgcgctctccatctgcccctcctgccagcgccttgttgccaccggagcatctgccgccgccgcaaccaccgccggtgcagataataagcctaaggcgggcggcccccggcggccgagcgccacacgtgttcagccctttcaccaattctgccgcctgctgaacacgcacacatatgtatatacatgcatgcgcacacatacatatatacgtatttttctttagcgctagccacgctctatcattcatcgatggtcatctactagctagatagtaattggttcactagatggcatatattcctgtcccctccccccttaattcattagctttgttttttcacaagctaattaatgaattgatagcggcgtcgcgtgaggacgatggagcaccacgcatgcatatgattctagtagcaaaaacaagagatatatgtcttgtttaatttggtgttgcttctgcttagtatagtgcccactgctggtgctgtagctgtagctttaattagtaggtgttcctgatggatttcctcttgtattagttaactgtcagtcagggaatagtaatgatgacagcatgacaccacatacacatcccagtttatttggatgtggatccatgtatatatgcacatgccacatgacggatctgtttcaacaattaaatactatattgatttgtctcc

SEQ ID NO: 804 - protein, 186 aa, Zea mays subsp. mays
  peptide (1)..(186): Ceres Seq. ID no. 12411211
PLSSSSFSFSLSPSWTILSISFLSLHILRRAEAARDTIGKLLQQEIKLSPTQDQKKLCMEQEEVGLALGLSLGSGHHHQELKPQHPSHPCAALLEPSLSLSGPATKDDGPTAPVRRFAAVKRELQTMEGNDDEATGRGTCLLSGVVGGGYCRRRRRVQQQPEEAEAVQGAVGAAGGPLQGAQHPQP

SEQ ID NO: 805 - protein, 128 aa, Zea mays subsp. mays
  peptide (1)..(128): Ceres Seq. ID no. 12411212
MEQEEVGLALGLSLGSGHHHQELKPQHPSHPCAALLEPSLSLSGPATKDDGPTAPVRRFAAVKRELQTMEGNDDEATGRGTCLLSGVVGGGYCRRRRRVQQQPEEAEAVQGAVGAAGGPLQGAQHPQP

SEQ ID NO: 806 - DNA, 1162 bp, Zea mays subsp. mays
  misc_feature (1)..(1162): Ceres Seq. ID no. 13501279
  misc_feature (1)..(1162): Ortholog of  Ceres SEQ ID NO 13583327 as cited in SEQ ID NO 62047
acgtatacgttacgtttcgcttggtttttttttcacggaacgatccagacgcgctagccgtaggccgcgcgtagctgggcggtgtgcgctgcgccatgaagaccacttcgtcgcacgggctccacgccgcgtcggcgtcgctctgcacgccgtacctactcctcctaccgctcggcctcctcgccgtgctgctggcgctcccgagcctcggctcctcttacgcgcgctcccaaggcctcggcgtgctctgccgcagcgcggcggcaggcaccgacggcggcggcggcggtgactactcctcctccgtcgcgtcgggcgccggcgacgagaagaaggccgcggtcgccgagacaccgccgccgccgcggccggagctcagcctgctggtgggcgtgctgaccgtgccgggcccggcgggagcggcgggacatcctgcggacggcctacgcgctgcagccggcggcgcccgcgtcgcgcgtggacgtgcgcttcgtcttctgcagcgtgacggacccggtggaggcggcgctggtggcggtggaggcgcggcgccacggcgacgtgctggtgctggactgcgcggagaacatgaacgacgggaagacgcacgcgtacctgtcctccgtgccgcgcctcttcgcgtccgcgccctacgactacgtcatgaagaccgacgacgacacgtacctgcgcgtcgcggcgctggtggcggagctgcgccccaggccccgcgacgacgtctacctgggctacggcttccccgtcggcgacgaccccatgccgttcatgcacggcatgggctacgtcgtgtcctgggacgtggcgcgctgggtgtccgccaacggggacatcctgcgccacaacgacacgcacgggcccgaggacctgctcgtcggcaagtggctcaacatcggcggcaggggcaggaaccgctacgacctcaagcccaggatgtacgacctcaactggttcatggacaacttccgcccggacaccatcgccgtgcacatgctcaaggacaaccgccgatgggcggccacgttcacctacttcaacgtcaccgccaggatccacaccaacagcctgccgtgatcaaccagttatttcagttcgatttttttttccctgaggttgacgttggctgattgtgccaaggtggcgt

SEQ ID NO: 807 - protein, 349 aa, Zea mays subsp. mays
  peptide (1)..(349): Ceres Seq. ID no. 13501280
MKTTSSHGLHAASASLCTPYLLLLPLGLLAVLLALPSLGSSYARSQGLGVLCRSAAAGTDGGGGGDYSSSVASGAGDEKKAAVAETPPPPRPELSLLVGVLTVPGPAGAAGHPADGLRAAAGGARVARGRALRLLQRDGPGGGGAGGGGGAAPRRRAGAGLRGEHERREDARVPVLRAAPLRVRALRLRHEDRRRHVPARRGAGGGAAPQAPRRRLPGLRLPRRRRPHAVHARHGLRRVLGRGALGVRQRGHPAPQRHARARGPARRQVAQHRRQGQEPLRPQAQDVRPQLVHGQLPPGHHRRAHAQGQPPMGGHVHLLQRHRQDPHQQPAVINQLFQFDFFFPEVDVG

SEQ ID NO: 808 - DNA, 1384 bp, Zea mays subsp. mays
  misc_feature (1)..(1384): Ceres Seq. ID no. 12454939
  misc_feature (1)..(1384): Ortholog of  Ceres SEQ ID NO 13594655 as cited in SEQ ID NO 51843
tatattaattgtgcagcgtgccaatctaatatgagttatgttctttttggtgttcctttcaagggaaacgctcggcggcgaagctaaagcagagcttgcgctacacgcgctgcgagcagtttctgtctaaagggcaaggtctgatctcatgtgagtcatgtctggttggtgtgatacattaatcttaatcaatttttgtgattttggggatttctggtttttggttgacaattcgccagtggtgtacatgacagatttgagctccccgtggcactgctcgcccggccagccaccatcccggtcttgcgctcggcggcgtgcatggtgtgctcgtccctgacagtggctagcttctgttttcttaattgatggctagcttctgttttcttaattgatgatttgttttttccttttctgatcgtcaatagggaagagacgacgataacatggacactgttttctaaatggatcagtatttttggtatatacacatgcttttactagtagaggagtatttattttcatttgtagcagccaaggaacttgtgcattccttatgaatcatgagaagaccatgaagatgcacacaaatttgcttgacttctgaccagtaataattagcgaaagaaagaaaatccagaaccatgaatcagcttgatagcagtaacaaatttgcttgacttctgacgagtaagaaattggcagcaagttcagcaggggccagactaataaatcagcttgatagcatccttgcagcggtgccttggactttggcggttagaagaggtttataattttatatgatgaaattatgtgcatcttcagttgtttttgcctcactgctctgtaaggacatataaaattggtatttgtactttctaaggttctccttggaatggtagagttttacagggaaccttccatcatcagttgctgacatagctcgaactcgacgtttcttcttcgccagttgcggctctggataaactcgaagctgacctatccaagttcgacgacgggcccttcttcctaggccaattcagcttggcggatgtagcgtacattacgattctggaaagggttcagatatactattcccatcttaggaactacgacatcgccgaaggcaggcccaacctccaggaattcatcgaggagatgaacaagattgaagcgtatgcgcagaccaagaacgatcctctgttcttgcttgatcttgccaagaaccatcttaagattgcctgaagatgtgacaaagcagcattagtccgttgatcggtggaagaccactcgtcagtgttgagttgaatgtttgatcaataaaatacggcatgttgtaagggttgttttacgctatttataatacaatgtactgttcagttgt

SEQ ID NO: 809 - protein, 60 aa, Zea mays subsp. mays
  peptide (1)..(60): Ceres Seq. ID no. 12454940
MSGWCDTLILINFCDFGDFWFLVDNSPVVYMTDLSSPWHCSPGQPPSRSCARRRAWCARP

SEQ ID NO: 810 - protein, 31 aa, Zea mays subsp. mays
  peptide (1)..(31): Ceres Seq. ID no. 12454941
MDQYFWYIHMLLLVEEYLFSFVAAKELVHSL

SEQ ID NO: 811 - protein, 30 aa, Zea mays subsp. mays
  peptide (1)..(30): Ceres Seq. ID no. 12454942
MFFLVFLSRETLGGEAKAELALHALRAVSV

SEQ ID NO: 812 - DNA, 1748 bp, Zea mays subsp. mays
  misc_feature (1)..(1748): Ceres Seq. ID no. 12450451
  misc_feature (1)..(1748): Ortholog of  Ceres SEQ ID NO 14313963 as cited in SEQ ID NO 59547
actttggacatctattgaaactctattccatggtattgctattcaacatatatatgtatatattcgtctagctgtccaatcttcattagccccatagttttgcgcgtgggcaacggtagatgggcatcgctagcttgacgatcttgatcggtgagttgctccttccatttttcttggtggttatggaatttatctgcaatatgtcttgtgcttttgtatgtctgctatttgtgctgctatttttttttctattatgtgcactatgtctctttgtcatatacatatacagatgtgcaaactatatttttgcagaatcgtgctaggaatccaatgtctggtggctattctcagcagggatatcgccctcctcgtccccagtcaaactggggcccgccttctgtgccaccccagcagcctggctatggttatatgcagcctggggcttatcctggggcaccgccacagtatggtgcacctcagcaaccttatggtagctaccccccaacatctggtggctatcagactggatgggatcagtctcaaaaccagcaatctcatacaactccccctggtactgggtatgattattatagtcagcagcagcaacctcagcaacaatctgcccctgggacagctgcttctactgatgccactagctacaattatggtcagccttcgacgtatgcttcacagggatatgattctacctacactcagcagagtggtgggcagcaagcatatggacatgatggctacactggttaccagacccaagggcagcagcagggctactctcagcagactggttatgatcagcagggttatggcacatctgcttatggatcagctgcaaactcgacccaggatgggtccaactatggtggtcctggaggggccagtcaggcatctccagggcagcaaacatcaaacccagctgctggaagccaacctggctataccagccaaccgcccactagtgctgcagcaacttacccacctcaaggttcagctccatctggatatggcgctccaccatcccagtctggctatggcacccaaccaccacagcaaggcggatatggtcagggcgcttatgggcagccttctccacagggccagaaacctcctccattgtcaccttatggacaggctctgcctcctggttctgctcaggctggttacgggcagtatggttacagccaacctgcttacggtgcaccaccagcttaccctggtgcacccattgcaagccaccagggctatggccagcagcagtcttatggcgatgcttatggtagtgcaagctatgggcagcctccagcctactctactgaagcaacacctcctgctgcatcccaggatcactctgctgcccctgctgcggcccttggaacaacagcttcgacagctcctgaaaacagtgggggcgcccaaacatccgctgaaacttgagcttcagcagctaattgggaacaaacattttccaagaccctgccgtgtggtttcctccgcgctgttgcttaatataattacgcatctaatttagggtctacaactacaagttatttttttttctgcctgttgtttttgacaccatgacttgctgtttccttgctatattgagtagtaccttgcagttattttattgctggcatatatgtctggactagtgatatatgtgtttgtgtggttacccttgttggaccgtaatgggtaccttccggcttggtntggacanataaannccc

SEQ ID NO: 813 - protein, 442 aa, Zea mays subsp. mays
  peptide (1)..(442): Ceres Seq. ID no. 12450452
MSAICAAIFFSIMCTMSLCHIHIQMCKLYFCRIVLGIQCLVAILSRDIALLVPSQTGARLLCHPSSLAMVICSLGLILGHRHSMVHLSNLMVATPQHLVAIRLDGISLKTSNLIQLPLVLGMIIIVSSSNLSNNLPLGQLLLLMPLATIMVSLRRMLHRDMILPTLSRVVGSKHMDMMATLVTRPKGSSRATLSRLVMISRVMAHLLMDQLQTRPRMGPTMVVLEGPVRHLQGSKHQTQLLEANLAIPANRPLVLQQLTHLKVQLHLDMALHHPSLAMAPNHHSKADMVRALMGSLLHRARNLLHCHLMDRLCLLVLLRLVTGSMVTANLLTVHHQLTLVHPLQATRAMASSSLMAMLMVVQAMGSLQPTLLKQHLLLHPRITLLPLLRPLEQQLRQLLKTVGAPKHPLKLELQQLIGNKHFPRPCRVVSSALLLNIITHLI

SEQ ID NO: 814 - protein, 430 aa, Zea mays subsp. mays
  peptide (1)..(430): Ceres Seq. ID no. 12450453
MCTMSLCHIHIQMCKLYFCRIVLGIQCLVAILSRDIALLVPSQTGARLLCHPSSLAMVICSLGLILGHRHSMVHLSNLMVATPQHLVAIRLDGISLKTSNLIQLPLVLGMIIIVSSSNLSNNLPLGQLLLLMPLATIMVSLRRMLHRDMILPTLSRVVGSKHMDMMATLVTRPKGSSRATLSRLVMISRVMAHLLMDQLQTRPRMGPTMVVLEGPVRHLQGSKHQTQLLEANLAIPANRPLVLQQLTHLKVQLHLDMALHHPSLAMAPNHHSKADMVRALMGSLLHRARNLLHCHLMDRLCLLVLLRLVTGSMVTANLLTVHHQLTLVHPLQATRAMASSSLMAMLMVVQAMGSLQPTLLKQHLLLHPRITLLPLLRPLEQQLRQLLKTVGAPKHPLKLELQQLIGNKHFPRPCRVVSSALLLNIITHLI

SEQ ID NO: 815 - protein, 427 aa, Zea mays subsp. mays
  peptide (1)..(427): Ceres Seq. ID no. 12450454
MSLCHIHIQMCKLYFCRIVLGIQCLVAILSRDIALLVPSQTGARLLCHPSSLAMVICSLGLILGHRHSMVHLSNLMVATPQHLVAIRLDGISLKTSNLIQLPLVLGMIIIVSSSNLSNNLPLGQLLLLMPLATIMVSLRRMLHRDMILPTLSRVVGSKHMDMMATLVTRPKGSSRATLSRLVMISRVMAHLLMDQLQTRPRMGPTMVVLEGPVRHLQGSKHQTQLLEANLAIPANRPLVLQQLTHLKVQLHLDMALHHPSLAMAPNHHSKADMVRALMGSLLHRARNLLHCHLMDRLCLLVLLRLVTGSMVTANLLTVHHQLTLVHPLQATRAMASSSLMAMLMVVQAMGSLQPTLLKQHLLLHPRITLLPLLRPLEQQLRQLLKTVGAPKHPLKLELQQLIGNKHFPRPCRVVSSALLLNIITHLI

SEQ ID NO: 816 - DNA, 1353 bp, Zea mays subsp. mays
  misc_feature (1)..(1353): Ceres Seq. ID no. 12566077
  misc_feature (1)..(1353): Ortholog of  Ceres SEQ ID NO 13581686 as cited in SEQ ID NO 57695
aaaaaatccggccgtccgcgttcttatccaccctaattaaaaatgacaaaaccaatacatttattgaaagaaaatagacgagtctcatagtagccggctaagagtggcgtaatggtgggcatggtagcggggtggtatacatgtcgaagaagatctggaggcgggaatcgaagctgttgtccgtgatctgctgccagatctcgcgcagctcctccttgttaattttgtcaacctgcacctgacggcggcggctcaatgtgtcaaacagctcgagcgcgaactctttcgattccgtcatccctgcacgtgtacatgcagctccccaatgtttcaacgacgaagggaaatggaggagaaagccgaggggaggcagcgcggcgtggtggtaccaatgcattccgcgaagtcggagcgggagaggaaaccctcggaagcgaggcggtcgaagttggcctgcacctccatccaggcgttgttggccttgttgctgctgatgaagcggaggccgcggagcgccttgtgcgcgccggagcgcgtgcggtcgagctgcgcgcgctgccgccgcgcggcgcgggcagcgagggccgactcgatgcctgacgacggctgctgctgctgcccctgcccttccgcgcggctttgggtgcggccgaagcgcttggtgaggtcctgcgagaactggcgcgcgatggacatggcctccgccttgagctcctgcgagaactgcaggagccggtgcgacgaggtccgcctgatcgncggcgacaaggaccgcgacgacgacgacgcgccgccggcatggtccccgcgcgcgcccagcggcagcgcggtggcgccccccgccgcggccggctcgacgctccgcagaatgatggtgtcgtcctcctgcaggtcgagcgtgacctcgaccagctcctccccgtcgtcggagctgcgttcggagccccgcggcgaggagcccgtgntgagtgaccgcggngtngtccccgccgagccgctccatcgctggtggcccggggcggcggcgcccctcatcgccgacccaatcanaagccgctttccagcgcggctcccggaacagtccaatgctcgaanaggagacgcgctcgacgactggatggatcgattttgtgggtggccttggaatctctggggaaaggcgcccgngacgcgtccgagcgggagctcaagccgatgaaagaggaagcgcaacgagacagcaatatatgaggatgagaaggcgagtacggtgggccgggccacgcaaatgcacaactctatttaattatccacattgtcatctactaatatgtaagcagactctacatgcatatgtgcaatcaattttccacc

SEQ ID NO: 817 - protein, 290 aa, Zea mays subsp. mays
  peptide (1)..(290): Ceres Seq. ID no. 12566078
  misc_feature (145)..(145): Xaa is any aa, unknown or other
  misc_feature (214)..(214): Xaa is any aa, unknown or other
  misc_feature (218)..(218): Xaa is any aa, unknown or other
  misc_feature (219)..(219): Xaa is any aa, unknown or other
  misc_feature (242)..(242): Xaa is any aa, unknown or other
  misc_feature (257)..(257): Xaa is any aa, unknown or other
  misc_feature (281)..(281): Xaa is any aa, unknown or other
MFQRRREMEEKAEGRQRGVVVPMHSAKSERERKPSEARRSKLACTSIQALLALLLLMKRRPRSALCAPERVRSSCARCRRAARAARADSMPDDGCCCCPCPSARLWVRPKRLVRSCENWRAMDMASALSSCENCRSRCDEVRLIXGDKDRDDDDAPPAWSPRAPSGSAVAPPAAAGSTLRRMMVSSSCRSSVTSTSSSPSSELRSEPRGEEPVXSDRXXVPAEPLHRWWPGAAAPLIADPIXSRFPARLPEQSNARXGDALDDWMDRFCGWPWNLWGKAPXTRPSGSSSR

SEQ ID NO: 818 - protein, 283 aa, Zea mays subsp. mays
  peptide (1)..(283): Ceres Seq. ID no. 12566079
  misc_feature (138)..(138): Xaa is any aa, unknown or other
  misc_feature (207)..(207): Xaa is any aa, unknown or other
  misc_feature (211)..(211): Xaa is any aa, unknown or other
  misc_feature (212)..(212): Xaa is any aa, unknown or other
  misc_feature (235)..(235): Xaa is any aa, unknown or other
  misc_feature (250)..(250): Xaa is any aa, unknown or other
  misc_feature (274)..(274): Xaa is any aa, unknown or other
MEEKAEGRQRGVVVPMHSAKSERERKPSEARRSKLACTSIQALLALLLLMKRRPRSALCAPERVRSSCARCRRAARAARADSMPDDGCCCCPCPSARLWVRPKRLVRSCENWRAMDMASALSSCENCRSRCDEVRLIXGDKDRDDDDAPPAWSPRAPSGSAVAPPAAAGSTLRRMMVSSSCRSSVTSTSSSPSSELRSEPRGEEPVXSDRXXVPAEPLHRWWPGAAAPLIADPIXSRFPARLPEQSNARXGDALDDWMDRFCGWPWNLWGKAPXTRPSGSSSR

SEQ ID NO: 819 - protein, 268 aa, Zea mays subsp. mays
  peptide (1)..(268): Ceres Seq. ID no. 12566080
  misc_feature (123)..(123): Xaa is any aa, unknown or other
  misc_feature (192)..(192): Xaa is any aa, unknown or other
  misc_feature (196)..(196): Xaa is any aa, unknown or other
  misc_feature (197)..(197): Xaa is any aa, unknown or other
  misc_feature (220)..(220): Xaa is any aa, unknown or other
  misc_feature (235)..(235): Xaa is any aa, unknown or other
  misc_feature (259)..(259): Xaa is any aa, unknown or other
MHSAKSERERKPSEARRSKLACTSIQALLALLLLMKRRPRSALCAPERVRSSCARCRRAARAARADSMPDDGCCCCPCPSARLWVRPKRLVRSCENWRAMDMASALSSCENCRSRCDEVRLIXGDKDRDDDDAPPAWSPRAPSGSAVAPPAAAGSTLRRMMVSSSCRSSVTSTSSSPSSELRSEPRGEEPVXSDRXXVPAEPLHRWWPGAAAPLIADPIXSRFPARLPEQSNARXGDALDDWMDRFCGWPWNLWGKAPXTRPSGSSSR

SEQ ID NO: 820 - DNA, 437 bp, Zea mays subsp. mays
  misc_feature (1)..(437): Ceres Seq. ID no. 3010869
  misc_feature (1)..(437): Ortholog of  Ceres SEQ ID NO 13655896 as cited in SEQ ID NO 64970
  misc_feature (1)..(437): Ortholog of  Ceres SEQ ID NO 12627322 as cited in SEQ ID NO 67162
atagaatctccggttgctagcgtaaagcgcatccgtacatataagagaacaagagamcttctgctattgcttaagtcgttcatttttttacatgttgtaggggcttagcatgggtaggagtgtgcgctcgcgacggcggcttgcacgggaatcactggaccaagataaagccggcggtgaaccagatcgagacgcacccttacttccagcgcgactctcttgtcaagttctgccagaagcacgggatctgcgtgaccgcgcacaccccgctgggtggctccaccgccaacgctgagtggttcgggarggtgtcgtgcctggacgancctgtyatcaaragcttgactgagaagttcgacaagacsccggtkcarctcgtcctccgctggggtctgtarcgggacacggtggtgatccccaagacctctaargtggag

SEQ ID NO: 821 - protein, 61 aa, Zea mays subsp. mays
  peptide (1)..(61): Ceres Seq. ID no. 3010870
MGRSVRSRRRLARESLDQDKAGGEPDRDAPLLPARLSCQVLPEARDLRDRAHPAGWLHRQR

SEQ ID NO: 822 - protein, 35 aa, Zea mays subsp. mays
  peptide (1)..(35): Ceres Seq. ID no. 3010871
  misc_feature (19)..(19): Xaa is any aa, unknown or other
IESPVASVKRIRTYKRTRXLLLLLKSFIFLHVVGA

SEQ ID NO: 823 - DNA, 551 bp, Zea mays subsp. mays
  misc_feature (1)..(551): Ceres Seq. ID no. 12467704
  misc_feature (1)..(551): Ortholog of  Ceres SEQ ID NO 15178498 as cited in SEQ ID NO 0
acttattacaaccgaccaacgcgctttgtaacgcctccgctgcaatcagcccccgcggcgagcttgccctgcccctgaccctgagtgctagttctcgccgttacgtaaggcttcttggccttgcgtcctccgtctttcgttgctgatacatcgaggtattaaagaagctgcctgattccgggtagcagaggtcgccgccgcctgcagcaatggccgacttctcctggctcacggtgcttggtttcctattcctcacattcaactcaggcatggcgatttatcggtccaacggtggggaagacgagaaacggagtcggttacaagggtatctcccgtgaccttgcacccattcagaggctaagcgtgatcgtggaaggagcagagctagtgagtgatccattcattgatcagtattcagtagtactagtaaactagtacggagtagtttgatcaagccggcaatttagtttacctgctccccttgttccgtttganaggagatcggtgtactgtgtacaatatgttttcaataaacttttgattntttggtt

SEQ ID NO: 824 - protein, 47 aa, Zea mays subsp. mays
  peptide (1)..(47): Ceres Seq. ID no. 12467705
LLQPTNALCNASAAISPRGELALPLTLSASSRRYVRLLGLASSVFRC

SEQ ID NO: 825 - protein, 42 aa, Zea mays subsp. mays
  peptide (1)..(42): Ceres Seq. ID no. 12467706
MADFSWLTVLGFLFLTFNSGMAIYRSNGGEDEKRSRLQGYLP

SEQ ID NO: 826 - DNA, 408 bp, Zea mays subsp. mays
  misc_feature (1)..(408): Ceres Seq. ID no. 3477294
  misc_feature (1)..(408): Ortholog of  Ceres SEQ ID NO 14305215 as cited in SEQ ID NO 0
gaaccagtccccggggctttcrgtactcccttggcagaaacatgcgatgaagttggatcggcactggccaaaggaaggccagttacctatcacaaaaatgaaggcaatattgagagccagaaatcacccttggtggcaaacagcactaatgataaagaacacaaactaggaaagtcagaaaagacggtttgggaaaaaaatgacgaacccggtgatgaggtcgatgttcagcaaaatggctggggaacatggaaacaaaatagtacgtcagcttggtcttatagagcccttaggagcagcgcccttggcccgacgatggcacttctacgcgggaagaacaaccagaggggtaaaccaccctatcgaaagaaggccaagtaattgcctacstgtttagtgtttaagttc

SEQ ID NO: 827 - protein, 126 aa, Zea mays subsp. mays
  peptide (1)..(126): Ceres Seq. ID no. 3477295
  misc_feature (8)..(8): Xaa is any aa, unknown or other
EPVPGAFXTPLAETCDEVGSALAKGRPVTYHKNEGNIESQKSPLVANSTNDKEHKLGKSEKTVWEKNDEPGDEVDVQQNGWGTWKQNSTSAWSYRALRSSALGPTMALLRGKNNQRGKPPYRKKAK

SEQ ID NO: 828 - protein, 65 aa, Zea mays subsp. mays
  peptide (1)..(65): Ceres Seq. ID no. 3477296
  misc_feature (64)..(64): Xaa is any aa, unknown or other
MTNPVMRSMFSKMAGEHGNKIVRQLGLIEPLGAAPLARRWHFYAGRTTRGVNHPIERRPSNCLXV

SEQ ID NO: 829 - DNA, 791 bp, Zea mays subsp. mays
  misc_feature (1)..(791): Ceres Seq. ID no. 12468710
  misc_feature (1)..(791): Ortholog of  Ceres SEQ ID NO 13599656 as cited in SEQ ID NO 527
taaagcacatgcgaaaggcgttcattcactctgtaaggcgttcttgttcttcacccaacgcttctcgcacgggggtcttctattgaccattgaagaaaaacatttgactggagatagcatctggaatatatgaatctagtataacgaactaggtctgaaaatctgggcaattccagattcgattctcatgtgagatgataaaaacgtcataattatcctgcgtactaaaaaatattcgctagttgagtcgttccggcatatacaaaattattagctacagttgttcctgcatgcgtgtaatgtccttcggtgaacttgtctgtcattatcatttaaaaacgtatctagatgcattacggaagatttttagtttcctttgttatatttgagaagttatatattgtatatacagagagatgcagctgtgtattatttgctgtagcttcgattgcgagacgcatggttgcagtcattttattgtagttagtttatatgatacgtcgttgtcaccgcatgaagattaactgctgtgccatatgaagacctcctgcctcatcacggtgtttgtatataagatcaactgcagtgcctacacggtggacggagtatttgtatgatgtgaaggtcactattcagcatcgtcagtatgaaatggctatggccttcaaagctttctttcttggtcaccggacagggaagaaatattctgctcaagctcacaattagatacaagacataactcagataagagcttgttcaacttgcactatagttcatttgagtatttacct

SEQ ID NO: 830 - protein, 44 aa, Zea mays subsp. mays
  peptide (1)..(44): Ceres Seq. ID no. 12468711
MHYGRFLVSFVIFEKLYIVYTERCSCVLFAVASIARRMVAVILL

SEQ ID NO: 831 - protein, 43 aa, Zea mays subsp. mays
  peptide (1)..(43): Ceres Seq. ID no. 12468712
KAHAKGVHSLCKAFLFFTQRFSHGGLLLTIEEKHLTGDSIWNI

SEQ ID NO: 832 - protein, 35 aa, Zea mays subsp. mays
  peptide (1)..(35): Ceres Seq. ID no. 12468713
MQLCIICCSFDCETHGCSHFIVVSLYDTSLSPHED

SEQ ID NO: 833 - DNA, 233 bp, Zea mays subsp. mays
  misc_feature (1)..(233): Ceres Seq. ID no. 15169985
  misc_feature (1)..(233): Ortholog of  Ceres SEQ ID NO 12388689 as cited in SEQ ID NO 0
acgaggcttccaagaaggccaagtagagggcgaagttcttctccacatggctttgctttagtaagtctgaagatcgaataacaggaccatatctgaagatcgaataacggatcatataaatgaggtactcggaaaatgttctgaaatccttacgaacagaacgttgccttcatgtttacactgtactcatgagtcacagtgatatggagatggcatagcctactattggaagt

SEQ ID NO: 834 - protein, 32 aa, Zea mays subsp. mays
  peptide (1)..(32): Ceres Seq. ID no. 15169986
MRYSENVLKSLRTERCLHVYTVLMSHSDMEMA

SEQ ID NO: 835 - DNA, 483 bp, Zea mays subsp. mays
  misc_feature (1)..(483): Ceres Seq. ID no. 15169987
  misc_feature (1)..(483): Ortholog of  Ceres SEQ ID NO 15179424 as cited in SEQ ID NO 1138
atctgaacagatgcaatctctgcattcagacaacaagggtgatgagatgaaagatgagaacgaaaccatttatatgcagaacagcaaaggtcggactcagactctatccaatgctgatgcatcagtactttccactaccgaggctgagaacacatccatcaagacttcccctgaaattgagctcaatggggatgatgtctgtattacaagcagcatagggaagaccaggaagtatagagcaaaattcactttgtttctgagcgtgatcgtgatctttttagcaatcatcaccatgctcatcaggatagagaatgatgatgattcagcgtaccttgtccccacttaatattttgtatgcttcattgctgtctgtttaaattcctatttttattttatcactatagagtggtttgtgttttgaacaattttgcagtcatctatccatgaatgacagcaaataattaaattagaattttcatgctc

SEQ ID NO: 836 - protein, 114 aa, Zea mays subsp. mays
  peptide (1)..(114): Ceres Seq. ID no. 15169988
SEQMQSLHSDNKGDEMKDENETIYMQNSKGRTQTLSNADASVLSTTEAENTSIKTSPEIELNGDDVCITSSIGKTRKYRAKFTLFLSVIVIFLAIITMLIRIENDDDSAYLVPT

SEQ ID NO: 837 - protein, 111 aa, Zea mays subsp. mays
  peptide (1)..(111): Ceres Seq. ID no. 15169989
MQSLHSDNKGDEMKDENETIYMQNSKGRTQTLSNADASVLSTTEAENTSIKTSPEIELNGDDVCITSSIGKTRKYRAKFTLFLSVIVIFLAIITMLIRIENDDDSAYLVPT

SEQ ID NO: 838 - protein, 99 aa, Zea mays subsp. mays
  peptide (1)..(99): Ceres Seq. ID no. 15169990
MKDENETIYMQNSKGRTQTLSNADASVLSTTEAENTSIKTSPEIELNGDDVCITSSIGKTRKYRAKFTLFLSVIVIFLAIITMLIRIENDDDSAYLVPT

SEQ ID NO: 839 - DNA, 547 bp, Zea mays subsp. mays
  misc_feature (1)..(547): Ceres Seq. ID no. 3624700
  misc_feature (1)..(547): Ortholog of  Ceres SEQ ID NO 13599971 as cited in SEQ ID NO 0
attttcatcgactgttcgggtgccagcatgtgtgaggtgcagaaagtggaagcagcttttagacatgcagccgaggttcatcctaaccatccaagtattgaacttatcagaacaaacaccgacggaatggcctcctcctcatctgaccatcccaacacagagcccaggaattgatggctcggtttgtcagatccttccaacccaggagcaggtaaatgtgagttgcttaagtaccaaagagagaggtcctgttcagcaagatgattagaagcattggcaattggcatggcttgttaattagattcgtggttcttagtctaaaatcacattgaagagggagacggacccaagtgatgcagttcatgtgttatctgtatcagtctctgtttttataagctgtcatatattttctcgaaactatcttgtgttgattttgtgtgaagtgtacttttaatggcacgggccattgtgtatttgcttgaaagataaggatggkattatctttgtatttgaactctaaatgcttaaantgaagtgatcattctgg

SEQ ID NO: 840 - protein, 88 aa, Zea mays subsp. mays
  peptide (1)..(88): Ceres Seq. ID no. 3624701
FSSTVRVPACVRCRKWKQLLDMQPRFILTIQVLNLSEQTPTEWPPPHLTIPTQSPGIDGSVCQILPTQEQVNVSCLSTKERGPVQQDD

SEQ ID NO: 841 - protein, 67 aa, Zea mays subsp. mays
  peptide (1)..(67): Ceres Seq. ID no. 3624702
MQPRFILTIQVLNLSEQTPTEWPPPHLTIPTQSPGIDGSVCQILPTQEQVNVSCLSTKERGPVQQDD

SEQ ID NO: 842 - protein, 57 aa, Zea mays subsp. mays
  peptide (1)..(57): Ceres Seq. ID no. 3624703
IFIDCSGASMCEVQKVEAAFRHAAEVHPNHPSIELIRTNTDGMASSSSDHPNTEPRN

SEQ ID NO: 843 - DNA, 426 bp, Zea mays subsp. mays
  misc_feature (1)..(426): Ceres Seq. ID no. 15170030
  misc_feature (1)..(426): Ortholog of  Ceres SEQ ID NO 12633565 as cited in SEQ ID NO 1190
tcatggtggacacggtactttgtccagaccggcttgacagagaacgaagggccgctgaagaaattcgaagaggctacatccaagaacaaatacaaaccaggttgtcagatcttccacctgagttcgccaaggtgatgcgcatccatagcaccttgaattgttgtcacaccccctgccctcctccggttggcttgctcattgttcgtgtggaggaaatcgtcgcaaaaaaagccatcaggaataggttagcttatgtaaagaggctccgacacttgttgctagaaattcactctggaaattaaattgtgtccccaatgattgcaaactggagccccgctgggatatatatgttagaactttcacgctgttgtaccgctgtgctatccatgtattgagcagtttgaaatgtaaagctcttgatgatcc

SEQ ID NO: 844 - protein, 99 aa, Zea mays subsp. mays
  peptide (1)..(99): Ceres Seq. ID no. 15170031
MVDTVLCPDRLDRERRAAEEIRRGYIQEQIQTRLSDLPPEFAKVMRIHSTLNCCHTPCPPPVGLLIVRVEEIVAKKAIRNRLAYVKRLRHLLLEIHSGN

SEQ ID NO: 845 - protein, 55 aa, Zea mays subsp. mays
  peptide (1)..(55): Ceres Seq. ID no. 15170032
MRIHSTLNCCHTPCPPPVGLLIVRVEEIVAKKAIRNRLAYVKRLRHLLLEIHSGN

SEQ ID NO: 846 - DNA, 310 bp, Zea mays subsp. mays
  misc_feature (1)..(310): Ceres Seq. ID no. 3623316
  misc_feature (1)..(310): Ortholog of  Ceres SEQ ID NO 15224539 as cited in SEQ ID NO 0
aaagctctgatagtctgatgtgagcgtgaatgtgaatggtttggcttttgtgaatacagacagtgaaagtgtaaattccttgttccactgggtgggatgggagatatggtgttgtacagcaatttatagttgttggtcagtaggcagttcaggatgtgaagaattctggtgagctgggcgaatatggatgctctttcaccaggatttagtcaggctcgatggatggatgctaaaacgcgtctggaaatgtaaattgtggcaccttgtttgattttcgaactgaaataatgtaaataattgattgcaagtt

SEQ ID NO: 847 - DNA, 548 bp, Zea mays subsp. mays
  misc_feature (1)..(548): Ceres Seq. ID no. 12589511
  misc_feature (1)..(548): Ortholog of  Ceres SEQ ID NO 15225023 as cited in SEQ ID NO 561
tctatctctctttttattgctattgtgacttgaaagatgttagaacaggtattctacatttatgttcttctcatccggattgccatatgttttcttcagttctgcacaactagttgctctgcaggatagtgtgtatcggctttgtgctaacttatatgcattttgtgccgtaagtgtttcctgctatatagactgaaggaaagtgggcagttgggttagacttgtatcctgtcttttccaacaatcattttcctctcatgtgacataatacatttgttcttggaaactagtttttgaattgctgtcttagcatttacatgtttagctgctttattatactgtatgcatccaggggtatggaatatggtctgttgcatgtgctttttcctggtatgcaaagcatgtagtttgaattccatgggttgtgttatatgtttcgctatctaagtcagcttcatctgaaaatgatwagcagatcagtttnaattggaacatgccaagctgaagcgatactcacctgcaaggagcgtyttctctgtgtactgcgt

SEQ ID NO: 848 - protein, 44 aa, Zea mays subsp. mays
  peptide (1)..(44): Ceres Seq. ID no. 12589512
MFFSSGLPYVFFSSAQLVALQDSVYRLCANLYAFCAVSVSCYID

SEQ ID NO: 849 - protein, 39 aa, Zea mays subsp. mays
  peptide (1)..(39): Ceres Seq. ID no. 12589513
  misc_feature (13)..(13): Xaa is any aa, unknown or other
  misc_feature (18)..(18): Xaa is any aa, unknown or other
  misc_feature (34)..(34): Xaa is any aa, unknown or other
MFRYLSQLHLKMXSRSVXIGTCQAEAILTCKERXLCVLR

SEQ ID NO: 850 - protein, 36 aa, Zea mays subsp. mays
  peptide (1)..(36): Ceres Seq. ID no. 12589514
YLSFYCYCDLKDVRTGILHLCSSHPDCHMFSSVLHN

SEQ ID NO: 851 - DNA, 567 bp, Zea mays subsp. mays
  misc_feature (1)..(567): Ceres Seq. ID no. 12469610
  misc_feature (1)..(567): Ortholog of  Ceres SEQ ID NO 14302536 as cited in SEQ ID NO 56675
  misc_feature (1)..(567): Ortholog of  Ceres SEQ ID NO 15172618 as cited in SEQ ID NO 61732
atatgatgacacatgtacgagctgcatcgatcagaatcctcagaccctggtgacccccttgggctcgccggccgcgccgccgacgccgtagtcgtggtcccggtagccaccgctgccgccgaagaggcccgtgtggagcatgagcacgtagaggagctgcgtgaaggcgaggatgatgacgaaggcctccagcacgcgcaggcgccagccgcggtgtccgccgatgtggatctccttgcaggccagcccgaaggcgagcgccgtgatggcccaggcgatgagcgacgacgcggcgttggtggccaggctgtcgtggcgccaggcgcgcacgtggtgcacgcccgccagcttggacgccgcgcccaccacgccggccaggatggcgaacaccaggaagtagaacgtcgcgccgttgccggccacgcctgcgtgcaatgcaacgcaatgcgcatcagaggcgcgccatgcatatcgatgcatgagtatatgcatgatgcgtgattactactggcctttcttacgtaccggggtagttggtctgcccgttgatgaagtggttcaggttcc

SEQ ID NO: 852 - protein, 162 aa, Zea mays subsp. mays
  peptide (1)..(162): Ceres Seq. ID no. 12469611
MYELHRSESSDPGDPLGLAGRAADAVVVVPVATAAAEEARVEHEHVEELREGEDDDEGLQHAQAPAAVSADVDLLAGQPEGERRDGPGDERRRGVGGQAVVAPGAHVVHARQLGRRAHHAGQDGEHQEVERRAVAGHACVQCNAMRIRGAPCISMHEYMHDA

SEQ ID NO: 853 - DNA, 548 bp, Zea mays subsp. mays
  misc_feature (1)..(548): Ceres Seq. ID no. 12469817
  misc_feature (1)..(548): Ortholog of  Ceres SEQ ID NO 12638082 as cited in SEQ ID NO 369
agtgaaggattcacctggccttcggattctagccctagaccagtgtaaaagtgtggaagtccttgtgctccagttgatgccagtctcttcccagccactaggtttgctctgcacaagtgttggcacaccatcggtctgccagtagtgaccacgccggtcagtttggccatgtcgccgtggccaagacaactcagcaagagctccgagcagaaggagtgtaaattcaagacgaagtggttgtggaagaggagtttgctccagtgcctattcagcaagtggatggagctatctaactggttattgggtagaaaggtcttaagcctcttcactgcaataaaggtgatgaggagtactctatgtgttcgtgaggctggagggcgctttcagttntagaggaggattagttaggcttgtgtataagctttggaggggtcctaccttcctgctaatgtagtaagttatgcactttgagtatatcaggacttgtaataaatgtaactcttcctatgtaataaacttcagttttagaaatgaaaagaatgttttgt

SEQ ID NO: 854 - protein, 74 aa, Zea mays subsp. mays
  peptide (1)..(74): Ceres Seq. ID no. 12469818
  misc_feature (74)..(74): Xaa is any aa, unknown or other
MSPWPRQLSKSSEQKECKFKTKWLWKRSLLQCLFSKWMELSNWLLGRKVLSLFTAIKVMRSTLCVREAGGRFQX

SEQ ID NO: 855 - protein, 47 aa, Zea mays subsp. mays
  peptide (1)..(47): Ceres Seq. ID no. 12469819
VKDSPGLRILALDQCKSVEVLVLQLMPVSSQPLGLLCTSVGTPSVCQ

SEQ ID NO: 856 - protein, 37 aa, Zea mays subsp. mays
  peptide (1)..(37): Ceres Seq. ID no. 12469820
  misc_feature (37)..(37): Xaa is any aa, unknown or other
MELSNWLLGRKVLSLFTAIKVMRSTLCVREAGGRFQX

SEQ ID NO: 857 - DNA, 633 bp, Zea mays subsp. mays
  misc_feature (1)..(633): Ceres Seq. ID no. 12469383
  misc_feature (1)..(633): Ortholog of  Ceres SEQ ID NO 12638082 as cited in SEQ ID NO 369
acataatcagtgatgcctgcccatatatatacaaccctttggttgggttcagtgaaggtttcctccctgctcacgaattctgtccaaagataactgaagggtgttgtggcgcatgtgttcctgctagtattaatcttctccccagtccctagatcgatttgcttaagctggtatgtgccaccccctgtgctggtgaccacgcgtgcagttctcccacctcgccatggctcggacgtccttaggagttgctggcccgtatgaagcttgttccgtaatcatctcagagctcccaaaataaagagcgaagattcaagatgaagtggttgctaaagaggactctactccaatgcctgctcatcaagtggatggagccatctaactggggtttaatagagggatttagacctccgtctccgcaacaaaggtgttgaggagtactcaaagtgattcggaggctggacggcatttccagtactgggggaggattagttaggcttgtgtataagctttggagggttcctaccttcctgctattgtaataagttatgcactttatatatatcaggacttgtaataaatgtaactcttcctatgtaataaccttcatttttagaaatgaaaacaatgttttgt

SEQ ID NO: 858 - protein, 49 aa, Zea mays subsp. mays
  peptide (1)..(49): Ceres Seq. ID no. 12469384
IISDACPYIYNPLVGFSEGFLPAHEFCPKITEGCCGACVPASINLLPSP

SEQ ID NO: 859 - protein, 38 aa, Zea mays subsp. mays
  peptide (1)..(38): Ceres Seq. ID no. 12469385
MKWLLKRTLLQCLLIKWMEPSNWGLIEGFRPPSPQQRC

SEQ ID NO: 860 - DNA, 819 bp, Zea mays subsp. mays
  misc_feature (1)..(819): Ceres Seq. ID no. 12469329
  misc_feature (1)..(819): Ortholog of  Ceres SEQ ID NO 13596128 as cited in SEQ ID NO 67831
  misc_feature (1)..(819): Ortholog of  Ceres SEQ ID NO 12589186 as cited in SEQ ID NO 0
agatcggagctagcaccggcgacctcgtaacgaactcagcgcgccaaggaaatctcgcgtggtcgttacgtgccgagctcgcctcctcgcgcctatataacctggccatctgttcctcctccttgtctcatgaggtcgcgatcgaagccaccatctaccgggagcagagggtgtcgccgccgatgaacttgcgatgggccaacgcagggaccccggcgtgctgctcggggggttttccggttccgagggtcgagaagggtgtcttcatgaagccgatgcagtggagcgccctgtggtggcttgattcctcaccggacttggtgtccgccgcggaaccgcgctccgccccagtaagctcctgaagccgttctggctggcgcactggacagagggcgacgcgcagaaggctcaggcggaagatgccaagcagaagctggcgctcctggaggcgcagctcgacgggaggaggttnttcgggggcgacaccatcggctacgtcgacatcgcagcctgcgtgctagctccttggctcagcgtcgtagaggaggtgactggagtggccgtggttgacgaaggtgagttccctgctntgcgccgttggtccagagagtacagctcctgcgaagctntcaagcagtgcgtcccggacagggaccagctcgtcgccttctatactgaaaggaaggaggcgtacaaagtgttcgctaatgcatggttgcagcagtagtttggttttgtgtgtggaataataatgtatggatcacagattgtctgtgctgaaataacagtaatgagcctagctagataagtaaataacct

SEQ ID NO: 861 - protein, 119 aa, Zea mays subsp. mays
  peptide (1)..(119): Ceres Seq. ID no. 12469330
IGASTGDLVTNSARQGNLAWSLRAELASSRLYNLAICSSSLSHEVAIEATIYREQRVSPPMNLRWANAGTPACCSGGFPVPRVEKGVFMKPMQWSALWWLDSSPDLVSAAEPRSAPVSS

SEQ ID NO: 862 - protein, 59 aa, Zea mays subsp. mays
  peptide (1)..(59): Ceres Seq. ID no. 12469331
MNLRWANAGTPACCSGGFPVPRVEKGVFMKPMQWSALWWLDSSPDLVSAAEPRSAPVSS

SEQ ID NO: 863 - DNA, 338 bp, Zea mays subsp. mays
  misc_feature (1)..(338): Ceres Seq. ID no. 11028919
  misc_feature (1)..(338): Ortholog of  Ceres SEQ ID NO 13600014 as cited in SEQ ID NO 593
ttcgaccgacagtgttggaggtgtgattgtctcgccagttggtgagggcaatcgcaggctgagcagtatggtcaacttggttgccgtgctcaacacagagttggaccatgcccttgacaagttgggcaaggttcgggcgaagattgctgaattgtgtgctgaatgcgcggcacaccactatcttgatggnggttctcccgcccctgtcgggattcagcacccttaccgttcaccgccccatggtcgcttcgattatggtaccccagactgcaggacccgcatagatttaggtccatagatcgatgtantcggagtctgtaataatgcttaatttagtg

SEQ ID NO: 864 - protein, 98 aa, Zea mays subsp. mays
  peptide (1)..(98): Ceres Seq. ID no. 11028920
  misc_feature (63)..(63): Xaa is any aa, unknown or other
STDSVGGVIVSPVGEGNRRLSSMVNLVAVLNTELDHALDKLGKVRAKIAELCAECAAHHYLDXGSPAPVGIQHPYRSPPHGRFDYGTPDCRTRIDLGP

SEQ ID NO: 865 - protein, 76 aa, Zea mays subsp. mays
  peptide (1)..(76): Ceres Seq. ID no. 11028921
  misc_feature (41)..(41): Xaa is any aa, unknown or other
MVNLVAVLNTELDHALDKLGKVRAKIAELCAECAAHHYLDXGSPAPVGIQHPYRSPPHGRFDYGTPDCRTRIDLGP

SEQ ID NO: 866 - protein, 58 aa, Zea mays subsp. mays
  peptide (1)..(58): Ceres Seq. ID no. 11028922
  misc_feature (28)..(28): Xaa is any aa, unknown or other
MPLTSWARFGRRLLNCVLNARHTTILMXVLPPLSGFSTLTVHRPMVASIMVPQTAGPA

SEQ ID NO: 867 - DNA, 471 bp, Zea mays subsp. mays
  misc_feature (1)..(471): Ceres Seq. ID no. 13589174
  misc_feature (1)..(471): Ortholog of  Ceres SEQ ID NO 13600184 as cited in SEQ ID NO 0
ggccaccgtcaccgccgtcgtcccgtccacggccgagcccgtggatccgtccaccgggttcgagatcaagttcaccgtctgatccccccgtcccgcgacaggttcgcgtctcgccgcgcgttcttggacggtctattcgtgcactactactgcgaatctgcgattaaagatcagaggcgacatctaatgtaccgtagtctgtttacctgaaaagctccgctatctgcttgggttggaattcatgccagattgtgggtgcaaacctgtttccttactacctagtgtccaagtcggaatattaataagctatgccaggattcagatcgaaatatttctgtctctgagagatgtgttgcgtgacaacttttcgaagactgttgcctgaacaatatctgtgtgtttatccctagactctaatgtacaaacagagtcttatacagtactatgcattaacgtcaagtttcagagttc

SEQ ID NO: 868 - protein, 69 aa, Zea mays subsp. mays
  peptide (1)..(69): Ceres Seq. ID no. 13589175
GHRHRRRPVHGRARGSVHRVRDQVHRLIPPSRDRFASRRAFLDGLFVHYYCESAIKDQRRHLMYRSLFT

SEQ ID NO: 869 - protein, 54 aa, Zea mays subsp. mays
  peptide (1)..(54): Ceres Seq. ID no. 13589176
PPSPPSSRPRPSPWIRPPGSRSSSPSDPPVPRQVRVSPRVLGRSIRALLLRICD

SEQ ID NO: 870 - protein, 47 aa, Zea mays subsp. mays
  peptide (1)..(47): Ceres Seq. ID no. 13589177
MPDCGCKPVSLLPSVQVGILISYARIQIEIFLSLRDVLRDNFSKTVA

SEQ ID NO: 871 - DNA, 496 bp, Zea mays subsp. mays
  misc_feature (1)..(496): Ceres Seq. ID no. 7113972
  misc_feature (1)..(496): Ortholog of  Ceres SEQ ID NO 12626078 as cited in SEQ ID NO 69113
atcctcgcatcgtccgcaccttatcctctcgactttacagtacctgctctcagctcctccctatctcaatggcatccgcgaatgccatctccaccgcctcccccttccggcccctctctcagggcagggcgacgaggtcacagcggttcgtggtgcgtgcgaacgccaaagacattgcctttgacagaaatccagggcagcgctgcaggccggcgtcgagaagctcgcaaacgccgncggtgtcaccctcgggccacgagggaggaatgtggcgctcgatgagtacggnaaccccaaagttgcgaatgatggagtcactattgcccgcgctattgagctgcatganccaatggaaaatgctggtgcantattgattcgngaggttgctagtaagaccaangattcagctggtgatgggactacaactgcatgcgtccttgctcgtgaaaataancaagtctaggcccttctgaggcgcaacatcctggcggcaaac

SEQ ID NO: 872 - protein, 123 aa, Zea mays subsp. mays
  peptide (1)..(123): Ceres Seq. ID no. 7113973
  misc_feature (79)..(79): Xaa is any aa, unknown or other
  misc_feature (96)..(96): Xaa is any aa, unknown or other
  misc_feature (115)..(115): Xaa is any aa, unknown or other
  misc_feature (122)..(122): Xaa is any aa, unknown or other
PRIVRTLSSRLYSTCSQLLPISMASANAISTASPFRPLSQGRATRSQRFVVRANAKDIAFDRNPGQRCRPASRSSQTPXVSPSGHEGGMWRSMSTXTPKLRMMESLLPALLSCMXQWKMLVXY

SEQ ID NO: 873 - protein, 101 aa, Zea mays subsp. mays
  peptide (1)..(101): Ceres Seq. ID no. 7113974
  misc_feature (57)..(57): Xaa is any aa, unknown or other
  misc_feature (74)..(74): Xaa is any aa, unknown or other
  misc_feature (93)..(93): Xaa is any aa, unknown or other
  misc_feature (100)..(100): Xaa is any aa, unknown or other
MASANAISTASPFRPLSQGRATRSQRFVVRANAKDIAFDRNPGQRCRPASRSSQTPXVSPSGHEGGMWRSMSTXTPKLRMMESLLPALLSCMXQWKMLVXY

SEQ ID NO: 874 - protein, 93 aa, Zea mays subsp. mays
  peptide (1)..(93): Ceres Seq. ID no. 7113975
  misc_feature (79)..(79): Xaa is any aa, unknown or other
ILASSAPYPLDFTVPALSSSLSQWHPRMPSPPPPPSGPSLRAGRRGHSGSWCVRTPKTLPLTEIQGSAAGRRREARKRXRCHPRATREECGAR

SEQ ID NO: 875 - DNA, 850 bp, Zea mays subsp. mays
  misc_feature (1)..(850): Ceres Seq. ID no. 12423719
  misc_feature (1)..(850): Ortholog of  Ceres SEQ ID NO 13662992 as cited in SEQ ID NO 61087
aaaaaaatctatgtactgaagacctggcgtcgacggcggcctcctcggcggcgggcgcgggctggtctccttccgcttcccggacagcttctgggcgggccgcgtggtggcgcgcacgggatgcagctccgggcattcccggtgcgagacgggaagcgttgcgccggcgacggtggtgcagctggtggtgcacgcggaggggcaagacctggcgtcgtacagcgtgagcctggtggacgggttcaacgtgcccgctgtggtgagcccgcaggcggtgggcggcgggcagtgcccggccctggggtgcgcggcggacctcaacgccgggtgcccgccctcgcagcgcgtgctgggggccgggggcggcgtggtggcgtgcaagggccccgcgggctacttcaaggagcggtgcccgctgacgcgcaccacgcccaccgacgtggagcccgtgccgcagcggtgcttggcgcccggcgagctcaaggtcgtcttctgccagtccgccatggtgaacgccgccgccgccgccgagaccgagcgcatccgcaccgtcgtcgcggacaactagagctactagctgtctagctgcctgtggtaacgccggccggtggtcactggtcagttgaacggaggagatgccggctctctgattagtgcgtaataaaggtacgtacgttaactaggcaattaagcgcgtgtgttactgttgaacttgaacggggccgctattaaagctgtgtgtgtgtgtgtggtactagtagttgtcattggcttcgttgccatgtgttcggccggcagtgccaagtgaatagttgcgtccatccaggagaatgtatgtttttgagttgcg

SEQ ID NO: 876 - protein, 194 aa, Zea mays subsp. mays
  peptide (1)..(194): Ceres Seq. ID no. 12423720
KKIYVLKTWRRRRPPRRRARAGLLPLPGQLLGGPRGGAHGMQLRAFPVRDGKRCAGDGGAAGGARGGARPGVVQREPGGRVQRARCGEPAGGGRRAVPGPGVRGGPQRRVPALAARAGGRGRRGGVQGPRGLLQGAVPADAHHAHRRGARAAAVLGARRAQGRLLPVRHGERRRRRRDRAHPHRRRGQLELLAV

SEQ ID NO: 877 - protein, 154 aa, Zea mays subsp. mays
  peptide (1)..(154): Ceres Seq. ID no. 12423721
MQLRAFPVRDGKRCAGDGGAAGGARGGARPGVVQREPGGRVQRARCGEPAGGGRRAVPGPGVRGGPQRRVPALAARAGGRGRRGGVQGPRGLLQGAVPADAHHAHRRGARAAAVLGARRAQGRLLPVRHGERRRRRRDRAHPHRRRGQLELLAV

SEQ ID NO: 878 - DNA, 790 bp, Zea mays subsp. mays
  misc_feature (1)..(790): Ceres Seq. ID no. 12408009
  misc_feature (1)..(790): Ortholog of  Ceres SEQ ID NO 14305544 as cited in SEQ ID NO 653
aaaacacactctagtctctagctgctgctctctcccactgtctcgccgtcttgctcacacgcagtgcccggtggtctggtcggtcgctcggtcgacgtggccgtgggcgttggcaggggttcctgctccagccactgaagacgcagcggcggcggcggctcctgctcatggcaggagctcaatgcgccacaggaccgcgcgccgggccgctcctcctcgtcctcgtcctcgtcctgtgcggcttccttgtgctgctcgtgcctgcggctcggcgcggggacgacgacgagacggaggagttccccgtcgcgtcttccgcttcttcgtcgtggtggcactggcacgccgctgatgggcgccgccgtgccctcccgcggccggccgccgcgacgtggccgtggcgccccgcccagccccgggcgcgcgggaggtggaactccgcggggcaggacagcaagcacgaggtccccagtggccccaacccggactccaatcggtagccgtagccagagaggtgggtggtcgtgaactccgatccgccgtctgtgtttgtttcggcgaacggcgaccaagctccctccctgtcccctgctcctgctcctggaggccggtcgtctagctaggcctggccgtcgtatcgctcctccatgcttcttgctgctccgtgctggagccagtacgtgcgtcgtttgcttgctgtgttgtatcttcttcttcgccgttctcttcgttagagaatgaacatgaccatcatctgacgcatgcattgctcaattctcgtccaaccgac

SEQ ID NO: 879 - protein, 116 aa, Zea mays subsp. mays
  peptide (1)..(116): Ceres Seq. ID no. 12408010
KHTLVSSCCSLPLSRRLAHTQCPVVWSVARSTWPWALAGVPAPATEDAAAAAAPAHGRSSMRHRTARRAAPPRPRPRPVRLPCAARACGSARGRRRDGGVPRRVFRFFVVVALARR

SEQ ID NO: 880 - protein, 110 aa, Zea mays subsp. mays
  peptide (1)..(110): Ceres Seq. ID no. 12408011
MAGAQCATGPRAGPLLLVLVLVLCGFLVLLVPAARRGDDDETEEFPVASSASSSWWHWHAADGRRRALPRPAAATWPWRPAQPRARGRWNSAGQDSKHEVPSGPNPDSNR

SEQ ID NO: 881 - protein, 58 aa, Zea mays subsp. mays
  peptide (1)..(58): Ceres Seq. ID no. 12408012
MGAAVPSRGRPPRRGRGAPPSPGRAGGGTPRGRTASTRSPVAPTRTPIGSRSQRGGWS

SEQ ID NO: 882 - DNA, 1259 bp, Zea mays subsp. mays
  misc_feature (1)..(1259): Ceres Seq. ID no. 12354552
  misc_feature (1)..(1259): Ortholog of  Ceres SEQ ID NO 15180657 as cited in SEQ ID NO 0
aaagggcaaaggcccaaacccagccggccagtcccccaccccccagcagccatggagttcggcttccgcgcaggaaaccgcacgcagcgccgcccttcccccgatcgacgcttcacagcacagcaagccggacccttccacggcgaccacccgcagccctcgccgttgcagtgggaggatgcggcccggcgcgagcggatcaaacgcgaggtggagcgccggctcatcgaggaggaggtccgcctggagctcgcccttgagcgcgcccgcctccacggtggttttggccccgccccgttcctcgggaccgacggctccgtcgtgccggtgcagccaccacctccacctccaggccggttctccagggccgacggcccatcgatgacgccggcaatgtcgtgggacgacagccctcggcggctcgcgagatttgagcaaccgatgctcctcagcgagacgggaacgtggtccctgctgccgaagccgaggcatacgctcctgctgcgcgagatcgcgcccagcgagagctccgaggttctttcatcagcaacaaaggcttctggcgtgaagaggaaagcagcagctgcgatttccgcaacaacgactgaacaacaaccaacgggagtacaagacccgagttccgggcaatggagctgcgcaatctgccaggtgagcgcgaccagcgaggccaacctgaacgagcacctccaagggaaaaagcacagggcaaagctggcccgatgcggagcgacgaccaaggcgacgacggatcctcctcctaacagaagcggcgatggcgcagtagcactagcagcaggcccgagcgacgcgccgaagaggatccagatcctggtcgacggggaggcgcaccaggtcgtccagaggagcagctgcgtgtggtgcgagcgctgcagggtcggctgcaccaacgccgccgccatggtcgaccatctgcggggcaagaggcacagcctgtcgaacaaggtctggacggcgataaaggccgtgaggaggagcagctaatacggcgataaaggccgtgaccgtgaggaggaggccgtggtgaggtgaggaggcacaatcttgtcgaatacggttgagcagggcctgtgttgagctttggaaagaaagggcacagatactagttgtttgacaactaatgaagtgtgggttttcatagatcctcttaatttagcagcggaaagaaagacggtatattccttgcttgttatcacttatcagacaatcacttattcccc

SEQ ID NO: 883 - protein, 340 aa, Zea mays subsp. mays
  peptide (1)..(340): Ceres Seq. ID no. 12354553
KGQRPKPSRPVPHPPAAMEFGFRAGNRTQRRPSPDRRFTAQQAGPFHGDHPQPSPLQWEDAARRERIKREVERRLIEEEVRLELALERARLHGGFGPAPFLGTDGSVVPVQPPPPPPGRFSRADGPSMTPAMSWDDSPRRLARFEQPMLLSETGTWSLLPKPRHTLLLREIAPSESSEVLSSATKASGVKRKAAAAISATTTEQQPTGVQDPSSGQWSCAICQVSATSEANLNEHLQGKKHRAKLARCGATTKATTDPPPNRSGDGAVALAAGPSDAPKRIQILVDGEAHQVVQRSSCVWCERCRVGCTNAAAMVDHLRGKRHSLSNKVWTAIKAVRRSS

SEQ ID NO: 884 - protein, 323 aa, Zea mays subsp. mays
  peptide (1)..(323): Ceres Seq. ID no. 12354554
MEFGFRAGNRTQRRPSPDRRFTAQQAGPFHGDHPQPSPLQWEDAARRERIKREVERRLIEEEVRLELALERARLHGGFGPAPFLGTDGSVVPVQPPPPPPGRFSRADGPSMTPAMSWDDSPRRLARFEQPMLLSETGTWSLLPKPRHTLLLREIAPSESSEVLSSATKASGVKRKAAAAISATTTEQQPTGVQDPSSGQWSCAICQVSATSEANLNEHLQGKKHRAKLARCGATTKATTDPPPNRSGDGAVALAAGPSDAPKRIQILVDGEAHQVVQRSSCVWCERCRVGCTNAAAMVDHLRGKRHSLSNKVWTAIKAVRRSS

SEQ ID NO: 885 - protein, 213 aa, Zea mays subsp. mays
  peptide (1)..(213): Ceres Seq. ID no. 12354555
MTPAMSWDDSPRRLARFEQPMLLSETGTWSLLPKPRHTLLLREIAPSESSEVLSSATKASGVKRKAAAAISATTTEQQPTGVQDPSSGQWSCAICQVSATSEANLNEHLQGKKHRAKLARCGATTKATTDPPPNRSGDGAVALAAGPSDAPKRIQILVDGEAHQVVQRSSCVWCERCRVGCTNAAAMVDHLRGKRHSLSNKVWTAIKAVRRSS

SEQ ID NO: 886 - DNA, 670 bp, Zea mays subsp. mays; identical to SEQ ID NO: 724
  misc_feature (1)..(670): Ceres Seq. ID no. 13565500
  misc_feature (1)..(670): Ortholog of  Ceres SEQ ID NO 14312544 as cited in SEQ ID NO 0

SEQ ID NO: 887 - protein, 154 aa, Zea mays subsp. mays; identical to SEQ ID NO: 725
  peptide (1)..(154): Ceres Seq. ID no. 13565501

SEQ ID NO: 888 - protein, 119 aa, Zea mays subsp. mays; identical to SEQ ID NO: 726
  peptide (1)..(119): Ceres Seq. ID no. 13565502

SEQ ID NO: 889 - protein, 113 aa, Zea mays subsp. mays; identical to SEQ ID NO: 727
  peptide (1)..(113): Ceres Seq. ID no. 13565503

SEQ ID NO: 890 - DNA, 749 bp, Zea mays subsp. mays
  misc_feature (1)..(749): Ceres Seq. ID no. 12415361
  misc_feature (1)..(749): Ortholog of  Ceres SEQ ID NO 13600184 as cited in SEQ ID NO 0
agattcgcagtagtagtgcacgaatagaccgttcaagaccgcgcggcgagacgcgaacctgtcgcgggacgggggggtcagacggtgaacttgatctcgaagccggtggacggatccacgggctcggccgtggacgggacgacggcggtgacggtggcggctggggggccgacggggaggcggcgggttatcatgtcttcgatcttcgcggggtctccggagaggagggcctccacactgccgtcacggcggttgcggacccagccggcgaggccgagcgactcggccgtggacgcagtccagtcgcggaaccccacccccgtgacgcgccccttcaccaccacgcggactgcctttcgtgcgggctccggctgcggcgcggatggtggcgtggcggcatcgggatcggcggaggacgccatggcgcggtggtgctggtacggttgtggacttgtggaagcagcgagactggagaccggagacggagagggacgagacgagacgagacggctgaagcaaggaactgctggaacattttggaaagtcaaggcctgccctagtaggacaacccaagcccggcccaaaaaaaatcgtgaccctgcgcggctgggtcgcactcgcggctcgtggcagaggctgtgatgggctacagttgtgggctttttaaccttcttttaaaaatgtgttattatttttctatattcgtagtgtcccttttccatggttacttctctccagcattgctacat

SEQ ID NO: 891 - protein, 185 aa, Zea mays subsp. mays
  peptide (1)..(185): Ceres Seq. ID no. 12415362
IRSSSARIDRSRPRGETRTCRGTGGSDGELDLEAGGRIHGLGRGRDDGGDGGGWGADGEAAGYHVFDLRGVSGEEGLHTAVTAVADPAGEAERLGRGRSPVAEPHPRDAPLHHHADCLSCGLRLRRGWWRGGIGIGGGRHGAVVLVRLWTCGSSETGDRRRRGTRRDETAEARNCWNILESQGLP

SEQ ID NO: 892 - protein, 149 aa, Zea mays subsp. mays
  peptide (1)..(149): Ceres Seq. ID no. 12415363
MSSIFAGSPERRASTLPSRRLRTQPARPSDSAVDAVQSRNPTPVTRPFTTTRTAFRAGSGCGADGGVAASGSAEDAMARWCWYGCGLVEAARLETGDGEGRDETRRLKQGTAGTFWKVKACPSRTTQARPKKNRDPARLGRTRGSWQRL

SEQ ID NO: 893 - DNA, 1566 bp, Zea mays subsp. mays
  misc_feature (1)..(1566): Ceres Seq. ID no. 12360046
  misc_feature (1)..(1566): Ortholog of  Ceres SEQ ID NO 13600014 as cited in SEQ ID NO 593
ctcgtagggcaccgatgcctcataggagggaacgcgcgcttgccaccgttgtttgctccgcgcaatcgctcggactttcacaggagtcctgagatcaccaccggatcaccaggaggatgctcgtgacctcaaccagcggaatcaatggccgaggagcccgaaattgctcgccgtatttggatttggaccgcatcacggtatggccgagctcctccacaaatcggcggcagatggctcgtcttagacacactgcacgtaagtcggtgattcctttcctgccgtctcgacttgcggagcgtcctctgcaccgcaccgtgtccggtcagtcgagtcacctggagagactgcaccaccgcctgcgtgaggagcaggaacgccggcgtcagcacagagagcagcaggactcttcctccccaccccagcaagaggtggagtccgtgaggccccgttcctctgttgctcagctggaggcaccccctgcaccaccgcgggacgccccggatgttggaggagctactggaggaggttctggaggagaccccgacgatgacgactcagaccacagcacggagtcttctgagccgcaggaggtggaaggatgggtcgcccgacccatcacccgtgacgccgctcgcggttgtcacttccacgacgcactcgacaccttgctgcgccaggctttcgaccggcacacctggtcgatcgagtatcgttgtgtagtctaccagcacagtcgcgggaggtacccggaccgctgggaggctacctgcctagttcgccgtccggaggatgacctccggggtgcggaggccgtttcagagcactattccatctccgagagggacactgtagaggcggctatgcaggatgcagcacggcgtgcactctcccagtactgttctttgttcggtggcgtggccgacggtcttaaccttcggtactacccccgccaccctactggcagcacagagagtgtggttgtctcacctgttggtgaggctaatcctaggttgagcagcacagtcaacctagtcgcagtgcttaacactgagctggatcactctctggacgagctaagcagggctcgaacggagattgcggagttgcgtgctgagttggcagagcgccatcaccaggagggtggttcccctgctcctgttgggactcagcacccataccgctcaccgccacgtggtcatcacacttatggttcccctgtctgtaagaccaggatagatctggatccttagatcgttagcgtcggagtttgtaataattcttaagtcagatgtctcagtcttaggtagtcagtttagtttgcttatcagttgcttccatttagtttagtttgcttatcagttgctttcatgcttgttatgatgaacttgtgcttgatttgaatctttgtaatgattgtagtcaacatgtgggtttcccctgcagtttggcttagctagtaatgttaataaagtcagttgtttagttgggaaaccctttacttctactttcctttcttatctgaggagctgtgttgaatcataaatgaggatcagtgaagccctttgt

SEQ ID NO: 894 - protein, 377 aa, Zea mays subsp. mays
  peptide (1)..(377): Ceres Seq. ID no. 12360047
MLVTSTSGINGRGARNCSPYLDLDRITVWPSSSTNRRQMARLRHTARKSVIPFLPSRLAERPLHRTVSGQSSHLERLHHRLREEQERRRQHREQQDSSSPPQQEVESVRPRSSVAQLEAPPAPPRDAPDVGGATGGGSGGDPDDDDSDHSTESSEPQEVEGWVARPITRDAARGCHFHDALDTLLRQAFDRHTWSIEYRCVVYQHSRGRYPDRWEATCLVRRPEDDLRGAEAVSEHYSISERDTVEAAMQDAARRALSQYCSLFGGVADGLNLRYYPRHPTGSTESVVVSPVGEANPRLSSTVNLVAVLNTELDHSLDELSRARTEIAELRAELAERHHQEGGSPAPVGTQHPYRSPPRGHHTYGSPVCKTRIDLDP

SEQ ID NO: 895 - protein, 339 aa, Zea mays subsp. mays
  peptide (1)..(339): Ceres Seq. ID no. 12360048
MARLRHTARKSVIPFLPSRLAERPLHRTVSGQSSHLERLHHRLREEQERRRQHREQQDSSSPPQQEVESVRPRSSVAQLEAPPAPPRDAPDVGGATGGGSGGDPDDDDSDHSTESSEPQEVEGWVARPITRDAARGCHFHDALDTLLRQAFDRHTWSIEYRCVVYQHSRGRYPDRWEATCLVRRPEDDLRGAEAVSEHYSISERDTVEAAMQDAARRALSQYCSLFGGVADGLNLRYYPRHPTGSTESVVVSPVGEANPRLSSTVNLVAVLNTELDHSLDELSRARTEIAELRAELAERHHQEGGSPAPVGTQHPYRSPPRGHHTYGSPVCKTRIDLDP

SEQ ID NO: 896 - DNA, 960 bp, Zea mays subsp. mays
  misc_feature (1)..(960): Ceres Seq. ID no. 12376701
  misc_feature (1)..(960): Ortholog of  Ceres SEQ ID NO 12611971 as cited in SEQ ID NO 53205
gcacgagaccattacctagaacatcctaatcgaaaagaaactcgaaagggaagcatgcagcgttcttatatgagatgtgcaagttctacagagattggcatgccaagtctgatggttttcatggtatttgaaattaataatatactactgttatatgcttttgccaattaccatcaaatatgagaagaaacacgcttctgacagaaaatcgctttctgttcaggaattttccttcatgatcctgtgagcttcactgccgtacttcatccagagtacttcacattcaagaagggtgtggtgagagtagagacccagggcatttgcactggccacactttgatggatcagggattgaaaaagtatgtttttttttctctctgagtaactcataaaagattgacccgtctgatgttttttagtttcagcattcttacatacaccacattgatatgacataaatctcaccaaattactttataacttttggagtaagcaaaccaaggcaaaagttaccccacatgatctatatgtttcagcagatttcacacttgtttcttcttgttcctcctatgctgcaggtggaattcagagaacccatggtcagggtataaaccgatttcagttgcatggacggttgatgtgccaaaggtcatcagctttataaagaagctgctcatggcaccatgagcaaagtacaaccatttaacgacgtgtcgacatcagcgctctctgatgtccaagaaaatttgacgagtacagatgctctttctcagttgcactgtaattagttcctggacctaggatgattcctattcctccaatagtaagaggaacctttcattgtgaaaggtcatgcagcagtctcgaataccatgaagcaaattctggcatacgacatcatgtctcacacatttgtatcaatacatttcgaatcaataaagtttccctcactctttactc

SEQ ID NO: 897 - protein, 60 aa, Zea mays subsp. mays
  peptide (1)..(60): Ceres Seq. ID no. 12376702
ARDHYLEHPNRKETRKGSMQRSYMRCASSTEIGMPSLMVFMVFEINNILLLYAFANYHQI

SEQ ID NO: 898 - protein, 52 aa, Zea mays subsp. mays
  peptide (1)..(52): Ceres Seq. ID no. 12376703
MIPIPPIVRGTFHCERSCSSLEYHEANSGIRHHVSHICINTFRINKVSLTLY

SEQ ID NO: 899 - protein, 42 aa, Zea mays subsp. mays
  peptide (1)..(42): Ceres Seq. ID no. 12376704
MQRSYMRCASSTEIGMPSLMVFMVFEINNILLLYAFANYHQI

SEQ ID NO: 900 - DNA, 978 bp, Zea mays subsp. mays
  misc_feature (1)..(978): Ceres Seq. ID no. 12354728
  misc_feature (1)..(978): Ortholog of  Ceres SEQ ID NO 13598513 as cited in SEQ ID NO 64102
agtattagcatatatatacacgtagtaatgcagaacagatgggagtaccttaagcaagacacaatctgcagccgggatagactcgaacatgtcgccggcgatgaacttcaccgtgccatcatcaggtgccccgctgaccacctgctcgaggtccaacacgctgcaccggatgtgcgggaaggccctagcgatggccatcgcagcggcgccgtggccgccgccgacgtcgacgagcgagccgagcccgcggaatatacccgcggcccggggctctctcaggagcgtgtccatggcgaagttgctgtccgccgcgcacccgtcgttcaaggtcttgttgtacagggcgtcgttcttcgtcaagctccacggggacatgccgtgcgccacctcgaagagcgtggcggtggcgccggcgtccttgaaccactcttccaggctgaagtaggtggcgaccgacgtagtggggcgcatcagaaggtccagcatcggcgatatgtcgcacgaggtcggtgcccccgcgccgcttacgaggaggcgggacgccggagtgagcttgtaaacagtactgtcgtcgctctcatctgtgcctgtggtgcccaagatgctggagacggtaagcacgcgcatgagccgtcggagatacgggagcttcgacgggtcgacgccggtctcggtgatgatgtccgagattgttgctgccccacctcggcggtggatggcgctagggatgcctagctggatcgcgcacccgatcgccatggtcttcacgtaggagagactgtaattgtagagctccacgtaaccttggagcatgtcctgtgtgttattaagctcctcctggacagaggacatggtggtgttgtaaatggcaggggcgcagggcttgttgcattggctgcgctgggatgctacttttataagggaatggggaggcaaagaagatatcgacgacaaaggaagggcctgcactttttatgc

SEQ ID NO: 901 - protein, 244 aa, Zea mays subsp. mays
  peptide (1)..(244): Ceres Seq. ID no. 12354729
SISIYIHVVMQNRWEYLKQDTICSRDRLEHVAGDELHRAIIRCPADHLLEVQHAAPDVREGPSDGHRSGAVAAADVDERAEPAEYTRGPGLSQERVHGEVAVRRAPVVQGLVVQGVVLRQAPRGHAVRHLEERGGGAGVLEPLFQAEVGGDRRSGAHQKVQHRRYVARGRCPRAAYEEAGRRSELVNSTVVALICACGAQDAGDGKHAHEPSEIRELRRVDAGLGDDVRDCCCPTSAVDGARDA

SEQ ID NO: 902 - protein, 235 aa, Zea mays subsp. mays
  peptide (1)..(235): Ceres Seq. ID no. 12354730
MQNRWEYLKQDTICSRDRLEHVAGDELHRAIIRCPADHLLEVQHAAPDVREGPSDGHRSGAVAAADVDERAEPAEYTRGPGLSQERVHGEVAVRRAPVVQGLVVQGVVLRQAPRGHAVRHLEERGGGAGVLEPLFQAEVGGDRRSGAHQKVQHRRYVARGRCPRAAYEEAGRRSELVNSTVVALICACGAQDAGDGKHAHEPSEIRELRRVDAGLGDDVRDCCCPTSAVDGARDA

SEQ ID NO: 903 - DNA, 2271 bp, Zea mays subsp. mays
  misc_feature (1)..(2271): Ceres Seq. ID no. 12361733
  misc_feature (1)..(2271): Ortholog of  Ceres SEQ ID NO 14315241 as cited in SEQ ID NO 52516
  misc_feature (1)..(2271): Ortholog of  Ceres SEQ ID NO 13663419 as cited in SEQ ID NO 66561
  misc_feature (1)..(2271): Ortholog of  Ceres SEQ ID NO 15177892 as cited in SEQ ID NO 0
gcacgagaccattacctagaacatcctaatcgaaaagtttgttttcgtcgtaaatctccgtcccgctgggcgcgctgccggagtcgccgtcgcccagcccccagccgattattcttattctctttgcttcgcctcgcctcctgtcgtcgtcgtcatcatcatcgcccccggctgctaaacaccaacaagtgcccttgccccacatggccacccggccacattaccccacaaccggcagggcacgggcaacttgacatgcatggcaacgacgcacagcagcttgctcgatcgctcggtgtcactgcgtgtgttcgtgtggtgcttgcctctgtactactgcactgcacgcacacacgcagggatgcagagggccactcccactcgcatcgcatgcgtgtgtgtggccttcttttttcccctgctgtgctgggtgctgctgccacccaaaagcaaagctaagaacggccatgccatgcgtatatatataacccaaatagcacattagcagaaccgtcaaagcacatatatacatgcctgccgtcgtgctacagtactacaccgcagtggggcatggtggcgctggcgcgcgagggagagtgagggccagcgcgccatgcccgcgcgacacgcactggcactgccggcagtggcacaggcacaccccggccccacgatctccccacctgggtcctgggctccacagctgcctcgctcgccagtcgccaccaccatggaacggacggctacggtggtcttgtttgctctctttgactcggtgcctgcctcgggaaacgtggtcctggatgctcgtcggtggcgtatggagcgtcggaggagatcggcccgttccggatcaaaccaaacgggacaggcctgttcctcaacaagtactcatggaacagagaggcaaaccttctgttcctcgagtcgcccgcgggagtcggcttctcctacgccaacaccacctcggacctcaagacgtcgggcgacgagaggaccgctcaagacgcgctgcagttcctggtcagctggatgtcacggttcccgcagtaccggcaccgagatttctacatcgccggagaaagctacgcgggccactacgtcccccagttggcaaggaagatcgtcgagtacaacgaggcctcgcctcaccccttcatcaacctcaagggaatccttgtgagtatcgtatctatgcatgctgctgccaaacacgagcaggccgccggccggccggctccagtctaatcttaacccctccaaaaaaaaaacaccgatcaggtgggcaacgcggtgaccgacaactactacgacaacatcggcacggtcacctactggtggacgcacgccatgatctccgaccgcacctacaaggccatcctcaggtggtgcaacttcagcagcagcagcatctcgcgcccctgcaaccgcgccatgagctacgccatgaaccacgagttcggggacatcgaccagtacagcatctacacgccgtcgtgcgccgccgccgcggccagggccaacgccaccgtgctcaggttcaagaacaccctcgtccgccgccgccgctcctccggctacgacccctgcacggagacctacgccgagaggtactacaacaggatggacgtgcagagggcgatgcacgccaacaccacggggatcccctacagatggactgcctgcagtgatgtgctgatcaagacatggcaagattcagagttctccatgctgccgacgtacaagaagctgatgaaagcaggactgaggatatgggtgttcagcggcgacacagattcagtcgtcccggtgaccgcgacgaggttcgccatcagtcatctcggtctgaagatcaagacccgctggtatccgtggtactcagctggacaggtaggaggatggtctgaggtgtacgaagggctcacgtttgcgtcggtgagaggcgcagggcatgaggtgccgttgttccagccccggagggcgttcaggatgttccggtcgttcttggccggggagccattgcccaagtcctgaaggttcctcacatgtgactgaggccatgcatgcctacctgatcatgtctagctacggtcctgacgggtgagaaggtgacgttccccaggtagagaatgacttgttgataggcgcgcagttcatagctgaggagtgattgattggtctcgggagaaggatgtagagaataataaggatggctatgttatgccatggaaacccatgagcattgcaatgattagcgaataattttcagtt

SEQ ID NO: 904 - protein, 386 aa, Zea mays subsp. mays
  peptide (1)..(386): Ceres Seq. ID no. 12361734
MPAVVLQYYTAVGHGGAGARGRVRASAPCPRDTHWHCRQWHRHTPAPRSPHLGPGLHSCLARQSPPPWNGRLRWSCLLSLTRCLPRETWSWMLVGGVWSVGGDRPVPDQTKRDRPVPQQVLMEQRGKPSVPRVARGSRLLLRQHHLGPQDVGRREDRSRRAAVPGQLDVTVPAVPAPRFLHRRRKLRGPLRPPVGKEDRRVQRGLASPLHQPQGNPCEYRIYACCCQTRAGRRPAGSSLILTPPKKKHRSGGQRGDRQLLRQHRHGHLLVDARHDLRPHLQGHPQVVQLQQQQHLAPLQPRHELRHEPRVRGHRPVQHLHAVVRRRRGQGQRHRAQVQEHPRPPPPLLRLRPLHGDLRREVLQQDGRAEGDARQHHGDPLQMDCLQ

SEQ ID NO: 905 - protein, 295 aa, Zea mays subsp. mays
  peptide (1)..(295): Ceres Seq. ID no. 12361735
MLVGGVWSVGGDRPVPDQTKRDRPVPQQVLMEQRGKPSVPRVARGSRLLLRQHHLGPQDVGRREDRSRRAAVPGQLDVTVPAVPAPRFLHRRRKLRGPLRPPVGKEDRRVQRGLASPLHQPQGNPCEYRIYACCCQTRAGRRPAGSSLILTPPKKKHRSGGQRGDRQLLRQHRHGHLLVDARHDLRPHLQGHPQVVQLQQQQHLAPLQPRHELRHEPRVRGHRPVQHLHAVVRRRRGQGQRHRAQVQEHPRPPPPLLRLRPLHGDLRREVLQQDGRAEGDARQHHGDPLQMDCLQ

SEQ ID NO: 906 - protein, 265 aa, Zea mays subsp. mays
  peptide (1)..(265): Ceres Seq. ID no. 12361736
MEQRGKPSVPRVARGSRLLLRQHHLGPQDVGRREDRSRRAAVPGQLDVTVPAVPAPRFLHRRRKLRGPLRPPVGKEDRRVQRGLASPLHQPQGNPCEYRIYACCCQTRAGRRPAGSSLILTPPKKKHRSGGQRGDRQLLRQHRHGHLLVDARHDLRPHLQGHPQVVQLQQQQHLAPLQPRHELRHEPRVRGHRPVQHLHAVVRRRRGQGQRHRAQVQEHPRPPPPLLRLRPLHGDLRREVLQQDGRAEGDARQHHGDPLQMDCLQ

SEQ ID NO: 907 - DNA, 665 bp, Zea mays subsp. mays
  misc_feature (1)..(665): Ceres Seq. ID no. 12354772
  misc_feature (1)..(665): Ortholog of  Ceres SEQ ID NO 13661195 as cited in SEQ ID NO 61007
actacagttcttattccaagctcacctatccctgttaatatgaaattggttgaccaataccatggaagcagctccaacgctgactactactacatgtcagcaaggtccttgtccaggagtccagtgccaactgctggtatatggtccggcagtaatcgtcaatcatcaagaagtcctccacaaatgaatgatcaaaggggatctttaattggtgagatcgctccggaacattctgcaccatctactgttacaaaaaatgccctctcagtggcaccatggatgggtcttctattgggtacgtgcctcttgcacattttgattggaaacaaacatagggagatggcaagtggcactgtcataccaattggaagaaggcttttactgtttgtggatgatcatggaaattcatcgcttagccagagcagtggaagtgaaattggatgttcactggatctgtagttgtaccaggtagatcaacaaggtgcgtttatggcgcactgtgtaacagtagctatgcctatgaagctgcacaatttagtgacagcagtgcgtatgaatcggattgctatgatgtgaccatggtctcagtcatgttcaagatgctattgtactattctctgctaataactaaacagcttagctcaaggaccggtggcttggattcg

SEQ ID NO: 908 - protein, 152 aa, Zea mays subsp. mays
  peptide (1)..(152): Ceres Seq. ID no. 12354773
TTVLIPSSPIPVNMKLVDQYHGSSSNADYYYMSARSLSRSPVPTAGIWSGSNRQSSRSPPQMNDQRGSLIGEIAPEHSAPSTVTKNALSVAPWMGLLLGTCLLHILIGNKHREMASGTVIPIGRRLLLFVDDHGNSSLSQSSGSEIGCSLDL

SEQ ID NO: 909 - protein, 139 aa, Zea mays subsp. mays
  peptide (1)..(139): Ceres Seq. ID no. 12354774
MKLVDQYHGSSSNADYYYMSARSLSRSPVPTAGIWSGSNRQSSRSPPQMNDQRGSLIGEIAPEHSAPSTVTKNALSVAPWMGLLLGTCLLHILIGNKHREMASGTVIPIGRRLLLFVDDHGNSSLSQSSGSEIGCSLDL

SEQ ID NO: 910 - protein, 121 aa, Zea mays subsp. mays
  peptide (1)..(121): Ceres Seq. ID no. 12354775
MSARSLSRSPVPTAGIWSGSNRQSSRSPPQMNDQRGSLIGEIAPEHSAPSTVTKNALSVAPWMGLLLGTCLLHILIGNKHREMASGTVIPIGRRLLLFVDDHGNSSLSQSSGSEIGCSLDL

SEQ ID NO: 911 - DNA, 540 bp, Zea mays subsp. mays
  misc_feature (1)..(540): Ceres Seq. ID no. 12417242
  misc_feature (1)..(540): Ortholog of  Ceres SEQ ID NO 13584254 as cited in SEQ ID NO 63465
aagcacaaacacgcgcgatccgatctgggccggccaagcagccacccatccatggcgactagggtttggctcaccgccctcctgcttggtttcctcgtcgccgcctcccccttcaccagccgagttgctagagctgaatccgaggaagatgctgctgctgctgaggtggaaccggggagaccggggttggactatgcctgtttgttgctgcgcccagggccacggattgggttggacaggtggtggtaccgcaggtttccagtgatggacctttaagtcctgctcctggtgtagagacagtagttgtcttcccaaaaaatgctggcaaaattgtactagcaggtgaagaaactgaattactagttggtctgcaaaatgacggtgaatcaattttgaatgttgttgctgttcattcaactctccatcttccttttgaccacaatatgtatggncagaaccttactgttcagaatttcttcaattcatcagttcctgtttctgtgcaagcaaaccttncnctacaagttcgttgtgagcaag

SEQ ID NO: 912 - protein, 91 aa, Zea mays subsp. mays
  peptide (1)..(91): Ceres Seq. ID no. 12417243
KHKHARSDLGRPSSHPSMATRVWLTALLLGFLVAASPFTSRVARAESEEDAAAAEVEPGRPGLDYACLLLRPGPRIGLDRWWYRRFPVMDL

SEQ ID NO: 913 - protein, 87 aa, Zea mays subsp. mays
  peptide (1)..(87): Ceres Seq. ID no. 12417244
STNTRDPIWAGQAATHPWRLGFGSPPSCLVSSSPPPPSPAELLELNPRKMLLLLRWNRGDRGWTMPVCCCAQGHGLGWTGGGTAGFQ

SEQ ID NO: 914 - protein, 74 aa, Zea mays subsp. mays
  peptide (1)..(74): Ceres Seq. ID no. 12417245
MATRVWLTALLLGFLVAASPFTSRVARAESEEDAAAAEVEPGRPGLDYACLLLRPGPRIGLDRWWYRRFPVMDL

SEQ ID NO: 915 - DNA, 887 bp, Zea mays subsp. mays
  misc_feature (1)..(887): Ceres Seq. ID no. 12416261
  misc_feature (1)..(887): Ortholog of  Ceres SEQ ID NO 13600199 as cited in SEQ ID NO 565
gggtcatttgacatagttggattgggagctgaaaatcaatattttgataccgataacagtggaattcaaaaccagggatatcaaaatacaaccgaagtaaggacatataatcaggctgctcttactgtgcggagccatatgaagcatgatcatgtagtcttatcctcgcatgcatcaggcactctgaatatccatgcggcaaatgagctacataaccagagctccacatcttcacaatcatggttcaatgcggctctatcagccttgttggactctgtacctagtagtccagcattagctgctgaaatcgaaaacactgttatcaacagaacactccagcgcatctctagcttccgaccacagcaaactgcaggtgaagaaaacacttttatcaacagaacacttcagcacatctctagcttcaggtcacagcaagcaacaggggaagaaccaggcacccctagtattcaggttaccagaggtggcaggctgatgttcatatctctactggttatacttgcttctgttatatggacctttacttcaggctccgccctcaacttttgcaagggtttatggaaatcctnttntacgtgacagattaagtgggaacctggtgaccttgccctctgtaaattttttggtcctcggtaccatttatggtttgaatatcctttcgctttcaaaagggtgaagaggtagaaacattttgagggtggtaatatgattataggttgtagagcctatttaaaacggtaaaacgcaaggggaaaaagcatatctgatggtaatatttgaaactaatgggttactgttctcatttgtattttgacagatatatgtactgaatgtaattaacctattaatatagcttcagtttctgtgct

SEQ ID NO: 916 - protein, 198 aa, Zea mays subsp. mays
  peptide (1)..(198): Ceres Seq. ID no. 12416262
  misc_feature (196)..(196): Xaa is any aa, unknown or other
  misc_feature (197)..(197): Xaa is any aa, unknown or other
GSFDIVGLGAENQYFDTDNSGIQNQGYQNTTEVRTYNQAALTVRSHMKHDHVVLSSHASGTLNIHAANELHNQSSTSSQSWFNAALSALLDSVPSSPALAAEIENTVINRTLQRISSFRPQQTAGEENTFINRTLQHISSFRSQQATGEEPGTPSIQVTRGGRLMFISLLVILASVIWTFTSGSALNFCKGLWKSXXT

SEQ ID NO: 917 - protein, 152 aa, Zea mays subsp. mays
  peptide (1)..(152): Ceres Seq. ID no. 12416263
  misc_feature (150)..(150): Xaa is any aa, unknown or other
  misc_feature (151)..(151): Xaa is any aa, unknown or other
MKHDHVVLSSHASGTLNIHAANELHNQSSTSSQSWFNAALSALLDSVPSSPALAAEIENTVINRTLQRISSFRPQQTAGEENTFINRTLQHISSFRSQQATGEEPGTPSIQVTRGGRLMFISLLVILASVIWTFTSGSALNFCKGLWKSXXT

SEQ ID NO: 918 - DNA, 680 bp, Zea mays subsp. mays
  misc_feature (1)..(680): Ceres Seq. ID no. 12366342
  misc_feature (1)..(680): Ortholog of  Ceres SEQ ID NO 14305247 as cited in SEQ ID NO 0
tcactgatatcaatgtgtaaaacatcacttatttgcagctaaatggagtatatcattactatacctttgtctttttatatttatataaaaacacaatcgaatggagtccattcgtttcattgaacttgtctttgatgctatgaatgtttagtcacatgtagcagtttatgccctggtgtattaagagggtgcactaactgtgcttgttgattccctgttttctattaagtctaagttctgtttatatggatttttgtatgtatgattgcattgttctttgtatgaggctgcatatggcgaggcgatgtctagtcagcacggaccatactatgactagaggacctcacctattgatccccaggctgtgtatgcaagtggtggaaaagctcatggaaggtacacaatgtttgctaacgtcatcgacttgagccaggtgagggttcagcgtggaggtttgtcgaggtctgctgctcgtagctcccgtcgctccactcaagatccagcaaaagtggagcaactgcgcgaagaacttaggcgaaatcctcttcgctagtggaggtatcgaccatcactcgtcactgtaacccgatggtgatcgacgaccatgagcttccatgttattgtgttctgatacttgagaattttattatgagtatgatgatgagatgtgtcttattatg

SEQ ID NO: 919 - protein, 60 aa, Zea mays subsp. mays
  peptide (1)..(60): Ceres Seq. ID no. 12366343
MDFCMYDCIVLCMRLHMARRCLVSTDHTMTRGPHLLIPRLCMQVVEKLMEGTQCLLTSST

SEQ ID NO: 920 - protein, 56 aa, Zea mays subsp. mays
  peptide (1)..(56): Ceres Seq. ID no. 12366344
MYDCIVLCMRLHMARRCLVSTDHTMTRGPHLLIPRLCMQVVEKLMEGTQCLLTSST

SEQ ID NO: 921 - protein, 49 aa, Zea mays subsp. mays
  peptide (1)..(49): Ceres Seq. ID no. 12366345
MFANVIDLSQVRVQRGGLSRSAARSSRRSTQDPAKVEQLREELRRNPLR

SEQ ID NO: 922 - DNA, 840 bp, Zea mays subsp. mays
  misc_feature (1)..(840): Ceres Seq. ID no. 12416571
  misc_feature (1)..(840): Ortholog of  Ceres SEQ ID NO 15224654 as cited in SEQ ID NO 557
aaaaaggcaactgctcgccgccgtttcttttagtcacggcgccgcagcaggaaaccagaagccttgcattgctggccatggcgtcgatctccctccctcctttatcttcgcatgcgtcggctagttgcgggggaggcgttccactcccggggagtcgtctccgcccagggcacgcccaaggccattcgggatgaagacgccgttagattctcctgcattcgtgtggagtcccgccgcggccgacgcgaaggaaggaggagccggagttggagacctccatcgcagcactggctctgtacttggagtgggggtcggcagcggtggctgactcgcccagttggttggcggaacgactgccaacggcaccgcgtcgaggatgtctggcgactgcggtcctcctcgtattgggatccagatgcggagcggtggtgcccaacggcgaggcgggttccggcgtcgaggtgggatccagcgtcgaggcggtccccaacggcgaggacccaccgggatgcggcggggcggtgctatccgccccgtcaacaagatcttgcattgctcggtcgagtgcacggcgcagagaagaaatgttgaagatgccatggcgagaggcttcaatccagtcgtcgttcactgcggcgacaaggtggttcaccacaaattcacgctggtacagaggcattttcttaccgttcttctttccctgttcgtctgttcttcttctggcgagagcgggtggcgagagcgggtgctgataacgtgttagaaaaagaagggactgaagcaaatgatgcgtaactttttcattcaatgatggtgtgtatttatacatagtgaaacgac

SEQ ID NO: 923 - protein, 159 aa, Zea mays subsp. mays
  peptide (1)..(159): Ceres Seq. ID no. 12416572
MRRLVAGEAFHSRGVVSAQGTPKAIRDEDAVRFSCIRVESRRGRREGRRSRSWRPPSQHWLCTWSGGRQRWLTRPVGWRNDCQRHRVEDVWRLRSSSYWDPDAERWCPTARRVPASRWDPASRRSPTARTHRDAAGRCYPPRQQDLALLGRVHGAEKKC

SEQ ID NO: 924 - protein, 128 aa, Zea mays subsp. mays
  peptide (1)..(128): Ceres Seq. ID no. 12416573
MSGDCGPPRIGIQMRSGGAQRRGGFRRRGGIQRRGGPQRRGPTGMRRGGAIRPVNKILHCSVECTAQRRNVEDAMARGFNPVVVHCGDKVVHHKFTLVQRHFLTVLLSLFVCSSSGESGWRERVLITC

SEQ ID NO: 925 - protein, 115 aa, Zea mays subsp. mays
  peptide (1)..(115): Ceres Seq. ID no. 12416574
MRSGGAQRRGGFRRRGGIQRRGGPQRRGPTGMRRGGAIRPVNKILHCSVECTAQRRNVEDAMARGFNPVVVHCGDKVVHHKFTLVQRHFLTVLLSLFVCSSSGESGWRERVLITC

SEQ ID NO: 926 - DNA, 793 bp, Zea mays subsp. mays
  misc_feature (1)..(793): Ceres Seq. ID no. 12416305
  misc_feature (1)..(793): Ortholog of  Ceres SEQ ID NO 13655537 as cited in SEQ ID NO 63735
aagtggcaacagacggagcaaacgcagtcctctcgtcactgctcggaccaggtgatgtccaccatgccgacgttctggtcgagtcccagggcgtcccacaccgccggcgaggcgtcgacgatgttgttgtcgcacggcggctcgaaggtgtgctcgtcgtcgcagccgtgcacggagtcgcactcgtccaccaccttggcgtacacggagttgccgttggcggcgctgatcttgatccggtggccgcagcgcgccatgttgctgaaccagcccgtggagagcgccaccaccttctcctggtcgctgtggtacgcgttgtcgcactccgagggggccgccgccgtccttgcccttctcgaagctgttgagcgtcagcacggccctggtgctcgccgtgaccggcggcgagcagcggtactgcgggtacatcttgccgtcctcgcagcagtccgggtcgttgctcttctcgcagttgccggagcggcccgggaggtacccgctggcgcggcacgtgccgaggctggcgccagggcggagagaggacnccgtgtggggtgcggagagcgcgaccaggaggaacatgaacatggcggcggctacagctcctacaccggccatctttgcttgcctgcagattttgtgctcgaggatcgagccccttctcactctgttctttttccttccttccttcctttctttctttctttctttctttcttgtgctctgctttgcttgatggttttgttagattacttgtgcatgggattatatatagtggccgtgccctcttgtt

SEQ ID NO: 927 - protein, 264 aa, Zea mays subsp. mays
  peptide (1)..(264): Ceres Seq. ID no. 12416306
  misc_feature (182)..(182): Xaa is any aa, unknown or other
KWQQTEQTQSSRHCSDQVMSTMPTFWSSPRASHTAGEASTMLLSHGGSKVCSSSQPCTESHSSTTLAYTELPLAALILIRWPQRAMLLNQPVESATTFSWSLWYALSHSEGAAAVLALLEAVERQHGPGARRDRRRAAVLRVHLAVLAAVRVVALLAVAGAAREVPAGAARAEAGARAERGXRVGCGERDQEEHEHGGGYSSYTGHLCLPADFVLEDRAPSHSVLFPSFLPFFLSFFLSCALLCLMVLLDYLCMGLYIVAVPSC

SEQ ID NO: 928 - protein, 246 aa, Zea mays subsp. mays
  peptide (1)..(246): Ceres Seq. ID no. 12416307
  misc_feature (164)..(164): Xaa is any aa, unknown or other
MSTMPTFWSSPRASHTAGEASTMLLSHGGSKVCSSSQPCTESHSSTTLAYTELPLAALILIRWPQRAMLLNQPVESATTFSWSLWYALSHSEGAAAVLALLEAVERQHGPGARRDRRRAAVLRVHLAVLAAVRVVALLAVAGAAREVPAGAARAEAGARAERGXRVGCGERDQEEHEHGGGYSSYTGHLCLPADFVLEDRAPSHSVLFPSFLPFFLSFFLSCALLCLMVLLDYLCMGLYIVAVPSC

SEQ ID NO: 929 - protein, 243 aa, Zea mays subsp. mays
  peptide (1)..(243): Ceres Seq. ID no. 12416308
  misc_feature (161)..(161): Xaa is any aa, unknown or other
MPTFWSSPRASHTAGEASTMLLSHGGSKVCSSSQPCTESHSSTTLAYTELPLAALILIRWPQRAMLLNQPVESATTFSWSLWYALSHSEGAAAVLALLEAVERQHGPGARRDRRRAAVLRVHLAVLAAVRVVALLAVAGAAREVPAGAARAEAGARAERGXRVGCGERDQEEHEHGGGYSSYTGHLCLPADFVLEDRAPSHSVLFPSFLPFFLSFFLSCALLCLMVLLDYLCMGLYIVAVPSC

SEQ ID NO: 930 - DNA, 1012 bp, Zea mays subsp. mays
  misc_feature (1)..(1012): Ceres Seq. ID no. 12369675
  misc_feature (1)..(1012): Ortholog of  Ceres SEQ ID NO 14309294 as cited in SEQ ID NO 0
gagctccccgcggcagcaatggagaccctcctctccccctccacattgttcacgctaccactccgtggctccagcaggagaccgtctctggctgctagcgtctcgtccaggcccaccgtgtcctgctccagcgcgctcaagaggccacaggccggcgccgtcgctgcctcctcccatggagacggcgtcggcaggaactggatgtcgttcctgcaccacggcctggcggcggccgcgctgtcgctggccatcggcctgaccccggcgcccgcgcgcggcggtggcgtcggagttcgacgtgctgaacgacggggcccccgtggactcctacgtggtggacgacgccggcgtgctgagccgcgtcaccaagtccgacgtcaagcggcttgcccgcgacctcgaggcccgcaagaacatccgcctcaacttcatcaccgtccgcaagctcacgagcaaggctgacgcgttcgagtacgcggaccaagtcctggagaagtggtaccccacgattgaggagggcaacaacaagggcatcgtggtgctcgtcacaagccagaaggagggcgccgtcaccggggggcccgccttcatccaggccgtcggcgaccagattctcgacgccaccgtgtctgagaacctcccagtcctcgcgaccgacgagaagtacaacgaggcgatcttgagcacggcgaagcggctggcggcggcgatcgacgggctgccggacactggtggcccgtcgttcaaggagaacaagcgggagtccaacttcaagaccaaggaggagacggagganaagcgcgggcagttcacgctcgtcgtcggcggcctgctcgtcatcgccgtcgtcgtgcccatggcgcagtactacgcctacgtgtccaagaagtgagcgaaccatgaatatggcgtgctgtgtacagtaaatcagtaatgttataccgaagagggtttttttttaatctcccaggttgaagttcttcggtctgttggaattcttagaaatggacgg

SEQ ID NO: 931 - protein, 153 aa, Zea mays subsp. mays
  peptide (1)..(153): Ceres Seq. ID no. 12369676
ELPAAAMETLLSPSTLFTLPLRGSSRRPSLAASVSSRPTVSCSSALKRPQAGAVAASSHGDGVGRNWMSFLHHGLAAAALSLAIGLTPAPARGGGVGVRRAERRGPRGLLRGGRRRRAEPRHQVRRQAACPRPRGPQEHPPQLHHRPQAHEQG

SEQ ID NO: 932 - protein, 147 aa, Zea mays subsp. mays
  peptide (1)..(147): Ceres Seq. ID no. 12369677
METLLSPSTLFTLPLRGSSRRPSLAASVSSRPTVSCSSALKRPQAGAVAASSHGDGVGRNWMSFLHHGLAAAALSLAIGLTPAPARGGGVGVRRAERRGPRGLLRGGRRRRAEPRHQVRRQAACPRPRGPQEHPPQLHHRPQAHEQG

SEQ ID NO: 933 - protein, 86 aa, Zea mays subsp. mays
  peptide (1)..(86): Ceres Seq. ID no. 12369678
MSFLHHGLAAAALSLAIGLTPAPARGGGVGVRRAERRGPRGLLRGGRRRRAEPRHQVRRQAACPRPRGPQEHPPQLHHRPQAHEQG

SEQ ID NO: 934 - DNA, 1231 bp, Zea mays subsp. mays
  misc_feature (1)..(1231): Ceres Seq. ID no. 12364668
  misc_feature (1)..(1231): Ortholog of  Ceres SEQ ID NO 13574538 as cited in SEQ ID NO 15165
gcacgagaccattacctagaacatcctaatcgaaaatgtttttttctacaggtgttttatgaattgcttttttacttcttgtttgatgtgaaatgaaatgccatgtggtatctgatgcctggtctcgtttcagtggcctcgcgtctcgtaagagtggcagacagtgatcggcgggttctttgcgacacgggctgctcttcgaccatgagcttcttgttactattcccccgcgacatttgtttggcatttctgttaacgattttctttgtttatattacactaaagtcaaagcctgaagccacgtcggcaactggatctaccattatgacataagcagaaatctaaataacacaaaaaaatcaggattactatatatttgtgcacaaagccacgaagaattgcatgaattgtggacaaagctgaaattcaaggatgctgaaagcctgcagcagacttctgacatggagagtgtgaatcttctccaaagtggggggccatgagatcaatgttgcctcggatcaatcacaaacaaggttgtctggatacacttcagttccatatacaagcttccctgcccaggcagagctaactgttgtaggttgcagcaaaggattggatgcaaaagggcgctggacacgtgctcgtgtggcccaagtgagcatgctaatcagccccttttggttccttgcacagcttacgttcaatctgtctctaagatacaccactgtcacggtaagtgttactaagaactgaatgatacttccatattttaaagccaaacctggcccaggcaccacccaggcaccagaggcctccaaacggtcaaggatacaccactgtcacggtcaagtcctgcagaagctgaaactgatcatggataagactttgccttgtgtcacaatgggtgcatttgctggtggtccttggatcaggttgctcatgggtggtgaatgatctgacgacttcagaagaggatagatctgagattacctttcatgcatgtcaaggaagttaagtagctgatgccatcaaagaaatggagaaacgtcaggtgaaccgcgagcagaattccgtggcgcatttgttagcgcagttagttaggactctgttcatacagctgttcgattaagccaaatacctgatttagttttatattggttgttgtcaaagaatttgtgaaatattgaggttgataatatatgtggcgttcgtttttatgtaatcattgtcc

SEQ ID NO: 935 - protein, 76 aa, Zea mays subsp. mays
  peptide (1)..(76): Ceres Seq. ID no. 12364669
MWYLMPGLVSVASRLVRVADSDRRVLCDTGCSSTMSFLLLFPRDICLAFLLTIFFVYITLKSKPEATSATGSTIMT

SEQ ID NO: 936 - protein, 72 aa, Zea mays subsp. mays
  peptide (1)..(72): Ceres Seq. ID no. 12364670
MPGLVSVASRLVRVADSDRRVLCDTGCSSTMSFLLLFPRDICLAFLLTIFFVYITLKSKPEATSATGSTIMT

SEQ ID NO: 937 - protein, 66 aa, Zea mays subsp. mays
  peptide (1)..(66): Ceres Seq. ID no. 12364671
MILPYFKAKPGPGTTQAPEASKRSRIHHCHGQVLQKLKLIMDKTLPCVTMGAFAGGPWIRLLMGGE

SEQ ID NO: 938 - DNA, 931 bp, Zea mays subsp. mays
  misc_feature (1)..(931): Ceres Seq. ID no. 12418204
  misc_feature (1)..(931): Ortholog of  Ceres SEQ ID NO 13599087 as cited in SEQ ID NO 614
ctcttcgtcctcgtgctctgccgctccgtgctacagggtttcctcgccttcgtggttttagggttcatgttcttcaccagaatccatcgggaaaaaagtcttttccccctacattttcgaccggaggctgtgtattgaagaaccttatccagttcgacgtcagtgccgccaatgctttcctcgatgcccacgccgcacataggcatcggtagctccgctgtgagccactacaacccctcgcacccaggttgtgattgaaggacatcttcacgctgctactttggatgacaaaaaatgccaattgttgttcacaaaatcacgctgggaactctgggacaacttcacgctaccaagtgattccattggttgtcgttgaaggacatctttatgctgctacctctacgaactcatctgtgaaaaagcaattgttcttcacgctggggactttaagaactctgtgacatcttcacgttgccaactctggtaacacaggtcatattcgtcctctgctgcagacaaagttcgtgagcaagaaacgagctattggaatttttccatacacaagacgttgataaacagatttcagctgaactcaataaagacagcctcgcgtcacctcctaagaagatcaagactgccctgctaggttntacacaccctgataaccttaatcattagatcatcaacggtctcatgatgttctcatgaaggtagtatgacctcgtcacttttagagcatggatgcttttgtgtatatataaccaaaccactgaaactttcgcagtgttgtatatattgaacagatctccagctgttgaatcttgctaatgatgtaatatataagtttgtacaaacccacgaacatgtatgttgactatgcagctaccgtaactgctataattatcacctctgcacaatgtgcaactctttc

SEQ ID NO: 939 - protein, 69 aa, Zea mays subsp. mays
  peptide (1)..(69): Ceres Seq. ID no. 12418205
LRPRALPLRATGFPRLRGFRVHVLHQNPSGKKSFPPTFSTGGCVLKNLIQFDVSAANAFLDAHAAHRHR

SEQ ID NO: 940 - protein, 58 aa, Zea mays subsp. mays
  peptide (1)..(58): Ceres Seq. ID no. 12418206
MTKNANCCSQNHAGNSGTTSRYQVIPLVVVEGHLYAATSTNSSVKKQLFFTLGTLRTL

SEQ ID NO: 941 - protein, 45 aa, Zea mays subsp. mays
  peptide (1)..(45): Ceres Seq. ID no. 12418207
LFVLVLCRSVLQGFLAFVVLGFMFFTRIHREKSLFPLHFRPEAVY

SEQ ID NO: 942 - DNA, 1004 bp, Zea mays subsp. mays
  misc_feature (1)..(1004): Ceres Seq. ID no. 12363503
  misc_feature (1)..(1004): Ortholog of  Ceres SEQ ID NO 14311854 as cited in SEQ ID NO 51455
gcacgagaccattacctagaacatcctaatcgaaaactgtgcacccccccagtcgccgcctcatcctcccatcgccatccacctagatcctcccatcacctcctcctcgtagggcgcccataggtagttcacagagcacggccggcgagcgtcgaggcagagccacgacttacccttgccgctccagtgaaggaggttgatatggccctgatggagaccccgacagcggccctcgacgttgtcgccgccgagcccgtgctggttccaccagtggtccaccacccagatgtggcccgcaaagacgagcaggaacggcggcagcgaggcgaggtggtagatccagcaccgctttggcacggccatccattcctccacccagagcgtgtacccaggcctgcctctcctcgaggaacgccgtcgaggtcgttcggctggagcagaaggcggcgtcgctcagcaagctggtcgaggagcagtgcgagagcatagacgatctcaagtccaaggctagtgctgatctccttccccgatttatgaactgcattgagtcgcgtgcgagtttcagttgttgataatttattcatggtggtaactagtgttggaaaactaaagtttacccccaccttttctgctgcatctacggacgaaaggatgaatctgcgacgcggagaaacagttactgcaggccacatcaataaaactgacaagcaaatataaggtggtgaaagtctctgctactttacaaggttcagtatgtaattaaaaaaagaatgatctggatatggatgtactgtctgtacataaactgctcgtcttggttccttcaggaatcataaaagcatatggaggaactatgtataggctacaaagaagcataagaagcatttttatagcagaagccaagtgttttgatgattttgtttttttcaattgtgttttctgttattggttcagcatgcacatatattgacatgatttatggcatggcatctgccatctttgtc

SEQ ID NO: 943 - protein, 95 aa, Zea mays subsp. mays
  peptide (1)..(95): Ceres Seq. ID no. 12363504
MALMETPTAALDVVAAEPVLVPPVVHHPDVARKDEQERRQRGEVVDPAPLWHGHPFLHPERVPRPASPRGTPSRSFGWSRRRRRSASWSRSSARA

SEQ ID NO: 944 - protein, 92 aa, Zea mays subsp. mays
  peptide (1)..(92): Ceres Seq. ID no. 12363505
METPTAALDVVAAEPVLVPPVVHHPDVARKDEQERRQRGEVVDPAPLWHGHPFLHPERVPRPASPRGTPSRSFGWSRRRRRSASWSRSSARA

SEQ ID NO: 945 - protein, 62 aa, Zea mays subsp. mays
  peptide (1)..(62): Ceres Seq. ID no. 12363506
MDVLSVHKLLVLVPSGIIKAYGGTMYRLQRSIRSIFIAEAKCFDDFVFFNCVFCYWFSMHIY

SEQ ID NO: 946 - DNA, 2056 bp, Zea mays subsp. mays
  misc_feature (1)..(2056): Ceres Seq. ID no. 12418187
  misc_feature (1)..(2056): Ortholog of  Ceres SEQ ID NO 13596935 as cited in SEQ ID NO 63031
  misc_feature (1)..(2056): Ortholog of  Ceres SEQ ID NO 15179123 as cited in SEQ ID NO 0
gcacgagaccattacctagaacatcctaatcgaaaaatgtggatgacgaggagggcctactcaatttactttattgcttggccggcgccggcgacgtcgcacgccaccgatggatcctatacagcgcactcactgctgcgctccggcggcggctgctgcctgcgccacgctcggcgacgcctggcgcttgacgagcttggtgaaggaggtgccctccacctcgaagtcgtcgtagcgccggaacagctcggccagcagcatgcacgccgtgtccaccaccacctccttggcggcgcactgcttgttcccgggcccgggctgcgccgtctccggcccgttggaccagaagaggtgctgcagcagcctggcgccgtcgtcgccgaggaagcgttccggcacgaactcctcgggccgctcgaacacctcggggtcccgcatcgccagcggctggtacccgcacagcacctcgcccgcggacacctggtacgcggcgccgccgtgggagcgcagcacgaagtccctgcgcgcgcgcccgaactgcagcggcacgggcggctgcatccgcagcatctcgtacaccgtcgaccgcaccagcggcatgccctcgcggacggtggcgaacccgaactcgccgtctttgcccaccatggcgcgccgcacctcgtcacgcaggcgctcgcgcagcgccgacgcgccgccgaccttggccacgaggaagggcaggaacacggagaagccgccgaaggcgttgaagccgagcacgaacaggatgttgttgatggcgtccttcttgccgatgccgtgctgcgcctcggcgtaggccacggcctcggcgccgtgcttctcgatgaagcggtagagcacgtagtagcccggccagatgaggaaggagggcagcgggaaggagtggatgagcagctcctccagcggctggacgaggccgatcttctgcgtgggcaggatctgcagcgccagccagatgtccaggatggtgaagccgaagttgtccaccagccagtcggcggacgggtcggcgcccacgaacgccttgcagaggaaccggaagatgcactgctgcagggggacgaggtagctggcggagggcttcttgtcgctgccgtcgtccttgccgaactccgcgtccacggcgtccagcatggcgccgacgctcgcgcggaagtcggcggaccaggtgcgggcggagcggtggaggaggtccatggcgaaggtcttgacgcgcgcgtgctcctcctcctgcgtgtcgaggtacacgccgacgcgcgtcccgccggtgaagccggcgcccgggttatagggcccgatgaggatgtcgcgcttgtccacgaggtccgggtcgaagagcgcggtgaaggcggcggcgtccacgatggcgaccacgcgcgggtccacgcccacgaagaaggggaaggtgggcgggatgttggtgcggaacacggtgctgcggtgtgccgccgcgcgcttccggaagaactcgtcctggctctggaaccagaagtagtcgagccggtcccgtagcgggcccagcaccggtggcccgtagctgcctggtatcggccgcggcggaggcgtcaccgaggccgcggcgctcgccgtcggcgacacgaaggacggcagcatggctagctagctgctgctaagtcgctgactggctggcttgctatgctagctatagctatctcccgtgtgtggtggtggtgagctcagctcagctcagctcacagctccatcgatggatcatcaccttccgatccgttatgtaatgtagccgggaaggagcgaggcaagagcgtgacagcgactacaacaagtgtccagcgtgtggaacgtgtgggacatccaagctaggcagcatacacaagcaacaaggagccggcacgttgccatattctgccgacgaggacagcgccaccatgctaggcagccatgtcattggtccacacctttcatatttgttttcattttaaaaaatagtggtatcacaatgctgcaagataaggtgtacttgctaggaaaaaacggcacatatttaagttgt

SEQ ID NO: 947 - protein, 511 aa, Zea mays subsp. mays
  peptide (1)..(511): Ceres Seq. ID no. 12418188
ARDHYLEHPNRKMWMTRRAYSIYFIAWPAPATSHATDGSYTAHSLLRSGGGCCLRHARRRLALDELGEGGALHLEVVVAPEQLGQQHARRVHHHLLGGALLVPGPGLRRLRPVGPEEVLQQPGAVVAEEAFRHELLGPLEHLGVPHRQRLVPAQHLARGHLVRGAAVGAQHEVPARAPELQRHGRLHPQHLVHRRPHQRHALADGGEPELAVFAHHGAPHLVTQALAQRRRAADLGHEEGQEHGEAAEGVEAEHEQDVVDGVLLADAVLRLGVGHGLGAVLLDEAVEHVVARPDEEGGQREGVDEQLLQRLDEADLLRGQDLQRQPDVQDGEAEVVHQPVGGRVGAHERLAEEPEDALLQGDEVAGGGLLVAAVVLAELRVHGVQHGADARAEVGGPGAGGAVEEVHGEGLDARVLLLLRVEVHADARPAGEAGARVIGPDEDVALVHEVRVEERGEGGGVHDGDHARVHAHEEGEGGRDVGAEHGAAVCRRALPEELVLALEPEVVEPVP

SEQ ID NO: 948 - protein, 499 aa, Zea mays subsp. mays
  peptide (1)..(499): Ceres Seq. ID no. 12418189
MWMTRRAYSIYFIAWPAPATSHATDGSYTAHSLLRSGGGCCLRHARRRLALDELGEGGALHLEVVVAPEQLGQQHARRVHHHLLGGALLVPGPGLRRLRPVGPEEVLQQPGAVVAEEAFRHELLGPLEHLGVPHRQRLVPAQHLARGHLVRGAAVGAQHEVPARAPELQRHGRLHPQHLVHRRPHQRHALADGGEPELAVFAHHGAPHLVTQALAQRRRAADLGHEEGQEHGEAAEGVEAEHEQDVVDGVLLADAVLRLGVGHGLGAVLLDEAVEHVVARPDEEGGQREGVDEQLLQRLDEADLLRGQDLQRQPDVQDGEAEVVHQPVGGRVGAHERLAEEPEDALLQGDEVAGGGLLVAAVVLAELRVHGVQHGADARAEVGGPGAGGAVEEVHGEGLDARVLLLLRVEVHADARPAGEAGARVIGPDEDVALVHEVRVEERGEGGGVHDGDHARVHAHEEGEGGRDVGAEHGAAVCRRALPEELVLALEPEVVEPVP

SEQ ID NO: 949 - protein, 497 aa, Zea mays subsp. mays
  peptide (1)..(497): Ceres Seq. ID no. 12418190
MTRRAYSIYFIAWPAPATSHATDGSYTAHSLLRSGGGCCLRHARRRLALDELGEGGALHLEVVVAPEQLGQQHARRVHHHLLGGALLVPGPGLRRLRPVGPEEVLQQPGAVVAEEAFRHELLGPLEHLGVPHRQRLVPAQHLARGHLVRGAAVGAQHEVPARAPELQRHGRLHPQHLVHRRPHQRHALADGGEPELAVFAHHGAPHLVTQALAQRRRAADLGHEEGQEHGEAAEGVEAEHEQDVVDGVLLADAVLRLGVGHGLGAVLLDEAVEHVVARPDEEGGQREGVDEQLLQRLDEADLLRGQDLQRQPDVQDGEAEVVHQPVGGRVGAHERLAEEPEDALLQGDEVAGGGLLVAAVVLAELRVHGVQHGADARAEVGGPGAGGAVEEVHGEGLDARVLLLLRVEVHADARPAGEAGARVIGPDEDVALVHEVRVEERGEGGGVHDGDHARVHAHEEGEGGRDVGAEHGAAVCRRALPEELVLALEPEVVEPVP

SEQ ID NO: 950 - DNA, 768 bp, Zea mays subsp. mays
  misc_feature (1)..(768): Ceres Seq. ID no. 12360608
  misc_feature (1)..(768): Ortholog of  Ceres SEQ ID NO 13597019 as cited in SEQ ID NO 64303
  misc_feature (1)..(768): Ortholog of  Ceres SEQ ID NO 13654191 as cited in SEQ ID NO 68235
atcaatggacgacgcaaacgcaaacttctttgctgctcgctctagttttcgagctgtgtgtgcatcggtttgtgttcaaagcttaatttttcattgggaaaaacttattagagcagcagcgaacgcgcgcaccttgacgctgatggagtagaggacaagggcgtccagcgtggtgacgctgaggtggagcacggcgaggcggagcgcctggagcgcggtgaccaggcagacgagctgcccgggcctccgcgccgtcatcacgcggatgctaccgtgcgcctccaccaaggccacctcgacgtcggccacccccaaccgccggccgtcctcctcctcctccgctgccgccgccgcagcagcaccgcgcgccgagtggcaccacaggtactgcgggtacgtgaagaaccgcgcgaacggggccggccgcgcgtggcccgccgcgtcctccgtcacgctgctgctgctgctgcagttgctcgtcgacgccgccgcggaatccacgcggatcttggtgctgctgctgctggcgtgcgctggcgtcgcgtcaggcttcgccgccgccggaacgtgcagcagcttccgcttctgcgcctcgaggcactgcagctgctgctccagctccctcacgaacacgattgcccctcccacgatggaagcttggtccccctgcgaacgttttcgaaaccgttagttttgccaggatttgccgatttattatctggactatggacagacatgcagtgacattatttgccgatttaattaact

SEQ ID NO: 951 - protein, 141 aa, Zea mays subsp. mays
  peptide (1)..(141): Ceres Seq. ID no. 12360609
MLPCASTKATSTSATPNRRPSSSSSAAAAAAAPRAEWHHRYCGYVKNRANGAGRAWPAASSVTLLLLLQLLVDAAAESTRILVLLLLACAGVASGFAAAGTCSSFRFCASRHCSCCSSSLTNTIAPPTMEAWSPCERFRNR

SEQ ID NO: 952 - DNA, 1002 bp, Zea mays subsp. mays
  misc_feature (1)..(1002): Ceres Seq. ID no. 12387989
  misc_feature (1)..(1002): Ortholog of  Ceres SEQ ID NO 13598313 as cited in SEQ ID NO 68293
aatcttttgaagcaaccttctccagcttcagatgggcaaaagctcttctcctaccagcaggatattccctactaaccgccgccgtctttgccggtcatgtcatgtgaccctgatggtccccagaaagggcgtcctctgcggcggcggcggcggcggcggcagcgatggccccatctggacctgctgctggtgctcgctctgccgggcggtcgagatcttcagctccaggtccggcgccaggccaccagcctttgccgccgtcagcgacgaagaagggtggctgtgtttcggcggcgccagggccaggctcggcgccgtgcggccaattcccgccgagcaccgcggcagctgcagggacagcaggctgctcggaggcagcgcggcgtggtcgggcctcgctggtggcctgccgacgccgagcgacagggccggcgggagctgtgccgtcgtcccggttccgggttctgcggagccagtcgcggtcgcggtcgtgatggcgtccttgagccgcaggcgctccatgcccttgatggagctcgtcgccgccctctcggcgttctccacctgaaacggaagaggttcgcgaatcagacacgcacacgccagggctggtacagcacgtctcgcatggagggagcgtggcgacggacggacgggacgggacgggacgtaacgtaccacgtcgaagaggctggacctgcgcttcttgtgcgtcaggctgctctgccggaggaagtacttctgggcgtggctggccacctgcgtcggggtccgcgtcgtcacgaagtgccgggagatgcctcgccagtcgcccttcccgagcttctccaggcccgccaggaatcgcctgtgctcgtcctccgtccatggaacgcctggtgatacccagacaagaaggcgaggagagttttttttttagaatcagacttgcttagctcaaacaagctgccgggaacaggagtattgttgttctattctgttctgttctatataaaagatttg

SEQ ID NO: 953 - protein, 261 aa, Zea mays subsp. mays
  peptide (1)..(261): Ceres Seq. ID no. 12387990
MSCDPDGPQKGRPLRRRRRRRQRWPHLDLLLVLALPGGRDLQLQVRRQATSLCRRQRRRRVAVFRRRQGQARRRAANSRRAPRQLQGQQAARRQRGVVGPRWWPADAERQGRRELCRRPGSGFCGASRGRGRDGVLEPQALHALDGARRRPLGVLHLKRKRFANQTRTRQGWYSTSRMEGAWRRTDGTGRDVTYHVEEAGPALLVRQAALPEEVLLGVAGHLRRGPRRHEVPGDASPVALPELLQARQESPVLVLRPWNAW

SEQ ID NO: 954 - protein, 178 aa, Zea mays subsp. mays
  peptide (1)..(178): Ceres Seq. ID no. 12387991
MGKSSSPTSRIFPTNRRRLCRSCHVTLMVPRKGVLCGGGGGGGSDGPIWTCCWCSLCRAVEIFSSRSGARPPAFAAVSDEEGWLCFGGARARLGAVRPIPAEHRGSCRDSRLLGGSAAWSGLAGGLPTPSDRAGGSCAVVPVPGSAEPVAVAVVMASLSRRRSMPLMELVAALSAFST

SEQ ID NO: 955 - protein, 151 aa, Zea mays subsp. mays
  peptide (1)..(151): Ceres Seq. ID no. 12387992
MVPRKGVLCGGGGGGGSDGPIWTCCWCSLCRAVEIFSSRSGARPPAFAAVSDEEGWLCFGGARARLGAVRPIPAEHRGSCRDSRLLGGSAAWSGLAGGLPTPSDRAGGSCAVVPVPGSAEPVAVAVVMASLSRRRSMPLMELVAALSAFST

SEQ ID NO: 956 - DNA, 568 bp, Zea mays subsp. mays
  misc_feature (1)..(568): Ceres Seq. ID no. 12382795
  misc_feature (1)..(568): Ortholog of  Ceres SEQ ID NO 15180188 as cited in SEQ ID NO 0
agtaagtatctcctgccgggtatcaagactgaagaacaaaggtcagatctcgcgtatgctcgtttgtagcagtgtggatctgatacaggtaattgaaacctttagatggtggtagggctagtagtgagcagtagacgacaactagtcctggcagccagttgtagtgaggtgacatggctgcatacagacatccaaccaaaggaaacagagggtgtggtgtggaaagaaggggagagtggacaaaagccagaccggacagacatggctggcgctgctgctgctgcacaggcacagggaaaggtgatgagacgagaggggtggggtggtactctgctgggaccggcgcactcacgggtgcggagaatcagcttcgcctcacgagcgatgcagcagcggagacacagacacctctcgtctgcgtactgtttcgcccatgctcttgtcttgtacgcatccagcagcgttccttgtcctttggctccttcgatgtattacctgctcttcttttcaactaggagtttagcggacaaagaaatgaaaaagtaattagcagtcatttatcttggtc

SEQ ID NO: 957 - protein, 146 aa, Zea mays subsp. mays
  peptide (1)..(146): Ceres Seq. ID no. 12382796
MVVGLVVSSRRQLVLAASCSEVTWLHTDIQPKETEGVVWKEGESGQKPDRTDMAGAAAAAQAQGKVMRREGWGGTLLGPAHSRVRRISFASRAMQQRRHRHLSSAYCFAHALVLYASSSVPCPLAPSMYYLLFFSTRSLADKEMKK

SEQ ID NO: 958 - protein, 113 aa, Zea mays subsp. mays
  peptide (1)..(113): Ceres Seq. ID no. 12382797
MAAYRHPTKGNRGCGVERRGEWTKARPDRHGWRCCCCTGTGKGDETRGVGWYSAGTGALTGAENQLRLTSDAAAETQTPLVCVLFRPCSCLVRIQQRSLSFGSFDVLPALLFN

SEQ ID NO: 959 - protein, 94 aa, Zea mays subsp. mays
  peptide (1)..(94): Ceres Seq. ID no. 12382798
MAGAAAAAQAQGKVMRREGWGGTLLGPAHSRVRRISFASRAMQQRRHRHLSSAYCFAHALVLYASSSVPCPLAPSMYYLLFFSTRSLADKEMKK

SEQ ID NO: 960 - DNA, 760 bp, Zea mays subsp. mays
  misc_feature (1)..(760): Ceres Seq. ID no. 12418043
  misc_feature (1)..(760): Ortholog of  Ceres SEQ ID NO 14303027 as cited in SEQ ID NO 61275
tgattaagtactgataatatttgttgattttgcagatgtgaaggacataaagtgtgtgataaattatgattttccaacaactcttgaagattatattcacaggataggtcgaactggccgtgctggtgctagcggaactgcatttacttttttcacacacgcaaatgcaaagttctcaaggaatctagtgaagattctgcgagaagctggccaagtcgtgaatcctgccttagaatccatgtccaggtcttcgaactcaacgggaggaggcaatttccggtcgagaggcagaggtgggtttggtaaccggggccatatgtctggatcaaatacctttcctttaggaggaagaaggccatattgatgtgtgcaaaagaactgtgggagtatgggactatttgtatactactcggcattaagtgcattctttgggaaatttctgagaaatttcccctactaccaggattgataacaccatcgattttcgctacagtacctggagcttcttatatgaaagaacaacacatcaactatctagcaacagcatatgcattccattcagatatttcttttggaaggaccctgtcttgttttagtggagtccctgtgatcgtttaaagtcgtctgtatacttgtactgaacttcttgtggtgttactgttaggatttatggttgctctctattggtgtgcggtgttactgaacaaatttagttaagaagttaggcatttccatatttaatttgattctgaaataaact

SEQ ID NO: 961 - protein, 84 aa, Zea mays subsp. mays
  peptide (1)..(84): Ceres Seq. ID no. 12418044
MCAKELWEYGTICILLGIKCILWEISEKFPLLPGLITPSIFATVPGASYMKEQHINYLATAYAFHSDISFGRTLSCFSGVPVIV

SEQ ID NO: 962 - DNA, 702 bp, Zea mays subsp. mays; identical to SEQ ID NO: 720
  misc_feature (1)..(702): Ceres Seq. ID no. 13492969
  misc_feature (1)..(702): Ortholog of  Ceres SEQ ID NO 12329459 as cited in SEQ ID NO 20533

SEQ ID NO: 963 - protein, 179 aa, Zea mays subsp. mays; identical to SEQ ID NO: 721
  peptide (1)..(179): Ceres Seq. ID no. 13492970

SEQ ID NO: 964 - DNA, 508 bp, Zea mays subsp. mays
  misc_feature (1)..(508): Ceres Seq. ID no. 12379477
  misc_feature (1)..(508): Ortholog of  Ceres SEQ ID NO 15168904 as cited in SEQ ID NO 20611
cagaatatgtgaggaatgttctcctgtggaagagtctacagggggctacactgctactaaattgatacttgatggatctgatgacaagaatccttgtgataaggaactagttaataaggacaacctgctgcagaggaacaagataaatcaaaaataccaaggactgttcaaaggaaaaacaactaaatgccgacaccctgtacaaaagcaagaaccaggagatggagcaacgcccgcatcacccagtccggccaatcccatctcaactgtggtgcaaaaactttggtaagaaggaatactgaaggaccttccaaactagcatgaagtgcgggcaccttgcttttcttttgccttctttttgtgaaaacgtgtgcttagcgacaatgctggctaagtgttagaagcatctctggaatgcttcgtgtagtatcttttgactctcttttcttttgtcgtctcaatcatgttacatgagaaatgcctgatggactcaaataatgaaccggtg

SEQ ID NO: 965 - protein, 95 aa, Zea mays subsp. mays
  peptide (1)..(95): Ceres Seq. ID no. 12379478
RICEECSPVEESTGGYTATKLILDGSDDKNPCDKELVNKDNLLQRNKINQKYQGLFKGKTTKCRHPVQKQEPGDGATPASPSPANPISTVVQKLW

SEQ ID NO: 966 - DNA, 723 bp, Zea mays subsp. mays
  misc_feature (1)..(723): Ceres Seq. ID no. 14312743
  misc_feature (1)..(723): Ortholog of  Ceres SEQ ID NO 13598976 as cited in SEQ ID NO 460
acggctctcgtttccgcccgcgccacccgccatgtcgtccccgccgcgggggcagcccgccaccgccgccgtgccggcggtcgcggccgccacgtccccgcagttgcccgccgcgtcccacacgctcccccgcgcgttcctcgccacatcctctccccgtgccatagtggcagcaccggcgcccccgcggcggggacgacatggcaggtgggatcggcggcggagacgtgagcagtttttttccactgattctgacagccggaatctatatatacatacaaacacaagagcaaatgaaaggccaaagggacgggaaacgaacgggaagaggtggtgcgtgctaactcctatgcatcgcattcctggatgttcattggtcaatcacgatgctgcactgctgcagctcgggtagtttttgctaagctggaggtgcagcagacaagacaacaagcaagaggatgcaactatatatactgatgccactagtccatcgtggagctcggttgaggaagctcatcgatctcgttgtaccgaactatctcaaaaaaacatagtgcctgtttgtctggatagctgctcggccacaggcacagctgtctggccccgggcaccatccaaacaatcccatatagagcgtgtttggacgcagattcgtaggcctgtaaagcaaacacgtcccaattatctgaactcgggattattgacgccttggcaagattcaac

SEQ ID NO: 967 - protein, 136 aa, Zea mays subsp. mays
  peptide (1)..(136): Ceres Seq. ID no. 14312744
RLSFPPAPPAMSSPPRGQPATAAVPAVAAATSPQLPAASHTLPRAFLATSSPRAIVAAPAPPRRGRHGRWDRRRRREQFFSTDSDSRNLYIHTNTRANERPKGRETNGKRWCVLTPMHRIPGCSLVNHDAALLQLG

SEQ ID NO: 968 - protein, 126 aa, Zea mays subsp. mays
  peptide (1)..(126): Ceres Seq. ID no. 14312745
MSSPPRGQPATAAVPAVAAATSPQLPAASHTLPRAFLATSSPRAIVAAPAPPRRGRHGRWDRRRRREQFFSTDSDSRNLYIHTNTRANERPKGRETNGKRWCVLTPMHRIPGCSLVNHDAALLQLG

SEQ ID NO: 969 - protein, 76 aa, Zea mays subsp. mays
  peptide (1)..(76): Ceres Seq. ID no. 14312746
TALVSARATRHVVPAAGAARHRRRAGGRGRHVPAVARRVPHAPPRVPRHILSPCHSGSTGAPAAGTTWQVGSAAET

SEQ ID NO: 970 - DNA, 568 bp, Zea mays subsp. mays; identical to SEQ ID NO: 956
  misc_feature (1)..(568): Ceres Seq. ID no. 12382795
  misc_feature (1)..(568): Ortholog of  Ceres SEQ ID NO 15180188 as cited in SEQ ID NO 0

SEQ ID NO: 971 - protein, 146 aa, Zea mays subsp. mays; identical to SEQ ID NO: 957
  peptide (1)..(146): Ceres Seq. ID no. 12382796

SEQ ID NO: 972 - protein, 113 aa, Zea mays subsp. mays; identical to SEQ ID NO: 958
  peptide (1)..(113): Ceres Seq. ID no. 12382797

SEQ ID NO: 973 - protein, 94 aa, Zea mays subsp. mays; identical to SEQ ID NO: 959
  peptide (1)..(94): Ceres Seq. ID no. 12382798

SEQ ID NO: 974 - DNA, 760 bp, Zea mays subsp. mays; identical to SEQ ID NO: 960
  misc_feature (1)..(760): Ceres Seq. ID no. 12418043
  misc_feature (1)..(760): Ortholog of  Ceres SEQ ID NO 14303027 as cited in SEQ ID NO 61275

SEQ ID NO: 975 - protein, 84 aa, Zea mays subsp. mays; identical to SEQ ID NO: 961
  peptide (1)..(84): Ceres Seq. ID no. 12418044

SEQ ID NO: 976 - DNA, 702 bp, Zea mays subsp. mays; identical to SEQ ID NO: 720
  misc_feature (1)..(702): Ceres Seq. ID no. 13492969
  misc_feature (1)..(702): Ortholog of  Ceres SEQ ID NO 12329459 as cited in SEQ ID NO 20533

SEQ ID NO: 977 - protein, 179 aa, Zea mays subsp. mays; identical to SEQ ID NO: 721
  peptide (1)..(179): Ceres Seq. ID no. 13492970

SEQ ID NO: 978 - DNA, 508 bp, Zea mays subsp. mays; identical to SEQ ID NO: 964
  misc_feature (1)..(508): Ceres Seq. ID no. 12379477
  misc_feature (1)..(508): Ortholog of  Ceres SEQ ID NO 15168904 as cited in SEQ ID NO 20611

SEQ ID NO: 979 - protein, 95 aa, Zea mays subsp. mays; identical to SEQ ID NO: 965
  peptide (1)..(95): Ceres Seq. ID no. 12379478

SEQ ID NO: 980 - DNA, 723 bp, Zea mays subsp. mays; identical to SEQ ID NO: 966
  misc_feature (1)..(723): Ceres Seq. ID no. 14312743
  misc_feature (1)..(723): Ortholog of  Ceres SEQ ID NO 13598976 as cited in SEQ ID NO 460

SEQ ID NO: 981 - protein, 136 aa, Zea mays subsp. mays; identical to SEQ ID NO: 967
  peptide (1)..(136): Ceres Seq. ID no. 14312744

SEQ ID NO: 982 - protein, 126 aa, Zea mays subsp. mays; identical to SEQ ID NO: 968
  peptide (1)..(126): Ceres Seq. ID no. 14312745

SEQ ID NO: 983 - protein, 76 aa, Zea mays subsp. mays; identical to SEQ ID NO: 969
  peptide (1)..(76): Ceres Seq. ID no. 14312746

SEQ ID NO: 984 - DNA, 1458 bp, Zea mays subsp. mays
  misc_feature (1)..(1458): Ceres Seq. ID no. 13599231
ctaattttacgaagcccgttaatcgcgttaccagcaatccaaaaagctccacaaccccacccttcttcttcctccgccatcgttgcctccgttcaaaagatttcagaaacccacacccacctaaacccatgcagtcccttgcgaaatctcggtcgctcgagtccgtccttcccctcgccgtccacctccagtccatggcgtacgtgaatgtgacgatgcggtggaagaaggactcatcgtttgatgccatccccgagatctcccacgcgcgcgacatccgcccgctcgtctccctcgcacacatcctgtccccatcgcccacccctgtatctgcggtctccaagctcggccccttgctcgagatcccagaccgccgggtcaccgctttcctccgccgcttccccgccgccttcgtcgagtctgtggggcagcacaacatcccctggttccgtctctctgatgccgccacccgactcctgcgggaggagcgggccgtcttcgccgcccgccgtgccgatgtctgtgctcgcctgcgccgcatcgtcttgatgaccccgcgacgccgcctcccgctccacatcgcgcagggcatgctctggcatcttggcattccagagaactacttaaaggacctggatcatgacattgcacaggatggattcaggattgtaatttcaggagatggtgaccatgggagggaattggagctaattgacgatggcaagaatgaagaaatgcctctgtcagttcttcaggtaaatgctatgagaaagttggggtcggtggaagaggtgcctgtcccgctcttcccgtccaagggtcttcggttgaagcaaaagattaaggactggttggaagggttccagaggctcccttatgtatctccatatgagaatttcagccacatcaatccgggtagtgatgtttcagagaagcgggcagtcggggtgctccatgagctgcttagtctgtttgtgacatgctctgctgagaggcgacggttacgctgcctccggcagcacctagggctgccacagaagtttcatcttgtgttcgagcggcaccctcatgtgttctacttattgttaaaggagaagacatgctttgttgtcctcaaagaggcctacatagctggagaagacactgcaattgaggcgcaccccatgttggaagtgttcaagaagtatgttgagttgatggagcagtcacgggaaatcataagatgtcgacggagcgggaagcctattgaactagagtccaaggcatgcggggatagctgagaagaaggatgggaatacatgtgcaaatatgacctctataacaagaatgtggatatgtactcttggtaggagctagtttatttctcattatttgtagagaaatatttctcattatttgtagagaaatacatcaagtgctgaaacaggttggtgactatgatatttaatctgcattctt

SEQ ID NO: 985 - protein, 425 aa, Zea mays subsp. mays
  peptide (1)..(425): Ceres Seq. ID no. 15222542
NFTKPVNRVTSNPKSSTTPPFFFLRHRCLRSKDFRNPHPPKPMQSLAKSRSLESVLPLAVHLQSMAYVNVTMRWKKDSSFDAIPEISHARDIRPLVSLAHILSPSPTPVSAVSKLGPLLEIPDRRVTAFLRRFPAAFVESVGQHNIPWFRLSDAATRLLREERAVFAARRADVCARLRRIVLMTPRRRLPLHIAQGMLWHLGIPENYLKDLDHDIAQDGFRIVISGDGDHGRELELIDDGKNEEMPLSVLQVNAMRKLGSVEEVPVPLFPSKGLRLKQKIKDWLEGFQRLPYVSPYENFSHINPGSDVSEKRAVGVLHELLSLFVTCSAERRRLRCLRQHLGLPQKFHLVFERHPHVFYLLLKEKTCFVVLKEAYIAGEDTAIEAHPMLEVFKKYVELMEQSREIIRCRRSGKPIELESKACGDS

SEQ ID NO: 986 - protein, 383 aa, Zea mays subsp. mays
  peptide (1)..(383): Ceres Seq. ID no. 15222543
MQSLAKSRSLESVLPLAVHLQSMAYVNVTMRWKKDSSFDAIPEISHARDIRPLVSLAHILSPSPTPVSAVSKLGPLLEIPDRRVTAFLRRFPAAFVESVGQHNIPWFRLSDAATRLLREERAVFAARRADVCARLRRIVLMTPRRRLPLHIAQGMLWHLGIPENYLKDLDHDIAQDGFRIVISGDGDHGRELELIDDGKNEEMPLSVLQVNAMRKLGSVEEVPVPLFPSKGLRLKQKIKDWLEGFQRLPYVSPYENFSHINPGSDVSEKRAVGVLHELLSLFVTCSAERRRLRCLRQHLGLPQKFHLVFERHPHVFYLLLKEKTCFVVLKEAYIAGEDTAIEAHPMLEVFKKYVELMEQSREIIRCRRSGKPIELESKACGDS

SEQ ID NO: 987 - protein, 361 aa, Zea mays subsp. mays
  peptide (1)..(361): Ceres Seq. ID no. 15222544
MAYVNVTMRWKKDSSFDAIPEISHARDIRPLVSLAHILSPSPTPVSAVSKLGPLLEIPDRRVTAFLRRFPAAFVESVGQHNIPWFRLSDAATRLLREERAVFAARRADVCARLRRIVLMTPRRRLPLHIAQGMLWHLGIPENYLKDLDHDIAQDGFRIVISGDGDHGRELELIDDGKNEEMPLSVLQVNAMRKLGSVEEVPVPLFPSKGLRLKQKIKDWLEGFQRLPYVSPYENFSHINPGSDVSEKRAVGVLHELLSLFVTCSAERRRLRCLRQHLGLPQKFHLVFERHPHVFYLLLKEKTCFVVLKEAYIAGEDTAIEAHPMLEVFKKYVELMEQSREIIRCRRSGKPIELESKACGDS

SEQ ID NO: 988 - DNA, 930 bp, Zea mays subsp. mays
  misc_feature (1)..(930): Ceres Seq. ID no. 13599585
acacattcaaactaataactctcaaaaactgagagcagaagagagtagaggagaaacaaatgtccatatccatggcgctattctctccgccgatctcttcttcagttcaaaaccccaagatctcgttccctctcctctccaccaagcgcttctctctcctctccgtcactcgcgcttcctccgattctgctgcagtctctgcaaccaccgtagagattccgaagcccgcgtcggtttctgtagaggaggtgccatctaaacctcctgcggaaagctcctccgacgagactgatctgccaaccacggcgacgggaatcaagtttcaggatgcgaagtgggttaatggaacctgggatctgaaacagttcgagaaagacgggaaaaccgattgggattctattatcgtcgctgaggcaaagaggagaaagtggcttgaagataacccagaaacaactactaacgctgagcctgttcttttcgacacctcgatcattccatggtgggcgtggatgaagagataccatctaccagaagctgaactcctcaatggtcgtgctgcgatgatagggttcttcatggcttactttgttgacagccttaccggagtaggacttgttgatcaaatgggaaacttcttctgcaaaacactcttgtttgtggctgtagctggagttcttttcatccgcaagaacgaagatttagataagctcaagggtctgatcgaagagacgacgctatatgacaagcaatggcaagcggcttggaaagagccggaatcatcatcatcgacgctttcttcaaagaagtgaacaaaatctttctcgctttttgtttcctcttttctcatgtgatgtttgtgatcagtgaaaaaagtctcaagataaacgcaaaatctatttggctttgaaaaaatctctttaaagtagtccc

SEQ ID NO: 989 - protein, 249 aa, Zea mays subsp. mays
  peptide (1)..(249): Ceres Seq. ID no. 15218600
MSISMALFSPPISSSVQNPKISFPLLSTKRFSLLSVTRASSDSAAVSATTVEIPKPASVSVEEVPSKPPAESSSDETDLPTTATGIKFQDAKWVNGTWDLKQFEKDGKTDWDSIIVAEAKRRKWLEDNPETTTNAEPVLFDTSIIPWWAWMKRYHLPEAELLNGRAAMIGFFMAYFVDSLTGVGLVDQMGNFFCKTLLFVAVAGVLFIRKNEDLDKLKGLIEETTLYDKQWQAAWKEPESSSSTLSSKK

SEQ ID NO: 990 - protein, 245 aa, Zea mays subsp. mays
  peptide (1)..(245): Ceres Seq. ID no. 15218601
MALFSPPISSSVQNPKISFPLLSTKRFSLLSVTRASSDSAAVSATTVEIPKPASVSVEEVPSKPPAESSSDETDLPTTATGIKFQDAKWVNGTWDLKQFEKDGKTDWDSIIVAEAKRRKWLEDNPETTTNAEPVLFDTSIIPWWAWMKRYHLPEAELLNGRAAMIGFFMAYFVDSLTGVGLVDQMGNFFCKTLLFVAVAGVLFIRKNEDLDKLKGLIEETTLYDKQWQAAWKEPESSSSTLSSKK

SEQ ID NO: 991 - DNA, 727 bp, Zea mays subsp. mays
  misc_feature (1)..(727): Ceres Seq. ID no. 13599232
agtgttttctagtgactcggaaaggaaagcgtgactcgctctgaagactcagtgagggctctgtgatcggagttgtaaaaatgtcgacggtggtagatcggagtgtatcgacgctgaatccaaacgcgccggcgttcgatccggtgggattccgtgaggtagaggatttctctcccaagtggtgggagctggtgacaacatccaagtggttccgtgacttctggctcagtgccaactcggaggagtatgagttcggcgagttctcagatatggaggacgagttcgaggagctagtcatgacgtcatccggtgagaatgagatggatggatcttcggtgagagaatcagatgttgggaggtacttgaaggtgcttctgagcatggcgaagtctacgaaagggaagctttacagatctaatgtgtcttgttctgccaagtataaccagaagaagatgaacccaaacttctactgtcgccggaaccatcacatctatcagcctcggtgaaaaggttgcagcagcgtctgggaaagaaataaaagctcatctctaaatctcttgtgttttcatgaatgagatactctcatctttacttcttgttctgtactacttgttcctctgattatgtgaatattcttctgttttgtgctttgcgtttatcaaaataatttcgcatagaaaaaaaaaaaaaaaaaagcttatcgataccgtcgacctcgagggggggc

SEQ ID NO: 992 - protein, 141 aa, Zea mays subsp. mays
  peptide (1)..(141): Ceres Seq. ID no. 13599233
MSTVVDRSVSTLNPNAPAFDPVGFREVEDFSPKWWELVTTSKWFRDFWLSANSEEYEFGEFSDMEDEFEELVMTSSGENEMDGSSVRESDVGRYLKVLLSMAKSTKGKLYRSNVSCSAKYNQKKMNPNFYCRRNHHIYQPR

SEQ ID NO: 993 - protein, 78 aa, Zea mays subsp. mays
  peptide (1)..(78): Ceres Seq. ID no. 13599234
MEDEFEELVMTSSGENEMDGSSVRESDVGRYLKVLLSMAKSTKGKLYRSNVSCSAKYNQKKMNPNFYCRRNHHIYQPR

SEQ ID NO: 994 - DNA, 825 bp, Zea mays subsp. mays
  misc_feature (1)..(825): Ceres Seq. ID no. 13623012
gaaaaaaaacagaactcgcaccgttctcgtctaatctctctctcgacaatggctcgatcttcgtctccgtctctttctctctcccggtgccgattcgccgcggcttatctcctcccttcatctcgatccatcttcttccgatctcaatcctcgaatcgccgctctaacctcggggagctgattgagatcgatgtcgccgcgtcgcagtcgcagtcgcaatcggatcctctttcgcagaagctggaggacgcggtgcaccggataatggtgcgccgagccgcgcctgattggctccctttccttcccggcgcttcgtattgggtcccgcctcgtaggtcccagtcccatgggatcgctaagctcgttgagaagctggcgaatcccatcggcgatgaagagtcagtctctgtcgcgtcgggtcgtggatggccttgttctgattacttcatcaaaggtgtagagcctgaatcggtggagacggagatggcttcaggtactgctgcatctcactctgaggatgaggaaggctaaaacattaaaactcgttaaaaccattgtctggactcttcaaaagatttgttgattttaggaacgcggatcaaagaagaattgaaccaccaagagcggttttgaagaggtgacatggtttagactttaagagagggtagaggaaacaaaccttttacaacacatgagatcctatcaagttctgaaatgttaaaaaaaaaaacaataagaaaaggcgttgtagctcagccccctgttttcaatgtaatctttcttataacagtttgatgaatcctgtgtatatatatattcgccggg

SEQ ID NO: 995 - protein, 176 aa, Zea mays subsp. mays
  peptide (1)..(176): Ceres Seq. ID no. 15219384
EKKQNSHRSRLISLSTMARSSSPSLSLSRCRFAAAYLLPSSRSIFFRSQSSNRRSNLGELIEIDVAASQSQSQSDPLSQKLEDAVHRIMVRRAAPDWLPFLPGASYWVPPRRSQSHGIAKLVEKLANPIGDEESVSVASGRGWPCSDYFIKGVEPESVETEMASGTAASHSEDEEG

SEQ ID NO: 996 - protein, 160 aa, Zea mays subsp. mays
  peptide (1)..(160): Ceres Seq. ID no. 15219385
MARSSSPSLSLSRCRFAAAYLLPSSRSIFFRSQSSNRRSNLGELIEIDVAASQSQSQSDPLSQKLEDAVHRIMVRRAAPDWLPFLPGASYWVPPRRSQSHGIAKLVEKLANPIGDEESVSVASGRGWPCSDYFIKGVEPESVETEMASGTAASHSEDEEG

SEQ ID NO: 997 - protein, 88 aa, Zea mays subsp. mays
  peptide (1)..(88): Ceres Seq. ID no. 15219386
MVRRAAPDWLPFLPGASYWVPPRRSQSHGIAKLVEKLANPIGDEESVSVASGRGWPCSDYFIKGVEPESVETEMASGTAASHSEDEEG

SEQ ID NO: 998 - DNA, 899 bp, Zea mays subsp. mays
  misc_feature (1)..(899): Ceres Seq. ID no. 15226901
ctcccccagcccacaggacaactacaaacgcaaacgcactgtgtgctgctgcctgctgctccgtgctgtgccgtggtgtcctcctctcacctgctccaaccaagcaccgccgtcccagcgtccctcaccggccatccagccagccgccgcacggcccgtcgaccccaccgcagggctccctcccgcgctgtcctctccagtctccagcgatgaagcgcctgctgcggcgcctctcccgcgtggccgcggccgacgcctgcgcctgcgccgccgccgcggcgtaccagccgctccggccgggcgccaaggcggccgcgctctccggcgcgcggcggctgggcggcggcgcgcgcgcgccgggtggccacgtgcccgtctgcgtcggcgaggagggcgggcccctggagcggtacgccgtgcgcgccgagctcctcgcccgccccgccttcgccgcgctgctccgccgcgccgcgcaggagtacggctacgcccgccccggcgcgctccgcatcccctgccccgtcgccgacttccgcgacctcctcgtccagctctcctccacctccgcggaccagcccgacgacgacgcggcgctctgctgccactactgctaggcgattctctggcgccaccgctctcattccacccatccaatccggcggaaaggacaaaaaaaaaaagaaagaaagaaagaaacattcgccgcagttgccgcggagggcgtaattgcgatttgcccttgccccctcggtgactgcagcgccaagtgctgctttgcttgtacatacgggagggttagttaagttaactgtgccgtggatccttggatggatgtgggcacggcagggattttctcctgcagctcaacaacagttttttgcgcctgctgtctgtctgat

SEQ ID NO: 999 - protein, 250 aa, Zea mays subsp. mays
  peptide (1)..(250): Ceres Seq. ID no. 15226902
SPSPQDNYKRKRTVCCCLLLRAVPWCPPLTCSNQAPPSQRPSPAIQPAAARPVDPTAGLPPALSSPVSSDEAPAAAPLPRGRGRRLRLRRRRGVPAAPAGRQGGRALRRAAAGRRRARAGWPRARLRRRGGRAPGAVRRARRAPRPPRLRRAAPPRRAGVRLRPPRRAPHPLPRRRLPRPPRPALLHLRGPARRRRGALLPLLLGDSLAPPLSFHPSNPAERTKKKRKKERNIRRSCRGGRNCDLPLPPR

SEQ ID NO: 1000 - protein, 203 aa, Zea mays subsp. mays
  peptide (1)..(203): Ceres Seq. ID no. 15226903
PPAHRTTTNANALCAAACCSVLCRGVLLSPAPTKHRRPSVPHRPSSQPPHGPSTPPQGSLPRCPLQSPAMKRLLRRLSRVAAADACACAAAAAYQPLRPGAKAAALSGARRLGGGARAPGGHVPVCVGEEGGPLERYAVRAELLARPAFAALLRRAAQEYGYARPGALRIPCPVADFRDLLVQLSSTSADQPDDDAALCCHYC

SEQ ID NO: 1001 - protein, 134 aa, Zea mays subsp. mays
  peptide (1)..(134): Ceres Seq. ID no. 15226904
MKRLLRRLSRVAAADACACAAAAAYQPLRPGAKAAALSGARRLGGGARAPGGHVPVCVGEEGGPLERYAVRAELLARPAFAALLRRAAQEYGYARPGALRIPCPVADFRDLLVQLSSTSADQPDDDAALCCHYC

SEQ ID NO: 1002 - DNA, 842 bp, Zea mays subsp. mays
  misc_feature (1)..(842): Ceres Seq. ID no. 13599328
ctttttccacttcctccctcctaatcctaaatcagcatcaatggcgattaccttctcagatctacacacagaggaaggcctcaaatccgtggaggagcacctcgccggaaaaacctacatctccggagatcaattgtccgtggatgatgtgaaggtatacgctgccgtttcggtgaaacctagcgatgctttccctaatgctagcaggtggttcgattgcgtcgcttcccatctagctaaaagcttccctggaaaagccgttggagttagtatcggtggctctgctgctgctgctcctgctcaagctgaggcacctgcagcagctgcagctgatgatgatgatgacatggatctgtttggtgacgagaccgaggaggaaaagaaagcagctgaggagagggaggctgccaagaaggacaccaaaaagcccaaagagagtggaaagtcctctgtgctcatggaagttaagccatgggatgacgagactgacatgaagaaacttgaggagtgtgttcgcgctgttgagatgcctggtcttctttggggagcttcaaaactggttccagttggttacggcatcaagaagctcacgatcatgctcacaatcgttgatgacctcgtgtccccagacaacctcattgaagactacctcacctgtgaacctaacaacgagtacatccagagtgttgacatcgtcgcattcaacaagatctagagactttaaaaacctctccccctaccaaacgatacattttgatttccttccaagttttgttatcttttgttgtttgcttgagatgcttattctctagttgcaagacctatgttacatgctatcaaag

SEQ ID NO: 1003 - protein, 237 aa, Zea mays subsp. mays
  peptide (1)..(237): Ceres Seq. ID no. 13599329
FFHFLPPNPKSASMAITFSDLHTEEGLKSVEEHLAGKTYISGDQLSVDDVKVYAAVSVKPSDAFPNASRWFDCVASHLAKSFPGKAVGVSIGGSAAAAPAQAEAPAAAAADDDDDMDLFGDETEEEKKAAEEREAAKKDTKKPKESGKSSVLMEVKPWDDETDMKKLEECVRAVEMPGLLWGASKLVPVGYGIKKLTIMLTIVDDLVSPDNLIEDYLTCEPNNEYIQSVDIVAFNKI

SEQ ID NO: 1004 - protein, 224 aa, Zea mays subsp. mays
  peptide (1)..(224): Ceres Seq. ID no. 13599330
MAITFSDLHTEEGLKSVEEHLAGKTYISGDQLSVDDVKVYAAVSVKPSDAFPNASRWFDCVASHLAKSFPGKAVGVSIGGSAAAAPAQAEAPAAAAADDDDDMDLFGDETEEEKKAAEEREAAKKDTKKPKESGKSSVLMEVKPWDDETDMKKLEECVRAVEMPGLLWGASKLVPVGYGIKKLTIMLTIVDDLVSPDNLIEDYLTCEPNNEYIQSVDIVAFNKI

SEQ ID NO: 1005 - protein, 122 aa, Zea mays subsp. mays
  peptide (1)..(122): Ceres Seq. ID no. 13599331
MDLFGDETEEEKKAAEEREAAKKDTKKPKESGKSSVLMEVKPWDDETDMKKLEECVRAVEMPGLLWGASKLVPVGYGIKKLTIMLTIVDDLVSPDNLIEDYLTCEPNNEYIQSVDIVAFNKI

SEQ ID NO: 1006 - DNA, 1935 bp, Zea mays subsp. mays
  misc_feature (1)..(1935): Ceres Seq. ID no. 12637422
gaccgatgccgctgctgctgcgcggcgcctccctcctccgcctctgccagtgtaccagtgggctctcaagtgtgaaatttagttcaagagtaacggtactagtgaatctcaacgccatgagggacggaatgcgggccacatattcacgtagagctgcctctaagaacagtgaggtcaagaaagatgagcagccactcacagagaaggaagatgctgctgaaagtgatttggagatggagcgagggaggagcagcagccctagccagctccaatcaatgactgtcaaggagctcagggagctcacgaggaggaggggtatttctgtgaaaggtaccaagaaagatttagtatcagcactgatgaattctatggccgtggaagcaaatggtgaagagggaaagtcatccgttgagctggttagccccttggaagtacctttgaaaagaaaaggtggtgcttctgttgtggttgaacaaaaactagaaagttctgagattatttctgaaacacctaacaagaaaagaagtagaacaaaacaaaaatcaagcaagaacaccacttgtcaggaaatttcggtgactaatgtcaagctaagtaagactgttgtccagaaggaaacagttgacggattaagtcctgatgatgattcagagccttggactatactcgtgcataagaaaccagaagccagctggattccatacaaccctaggactatgaggcctccacctcttagcaaggatacacgggctctgaagattatgtcatggaatgtcaatggattgaaagcattgctcaaatcaagaggcttctctgtgcagcagttagcacagagggaggactttgatgtgctttgcttacaagaaacaaaaatgcaggagaaggatattgaagttattaaggacactttgcttgatggctacacaaatagtttctggacttgcagtgtgtcaaagcttggctattctggcactgcaataatttcaagagtcaaaccactgtcgatcaagtatgggcttggtataccagaccatgatactgaagggagggttgtgactgtagagtttgatgacttctacctgttaactgcttatgtaccaaactctggtgatggtctaaaaagattgacttacagggtcacagagtgggatccatcccttggtaactacatgaaagaattggagaaatcgaagcctgtcatactaaccggtgatcttaattgtgcgcatcaggagattgatatacatgaccctgctggaaatcgtagaagtgctggcttcacaaacgaggaaagagaatcatttgggaccaattttttgtccaaagggttcgttgatacgtttcggaaacagcatcctaatgttgttgcctatagttactgggggtacagacataatgcccggaagacaaacaaaggttggcgcctggattactttcttgtgtccgaatcaatcgcagaaaaagtgcatgattcatatattcttccggacatctctgccagtgatcacagtccccttggtctcgtgctgaagctgtaggctgtatcacaggctatgccaaacattcagtctgaagcttgtgccatatttctcagacagcgatgcttattcctgatggtttctggttcgttcagattcctggcaggaacaaggacttttgtcagactattagtgaaacaaggctttgtaatgcactgagcagatttgagactattagtggacaacttactgttagcaaagctgcacctttgtaatgtaaatatgcggccatatcttgtgctgcacttgtgcagctcaatatgagcagcaggggaagctcattacctggtcatggaattatgatactgaccttaacctgttgaggtctttaaactatcttgtcatgtgctgtgccgctgatggcgtcagaaaataactgtgccatgcaatttcacgc

SEQ ID NO: 1007 - protein, 511 aa, Zea mays subsp. mays
  peptide (1)..(511): Ceres Seq. ID no. 12637423
PMPLLLRGASLLRLCQCTSGLSSVKFSSRVTVLVNLNAMRDGMRATYSRRAASKNSEVKKDEQPLTEKEDAAESDLEMERGRSSSPSQLQSMTVKELRELTRRRGISVKGTKKDLVSALMNSMAVEANGEEGKSSVELVSPLEVPLKRKGGASVVVEQKLESSEIISETPNKKRSRTKQKSSKNTTCQEISVTNVKLSKTVVQKETVDGLSPDDDSEPWTILVHKKPEASWIPYNPRTMRPPPLSKDTRALKIMSWNVNGLKALLKSRGFSVQQLAQREDFDVLCLQETKMQEKDIEVIKDTLLDGYTNSFWTCSVSKLGYSGTAIISRVKPLSIKYGLGIPDHDTEGRVVTVEFDDFYLLTAYVPNSGDGLKRLTYRVTEWDPSLGNYMKELEKSKPVILTGDLNCAHQEIDIHDPAGNRRSAGFTNEERESFGTNFLSKGFVDTFRKQHPNVVAYSYWGYRHNARKTNKGWRLDYFLVSESIAEKVHDSYILPDISASDHSPLGLVLKL

SEQ ID NO: 1008 - protein, 510 aa, Zea mays subsp. mays
  peptide (1)..(510): Ceres Seq. ID no. 12637424
MPLLLRGASLLRLCQCTSGLSSVKFSSRVTVLVNLNAMRDGMRATYSRRAASKNSEVKKDEQPLTEKEDAAESDLEMERGRSSSPSQLQSMTVKELRELTRRRGISVKGTKKDLVSALMNSMAVEANGEEGKSSVELVSPLEVPLKRKGGASVVVEQKLESSEIISETPNKKRSRTKQKSSKNTTCQEISVTNVKLSKTVVQKETVDGLSPDDDSEPWTILVHKKPEASWIPYNPRTMRPPPLSKDTRALKIMSWNVNGLKALLKSRGFSVQQLAQREDFDVLCLQETKMQEKDIEVIKDTLLDGYTNSFWTCSVSKLGYSGTAIISRVKPLSIKYGLGIPDHDTEGRVVTVEFDDFYLLTAYVPNSGDGLKRLTYRVTEWDPSLGNYMKELEKSKPVILTGDLNCAHQEIDIHDPAGNRRSAGFTNEERESFGTNFLSKGFVDTFRKQHPNVVAYSYWGYRHNARKTNKGWRLDYFLVSESIAEKVHDSYILPDISASDHSPLGLVLKL

SEQ ID NO: 1009 - protein, 473 aa, Zea mays subsp. mays
  peptide (1)..(473): Ceres Seq. ID no. 12637425
MRDGMRATYSRRAASKNSEVKKDEQPLTEKEDAAESDLEMERGRSSSPSQLQSMTVKELRELTRRRGISVKGTKKDLVSALMNSMAVEANGEEGKSSVELVSPLEVPLKRKGGASVVVEQKLESSEIISETPNKKRSRTKQKSSKNTTCQEISVTNVKLSKTVVQKETVDGLSPDDDSEPWTILVHKKPEASWIPYNPRTMRPPPLSKDTRALKIMSWNVNGLKALLKSRGFSVQQLAQREDFDVLCLQETKMQEKDIEVIKDTLLDGYTNSFWTCSVSKLGYSGTAIISRVKPLSIKYGLGIPDHDTEGRVVTVEFDDFYLLTAYVPNSGDGLKRLTYRVTEWDPSLGNYMKELEKSKPVILTGDLNCAHQEIDIHDPAGNRRSAGFTNEERESFGTNFLSKGFVDTFRKQHPNVVAYSYWGYRHNARKTNKGWRLDYFLVSESIAEKVHDSYILPDISASDHSPLGLVLKL

SEQ ID NO: 1010 - DNA, 1960 bp, Zea mays subsp. mays
  misc_feature (1)..(1960): Ceres Seq. ID no. 13600301
gaacttcagtagattgagggatctaagagagtcaagggtagctgaagtagttccattgaaagaagttgaagaggaaatcatgtccagaaggcatacagaaatttctgatgataatacaccacctgagcaggaaagagagccaaagcaaggtgggaccggaaaaccaagtcagttggtggatacttcaaccaaagctacatctgagcaggttgctgcaaagttggaggaaagtgaaatggaaaaagaattatgtgcagaggcagaggacccttcagagttcatcactcatcgagccaaagattttgtgtcgagcatgaaggacattgaaacccggtttatgcgtgcagctgaagcaggaaatgaggtttccagaatgcttgaaaccaagaagatccgacttgacatatgtgctaaaataccaggttctccagtcaagctaccttctgcccgatttgtgtcagcacttcgagtgtgctgcaatcgtgatgttattctcaaccaggaaactgcgcagcatgtttcaaaggttgtcacatggaagcgttctgtctcatctctttcatcatcatctaagagtgcacttatgacatcgataatgaaagatgatgtggatgacagtaatagtgattttgttgaggaattcgccatggtatccggaagccattcttctacgttggacaggctacacgcatgggagagaaaactatatgatgaaatcaaggcaagtgaaaatgttaggaaggcctatgatgagaaatgtaacctactccgacgccaatttgcacgaggcctaaatgcgcaggtgattgataagactagagctgttgtgaaggatctccattccagggtatctgttgtgattcaagctgttgatgcaatctccaaaagaattgagaagataagggatgaagaactgcagccacagcttgtcgagctaattcaagggctaatcagaatgtggaaactgatgctggaatgtcaccacaaacagttcatcacgatcacattagcataccacgtgaaagactcgacctcggcgcgtcaaggtgagcaccaccatcaccgccaggcggcgatgcatctgtggaatgagatggacagcttctcctccagcttcagaaactgggtcaccgctcacaaatcgtacgtcgaggccctcaacgcgtggctccagaagtgcgtcctgcagccgccccaggaccggcgcaggcgcaaacgcaaggtctccttccctcctcggcaggccgtctcccctcccatattcatcctctgcggggactggctcgccaggacagaacctctccctgctgacgagctatgcagatccctcaaagacgtgatgcagctcctccgcgactcgttcgagcaccgcgacgagcagaacaggcccagaagcggcgagtcgcaggagtgcgggatgctggagaacagtagcgagcaggaggcggcggctaagagtgggagttgtgcagcatcagctgaagggctgcagtcgagactgacggcggttcttgaccgcctgacaaagttctcggaggcatcactgaagtgctacgaggagctcaagcagaactacgagatggcctgtgctgattataggagagttggaccaaatgctcagcttgcttaggattgatgttggttgtggtgtgtgacttcttgctatctctgttctggatgacaaattctctagtgttttggtatatattttgtgaacaatcaggtgatagcacaatctttggccgaatattactgatgatttagtgctatcagttatgtatgctccactgtgggccctgccctgatgcttcgaaaggcctatgagaaccgttttcaccacgatataacaggcaaaatataccatgatttctgtgcgctaaaaaaaaaaaaaaaaaaaactcgagggggggcccggtacccaattcgtgttaaacacaataaagttggaacgggagggggg

SEQ ID NO: 1011 - protein, 542 aa, Zea mays subsp. mays
  peptide (1)..(542): Ceres Seq. ID no. 13600302
NFSRLRDLRESRVAEVVPLKEVEEEIMSRRHTEISDDNTPPEQEREPKQGGTGKPSQLVDTSTKATSEQVAAKLEESEMEKELCAEAEDPSEFITHRAKDFVSSMKDIETRFMRAAEAGNEVSRMLETKKIRLDICAKIPGSPVKLPSARFVSALRVCCNRDVILNQETAQHVSKVVTWKRSVSSLSSSSKSALMTSIMKDDVDDSNSDFVEEFAMVSGSHSSTLDRLHAWERKLYDEIKASENVRKAYDEKCNLLRRQFARGLNAQVIDKTRAVVKDLHSRVSVVIQAVDAISKRIEKIRDEELQPQLVELIQGLIRMWKLMLECHHKQFITITLAYHVKDSTSARQGEHHHHRQAAMHLWNEMDSFSSSFRNWVTAHKSYVEALNAWLQKCVLQPPQDRRRRKRKVSFPPRQAVSPPIFILCGDWLARTEPLPADELCRSLKDVMQLLRDSFEHRDEQNRPRSGESQECGMLENSSEQEAAAKSGSCAASAEGLQSRLTAVLDRLTKFSEASLKCYEELKQNYEMACADYRRVGPNAQLA

SEQ ID NO: 1012 - protein, 516 aa, Zea mays subsp. mays
  peptide (1)..(516): Ceres Seq. ID no. 13600303
MSRRHTEISDDNTPPEQEREPKQGGTGKPSQLVDTSTKATSEQVAAKLEESEMEKELCAEAEDPSEFITHRAKDFVSSMKDIETRFMRAAEAGNEVSRMLETKKIRLDICAKIPGSPVKLPSARFVSALRVCCNRDVILNQETAQHVSKVVTWKRSVSSLSSSSKSALMTSIMKDDVDDSNSDFVEEFAMVSGSHSSTLDRLHAWERKLYDEIKASENVRKAYDEKCNLLRRQFARGLNAQVIDKTRAVVKDLHSRVSVVIQAVDAISKRIEKIRDEELQPQLVELIQGLIRMWKLMLECHHKQFITITLAYHVKDSTSARQGEHHHHRQAAMHLWNEMDSFSSSFRNWVTAHKSYVEALNAWLQKCVLQPPQDRRRRKRKVSFPPRQAVSPPIFILCGDWLARTEPLPADELCRSLKDVMQLLRDSFEHRDEQNRPRSGESQECGMLENSSEQEAAAKSGSCAASAEGLQSRLTAVLDRLTKFSEASLKCYEELKQNYEMACADYRRVGPNAQLA

SEQ ID NO: 1013 - protein, 464 aa, Zea mays subsp. mays
  peptide (1)..(464): Ceres Seq. ID no. 13600304
MEKELCAEAEDPSEFITHRAKDFVSSMKDIETRFMRAAEAGNEVSRMLETKKIRLDICAKIPGSPVKLPSARFVSALRVCCNRDVILNQETAQHVSKVVTWKRSVSSLSSSSKSALMTSIMKDDVDDSNSDFVEEFAMVSGSHSSTLDRLHAWERKLYDEIKASENVRKAYDEKCNLLRRQFARGLNAQVIDKTRAVVKDLHSRVSVVIQAVDAISKRIEKIRDEELQPQLVELIQGLIRMWKLMLECHHKQFITITLAYHVKDSTSARQGEHHHHRQAAMHLWNEMDSFSSSFRNWVTAHKSYVEALNAWLQKCVLQPPQDRRRRKRKVSFPPRQAVSPPIFILCGDWLARTEPLPADELCRSLKDVMQLLRDSFEHRDEQNRPRSGESQECGMLENSSEQEAAAKSGSCAASAEGLQSRLTAVLDRLTKFSEASLKCYEELKQNYEMACADYRRVGPNAQLA

SEQ ID NO: 1014 - DNA, 2225 bp, Zea mays subsp. mays
  misc_feature (1)..(2225): Ceres Seq. ID no. 14302694
attttgacctcggaaaggtttgaacccgtcagggactaaagatgccaaaggtatattgttttccttctcattctactatgctataactatttctcctctactgttttttaccctacgaactgtgttgctaattttaatctacactacatctacttaaactcaattgttcagtgtcatagctttgctggaagccacatggcatattacttacatgccttcttagagtcttttagttatttcggtaatctgtattataggaatcataattaatgttgttttataacaataaatttatattgttgttttttagtcagaaaaaatgcttgtcatttggtcaattagctagcgacatgatattaagtgttgtagcgtggtcaagggttagctatgtctatgtgccatgtgttaaaagtattaggctacaaaaatccgaaaatgtcttgataaaagcaaaaaatagtaggaccattgaaaatttaaattagtatcgttgttacaagtttacccaacttcgagtataagagagcatagttcagcccctcgtctatcacttgtatgtaaggtgaactgtttcgtttttctatagcccgaccaatgtgcctctaagcatattcccaacaggacttagtgtgttgaaaacgccgagtcagaaatttgcacacatttttgagttatatgtatttattttagttcatttggactttggttgtgaacttaatgctccaagttattttgaccgcagtgggtcctttctccaaagtacttaaaattttcattccctatcacgcctagaggccctatgggtctgcaaatgtgattttctccataaacatcaataaggttgtagctttaagtaatggatgggtggttcttgcatgtactcttccatctgctttgtcggaatgaagcttcagttgaatttgttatagtcgttcactggtgcaaactgttattgctttgttatgtgtcatttgtttgtaggtctggaagatgagtaggcggaacgtggttgcaatagatcctattcaagtgtactatgtggaagggatcttggagcagttggcgttcgtggaggagtcgaagcgcaaggaggactgggtcgtcaggaaccaggagcgcagggcggccaaacgcaatcgcatccgcgacgagcacaaggtcgttgtcaggcagcccaaggactcaccaccacgttccacaacagggagcgtgacatcctgcggatgaggacccacttcaaggttagcaagcagccgcccaatgaggcgctcgactccaggctctttgcaattcgcatccctggctccatggacttgcattcgcacattaggaaggtcttgaggaagctacgtctgatgatggtcctcaccggaataaccttttctttgcacactaactgattgaattgacacatcttgtgtaccattgaaatctgaccacttcttttgccaacccctcttttgttaaaaataaaattaaaaattagattgtcaatcttgaggccacaatggagttattcgtggagcttcgagttattggaggtcgagctgtaaaaagctagcgttttttgcatattgtacacagtatcaggaggatgagccagaagcacaagaatggtattgccaagcagcacacctgctctacagcttagttatgtttagatttatatatgatatatatgaggtttctttgctcacatgtatttgcctgcacctatctaggtttagctctattgattacatcttttgtgcagggctgatgagctatcccctgatgagcttgagcgcctcttgaatcatgaccatggttggttgattgccaacccccaccagttcaaggtccctagctggttcctcaacaggaaaaagtactacaaggatggtaggttctctcaggttgtttccaacgcccttgacaagaagctcagcttagggatgactctaggctgaagaagaccaggaaccactatggtctgtcactactggggtctacttgtccgtggccagcacaccaagactaccaaaaggcatggaaagactataggtgtgtcggagaatagataaagtcaatttggtgcctaccttggatatttattatctgtaggatagatgaaccgttctggtttatgaaacttttgttgcgtattccaagctggttgaattgaatgttcttaagaaccaatgtcattagaaaagttaaaagattcaataatttgaaatggtttt

SEQ ID NO: 1015 - protein, 78 aa, Zea mays subsp. mays
  peptide (1)..(78): Ceres Seq. ID no. 14302695
MSRRNVVAIDPIQVYYVEGILEQLAFVEESKRKEDWVVRNQERRAAKRNRIRDEHKVVVRQPKDSPPRSTTGSVTSCG

SEQ ID NO: 1016 - protein, 71 aa, Zea mays subsp. mays
  peptide (1)..(71): Ceres Seq. ID no. 14302696
MLFYNNKFILLFFSQKKCLSFGQLASDMILSVVAWSRVSYVYVPCVKSIRLQKSENVLIKAKNSRTIENLN

SEQ ID NO: 1017 - protein, 58 aa, Zea mays subsp. mays
  peptide (1)..(58): Ceres Seq. ID no. 14302697
MWKGSWSSWRSWRSRSARRTGSSGTRSAGRPNAIASATSTRSLSGSPRTHHHVPQQGA

SEQ ID NO: 1018 - DNA, 1876 bp, Zea mays subsp. mays
  misc_feature (1)..(1876): Ceres Seq. ID no. 13624195
aacaacttgaaaacatcttaagggtagaagcgacgtagctgtttgatgttccaagcgttgccgtagatctcgccttgattgttggccagcttgtatgttccgggcttcagaactttggcgatgacgaatggcccttcccaggggggtgtgagcttgtgcctccctcgggcgtcttgccgcagccgaagcactagatcgcccacctggaggtctcgggaccggacccctcgggcgtggtagcgtcgcagggactgctggtaccgcgccgagtgtagtaaggccctgtcccgagcctcctccagctggtccagcgattcctctcggctagcttggttgctttgatcggtgtaggccctcgtcctcggggagccgtattccaggtcagtgggcaagatagcttcagccccgtaaaccaggaaaaacggcgtgaaacccgtggcacgactcggcgtcgtccttaggctccagaccaccgaggggagttccttcatccatcgcttgccgaacttgttgaggtcgttgtagatccgaggcttgagcccttgtagaatcatgccgttggcacgctctacttgcccattcgacatgggatgagccacggcggcccagtccacccggatatggtgatcctcgcaaaaaatccaaaattttttgccggtgaactgggtgccgttgtcggtgatgatggagttcgggaccccgaagcgatggatgatgttggtgaagaacgccaccgcctgctcggacctgatgctgttcagaggttgggcctcgatccacttggagaatttgtcgatggcgaccagcaggtgcgtatagcccccgggcgccttctgcaagggaccgacgaggtccagaccccatacagcgaagggccaggtgatgggtattgtctgcagagcctgagcgggaaggtgggtccgcttcgcatagaattggcacccttcgcaggtgcggacaattctagtggcgtcagccaccgccgttggccagtagaagccctgccggaaagcattcccgacaagggctcggggtgctgcgtggtggccggaagcccccgagtgtatttcttgcagcaattcccgaccttcggcgatggagatgcatcgctagaggaggcccgaggggctgcgatgttagagctcctcttcattgcccagcaagacgaatgacttggcgcgtcgcgctacccgccgagcctcgacttggtcgaggggtagctctcctcgacggagatatcgcaggtacggggcctgccaatctcgatctggcgtggccccactctgttcttcctcgacgtccagtgcctcgtcctcggggggccgagggtacctcgggccgttccgagggtgcctcgggctgagcagacctcccagcgcaagcaagagcgccgaacacatggttcatgcaccgctggtacgtcgcgcccgcattcctcaaaccgaacggcantggtgacatagcagtacatgccgaacggcgtgatgaaagaagtcgcgagctggtcggactctttcattcggatctggtgataccctgagtaggcatcgaggaaggacagggtttcgcacccagcggtggaatccacgatttggtcgatgcgaggcaaagggtagggaaccttcggacatgctttgttgagaccagtgtagtctacgcacatccgccatttcccccctttcttcctcacaagcaccagggttggcaagccattcgggatggaatacctctttgatgaaccctgctgccattagcttgtggatctcttcgccaatcactctgcgcttttcctcgtcgaatcggcgcagagactgcctgacgggccgggctccggcccgaatatccagcgagtgctcggcgacatccctcggtattg

SEQ ID NO: 1019 - protein, 193 aa, Zea mays subsp. mays
  peptide (1)..(193): Ceres Seq. ID no. 13624196
MSHGGPVHPDMVILAKNPKFFAGELGAVVGDDGVRDPEAMDDVGEERHRLLGPDAVQRLGLDPLGEFVDGDQQVRIAPGRLLQGTDEVQTPYSEGPGDGYCLQSLSGKVGPLRIELAPFAGADNSSGVSHRRWPVEALPESIPDKGSGCCVVAGSPRVYFLQQFPTFGDGDASLEEARGAAMLELLFIAQQDE

SEQ ID NO: 1020 - protein, 183 aa, Zea mays subsp. mays
  peptide (1)..(183): Ceres Seq. ID no. 13624197
MVILAKNPKFFAGELGAVVGDDGVRDPEAMDDVGEERHRLLGPDAVQRLGLDPLGEFVDGDQQVRIAPGRLLQGTDEVQTPYSEGPGDGYCLQSLSGKVGPLRIELAPFAGADNSSGVSHRRWPVEALPESIPDKGSGCCVVAGSPRVYFLQQFPTFGDGDASLEEARGAAMLELLFIAQQDE

SEQ ID NO: 1021 - protein, 154 aa, Zea mays subsp. mays
  peptide (1)..(154): Ceres Seq. ID no. 13624198
MDDVGEERHRLLGPDAVQRLGLDPLGEFVDGDQQVRIAPGRLLQGTDEVQTPYSEGPGDGYCLQSLSGKVGPLRIELAPFAGADNSSGVSHRRWPVEALPESIPDKGSGCCVVAGSPRVYFLQQFPTFGDGDASLEEARGAAMLELLFIAQQDE

SEQ ID NO: 1022 - DNA, 1580 bp, Zea mays subsp. mays
  misc_feature (1)..(1580): Ceres Seq. ID no. 14302617
ttttagtggaggagctactgtcttgagggttactagtgtctgacactatcttgagcaagtcagagacaggagtagagttggattgcagctcctctatgaggagcttgattttgttggacatagccactcgattgaatgacaactttccaacatggccaccgtcaccagacatggcatcggtagcagcagcatcgtgtctcggggtcggggacagcagccagagaagcatgagagccagttaccagcagtgtggcgagcagcatggcgggcatggtgagcttgggctgcgaggccaccgcccaactccggtgcggcgtctcgagtcccgtcgtgtttgtcctggatcatgaagtagtgaagctcgtccacagcatcctcagcctcgtcggccttcttgccgagaatctcgagctgctccagcaggttggggttcccggcgacgacgtcgtccctccccttggccacgtccagcagcgctctagcgtaccgcatcttctctttgatcatgttaaggttggtgccgagctcggcgctggacacgtaggatttcatccagtcgtcggggagattattgagaacatggccaaggagatacttggccgttcccagagccacctccatcttctgctccggtcgagatggaagtcgaaagaacagtgtgcgtgtgctgctggctggatgttgcccagcgccgaggaccgacgtatgcttatatggcgttctggtaattgataattgattggtcctgatgcgattcgtgcttatctataattctatccggatccggctcgctaggcatctttgccgagggcgtacggcttcctcgtggtcctcatctaatggtgctgtcacattcaaagaagaaagtgctgggaaaaccacgtacgagaatttccgatacagatcagacagcaggcctaacatctatagccaaggatgtctgaataactttctacaagtcttctgcagcaagacaaaaccggcgtgtttagaaggttttgtcttctgcatgcgttgaatgatctatagccacgtacgacaaagttttatagaaggttttgtcgtgcatgcgttgaatggtccaagccatagggacgaaccgacgtgtccggcttcgtttcgtgctttgcttttaattgggtggcgactcagattttcatgtcaaaatctgcagcctcgtgtgaagatgctagagaagacaaaaggcaagcgctgatgatcctgcaagtggtatgaatagagagcctataaagtgcctttctggcgcacaatctgaagctgcaaagcaaacgcaatgctgccgtcgggagattggaactacaatatctttgcatctctagctagtgaatgttcctttggactgatgactttgccgtagaggttagccgtcactcgtcactggacagtgcgtttgctgctatatcaagaggttcttttttttaaaagcttggtttcaatgtatacaaagtttcgtttaaggaccctttgctaccccctttgctaccgagtgtagtccaaaggctacttaactcataaacacaggagacacaaagatataggaggtattgatactttcattc

SEQ ID NO: 1023 - protein, 156 aa, Zea mays subsp. mays
  peptide (1)..(156): Ceres Seq. ID no. 14302618
MAGMVSLGCEATAQLRCGVSSPVVFVLDHEVVKLVHSILSLVGLLAENLELLQQVGVPGDDVVPPLGHVQQRSSVPHLLFDHVKVGAELGAGHVGFHPVVGEIIENMAKEILGRSQSHLHLLLRSRWKSKEQCACAAGWMLPSAEDRRMLIWRSGN

SEQ ID NO: 1024 - protein, 153 aa, Zea mays subsp. mays
  peptide (1)..(153): Ceres Seq. ID no. 14302619
MVSLGCEATAQLRCGVSSPVVFVLDHEVVKLVHSILSLVGLLAENLELLQQVGVPGDDVVPPLGHVQQRSSVPHLLFDHVKVGAELGAGHVGFHPVVGEIIENMAKEILGRSQSHLHLLLRSRWKSKEQCACAAGWMLPSAEDRRMLIWRSGN

SEQ ID NO: 1025 - protein, 89 aa, Zea mays subsp. mays
  peptide (1)..(89): Ceres Seq. ID no. 14302620
MRFVLIYNSIRIRLARHLCRGRTASSWSSSNGAVTFKEESAGKTTYENFRYRSDSRPNIYSQGCLNNFLQVFCSKTKPACLEGFVFCMR

SEQ ID NO: 1026 - DNA, 1718 bp, Zea mays subsp. mays
  misc_feature (1)..(1718): Ceres Seq. ID no. 12638003
tcgctggtactgggagcgggtgacagttattgtggatgcatgtgctattgtcggttaatgaacttcggaagctatttaagatcttacaatgccctttggcatattttaaatggaaatcaaagcactctgtttctttgttatttatttgttgtataatttgcttccacttgcagaattggtcttctagtggtctgcttgagaaaatgaagaaactttctgaaagaaggaagcttgaagatttaacaattggtccagtccttacagtaagtcaggggcggagccagcccttttttgggggtcagctgaccccggtaaatttctgaatatctaatagaaaatggtgttaataacaatagttctatagtgaagatctagtagaaaatactgatgaccccgataaaatttttgctagcttcgctactgcagtaagtggacagttctggattgtaatcacaattgttctttgtaactaaaatgatatggtgtcgtgttgggaacaaacagtagttaaaaacttaatcaagcaataaatggaaccaggtaataatatattattttctgttattttagtagatgtgaagggcaatcctagtctagcggtgagagttgtctcaccgagtcaccaggttgagggttcgaagatttgcctatcccctttctaaaccttactcatgtgtgtgtaagaagagaagtttttttttattttagtagatgtgagggtgtccagacatcaaatagtgtgtaagaagagaagacaaaggaaattgtctttgcacagtacaggttttcatataaaaggtcaaatatgtgtggagaaagaaaaagaacatgtagctattcatcactatttttttgtctcaactgtttatatggtcacaactcacaactggattagcggtataaagtttttctgtttcttcttattaacatatcatggatcttttctgatccaggttactacagaagccatgatagagcacatgaacaaccttctcaaaataagaggatcaaaggttctgtttggtggtgaaccgttagcgaatcactcaattcccaaaatttatggtgccatgaagcctactgctgtatttgttcctctagaagaaattctaaaaagtgggaacttcgagcttgtgacaaaggagatatttggtccattccaggtagtcacagaatactctgaggatcagcttgagttggtcttagaagcctgcgaaaggatgaatgcgcatctgacagctgcagttgtctcaaacgacccgctattcctgcaggatgtacttgggagatccgttaacgggacaacctacgccggaattcgagcgaggaccacgggcgctccacagaaccactggtttggcccggccggtgatccgcgaggcgcagggatcgggactccggaagccatcaaacttgtctggtcctgccacagggaagtcatatatgacgtcgggcccgtgcccgagagctgggcgcttccttccgcgacctgattagctagacgaggatagactattccatgtcatcacgagaaataaaaggggaagataagcgaagccagcaggactggagcgaccgaccgagagcgagtggctgcatgcctaggcattcattctctgcacgcaactgcactttcaaccctggagaaaacataataaatgctcgttcccctgtacttgagatacatggtacttggaaccggaacgtcggacaactcg

SEQ ID NO: 1027 - protein, 207 aa, Zea mays subsp. mays
  peptide (1)..(207): Ceres Seq. ID no. 12638004
MVTTHNWISGIKFFCFFLLTYHGSFLIQVTTEAMIEHMNNLLKIRGSKVLFGGEPLANHSIPKIYGAMKPTAVFVPLEEILKSGNFELVTKEIFGPFQVVTEYSEDQLELVLEACERMNAHLTAAVVSNDPLFLQDVLGRSVNGTTYAGIRARTTGAPQNHWFGPAGDPRGAGIGTPEAIKLVWSCHREVIYDVGPVPESWALPSAT

SEQ ID NO: 1028 - protein, 174 aa, Zea mays subsp. mays
  peptide (1)..(174): Ceres Seq. ID no. 12638005
MIEHMNNLLKIRGSKVLFGGEPLANHSIPKIYGAMKPTAVFVPLEEILKSGNFELVTKEIFGPFQVVTEYSEDQLELVLEACERMNAHLTAAVVSNDPLFLQDVLGRSVNGTTYAGIRARTTGAPQNHWFGPAGDPRGAGIGTPEAIKLVWSCHREVIYDVGPVPESWALPSAT

SEQ ID NO: 1029 - protein, 170 aa, Zea mays subsp. mays
  peptide (1)..(170): Ceres Seq. ID no. 12638006
MNNLLKIRGSKVLFGGEPLANHSIPKIYGAMKPTAVFVPLEEILKSGNFELVTKEIFGPFQVVTEYSEDQLELVLEACERMNAHLTAAVVSNDPLFLQDVLGRSVNGTTYAGIRARTTGAPQNHWFGPAGDPRGAGIGTPEAIKLVWSCHREVIYDVGPVPESWALPSAT

SEQ ID NO: 1030 - DNA, 2516 bp, Zea mays subsp. mays
  misc_feature (1)..(2516): Ceres Seq. ID no. 14309727
gcatgcgtccgcggtgggtgcgcctagagcctgcagccaccgtagcgaaatctccaatcttgatgttgcgcggggcgaagattgcctctgccgtcgttagggtcaagcaccgagtcgccggctgctgccccctctccctatcgtcgcgccatccatttcctcgccgttgacgacgacgagcgagactagggaccggccttcgacgaagtggcggctactgctcgatctagcgagggtggctggcatcgagctggggcggcggccatgagccatctcttcgacaacaggtgagaatgaatcttacagttcaaccatatatcctcttccggacaatgtaaatatcaactccagtagatcgatcagtcggtgtcctagccatggcatcagaatagcaatggacagctgcgacagaaactcaactagcagaatcacagggaaggatattaagcaggcgattatgttcagtgcctctttgaacaagctcacattaaaccaagatgaggccaccgaatacacaaatttgatcctagaagaacttcagacaggtcaaggagtcctccagatgaatgtcatgagcaagggcctgtcaagggatctccaaccaacctgcgggccaataccagtgccaatgaaatgcagccgacagcgacatatacttactgcaaccgtagtcttcttccaagctcactggaggcgtatatttgtggttttcttgtggctcatggcatgtgctgcactcttcacatggaagttcatgcagtacagacagcggttggctttcgaggtaatggggtactgcctgtcgacagccaagggggctgcagagacgctcaagctcaacatggccattgtgctcctacctgtttgccgcaacacggtcacttggctcaggagaagccgtgttatcaactcggtcatcccatttaatgacaatattaacttccacaagcttgttgcagcgggaattgtgatcggtgtaatccttcatggaggcatccacctggcatgcgacttcccaaggatcacaaggacagataaggccttctttggacgcacaattgccgctgactttgggtaccaccagccatcctacctggagatagtggtatcaaccgaggggacaactggtatagcaatggtggtactaatgtttgtcgcattcttgcttgctagtagtccttcgagaagaaatccaggaatgctgccacctctcgtcagacagttagctgggttcaatgccttctggtactcgcaccatgtgttcatcgctgtctatgtgctcctcattgtgcattccatgttcctattcctagcaaaggatgtagcagagaagacgacgtggatgtatgtcgcaattcctgtggtgatctacattggagaacggatgttcaggatggtcagatctatggtgttcgatgtcaagatcctcaatgccacagtttatccagggatggtacttgcactcaaggtgacaaagcctccaggttttcggtatcaaagtggaatgtatgtatttgtccaatgtccagaagtatcaaagtttgaatggcacccattttcccttacatctgctccagaagatgatcacttgagcatccatataagatctcttggtgattggagctaccaaatgtatgatgtcttccaacagatgctactttccagcaactccagcatgcctaaaatattctttgatggtccctacggtgcagcgtcacaggatcactcaaagtacgaaattatattgttaattggacttggaataggagcaacgcctttcataagtgttctcaaagacattgccaatggattagataaggggcatggcaacttaaattatcactctgaccgactgaagaaggcctacttttattgggtgacaagagagcaaggatcctttgagtggttcagggatatcatgaaagaggtttcggttctagacagcaagcagggtgtgatagaaatgtataactacctgacaagtgtctaccaagaaggtgataagcggtcgatgctaataagtgcgattcaagcacttcattttgcacgccatggcattgatatcatctcaaaaactcctgttcatacgcacttttcgaggccaaactggcctagagtgctacatggccttgcaagaaggcatatcggggagaggataggggttttctactgtggtccggacgatttgggaaggcagctggagaagctctgccacaaagtgaacacaaaaacattcacgcgatttgtgttccacaaggagcatttctaataatagagactagcatagatcaactccttaggaacaaacctgtcaagtatgatctcaaagctgccaagcacttcatttttttcgcatcactccttcctatcttttgctttagtatctctgtcttcatttaaccattataaagctgatcttacttgaggagctttgtatctaactagaaaaaaacagcgccctatcgggcgcttagacgatttcttgaatgtgatctttgtgatttttttttcttttc

SEQ ID NO: 1031 - protein, 624 aa, Zea mays subsp. mays
  peptide (1)..(624): Ceres Seq. ID no. 14309728
MDSCDRNSTSRITGKDIKQAIMFSASLNKLTLNQDEATEYTNLILEELQTGQGVLQMNVMSKGLSRDLQPTCGPIPVPMKCSRQRHILTATVVFFQAHWRRIFVVFLWLMACAALFTWKFMQYRQRLAFEVMGYCLSTAKGAAETLKLNMAIVLLPVCRNTVTWLRRSRVINSVIPFNDNINFHKLVAAGIVIGVILHGGIHLACDFPRITRTDKAFFGRTIAADFGYHQPSYLEIVVSTEGTTGIAMVVLMFVAFLLASSPSRRNPGMLPPLVRQLAGFNAFWYSHHVFIAVYVLLIVHSMFLFLAKDVAEKTTWMYVAIPVVIYIGERMFRMVRSMVFDVKILNATVYPGMVLALKVTKPPGFRYQSGMYVFVQCPEVSKFEWHPFSLTSAPEDDHLSIHIRSLGDWSYQMYDVFQQMLLSSNSSMPKIFFDGPYGAASQDHSKYEIILLIGLGIGATPFISVLKDIANGLDKGHGNLNYHSDRLKKAYFYWVTREQGSFEWFRDIMKEVSVLDSKQGVIEMYNYLTSVYQEGDKRSMLISAIQALHFARHGIDIISKTPVHTHFSRPNWPRVLHGLARRHIGERIGVFYCGPDDLGRQLEKLCHKVNTKTFTRFVFHKEHF

SEQ ID NO: 1032 - protein, 603 aa, Zea mays subsp. mays
  peptide (1)..(603): Ceres Seq. ID no. 14309729
MFSASLNKLTLNQDEATEYTNLILEELQTGQGVLQMNVMSKGLSRDLQPTCGPIPVPMKCSRQRHILTATVVFFQAHWRRIFVVFLWLMACAALFTWKFMQYRQRLAFEVMGYCLSTAKGAAETLKLNMAIVLLPVCRNTVTWLRRSRVINSVIPFNDNINFHKLVAAGIVIGVILHGGIHLACDFPRITRTDKAFFGRTIAADFGYHQPSYLEIVVSTEGTTGIAMVVLMFVAFLLASSPSRRNPGMLPPLVRQLAGFNAFWYSHHVFIAVYVLLIVHSMFLFLAKDVAEKTTWMYVAIPVVIYIGERMFRMVRSMVFDVKILNATVYPGMVLALKVTKPPGFRYQSGMYVFVQCPEVSKFEWHPFSLTSAPEDDHLSIHIRSLGDWSYQMYDVFQQMLLSSNSSMPKIFFDGPYGAASQDHSKYEIILLIGLGIGATPFISVLKDIANGLDKGHGNLNYHSDRLKKAYFYWVTREQGSFEWFRDIMKEVSVLDSKQGVIEMYNYLTSVYQEGDKRSMLISAIQALHFARHGIDIISKTPVHTHFSRPNWPRVLHGLARRHIGERIGVFYCGPDDLGRQLEKLCHKVNTKTFTRFVFHKEHF

SEQ ID NO: 1033 - protein, 568 aa, Zea mays subsp. mays
  peptide (1)..(568): Ceres Seq. ID no. 14309730
MNVMSKGLSRDLQPTCGPIPVPMKCSRQRHILTATVVFFQAHWRRIFVVFLWLMACAALFTWKFMQYRQRLAFEVMGYCLSTAKGAAETLKLNMAIVLLPVCRNTVTWLRRSRVINSVIPFNDNINFHKLVAAGIVIGVILHGGIHLACDFPRITRTDKAFFGRTIAADFGYHQPSYLEIVVSTEGTTGIAMVVLMFVAFLLASSPSRRNPGMLPPLVRQLAGFNAFWYSHHVFIAVYVLLIVHSMFLFLAKDVAEKTTWMYVAIPVVIYIGERMFRMVRSMVFDVKILNATVYPGMVLALKVTKPPGFRYQSGMYVFVQCPEVSKFEWHPFSLTSAPEDDHLSIHIRSLGDWSYQMYDVFQQMLLSSNSSMPKIFFDGPYGAASQDHSKYEIILLIGLGIGATPFISVLKDIANGLDKGHGNLNYHSDRLKKAYFYWVTREQGSFEWFRDIMKEVSVLDSKQGVIEMYNYLTSVYQEGDKRSMLISAIQALHFARHGIDIISKTPVHTHFSRPNWPRVLHGLARRHIGERIGVFYCGPDDLGRQLEKLCHKVNTKTFTRFVFHKEHF

SEQ ID NO: 1034 - DNA, 1001 bp, Zea mays subsp. mays
  misc_feature (1)..(1001): Ceres Seq. ID no. 15177518
atcaaccatggcttactcagctcccatatctccatccctatccttcttcaaaaacccccaactcaccagactctcgttccctttctccccactttactctcgccctagggttcagaatccaagtctgctcacgaagaacaagacgtggtcgtcgtccgtggtggtggcggcgacggcggcggagaagcagaagaagagataccctggagaatcgaaagggtttgtggaggagatgaggtttgtggcgatgagacttcacacgaaggagcaggccaaggaaggtgagaaagagacaaaatctcccgaggaacgtcctgtcgctaaatgggaaccgactgttgaaggttacttgaggtttttggtggatagcaagttggtttacgacacgcttgaagggattattcatcagtccactttcccaacttatgcggaattcaagaacactgggctggaaagggcagagaaattggacactgatctgaagtggttcaaagaacaaggctacgagattccagaaccaactgatactggtaaaaaatattctcagtatttaaaggatttagcagacaaggatcctccatcattcatttgtcacttctacaacatctacttcgcccacagcgctggtggtcgaatgattggaagaaaggtagcggaaaggattctcgacaatagagaactcgagttttacaaatgggacggcgacctttccggattgttgcagaacgtgagggaaaaactgaacaaagttgcagaggagtggacgagagaagagaagaatcattgtttggaagagaccgagaaatcgttcaagtattctggtgagatacttcgtctcatattgtcctgattcctctctttatatacgcgcttgtggcaactaaaatccctgctcaagttttttattcctgtattatatttttaaactcgcttctgcttgtttgtatcatcaaactcttatttgcttcaaagcttaatacgacgttggaagttcagcgttc

SEQ ID NO: 1035 - protein, 282 aa, Zea mays subsp. mays
  peptide (1)..(282): Ceres Seq. ID no. 15177519
STMAYSAPISPSLSFFKNPQLTRLSFPFSPLYSRPRVQNPSLLTKNKTWSSSVVVAATAAEKQKKRYPGESKGFVEEMRFVAMRLHTKEQAKEGEKETKSPEERPVAKWEPTVEGYLRFLVDSKLVYDTLEGIIHQSTFPTYAEFKNTGLERAEKLDTDLKWFKEQGYEIPEPTDTGKKYSQYLKDLADKDPPSFICHFYNIYFAHSAGGRMIGRKVAERILDNRELEFYKWDGDLSGLLQNVREKLNKVAEEWTREEKNHCLEETEKSFKYSGEILRLILS

SEQ ID NO: 1036 - protein, 280 aa, Zea mays subsp. mays
  peptide (1)..(280): Ceres Seq. ID no. 15177520
MAYSAPISPSLSFFKNPQLTRLSFPFSPLYSRPRVQNPSLLTKNKTWSSSVVVAATAAEKQKKRYPGESKGFVEEMRFVAMRLHTKEQAKEGEKETKSPEERPVAKWEPTVEGYLRFLVDSKLVYDTLEGIIHQSTFPTYAEFKNTGLERAEKLDTDLKWFKEQGYEIPEPTDTGKKYSQYLKDLADKDPPSFICHFYNIYFAHSAGGRMIGRKVAERILDNRELEFYKWDGDLSGLLQNVREKLNKVAEEWTREEKNHCLEETEKSFKYSGEILRLILS

SEQ ID NO: 1037 - protein, 205 aa, Zea mays subsp. mays
  peptide (1)..(205): Ceres Seq. ID no. 15177521
MRFVAMRLHTKEQAKEGEKETKSPEERPVAKWEPTVEGYLRFLVDSKLVYDTLEGIIHQSTFPTYAEFKNTGLERAEKLDTDLKWFKEQGYEIPEPTDTGKKYSQYLKDLADKDPPSFICHFYNIYFAHSAGGRMIGRKVAERILDNRELEFYKWDGDLSGLLQNVREKLNKVAEEWTREEKNHCLEETEKSFKYSGEILRLILS

SEQ ID NO: 1038 - DNA, 1575 bp, Zea mays subsp. mays
  misc_feature (1)..(1575): Ceres Seq. ID no. 15179007
aagttttagtttcagcttcactgtcttttttaacgactctgttccttctccgaccaaaagcgagaaaaaaaatggcgtctcttggccaaatcaccctcccgcgagcgccatcgttgcagaaaggcctcctacgccgtccgatcagaaccccaatcagattcaacggccggatcgcgagtgtattgactaacgcgggttcggtgaaagcaagtgtgagccagaaggtgattgaagaggaggcgaaagttctggtgggtacctacgcgcgtgctccagtggtgctctcgagtgggaaaggttgtaaattgatggacgcagaagggaaagagtatcttgattgtgcatctggaatcgctgtgaatgctctgggccatggagatcctgattggcttcaagctgtcactgaccaagcttctgttctttcccacgtcagcaatgtctattacaccattcctcagatagaactagcgaaacgccttgtggcaagttctttcgcagaccgtgtattcttctgtaactctggaacagaagccaacgaagcagccatcaagttttctagaaagttccagagattcacccatcctgaagacaaggaagtcgccacaagcttcatcgcctttacgaatagtttccatggtagaaccttaggagctcttgcattaacaagcaaagaacagtacagaactcctttcgaacctatcatgccaggcgttacgttcttggaatatggtaacactcaagcagccactgatcttatccgctccggtaaaatagctgctgtgtttgtggagcctattcaaggagaaggtggggtttactctgctacaaaagagtttctccagtctcttcgctcagcttgtgatgctgcaggatctcttctcgtcttcgatgaggttcagtgtggtttgggtcgaaccggtaacctatgggcatatgaagcatttggtgtaacacctgacataatgacagttgcaaagcctttagcaggtggtttaccaattggagcggtgcttgtaactgaaaaagttgctgagaccatcaaatatggagatcatggaagcacatttgcagggaaccctcttgtgtgtagtgcagccatcgctgtttttgataaagtatctaaatcctctttcttggccagtgtctcgagcaaaggtttatactttaaggatctgttggtgaagaaactaggaggaaacttgcacgtgaaggaagtgagaggagaagggcttattattggagtggagctggacgtgcccgcaggtccgttggtcgatgcttgtcgtgattctggtcttctgatcttgacggcagggaaagggaatgtcgtcaggattgttccgccgttgattatatcggaggaggaaatcgaacgtgccgttgagattattttccatgatttaactgcgcttgactgaatattgttgttgaacataaatgttcatcgactatgaactgtgtttttaaaattctgtactttacttaaataagctcaagtataacagtaaatgtgcctgttacagttcataactgctgtttcttggttctgtttttttgaaacatttttcttggttc

SEQ ID NO: 1039 - protein, 471 aa, Zea mays subsp. mays
  peptide (1)..(471): Ceres Seq. ID no. 15179008
VLVSASLSFLTTLFLLRPKARKKMASLGQITLPRAPSLQKGLLRRPIRTPIRFNGRIASVLTNAGSVKASVSQKVIEEEAKVLVGTYARAPVVLSSGKGCKLMDAEGKEYLDCASGIAVNALGHGDPDWLQAVTDQASVLSHVSNVYYTIPQIELAKRLVASSFADRVFFCNSGTEANEAAIKFSRKFQRFTHPEDKEVATSFIAFTNSFHGRTLGALALTSKEQYRTPFEPIMPGVTFLEYGNTQAATDLIRSGKIAAVFVEPIQGEGGVYSATKEFLQSLRSACDAAGSLLVFDEVQCGLGRTGNLWAYEAFGVTPDIMTVAKPLAGGLPIGAVLVTEKVAETIKYGDHGSTFAGNPLVCSAAIAVFDKVSKSSFLASVSSKGLYFKDLLVKKLGGNLHVKEVRGEGLIIGVELDVPAGPLVDACRDSGLLILTAGKGNVVRIVPPLIISEEEIERAVEIIFHDLTALD

SEQ ID NO: 1040 - protein, 448 aa, Zea mays subsp. mays
  peptide (1)..(448): Ceres Seq. ID no. 15179009
MASLGQITLPRAPSLQKGLLRRPIRTPIRFNGRIASVLTNAGSVKASVSQKVIEEEAKVLVGTYARAPVVLSSGKGCKLMDAEGKEYLDCASGIAVNALGHGDPDWLQAVTDQASVLSHVSNVYYTIPQIELAKRLVASSFADRVFFCNSGTEANEAAIKFSRKFQRFTHPEDKEVATSFIAFTNSFHGRTLGALALTSKEQYRTPFEPIMPGVTFLEYGNTQAATDLIRSGKIAAVFVEPIQGEGGVYSATKEFLQSLRSACDAAGSLLVFDEVQCGLGRTGNLWAYEAFGVTPDIMTVAKPLAGGLPIGAVLVTEKVAETIKYGDHGSTFAGNPLVCSAAIAVFDKVSKSSFLASVSSKGLYFKDLLVKKLGGNLHVKEVRGEGLIIGVELDVPAGPLVDACRDSGLLILTAGKGNVVRIVPPLIISEEEIERAVEIIFHDLTALD

SEQ ID NO: 1041 - protein, 369 aa, Zea mays subsp. mays
  peptide (1)..(369): Ceres Seq. ID no. 15179010
MDAEGKEYLDCASGIAVNALGHGDPDWLQAVTDQASVLSHVSNVYYTIPQIELAKRLVASSFADRVFFCNSGTEANEAAIKFSRKFQRFTHPEDKEVATSFIAFTNSFHGRTLGALALTSKEQYRTPFEPIMPGVTFLEYGNTQAATDLIRSGKIAAVFVEPIQGEGGVYSATKEFLQSLRSACDAAGSLLVFDEVQCGLGRTGNLWAYEAFGVTPDIMTVAKPLAGGLPIGAVLVTEKVAETIKYGDHGSTFAGNPLVCSAAIAVFDKVSKSSFLASVSSKGLYFKDLLVKKLGGNLHVKEVRGEGLIIGVELDVPAGPLVDACRDSGLLILTAGKGNVVRIVPPLIISEEEIERAVEIIFHDLTALD

SEQ ID NO: 1042 - DNA, 631 bp, Zea mays subsp. mays
  misc_feature (1)..(631): Ceres Seq. ID no. 15179011
ctgggattagagtttatagaaaatcggaaagagagagagagagagagacgagttctccgatcaacaacgccagcaaaatggagatggaaacagaagtctctgagaagaaggagatagtggtgcttctggttggtccgccaggaagcggcaaatcgacgttcagtgagtccgtaatgaaatcatctcaccgcccttggtctcgcatctgtcaggacattattaacaatggcaaagctggaagcaaagctcagtgcctaaagatggctatagaatccctcaaggaagggaagagcgtctttattgacagatgcaatcttgacagggagcagcgctccgagtttattaagctcggtggtccccttgttgaagtccatgcactggttctcgaactttctgctcaagtttgtatatctagatcagtcaaaagaagtggccatgagggtaatctacaaggcggaagagctgcagctgttgtgaacaagatgcttcggagtaaggaacttcccaaattgaatgaaggcttttctcggattctgttttgttacaacgacgcagatgttgagaatgctgtttttttttttttttttttttgaatgaatgttaaatttattcaaaaaagcctttatacaac

SEQ ID NO: 1043 - protein, 196 aa, Zea mays subsp. mays
  peptide (1)..(196): Ceres Seq. ID no. 15179012
GIRVYRKSERERERETSSPINNASKMEMETEVSEKKEIVVLLVGPPGSGKSTFSESVMKSSHRPWSRICQDIINNGKAGSKAQCLKMAIESLKEGKSVFIDRCNLDREQRSEFIKLGGPLVEVHALVLELSAQVCISRSVKRSGHEGNLQGGRAAAVVNKMLRSKELPKLNEGFSRILFCYNDADVENAVFFFFFF

SEQ ID NO: 1044 - protein, 171 aa, Zea mays subsp. mays
  peptide (1)..(171): Ceres Seq. ID no. 15179013
MEMETEVSEKKEIVVLLVGPPGSGKSTFSESVMKSSHRPWSRICQDIINNGKAGSKAQCLKMAIESLKEGKSVFIDRCNLDREQRSEFIKLGGPLVEVHALVLELSAQVCISRSVKRSGHEGNLQGGRAAAVVNKMLRSKELPKLNEGFSRILFCYNDADVENAVFFFFFF

SEQ ID NO: 1045 - protein, 169 aa, Zea mays subsp. mays
  peptide (1)..(169): Ceres Seq. ID no. 15179014
METEVSEKKEIVVLLVGPPGSGKSTFSESVMKSSHRPWSRICQDIINNGKAGSKAQCLKMAIESLKEGKSVFIDRCNLDREQRSEFIKLGGPLVEVHALVLELSAQVCISRSVKRSGHEGNLQGGRAAAVVNKMLRSKELPKLNEGFSRILFCYNDADVENAVFFFFFF

SEQ ID NO: 1046 - DNA, 1194 bp, Zea mays subsp. mays
  misc_feature (1)..(1194): Ceres Seq. ID no. 15176835
acttcgccttctctacacaaacaaaactggttcgctaagagctccgacaatggctgtctgcgcaactcactcctctctcatgatagcatacgccgcatccaaggaccttacaattccgtctcttttctcatctgccaacccaagacccaacaagttgagcgtcgcactctatccccctcttgttctccttgcggggagaagagcttcgaacccatccttcccggtggttgtctcagccgtagccgcagaggctgatgtcgacacggaggacgcggagcagaacgaagccacctccaccaccgccacagccgtcctcgatccgccaaagcctaagaaaggaaaagcagctttgcttctcaagagagatagaacaaggtctaagaggtttctggaaatccaaaagctaagggaaaccaaaaaggagtacgacgtcaagactgctatatctttgcttaagcaaaccgctaacacaaggtttgtggagtcggtcgaagcccatttccgtctcaacatcgatcctaagtacaatgatcagcagctgcgagcaaccgtgagccttcctaaaggaacagggcaaactgttaaagtggctgttcttgcacaaggtgagaaggtcgatgaagcaaaaaatgcaggggcagatattgtgggcagtgatgatttgatcgaacagataaaaggagggttcatggagttcgataagttaattgcatccccggatatgatggtcaaggttgctggcctgggaaagattcttggtccacgaggactcatgccaaatcccaaggctggtaccgtcacagctaacattccacaggctatagaagagttcaagaagggaaaagtagaattcagagcagacaaaactgggattgttcacattccgtttgggaaagtgaatttcacagaggaagacctgctcgtaaacttccttgcagcagtgaaatcggtggagacaaacaagccaaagggagcaaaaggagtgtactggaaaagcgcacacatatgttcgtcaatggggccatccatcaagttgaacataagggagatgatagagttcaagccataaataaccacatttgtgtttttttttttgtgagtgtaggcgaacaccattagttatctcttgtatacctcaccggttgtatcaccttaactctgataagaccatttgctttattgattattactgtt

SEQ ID NO: 1047 - protein, 355 aa, Zea mays subsp. mays
  peptide (1)..(355): Ceres Seq. ID no. 15176836
LRLLYTNKTGSLRAPTMAVCATHSSLMIAYAASKDLTIPSLFSSANPRPNKLSVALYPPLVLLAGRRASNPSFPVVVSAVAAEADVDTEDAEQNEATSTTATAVLDPPKPKKGKAALLLKRDRTRSKRFLEIQKLRETKKEYDVKTAISLLKQTANTRFVESVEAHFRLNIDPKYNDQQLRATVSLPKGTGQTVKVAVLAQGEKVDEAKNAGADIVGSDDLIEQIKGGFMEFDKLIASPDMMVKVAGLGKILGPRGLMPNPKAGTVTANIPQAIEEFKKGKVEFRADKTGIVHIPFGKVNFTEEDLLVNFLAAVKSVETNKPKGAKGVYWKSAHICSSMGPSIKLNIREMIEFKP

SEQ ID NO: 1048 - protein, 339 aa, Zea mays subsp. mays
  peptide (1)..(339): Ceres Seq. ID no. 15176837
MAVCATHSSLMIAYAASKDLTIPSLFSSANPRPNKLSVALYPPLVLLAGRRASNPSFPVVVSAVAAEADVDTEDAEQNEATSTTATAVLDPPKPKKGKAALLLKRDRTRSKRFLEIQKLRETKKEYDVKTAISLLKQTANTRFVESVEAHFRLNIDPKYNDQQLRATVSLPKGTGQTVKVAVLAQGEKVDEAKNAGADIVGSDDLIEQIKGGFMEFDKLIASPDMMVKVAGLGKILGPRGLMPNPKAGTVTANIPQAIEEFKKGKVEFRADKTGIVHIPFGKVNFTEEDLLVNFLAAVKSVETNKPKGAKGVYWKSAHICSSMGPSIKLNIREMIEFKP

SEQ ID NO: 1049 - protein, 329 aa, Zea mays subsp. mays
  peptide (1)..(329): Ceres Seq. ID no. 15176838
MIAYAASKDLTIPSLFSSANPRPNKLSVALYPPLVLLAGRRASNPSFPVVVSAVAAEADVDTEDAEQNEATSTTATAVLDPPKPKKGKAALLLKRDRTRSKRFLEIQKLRETKKEYDVKTAISLLKQTANTRFVESVEAHFRLNIDPKYNDQQLRATVSLPKGTGQTVKVAVLAQGEKVDEAKNAGADIVGSDDLIEQIKGGFMEFDKLIASPDMMVKVAGLGKILGPRGLMPNPKAGTVTANIPQAIEEFKKGKVEFRADKTGIVHIPFGKVNFTEEDLLVNFLAAVKSVETNKPKGAKGVYWKSAHICSSMGPSIKLNIREMIEFKP

SEQ ID NO: 1050 - DNA, 1006 bp, Zea mays subsp. mays
  misc_feature (1)..(1006): Ceres Seq. ID no. 15178924
aagtgtaaacattgtattccacaaactgcacttttcaaacaaattttgtaaaaaggcactctaaaacaataaaccatatatataaacagcataaatctgttcagtatccaaatccctctgagtctcttacataaacatcaatcccaacgaatcatctatgaaaaaacccctttgagaaaaataatccaaaacaatgtacttttcatcgtctgtactaaaacgcctcattttgatcaatttcttagccatacaactactccttataagcagcgaattgcccttaaacacgaccaatgagtatctcaaccacaaatgcttggttagtgaaggaaaatacaagccgggaagtgaatacgagagacatttaaataatatcatcaaaatgttctacagtggcagttacagaggtttctacctgttcggtatgaataatgataacgctatcctccagtgccgcgccgattcctacgggaccaagtgccacgactgctttgccaccgccctcgctaagcttcgcaggaaatgtccgtggtataagggcatgataatttggtatgaccaatgtcttctcgccattactactacagatgctattgggaagatcgattacgacaataacttttgtatgtccaatgcaaagaagttgggaggagataagagcgcttttacaaggacttggaaaactctcatggacaatctgacgactttagctaccaccactaaaggtaaagatacgtacacaatgttctctgcgggggagacgttgtacaagggtgataagatgtatggaatggtgcagtgtacatatgacttatcactaagagcttgtaaggagtgtttggtttttaatagcgtgcgttttcaagattgcttgagtgatacaagaggagcgagatttgtgggtgggacctgtacttttaggtttgagttttatccttttatttctaagccggtcctaaatatttaatgagctaaataaatgttatactattggtttgaatttccc

SEQ ID NO: 1051 - protein, 257 aa, Zea mays subsp. mays
  peptide (1)..(257): Ceres Seq. ID no. 15178925
MYFSSSVLKRLILINFLAIQLLLISSELPLNTTNEYLNHKCLVSEGKYKPGSEYERHLNNIIKMFYSGSYRGFYLFGMNNDNAILQCRADSYGTKCHDCFATALAKLRRKCPWYKGMIIWYDQCLLAITTTDAIGKIDYDNNFCMSNAKKLGGDKSAFTRTWKTLMDNLTTLATTTKGKDTYTMFSAGETLYKGDKMYGMVQCTYDLSLRACKECLVFNSVRFQDCLSDTRGARFVGGTCTFRFEFYPFISKPVLNI

SEQ ID NO: 1052 - protein, 194 aa, Zea mays subsp. mays
  peptide (1)..(194): Ceres Seq. ID no. 15178926
MFYSGSYRGFYLFGMNNDNAILQCRADSYGTKCHDCFATALAKLRRKCPWYKGMIIWYDQCLLAITTTDAIGKIDYDNNFCMSNAKKLGGDKSAFTRTWKTLMDNLTTLATTTKGKDTYTMFSAGETLYKGDKMYGMVQCTYDLSLRACKECLVFNSVRFQDCLSDTRGARFVGGTCTFRFEFYPFISKPVLNI

SEQ ID NO: 1053 - protein, 180 aa, Zea mays subsp. mays
  peptide (1)..(180): Ceres Seq. ID no. 15178927
MNNDNAILQCRADSYGTKCHDCFATALAKLRRKCPWYKGMIIWYDQCLLAITTTDAIGKIDYDNNFCMSNAKKLGGDKSAFTRTWKTLMDNLTTLATTTKGKDTYTMFSAGETLYKGDKMYGMVQCTYDLSLRACKECLVFNSVRFQDCLSDTRGARFVGGTCTFRFEFYPFISKPVLNI

SEQ ID NO: 1054 - DNA, 885 bp, Zea mays subsp. mays
  misc_feature (1)..(885): Ceres Seq. ID no. 15176511
ataacaaaaaaaaaatggcgaccgcgtctctcgtcccgacatcaaacatcttccatgtctctccgtcagttagaacaagagctagcgtcattgttgcatcatctcatcaacaacaaccaagaaggagagacttactgctgaaaacagcggtggctattcctgcgattttgaacttgaaggaagctcctatctctgaggcgcgtgaggtggaagtgggatcgttcttaccaccttctgagtctgacccttccttcgtcctcttcaaagccaaaccttctgatactcctgctctccgcgcagggaacgtgcagccgtatcagtttgttctaccaccgaactggaaacagcttcgaatagccaacatcttgtcaggcaactactgccaaccgaaatgcgcagagccatggatagaagtgaagttcgagaacgagaagcaagggaaagttcaagtagttgcttctcctttgattcgtttaaccaacaagccaaacgcaactattgaagatctcggtgagcctgagagagtgattgcttctctcggtccctttgtcactggaaactcttatgattctgatgagcttgtggatacatcaatcgaaaagatcggtgatcaaacgtactataagtatgtgttggagacgccgtttgcgctaacgggaagtcataaccttgcaaaagcgacagcgaaagggaacactgtggttctgtttgtggtgagtgctactgagaagcaatggcagagctcacagaagactcttcaagccattcttgattcttttcaactgtaaaatcagagttattgttatgactctaaaagaaactatagagcaaacggtttgtgtgtgattgtttgtgtgtagtacaatataacgaagtcatttcttc

SEQ ID NO: 1055 - protein, 261 aa, Zea mays subsp. mays
  peptide (1)..(261): Ceres Seq. ID no. 15176512
NKKKMATASLVPTSNIFHVSPSVRTRASVIVASSHQQQPRRRDLLLKTAVAIPAILNLKEAPISEAREVEVGSFLPPSESDPSFVLFKAKPSDTPALRAGNVQPYQFVLPPNWKQLRIANILSGNYCQPKCAEPWIEVKFENEKQGKVQVVASPLIRLTNKPNATIEDLGEPERVIASLGPFVTGNSYDSDELVDTSIEKIGDQTYYKYVLETPFALTGSHNLAKATAKGNTVVLFVVSATEKQWQSSQKTLQAILDSFQL

SEQ ID NO: 1056 - protein, 257 aa, Zea mays subsp. mays
  peptide (1)..(257): Ceres Seq. ID no. 15176513
MATASLVPTSNIFHVSPSVRTRASVIVASSHQQQPRRRDLLLKTAVAIPAILNLKEAPISEAREVEVGSFLPPSESDPSFVLFKAKPSDTPALRAGNVQPYQFVLPPNWKQLRIANILSGNYCQPKCAEPWIEVKFENEKQGKVQVVASPLIRLTNKPNATIEDLGEPERVIASLGPFVTGNSYDSDELVDTSIEKIGDQTYYKYVLETPFALTGSHNLAKATAKGNTVVLFVVSATEKQWQSSQKTLQAILDSFQL

SEQ ID NO: 1057 - DNA, 1447 bp, Zea mays subsp. mays
  misc_feature (1)..(1447): Ceres Seq. ID no. 15179593
attttccacgccttcattctctctataagattcattttatagattccatggccaccgtctcctccgcttctccctggccaagcgtttccacctccgcctcagattcgaactctgctgttccctctcaccaccgcgatcgtggagacgagaccgagtctctcgattccttctcctccatgagcctcaactccgaagagattactcataattccgatcgaattccggagtctcaaacaccggcgaatcctcccccgtcgctgctccacctctccttcaaccaggaccacgcctgcttcgccgtcggcaccgaccgcggcttccggatcctcaactgcgatccgttccgcgaaatcttccggcgcgatttcgatcggggcggtggagtcgccgtcgtggagatgctcttcagatgcaatatcctagcgctcgtaggcggcggacctgatccgcagtatccgccgaacaaggtcatgatttgggacgatcaccagagccggtgcatcggcgagctctccttcaggtccgatgttcgatccgttaggctcaggagggatcggattatcgtggtcctcgagcagaagatttttgtttacaacttcgcggaccttaagctgatgcatcagattgagactattgcgaaccctaagggcttgtgcgctgtctctcagggtgctggctctatggtgttggtgtgtcctggtttgcagaaaggacaactgaggatcgagcattatgcttcgaagcggactaagttcgtcatggctcatgattcgaggattgcttgctttgctctcacgcaggatgggcatttgttggccacggctagctctaaggggactctggttcggatctttaatactgttgatggcaccttgcgccaagaggttaggaggggtgcagatagagcagagatatacagtctggctttctcttcaaatgctcagtggttagctgtctcaagtgacaaaggaaccgtccatgtctttggtctcaaaggcaactccggtgctcaggtgaaagacacacccagaattgcatctgatcttactcgtacttcctcatccccatcctcgtccctgtcattattcaaaggagtgttgcccaagtatttcagctcggagtggtcggtggctcagttccggttggttgaaggaactcagtacgtagtcgcctttggacatcagaagaatactgttgttattcttggcatggatgggagcttctacagatgccagtttgatccggtgaatgggggagaaatgtctcagcttgagtatcacaactgtctaaaacctcctgttttctagatgcaactattttcttaagttccttctatcttttatctctgctctacttaagtggtgagagtcggtgcaaccatatggtgttaatgtatatagtttgtgtgtataataattacgaatggttcttataatttccaaaaacc

SEQ ID NO: 1058 - protein, 434 aa, Zea mays subsp. mays
  peptide (1)..(434): Ceres Seq. ID no. 15179594
FPRLHSLYKIHFIDSMATVSSASPWPSVSTSASDSNSAVPSHHRDRGDETESLDSFSSMSLNSEEITHNSDRIPESQTPANPPPSLLHLSFNQDHACFAVGTDRGFRILNCDPFREIFRRDFDRGGGVAVVEMLFRCNILALVGGGPDPQYPPNKVMIWDDHQSRCIGELSFRSDVRSVRLRRDRIIVVLEQKIFVYNFADLKLMHQIETIANPKGLCAVSQGAGSMVLVCPGLQKGQLRIEHYASKRTKFVMAHDSRIACFALTQDGHLLATASSKGTLVRIFNTVDGTLRQEVRRGADRAEIYSLAFSSNAQWLAVSSDKGTVHVFGLKGNSGAQVKDTPRIASDLTRTSSSPSSSLSLFKGVLPKYFSSEWSVAQFRLVEGTQYVVAFGHQKNTVVILGMDGSFYRCQFDPVNGGEMSQLEYHNCLKPPVF

SEQ ID NO: 1059 - protein, 419 aa, Zea mays subsp. mays
  peptide (1)..(419): Ceres Seq. ID no. 15179595
MATVSSASPWPSVSTSASDSNSAVPSHHRDRGDETESLDSFSSMSLNSEEITHNSDRIPESQTPANPPPSLLHLSFNQDHACFAVGTDRGFRILNCDPFREIFRRDFDRGGGVAVVEMLFRCNILALVGGGPDPQYPPNKVMIWDDHQSRCIGELSFRSDVRSVRLRRDRIIVVLEQKIFVYNFADLKLMHQIETIANPKGLCAVSQGAGSMVLVCPGLQKGQLRIEHYASKRTKFVMAHDSRIACFALTQDGHLLATASSKGTLVRIFNTVDGTLRQEVRRGADRAEIYSLAFSSNAQWLAVSSDKGTVHVFGLKGNSGAQVKDTPRIASDLTRTSSSPSSSLSLFKGVLPKYFSSEWSVAQFRLVEGTQYVVAFGHQKNTVVILGMDGSFYRCQFDPVNGGEMSQLEYHNCLKPPVF

SEQ ID NO: 1060 - protein, 376 aa, Zea mays subsp. mays
  peptide (1)..(376): Ceres Seq. ID no. 15179596
MSLNSEEITHNSDRIPESQTPANPPPSLLHLSFNQDHACFAVGTDRGFRILNCDPFREIFRRDFDRGGGVAVVEMLFRCNILALVGGGPDPQYPPNKVMIWDDHQSRCIGELSFRSDVRSVRLRRDRIIVVLEQKIFVYNFADLKLMHQIETIANPKGLCAVSQGAGSMVLVCPGLQKGQLRIEHYASKRTKFVMAHDSRIACFALTQDGHLLATASSKGTLVRIFNTVDGTLRQEVRRGADRAEIYSLAFSSNAQWLAVSSDKGTVHVFGLKGNSGAQVKDTPRIASDLTRTSSSPSSSLSLFKGVLPKYFSSEWSVAQFRLVEGTQYVVAFGHQKNTVVILGMDGSFYRCQFDPVNGGEMSQLEYHNCLKPPVF

SEQ ID NO: 1061 - DNA, 746 bp, Zea mays subsp. mays
  misc_feature (1)..(746): Ceres Seq. ID no. 15179616
aattagttgtcctcttctctaaaacattttcaacaaagaaaacggtaataagagagaagaggtggtagtaaacaagatcagaatctttaacattttcaaaacaaatggcgaccaaagccatcttcttcttctttgtctcggccgtgtgcctgtcctctctcgccggcgttgccaacgctgacgccgacgactttgacagtttccaaatccagggatcggtttactgtgacacttgccgtgtccaattcgttacccgcctcagccaattccttgaaggtgcgaaagtgaagctagagtgcaggagtagaacaaacggaactgtaacgttgactaaagaagccgtgacggacaaatcaggaagctacaaaatggaagtcaccggtgaccacgaggaggaagtctgcgagctcgttctcctccaatcaccagacagtggttgcagcgacgtcagcacagaggcttacctacgtaacgccgctaaggttagtctgaccgcgaatgacggtatcgtctcacacgagacacgtatcgttaacccccttggtttcatggttaagacgccgttagctgattgtcccgccgcatttaaggagcttggaatcgtccctgacgtcatcttctaaatatgatgacgacttgtaccaattcaagatcgttatttaactgtcatctattatttgctttcttgtatacagaaaacgtaatttgataaaaatacaaaaaagcggcaattctatatttattat

SEQ ID NO: 1062 - protein, 172 aa, Zea mays subsp. mays
  peptide (1)..(172): Ceres Seq. ID no. 15179617
MATKAIFFFFVSAVCLSSLAGVANADADDFDSFQIQGSVYCDTCRVQFVTRLSQFLEGAKVKLECRSRTNGTVTLTKEAVTDKSGSYKMEVTGDHEEEVCELVLLQSPDSGCSDVSTEAYLRNAAKVSLTANDGIVSHETRIVNPLGFMVKTPLADCPAAFKELGIVPDVIF

SEQ ID NO: 1063 - DNA, 892 bp, Zea mays subsp. mays
  misc_feature (1)..(892): Ceres Seq. ID no. 15179952
gaaaaatctctactcgtttccggaagaagatgactggagttgatgatgacaaggagttcaaagaggaaaccgtgattctcagcgacgacgacagtgaagtggaagaagttaaagacggaggagaagaaggctccgacgaggaagaagaagaagaagtcgatggaagtgaaggtgacgatgatgaggaagatgaagacgacgacgaggtccaggttttgcagtccctaggtgggcctccggtacagtcggctgaagacgaagatgaggaaggagaagaagacggaaacggagacgatgatgatgatgatgacgatgacgacgacgatgacgacgacgaggacgacgaagatggtgaagatgaggaggatcttgggactgattacctagtgaggccaattggtcgggctgaagatgaagaggatgcgagtgatttcgagcctgaagagaatggtgtggaggaagacatcgatgaaggtgaagatgacgacgagaatgataactcgggtgcgggaaaatctgaggctcctcccaagaggaagagaggagctgctgaggaagaggaagaggaggatagtgatgatgaagatgatgcaagacctccgaagaggtagttttcgaggaatttgacaacaacagcatggttcaaacaaacagatagagagcgttatggcttttttttttaaaaaagaaaatttggagtcgtgagatttgaatcattggttggggttcatgtaagtttattatggagcaagacttagtagtttaagttgagtaggggcttttttttttttttctttctcattttatgcaaatgttgtttctttttctagtgagtcaataaccaatgtttctggaacgatttgctgtctaatgctatttctctatcagttac

SEQ ID NO: 1064 - protein, 202 aa, Zea mays subsp. mays
  peptide (1)..(202): Ceres Seq. ID no. 15179953
KISTRFRKKMTGVDDDKEFKEETVILSDDDSEVEEVKDGGEEGSDEEEEEEVDGSEGDDDEEDEDDDEVQVLQSLGGPPVQSAEDEDEEGEEDGNGDDDDDDDDDDDDDDDEDDEDGEDEEDLGTDYLVRPIGRAEDEEDASDFEPEENGVEEDIDEGEDDDENDNSGAGKSEAPPKRKRGAAEEEEEEDSDDEDDARPPKR

SEQ ID NO: 1065 - protein, 193 aa, Zea mays subsp. mays
  peptide (1)..(193): Ceres Seq. ID no. 15179954
MTGVDDDKEFKEETVILSDDDSEVEEVKDGGEEGSDEEEEEEVDGSEGDDDEEDEDDDEVQVLQSLGGPPVQSAEDEDEEGEEDGNGDDDDDDDDDDDDDDDEDDEDGEDEEDLGTDYLVRPIGRAEDEEDASDFEPEENGVEEDIDEGEDDDENDNSGAGKSEAPPKRKRGAAEEEEEEDSDDEDDARPPKR

SEQ ID NO: 1066 - DNA, 872 bp, Zea mays subsp. mays
  misc_feature (1)..(872): Ceres Seq. ID no. 15179153
aatcggaaaattctagagcatcgagagtttcttcaatggcgaatctccccaccgttctcgttaccggcgctagtggcaaaacaggtcagattgtgtacaagaagctgaaggagaggtcagacaagtttgtggcgaaggggttagtgagaactcctcaagggaaagaggagattggaggagaagatgatgtgttcattggtgatataagggatgctgatagcattacccctgcgattcaagggatcgatgcgcttgtgattctcactagcgctgtgcccaagatgaaacctgggtttgatcccactaaaggtggaagacctgagttcattttcgatgatggacaataccctgaacaggttgattggattggccagaagaaccaaatagatgctgccaaggctgctggtgttaagcatattgtcttggttgggtccatgggtggaacaaatcctgatcatcctctcaacaaactgggaaatgggaacatactgatttggaagaggaaagctgaacagtaccttgctgattctggtactccttacacaataatcagagctggaggacttctagacaaagaaggaggtgcacgagagctcctagttggcaaagacgatgagcttcttcaaacagacaccaaaaccgtccccagggctgatgttgctgaagtctgcattcaggcattgctgttcgaggaagctaagaataaagcatttgatctcggttcaaaaccagagggaaccagttctcccaccaatgacttcaaggctctcttctctcaagtcatcgctcgtttttagatcttctatctctattgcaactgaataatttgtgttgtaatgtaccaaaccttttaaaataaaatctccgggtcc

SEQ ID NO: 1067 - protein, 264 aa, Zea mays subsp. mays
  peptide (1)..(264): Ceres Seq. ID no. 15179154
SENSRASRVSSMANLPTVLVTGASGKTGQIVYKKLKERSDKFVAKGLVRTPQGKEEIGGEDDVFIGDIRDADSITPAIQGIDALVILTSAVPKMKPGFDPTKGGRPEFIFDDGQYPEQVDWIGQKNQIDAAKAAGVKHIVLVGSMGGTNPDHPLNKLGNGNILIWKRKAEQYLADSGTPYTIIRAGGLLDKEGGARELLVGKDDELLQTDTKTVPRADVAEVCIQALLFEEAKNKAFDLGSKPEGTSSPTNDFKALFSQVIARF

SEQ ID NO: 1068 - protein, 253 aa, Zea mays subsp. mays
  peptide (1)..(253): Ceres Seq. ID no. 15179155
MANLPTVLVTGASGKTGQIVYKKLKERSDKFVAKGLVRTPQGKEEIGGEDDVFIGDIRDADSITPAIQGIDALVILTSAVPKMKPGFDPTKGGRPEFIFDDGQYPEQVDWIGQKNQIDAAKAAGVKHIVLVGSMGGTNPDHPLNKLGNGNILIWKRKAEQYLADSGTPYTIIRAGGLLDKEGGARELLVGKDDELLQTDTKTVPRADVAEVCIQALLFEEAKNKAFDLGSKPEGTSSPTNDFKALFSQVIARF

SEQ ID NO: 1069 - protein, 171 aa, Zea mays subsp. mays
  peptide (1)..(171): Ceres Seq. ID no. 15179156
MKPGFDPTKGGRPEFIFDDGQYPEQVDWIGQKNQIDAAKAAGVKHIVLVGSMGGTNPDHPLNKLGNGNILIWKRKAEQYLADSGTPYTIIRAGGLLDKEGGARELLVGKDDELLQTDTKTVPRADVAEVCIQALLFEEAKNKAFDLGSKPEGTSSPTNDFKALFSQVIARF

SEQ ID NO: 1070 - DNA, 737 bp, Zea mays subsp. mays
  misc_feature (1)..(737): Ceres Seq. ID no. 15173990
acaacaaacaatacatcaattctgccagataacgttttgagattttctctaaagctaaaagtcaatttaaaggtatttcttgttaagatcgaaaactctgttttgcagtttttgagtttttgaatcaaagatggggaggttgtttgtggttcatcttgaagggaagatctatagctgcaaacactgcaagactcatcttgctttatatgaagacatcatctccaagtcttttcactgtaagcatggaaaagcttatcttttcaacaaagtttccaatgttacaattggagaaacagaagacagaatgatgatgacaggaaaacatacagtggctgacattttctgtgtctcatgtggatcaatagttggttggagatatgagactgctcatgagaagagccagaagtacaaagaaggaaagtcagttcttgaaagatttaagatatcgggtcctgatggaagcaactactgggtgagtagccatggaaggcatataggtggaagtgatgcagatgattcttgaagtcctctctctatccttatgatttggcatccattgtaaatgtaaattcttcaacctcaactccaacttgcttttataagaccaacaaaagagctttattctattgcgctcaatattatctgaaaatccctcagtaaataaactctgattctgtgtaatgatcatgcttcatcaaaacctatgcttcttattcgtattgctataattataaact

SEQ ID NO: 1071 - protein, 130 aa, Zea mays subsp. mays
  peptide (1)..(130): Ceres Seq. ID no. 15173991
MGRLFVVHLEGKIYSCKHCKTHLALYEDIISKSFHCKHGKAYLFNKVSNVTIGETEDRMMMTGKHTVADIFCVSCGSIVGWRYETAHEKSQKYKEGKSVLERFKISGPDGSNYWVSSHGRHIGGSDADDS

SEQ ID NO: 1072 - protein, 72 aa, Zea mays subsp. mays
  peptide (1)..(72): Ceres Seq. ID no. 15173992
MMMTGKHTVADIFCVSCGSIVGWRYETAHEKSQKYKEGKSVLERFKISGPDGSNYWVSSHGRHIGGSDADDS

SEQ ID NO: 1073 - protein, 71 aa, Zea mays subsp. mays
  peptide (1)..(71): Ceres Seq. ID no. 15173993
MMTGKHTVADIFCVSCGSIVGWRYETAHEKSQKYKEGKSVLERFKISGPDGSNYWVSSHGRHIGGSDADDS

SEQ ID NO: 1074 - DNA, 542 bp, Zea mays subsp. mays
  misc_feature (1)..(542): Ceres Seq. ID no. 15173986
atcgaaccttgaacacctcctctctatagccggagacttcactcagagaaactcaagagaagagttagaagcaatggagggaggagaagaagctggagcggagataatggttgattcaaaggacttacagcaacaaagcaaagctttggacaagcttaccgatcgcgtcgaggatcgccagctcgattctaatcgtgttcaatcggctatggcttcgattgctgcttctagggaggctgatctaaatgccaagagattgagggagaaggaactggcttctgttaagatcaatgccgcagatgttgagctcattgtcaacgaactcgagctggagaagaatgtggtggagagaactctaagggagcacaaaggcgatgccgttgctgctactagggaattgctttcacgttatcctctatgaagggaccagttccagccttactacttgcagtttcttttgtgtgaggtttgagagcaagtatccgaatatttaactcaagttcgaagttttagtcttcttatcaatttaaatcgggttggcc

SEQ ID NO: 1075 - protein, 139 aa, Zea mays subsp. mays
  peptide (1)..(139): Ceres Seq. ID no. 15173987
SNLEHLLSIAGDFTQRNSREELEAMEGGEEAGAEIMVDSKDLQQQSKALDKLTDRVEDRQLDSNRVQSAMASIAASREADLNAKRLREKELASVKINAADVELIVNELELEKNVVERTLREHKGDAVAATRELLSRYPL

SEQ ID NO: 1076 - protein, 115 aa, Zea mays subsp. mays
  peptide (1)..(115): Ceres Seq. ID no. 15173988
MEGGEEAGAEIMVDSKDLQQQSKALDKLTDRVEDRQLDSNRVQSAMASIAASREADLNAKRLREKELASVKINAADVELIVNELELEKNVVERTLREHKGDAVAATRELLSRYPL

SEQ ID NO: 1077 - protein, 104 aa, Zea mays subsp. mays
  peptide (1)..(104): Ceres Seq. ID no. 15173989
MVDSKDLQQQSKALDKLTDRVEDRQLDSNRVQSAMASIAASREADLNAKRLREKELASVKINAADVELIVNELELEKNVVERTLREHKGDAVAATRELLSRYPL

SEQ ID NO: 1078 - DNA, 760 bp, Zea mays subsp. mays
  misc_feature (1)..(760): Ceres Seq. ID no. 15176693
ataacataagataacgcatagagaaaaccaagaagaaaagaagatgtcgtggcaaacttacgttgatgagcatttgatgtgtgatgtcggagacggccagggtcatcaccttactgccgccgcaatcgttggtcatgacggtagcgtttgggctcagagcgctaactttccccagttcaaggcacaagagttcactggtattatgaaagatttcgatgaaccgggtcacttagcccccacagggttatttctagcaggagccaagtacatggtcatccaaggcgagcctggcgctgtaatccgtggcaagaagggagctggaggcataaccataaagaaaactggacaatcatgtgtctttgggatatacgaagagcccgtgacaccaggacagtgcaatatggtcgtcgagaggttgggtgattacctcctcgaacaggatctctaagcccccatctcctcaaacctactacaatgttccaccttccacatttttttatgcaaacttaatatatatgatttgatttctgggttctttctaagaaggtgaagcctaatttagagtctgattcttaaaaatgtaaggttttcctttttctttttcttgatttcatcagatttattttattttgcttttgttaaccatgttaaataatttgtctatttgttattctctcttgacttttgacgaattgcattttatgtctattgcatatagtgttgacatattaagaaaataatatatggtttgacaacaact

SEQ ID NO: 1079 - protein, 134 aa, Zea mays subsp. mays
  peptide (1)..(134): Ceres Seq. ID no. 15176694
MSWQTYVDEHLMCDVGDGQGHHLTAAAIVGHDGSVWAQSANFPQFKAQEFTGIMKDFDEPGHLAPTGLFLAGAKYMVIQGEPGAVIRGKKGAGGITIKKTGQSCVFGIYEEPVTPGQCNMVVERLGDYLLEQDL

SEQ ID NO: 1080 - protein, 123 aa, Zea mays subsp. mays
  peptide (1)..(123): Ceres Seq. ID no. 15176695
MCDVGDGQGHHLTAAAIVGHDGSVWAQSANFPQFKAQEFTGIMKDFDEPGHLAPTGLFLAGAKYMVIQGEPGAVIRGKKGAGGITIKKTGQSCVFGIYEEPVTPGQCNMVVERLGDYLLEQDL

SEQ ID NO: 1081 - protein, 81 aa, Zea mays subsp. mays
  peptide (1)..(81): Ceres Seq. ID no. 15176696
MKDFDEPGHLAPTGLFLAGAKYMVIQGEPGAVIRGKKGAGGITIKKTGQSCVFGIYEEPVTPGQCNMVVERLGDYLLEQDL

SEQ ID NO: 1082 - DNA, 1102 bp, Zea mays subsp. mays
  misc_feature (1)..(1102): Ceres Seq. ID no. 15176185
acgcttgaactcgttattaattagacccaaaatgttaagagtaaccggaagtctctcagcggtatcatctccggcggcggtaactttctccgccgcactgagactctccgttgcccacactctcgctttctcatctcctcctccacatccccgctgcctctccacgttctctcgttcacttatcggcagacgcatctcttcgctccgaccacgcgttccttcaatgtacccgattaggctctctggcttctcggctctcaaagcgagagcttcgtttagcagtagtgggagtagtagtccaagcagagagattctggtgcagcatgtgcttgttaaggagggtgattctgagctctttgctgaactccagaagcgaatcttggatggagaggatatgagtgatcttgcagctgagtactcgatttgtccatccaagaaggatggtggtatacttggatgggtgaaattgggtcaaatggtaccagagtttgaggaagctgcgtttaaagcagagccgaatcatgtggtcaggtgtaaaacccaatttggctggcacttattgcaagttctatctgagagggaacctgtgaaagacatccaggtggaggagctgcattccaaaatgcaagatccagttttcatggaagaggctcagttaattgatgtcagagaacctgacgagatagccacagcatccttgccaggatttaaagtgttcccgctccgccaattcggaacatgggcaccagacatcacttcaaagctgaaccctgagaaggatacattcgtcctgtgtaaggttggtggcaggtcgatgcaggttgcgaactggctgcagtctcagggcttcaagagtgtgtacaatgtggctggtggaatacaagcctattccctcaaggttgacccatcaattcctacttactgacactgccacatcagagagttctagatcatcccatgcaatttactctctttattaaaaagatttttctatcgttaatccaaataattgccaatcgtattcggggaattcatttttaacagtaagtgcctgttttcgataaaattcaaatcacataaaaactgacgcgtaatgagagat

SEQ ID NO: 1083 - protein, 307 aa, Zea mays subsp. mays
  peptide (1)..(307): Ceres Seq. ID no. 15176186
RLNSLLIRPKMLRVTGSLSAVSSPAAVTFSAALRLSVAHTLAFSSPPPHPRCLSTFSRSLIGRRISSLRPRVPSMYPIRLSGFSALKARASFSSSGSSSPSREILVQHVLVKEGDSELFAELQKRILDGEDMSDLAAEYSICPSKKDGGILGWVKLGQMVPEFEEAAFKAEPNHVVRCKTQFGWHLLQVLSEREPVKDIQVEELHSKMQDPVFMEEAQLIDVREPDEIATASLPGFKVFPLRQFGTWAPDITSKLNPEKDTFVLCKVGGRSMQVANWLQSQGFKSVYNVAGGIQAYSLKVDPSIPTY

SEQ ID NO: 1084 - protein, 297 aa, Zea mays subsp. mays
  peptide (1)..(297): Ceres Seq. ID no. 15176187
MLRVTGSLSAVSSPAAVTFSAALRLSVAHTLAFSSPPPHPRCLSTFSRSLIGRRISSLRPRVPSMYPIRLSGFSALKARASFSSSGSSSPSREILVQHVLVKEGDSELFAELQKRILDGEDMSDLAAEYSICPSKKDGGILGWVKLGQMVPEFEEAAFKAEPNHVVRCKTQFGWHLLQVLSEREPVKDIQVEELHSKMQDPVFMEEAQLIDVREPDEIATASLPGFKVFPLRQFGTWAPDITSKLNPEKDTFVLCKVGGRSMQVANWLQSQGFKSVYNVAGGIQAYSLKVDPSIPTY

SEQ ID NO: 1085 - protein, 233 aa, Zea mays subsp. mays
  peptide (1)..(233): Ceres Seq. ID no. 15176188
MYPIRLSGFSALKARASFSSSGSSSPSREILVQHVLVKEGDSELFAELQKRILDGEDMSDLAAEYSICPSKKDGGILGWVKLGQMVPEFEEAAFKAEPNHVVRCKTQFGWHLLQVLSEREPVKDIQVEELHSKMQDPVFMEEAQLIDVREPDEIATASLPGFKVFPLRQFGTWAPDITSKLNPEKDTFVLCKVGGRSMQVANWLQSQGFKSVYNVAGGIQAYSLKVDPSIPTY

SEQ ID NO: 1086 - DNA, 1210 bp, Zea mays subsp. mays
  misc_feature (1)..(1210): Ceres Seq. ID no. 15179510
agtcatttgtcattatctgtctctctccactgagattcaacacgttatcagcactttgctctccaccgagcggttaccgtcgacagcaatgtccatgcatccgtgcatccggcgtctgtcggacgaaaagcgattcaaagacaagttcatggagacgctgcttaggtatggctacagaggctagtacatgtctaatggctggacgctggacaacaacccgacaccactggaaggagatgatctcgctggagtctggcagtctggccacaaggagttgatctctactcagcaacagttgcaccacagcatctgtatcgtcggaggccgggactgcgtggccatggcgccgcccaacgactccgagccatgcacgcaccaccggctgcccgcggacgagctgcagccgccgccgccggctacgtgctgcggcgccgctttggacgaccgggcgccggcggcggcatgggcgtcgtcgccgtccgagcctgaccaggtggcggcggcgcctgctgctcaggaggcggagaagaagcagaacagcgcgacgacgacggaggccgaagcagcagcgggaagcggcgccgggcgggagctggtggcggcgcggcggccggcggcggcggcggaggagagcgcgcgggagcggctgaagcggcatcgcaccgaaatggcggggcgggtgcggatcccggagatgtggggccaggagcggctgctcaaggactgggtcgactgcgccgtcttcgaccgcccgctcgccgccaccgcggggctgctcaccgcccgcgacgcgcttgtcgccgagtgcgccgccgcgcgccggccggccgtctcgcacggctccgcggggcgcccgctacgggtgcacaacggctgctcgtgagcactgcacacgtcatcggctacgacgactacgatcgagcgacgagcgagcccgctcgccgcatgcagttgagaagtgtgcctttcaacaactctattatttatttcgatccttcattgcgtagtactagtacgttctcggactatggatttggtcgatgatgtgatgatgatacacaccacgattggagtaattaatactactcatgcttcattagtactggtggttgtaattaatgtagttgatcaccattttaagcatgcatgtctcaaaacaatcttgtttattattttttcagctaatatataagctagagtgttcttgctt

SEQ ID NO: 1087 - protein, 231 aa, Zea mays subsp. mays
  peptide (1)..(231): Ceres Seq. ID no. 15179511
MSNGWTLDNNPTPLEGDDLAGVWQSGHKELISTQQQLHHSICIVGGRDCVAMAPPNDSEPCTHHRLPADELQPPPPATCCGAALDDRAPAAAWASSPSEPDQVAAAPAAQEAEKKQNSATTTEAEAAAGSGAGRELVAARRPAAAAEESARERLKRHRTEMAGRVRIPEMWGQERLLKDWVDCAVFDRPLAATAGLLTARDALVAECAAARRPAVSHGSAGRPLRVHNGCS

SEQ ID NO: 1088 - protein, 180 aa, Zea mays subsp. mays
  peptide (1)..(180): Ceres Seq. ID no. 15179512
MAPPNDSEPCTHHRLPADELQPPPPATCCGAALDDRAPAAAWASSPSEPDQVAAAPAAQEAEKKQNSATTTEAEAAAGSGAGRELVAARRPAAAAEESARERLKRHRTEMAGRVRIPEMWGQERLLKDWVDCAVFDRPLAATAGLLTARDALVAECAAARRPAVSHGSAGRPLRVHNGCS

SEQ ID NO: 1089 - DNA, 2153 bp, Zea mays subsp. mays
  misc_feature (1)..(2153): Ceres Seq. ID no. 15178310
  misc_feature (1)..(2153): Ortholog of  Ceres SEQ ID NO 15226720 as cited in SEQ ID NO 58707
  misc_feature (1)..(2153): Ortholog of  Ceres SEQ ID NO 14303173 as cited in SEQ ID NO 66550
  misc_feature (1)..(2153): Ortholog of  Ceres SEQ ID NO 15179672 as cited in SEQ ID NO 0
gtccttcttccttctctcacacactccactccacgtccccctccttcaaatcctttcaacacccaagcacaaggagagagaagccgccgccgccgccatggacaatattgaggtgaggaggaggaagaagaaagggagaagcagcggacgccgccaggggggacgggtacaggcggtcctgcgcgccggcctcgtcgccatggccttcgccctcctctgcctctgctcctccacgccctccgccattgccctcaccccagacggcgaggcgttgctggagctcaagctggccttcaacgccaccgtgcagcggctcaccagctggcgtcccagcgaccccaacccctgcggctgggagggcatctcctgctccgtccctgacctcagggtccaatccataaacctcccattcatgcagctcgggggcatcatttcgcccagcatcgggaggctcgacaagctgcagagactagctctgcaccagaacagcttgcacggcccaatccctgcagagatcaagaactgcaccgagctcagggcaatttacctgagagccaactacctgcaaggaggcatcccttcagagattggcgagctcgtgcacctcaccatcttggacctgtcaagcaatctgctgaggggcacaataccggcctcgatcggaagcctcactcacctgcgctttctgaacctgtctactaacttcttctccggagagatcccaaatgctggtgtcctcggaaccttcaaaagcagctcgttcgttggaaatctggagctctgtggcctgtccatccagaaagcttgccgtggaaccctcggctttcctgctgtgttgccacattccgatccgctctcttcggctggtgtttctccaatcaataacaacaagacgtcacactttctcaatggcgtcgtgatcggctcgatgtcaaccttggctcttgccttggtagccgtacttgggttcctatggatctgcttgctgtccattaagagtagcattggtggaaactatgtaaagatggacaaacagactgttcctgatggtgcaaagcttgtgacataccagtggaaccttccatattcatcaagcgagattattagaaggttggagctgcttgatgaagaggacgtggtcggttgtgggggctttggcacggtgtacaggatggtgatggatgatggcacgtcgtttgccgtcaagaggattgacctcagccgcgaaagtcgcgacaggaccttcgagaaggagcttgagattctgggcagcatcaggcacataaaccttgtcaatctgcgaggctactgccggctccccacagcgaagctactcgtatatgatttcgttgagctgggcagcttggattgctaccttcatggagatgaacaagaggagcagccattgaactggaacgcgcggatgaaaatcgcgcttggctcggctcgaggcctggcatatctgcaccacgattgctcgcccgggatcgtgcatagggacatcaaagccagtaacatcctgctggatagaagcttggagcctcgtgtctccgattttggcctcgcgaggctgcttgtagacagtgctgcccacgttaccaccgtcgtcgcgggcacctttggatacctagcaccagagtacttgcaaaacgggcatgctactgagaaatcagacgtgtatagctttggagtgcttatgctggagctagtgaccggaaagaggccgaccgattcttgcttcatcaagaagggactgaacattgttggctggctcaacaccctaactggggagcaccggctggaggatatcatcgatgagcgatgcggcgatgtggaggtggaagccgtggaagccatcctggacatcgcagccatgtgcaccgacgcagacccggggcagcggccatcgatgagcgctgtcctcaagatgctggaggaggagatcttgtccccctgcatgagcgagctgtgctacgagcagcacctggagctctgagctgaggaggaagatggtgctggctgcgtgcgtgaagcgtcatggatgagactgaagttttgtactgtagatacaacgatgatgagtgtaggtgatgtactgatgttttgtgtgctcttagggccaatgaagaacagtaagcagcagttcgtgagtg

SEQ ID NO: 1090 - protein, 664 aa, Zea mays subsp. mays
  peptide (1)..(664): Ceres Seq. ID no. 15178311
SFFLLSHTPLHVPLLQILSTPKHKEREAAAAAMDNIEVRRRKKKGRSSGRRQGGRVQAVLRAGLVAMAFALLCLCSSTPSAIALTPDGEALLELKLAFNATVQRLTSWRPSDPNPCGWEGISCSVPDLRVQSINLPFMQLGGIISPSIGRLDKLQRLALHQNSLHGPIPAEIKNCTELRAIYLRANYLQGGIPSEIGELVHLTILDLSSNLLRGTIPASIGSLTHLRFLNLSTNFFSGEIPNAGVLGTFKSSSFVGNLELCGLSIQKACRGTLGFPAVLPHSDPLSSAGVSPINNNKTSHFLNGVVIGSMSTLALALVAVLGFLWICLLSIKSSIGGNYVKMDKQTVPDGAKLVTYQWNLPYSSSEIIRRLELLDEEDVVGCGGFGTVYRMVMDDGTSFAVKRIDLSRESRDRTFEKELEILGSIRHINLVNLRGYCRLPTAKLLVYDFVELGSLDCYLHGDEQEEQPLNWNARMKIALGSARGLAYLHHDCSPGIVHRDIKASNILLDRSLEPRVSDFGLARLLVDSAAHVTTVVAGTFGYLAPEYLQNGHATEKSDVYSFGVLMLELVTGKRPTDSCFIKKGLNIVGWLNTLTGEHRLEDIIDERCGDVEVEAVEAILDIAAMCTDADPGQRPSMSAVLKMLEEEILSPCMSELCYEQHLEL

SEQ ID NO: 1091 - protein, 632 aa, Zea mays subsp. mays
  peptide (1)..(632): Ceres Seq. ID no. 15178312
MDNIEVRRRKKKGRSSGRRQGGRVQAVLRAGLVAMAFALLCLCSSTPSAIALTPDGEALLELKLAFNATVQRLTSWRPSDPNPCGWEGISCSVPDLRVQSINLPFMQLGGIISPSIGRLDKLQRLALHQNSLHGPIPAEIKNCTELRAIYLRANYLQGGIPSEIGELVHLTILDLSSNLLRGTIPASIGSLTHLRFLNLSTNFFSGEIPNAGVLGTFKSSSFVGNLELCGLSIQKACRGTLGFPAVLPHSDPLSSAGVSPINNNKTSHFLNGVVIGSMSTLALALVAVLGFLWICLLSIKSSIGGNYVKMDKQTVPDGAKLVTYQWNLPYSSSEIIRRLELLDEEDVVGCGGFGTVYRMVMDDGTSFAVKRIDLSRESRDRTFEKELEILGSIRHINLVNLRGYCRLPTAKLLVYDFVELGSLDCYLHGDEQEEQPLNWNARMKIALGSARGLAYLHHDCSPGIVHRDIKASNILLDRSLEPRVSDFGLARLLVDSAAHVTTVVAGTFGYLAPEYLQNGHATEKSDVYSFGVLMLELVTGKRPTDSCFIKKGLNIVGWLNTLTGEHRLEDIIDERCGDVEVEAVEAILDIAAMCTDADPGQRPSMSAVLKMLEEEILSPCMSELCYEQHLEL

SEQ ID NO: 1092 - protein, 598 aa, Zea mays subsp. mays
  peptide (1)..(598): Ceres Seq. ID no. 15178313
MAFALLCLCSSTPSAIALTPDGEALLELKLAFNATVQRLTSWRPSDPNPCGWEGISCSVPDLRVQSINLPFMQLGGIISPSIGRLDKLQRLALHQNSLHGPIPAEIKNCTELRAIYLRANYLQGGIPSEIGELVHLTILDLSSNLLRGTIPASIGSLTHLRFLNLSTNFFSGEIPNAGVLGTFKSSSFVGNLELCGLSIQKACRGTLGFPAVLPHSDPLSSAGVSPINNNKTSHFLNGVVIGSMSTLALALVAVLGFLWICLLSIKSSIGGNYVKMDKQTVPDGAKLVTYQWNLPYSSSEIIRRLELLDEEDVVGCGGFGTVYRMVMDDGTSFAVKRIDLSRESRDRTFEKELEILGSIRHINLVNLRGYCRLPTAKLLVYDFVELGSLDCYLHGDEQEEQPLNWNARMKIALGSARGLAYLHHDCSPGIVHRDIKASNILLDRSLEPRVSDFGLARLLVDSAAHVTTVVAGTFGYLAPEYLQNGHATEKSDVYSFGVLMLELVTGKRPTDSCFIKKGLNIVGWLNTLTGEHRLEDIIDERCGDVEVEAVEAILDIAAMCTDADPGQRPSMSAVLKMLEEEILSPCMSELCYEQHLEL

SEQ ID NO: 1093 - DNA, 960 bp, Zea mays subsp. mays
  misc_feature (1)..(960): Ceres Seq. ID no. 15179139
atgaaagcatcctattaaaaaaaagaagctcgtctctatctcttcaccacttcaactttaaaaaaaaaaacaaaacaaaaccagtttcctctttgtatcagacaggcatgtctatgatcatggcttcctctgctgctgctgcatcgatctctcttgtaaggaatctctctcgccatcatcaaacccctcttttggattactctagttccttccataataacctaaggatctcatccaacggtccagctttgtccacacgatcaagatccaccacctcctcctccatcttcagaaccatgtgcagcagcagcagcgagaactctagacccactaagatccaagaactcaacgtgtacgagttcaacgaaggcgaccgacacagccccgcggttctaaaactcggcaagaacccacaacagctttgcatcggcgacctcgtccctttcactaacaaactctacaccggagacctcaagaaacgcgtcgggatcaccgcaggtctctgcgttttgatccagcacgttcctgagaagaaaggcgaacgcttcgaagcttcttacagcttctacttcggagactacggtcacatttccgttcagggaccttacctgacttacgaggacacgcttctcgccatcaccggtggcaccggcgtcttcgaaggagcttacggacaggtcaagcttcatcagcttgtgtatccgaccaagctgttctacactttttacttgaaaggtgttgtcgctgatttgcctgtggagctcaccggaaaacatgttgagccgtcgaaggatgtgaagccggcggcggaagctcaggctactcagctcggggccactatcctaaactttaccgaataagtaatcattgtgtcgttgagctttctctttctcttggatcttaatgggtctgtttaatgggcctaaataatgggctttaaaataatgagccgcttttcgt

SEQ ID NO: 1094 - protein, 285 aa, Zea mays subsp. mays
  peptide (1)..(285): Ceres Seq. ID no. 15179140
ESILLKKRSSSLSLHHFNFKKKNKTKPVSSLYQTGMSMIMASSAAAASISLVRNLSRHHQTPLLDYSSSFHNNLRISSNGPALSTRSRSTTSSSIFRTMCSSSSENSRPTKIQELNVYEFNEGDRHSPAVLKLGKNPQQLCIGDLVPFTNKLYTGDLKKRVGITAGLCVLIQHVPEKKGERFEASYSFYFGDYGHISVQGPYLTYEDTLLAITGGTGVFEGAYGQVKLHQLVYPTKLFYTFYLKGVVADLPVELTGKHVEPSKDVKPAAEAQATQLGATILNFTE

SEQ ID NO: 1095 - protein, 250 aa, Zea mays subsp. mays
  peptide (1)..(250): Ceres Seq. ID no. 15179141
MSMIMASSAAAASISLVRNLSRHHQTPLLDYSSSFHNNLRISSNGPALSTRSRSTTSSSIFRTMCSSSSENSRPTKIQELNVYEFNEGDRHSPAVLKLGKNPQQLCIGDLVPFTNKLYTGDLKKRVGITAGLCVLIQHVPEKKGERFEASYSFYFGDYGHISVQGPYLTYEDTLLAITGGTGVFEGAYGQVKLHQLVYPTKLFYTFYLKGVVADLPVELTGKHVEPSKDVKPAAEAQATQLGATILNFTE

SEQ ID NO: 1096 - protein, 248 aa, Zea mays subsp. mays
  peptide (1)..(248): Ceres Seq. ID no. 15179142
MIMASSAAAASISLVRNLSRHHQTPLLDYSSSFHNNLRISSNGPALSTRSRSTTSSSIFRTMCSSSSENSRPTKIQELNVYEFNEGDRHSPAVLKLGKNPQQLCIGDLVPFTNKLYTGDLKKRVGITAGLCVLIQHVPEKKGERFEASYSFYFGDYGHISVQGPYLTYEDTLLAITGGTGVFEGAYGQVKLHQLVYPTKLFYTFYLKGVVADLPVELTGKHVEPSKDVKPAAEAQATQLGATILNFTE

SEQ ID NO: 1097 - DNA, 808 bp, Zea mays subsp. mays
  misc_feature (1)..(808): Ceres Seq. ID no. 15178388
acaatttcccaattctaattttgttttctctcacacacacactccttccaatctccaactaaatactattcttcaatttgaagcgtgtctgtagttggttgaagcactgtggtattgttctggttttggtctccgaggtttgtatcggaatccgatgtattatgcaaaagaagctgcgcatgtcgaccccattttcgtagcacatggctgccgctgataacaccaacccaaaggattattacaaagtgctggaggttgaatatgatgcaaccgatgaaaatatcaaattaaattaccgaagactcgcgttgaaatggcatcctgacaagcacggaggtgatagtgctgttactgcaaaatttcaagagattattgaagcttacaatgtattaagtgatcctgccaagcgtttggactatgatttaactgggatatgtgagattgaaaaatatagcttgcaggaatatcttgccagatttaaaagcatgattcttacctgcaatggacttggtatcaatcagacagacagatggtcacaacaattgattgaaaattttgagtccctagataaataaggcatctaaatctcaattttggccagtggagagtgatgaataaggacatctaagcgtgtctttttcctttaacatgctcttaaattccaccccactcgatttcaatgagatttgaaacctccataattgaccatgcaacctggtctgattgaatcatacatactgtaacattatgctactccaatgtgtacgtttagaatgatctgttgtgataaacctttaagtccttgtac

SEQ ID NO: 1098 - protein, 123 aa, Zea mays subsp. mays
  peptide (1)..(123): Ceres Seq. ID no. 15178389
MAAADNTNPKDYYKVLEVEYDATDENIKLNYRRLALKWHPDKHGGDSAVTAKFQEIIEAYNVLSDPAKRLDYDLTGICEIEKYSLQEYLARFKSMILTCNGLGINQTDRWSQQLIENFESLDK

SEQ ID NO: 1099 - DNA, 924 bp, Zea mays subsp. mays
  misc_feature (1)..(924): Ceres Seq. ID no. 15178887
gcgttatccaaacacacacttctcagtcctttcttggcgatagaaatggcttctcaatcttttactttggcgaatctaaggatctcccaaatcgattccttctacagtcagaaaccatcttctccaatacacttcttctccactagaaatccagtaaaatccctgaacctgacgaatccatggatggccggtgattcttctctctctctcgattcttccgcctccgtcttgcgaactaactcgacaacgcgcagaaagatcccaatcgccgtcgttgccagcttacccaccgcgaatccagaatctgcggtttctgatgcgaaaaagccaaaatggtcgtggagaggaatcaaatcatttgcaatgggagagctcgaagctaggaagctcaagtatcccaacaccggtactgaatcacttctcatgggtatcttgattgaaggaactagttttacttccaagtttttgagggcgcataagataacgctttacaaagttcgtgaagaaacaatcaagttactagggaaagcagatttgtattccttcagccctgaacatcctcctttaacccacgatgctcaaagagctcttgactctgctgtcaatcagaatctcaaagcaggtggtgctggggaaataatgccagcccatatattgctgggagtctggtctgaagttgaatctccaggtcataagatactggcaactcttggtttcactgatgaaaaagctaaagagttagagtcctttgcctctgaatctggatttctagatgaatagtgtcttgttacatttatcatcctccatttatgccatcttaattttcatactaaagcctccaaatttgtggttgcagtctgcaatgatgttcttatcggttcatcatactgattcttaattttcacttctttgcttttgcctaac

SEQ ID NO: 1100 - protein, 259 aa, Zea mays subsp. mays
  peptide (1)..(259): Ceres Seq. ID no. 15178888
ALSKHTLLSPFLAIEMASQSFTLANLRISQIDSFYSQKPSSPIHFFSTRNPVKSLNLTNPWMAGDSSLSLDSSASVLRTNSTTRRKIPIAVVASLPTANPESAVSDAKKPKWSWRGIKSFAMGELEARKLKYPNTGTESLLMGILIEGTSFTSKFLRAHKITLYKVREETIKLLGKADLYSFSPEHPPLTHDAQRALDSAVNQNLKAGGAGEIMPAHILLGVWSEVESPGHKILATLGFTDEKAKELESFASESGFLDE

SEQ ID NO: 1101 - protein, 244 aa, Zea mays subsp. mays
  peptide (1)..(244): Ceres Seq. ID no. 15178889
MASQSFTLANLRISQIDSFYSQKPSSPIHFFSTRNPVKSLNLTNPWMAGDSSLSLDSSASVLRTNSTTRRKIPIAVVASLPTANPESAVSDAKKPKWSWRGIKSFAMGELEARKLKYPNTGTESLLMGILIEGTSFTSKFLRAHKITLYKVREETIKLLGKADLYSFSPEHPPLTHDAQRALDSAVNQNLKAGGAGEIMPAHILLGVWSEVESPGHKILATLGFTDEKAKELESFASESGFLDE

SEQ ID NO: 1102 - protein, 198 aa, Zea mays subsp. mays
  peptide (1)..(198): Ceres Seq. ID no. 15178890
MAGDSSLSLDSSASVLRTNSTTRRKIPIAVVASLPTANPESAVSDAKKPKWSWRGIKSFAMGELEARKLKYPNTGTESLLMGILIEGTSFTSKFLRAHKITLYKVREETIKLLGKADLYSFSPEHPPLTHDAQRALDSAVNQNLKAGGAGEIMPAHILLGVWSEVESPGHKILATLGFTDEKAKELESFASESGFLDE

SEQ ID NO: 1103 - DNA, 924 bp, Zea mays subsp. mays
  misc_feature (1)..(924): Ceres Seq. ID no. 15178873
ttgcttctccttccgacacaatggctacgttcctcacacctcttgtttcaatcaaacctacagtcttttcattcccgtcccaatccgtcacctctccacacagacaaaccaatgtactctcactcaaaccgtttccttctcccgcgggagcacagagctccagggtgagattcattccccacgcggtggagactgaagaaaaacccgcttcagaccctaacgcagagtcctcaaggcgtgtctacatcggaaacatacccagaactgtggataacgaacagctctcaaaactcgtcgaagaacacggcgccgctgaaaatgttcaggtgatgtatgataagtattcaggaagaagccgtaggtttggattcgctacaatgaaatcagttgaagatgccaatgctgtgattgacaagttaaatggcactaccattgaagggcgtgaggtgaaggttaacatcacggagaaacctatagcgtcatcatcgtctcctgatttgtcattgcttcagtctgaggattcggcgtttgtagatagtccttataaagtgtatgtagggaatctggcaaagactgttactaaacagatgcttgagaatttgttttctgagaaagggaaagtagtcagtgccaaggtttcaagagtgcctggaacttccaaatcctctgggtttgggtttgtgacattttctacagaagaggatgttgaagctgccattttggctctaaacaactctttgttggaaggacagaagattcgggtgaataaggcatagtgtgagaaagaagaggagtccttgtgccatcacaagaacgtgaaaagaatctctttttgtaatgcaaacatgtagagcttagtatcatcatctttgtatctttgtatcctttctaagatgaaaaaatgaaagcatttctttctgatcg

SEQ ID NO: 1104 - protein, 257 aa, Zea mays subsp. mays
  peptide (1)..(257): Ceres Seq. ID no. 15178874
ASPSDTMATFLTPLVSIKPTVFSFPSQSVTSPHRQTNVLSLKPFPSPAGAQSSRVRFIPHAVETEEKPASDPNAESSRRVYIGNIPRTVDNEQLSKLVEEHGAAENVQVMYDKYSGRSRRFGFATMKSVEDANAVIDKLNGTTIEGREVKVNITEKPIASSSSPDLSLLQSEDSAFVDSPYKVYVGNLAKTVTKQMLENLFSEKGKVVSAKVSRVPGTSKSSGFGFVTFSTEEDVEAAILALNNSLLEGQKIRVNKA

SEQ ID NO: 1105 - protein, 251 aa, Zea mays subsp. mays
  peptide (1)..(251): Ceres Seq. ID no. 15178875
MATFLTPLVSIKPTVFSFPSQSVTSPHRQTNVLSLKPFPSPAGAQSSRVRFIPHAVETEEKPASDPNAESSRRVYIGNIPRTVDNEQLSKLVEEHGAAENVQVMYDKYSGRSRRFGFATMKSVEDANAVIDKLNGTTIEGREVKVNITEKPIASSSSPDLSLLQSEDSAFVDSPYKVYVGNLAKTVTKQMLENLFSEKGKVVSAKVSRVPGTSKSSGFGFVTFSTEEDVEAAILALNNSLLEGQKIRVNKA

SEQ ID NO: 1106 - protein, 148 aa, Zea mays subsp. mays
  peptide (1)..(148): Ceres Seq. ID no. 15178876
MYDKYSGRSRRFGFATMKSVEDANAVIDKLNGTTIEGREVKVNITEKPIASSSSPDLSLLQSEDSAFVDSPYKVYVGNLAKTVTKQMLENLFSEKGKVVSAKVSRVPGTSKSSGFGFVTFSTEEDVEAAILALNNSLLEGQKIRVNKA

SEQ ID NO: 1107 - DNA, 830 bp, Zea mays subsp. mays
  misc_feature (1)..(830): Ceres Seq. ID no. 15178424
agattgttcctacacacgccatttgcattcttctctctcttcagctactaaccaacgaatctctctctctctctaaaacaatggctcaggaagacgtcgctgctgctgctgctgctgctaacggtgctaccacggcggtggagaagtccgttacgttcacggcgtacaagcctcagctgattgtggaagcacagaaggtcggtgacgctgttgcgttctacaaggctgtgtttggcgccgtggagactggacgctctctctaccccaagcgtaaggctgaccaagagctccctcacctcgtctcttccgagctcgagctcgccggaacaaccgtagtcgtttctgacgtatccgttaactctggccctgatgcgaagacggggactatgcctgcgatcctcgaaaccgatgacgtggaagctgccgttgcgaaggccgttgcggctggagctgtcaaggaggaggaggaggaggaggtctcggagggtggagtcaaggggaaagtgacggatccgttcgggttcacgtggatctttgttgctccggcgaagaagagtgagaaggaaggaaacaaagaggtctaactgttaaccgtcggatctgatcatttcgtcggtttctgaacgaactttttaatattattatcctatgctttttattagtttgtcttttgtggaatctccggtatgagtaaaccggattgattaggctaaaatgacttttgttcttcaccaccttttgacataaacttggtgaaagaaataacaaaaatatcggatgttaatgtgattatgcttattagtggcttaactattttccattcgtatctc

SEQ ID NO: 1108 - protein, 193 aa, Zea mays subsp. mays
  peptide (1)..(193): Ceres Seq. ID no. 15178425
IVPTHAICILLSLQLLTNESLSLSKTMAQEDVAAAAAAANGATTAVEKSVTFTAYKPQLIVEAQKVGDAVAFYKAVFGAVETGRSLYPKRKADQELPHLVSSELELAGTTVVVSDVSVNSGPDAKTGTMPAILETDDVEAAVAKAVAAGAVKEEEEEEVSEGGVKGKVTDPFGFTWIFVAPAKKSEKEGNKEV

SEQ ID NO: 1109 - protein, 167 aa, Zea mays subsp. mays
  peptide (1)..(167): Ceres Seq. ID no. 15178426
MAQEDVAAAAAAANGATTAVEKSVTFTAYKPQLIVEAQKVGDAVAFYKAVFGAVETGRSLYPKRKADQELPHLVSSELELAGTTVVVSDVSVNSGPDAKTGTMPAILETDDVEAAVAKAVAAGAVKEEEEEEVSEGGVKGKVTDPFGFTWIFVAPAKKSEKEGNKEV

SEQ ID NO: 1110 - DNA, 836 bp, Zea mays subsp. mays
  misc_feature (1)..(836): Ceres Seq. ID no. 15175519
acaaattcacacattttttgttgcattatcacaaacacctcgtccctcacaatgcagctagcaatggcggccaacgctgtcgtttcaccgtcgccgttccgacctcagccctttctccggtcatccttctccggcgtctccgtcaagctcactccccaatccataacgctttcacgctccaagcccctcaccgtcttcgccgccaccaagaaggccgtcgccgtcctcaaggggacctccgccgtcgaaggcgtcgccactctcatccaagaagacgatggcccgacgacagtttctgttcgcatcactggccttactccggggcttcatggttttcacctacatgagtatggtgatacgacaaatgggtgtatttctacgggagcacattttaatcctaataaattgacacatggtgctcctgaggatgaagtccgtcatgcgggtgacctgggaaacatagttgctaatgcagagggggttgcagaggctacaattgtggataatcagataccactctctggccccaattcagtagttggaagagccttggtggtccatgagcttgaggatgaccttggaaagggtgggcatgaactcagtttgacaactggaaatgctggtggaagattagcatgtggtgtggttggtttgactccagcataatcagtgcagcgaattttttgtagcagtcgtgttatgttatcagatattatgttctctgtgaagcatgatgactcactgttttcttcagttaccaatgtaaactgtaaagcataatgtccttctaaagatgagtgtgcaaatgaatcatgaaaacatgttgttagtccttt

SEQ ID NO: 1111 - protein, 221 aa, Zea mays subsp. mays
  peptide (1)..(221): Ceres Seq. ID no. 15175520
TNSHIFCCIITNTSSLTMQLAMAANAVVSPSPFRPQPFLRSSFSGVSVKLTPQSITLSRSKPLTVFAATKKAVAVLKGTSAVEGVATLIQEDDGPTTVSVRITGLTPGLHGFHLHEYGDTTNGCISTGAHFNPNKLTHGAPEDEVRHAGDLGNIVANAEGVAEATIVDNQIPLSGPNSVVGRALVVHELEDDLGKGGHELSLTTGNAGGRLACGVVGLTPA

SEQ ID NO: 1112 - protein, 204 aa, Zea mays subsp. mays
  peptide (1)..(204): Ceres Seq. ID no. 15175521
MQLAMAANAVVSPSPFRPQPFLRSSFSGVSVKLTPQSITLSRSKPLTVFAATKKAVAVLKGTSAVEGVATLIQEDDGPTTVSVRITGLTPGLHGFHLHEYGDTTNGCISTGAHFNPNKLTHGAPEDEVRHAGDLGNIVANAEGVAEATIVDNQIPLSGPNSVVGRALVVHELEDDLGKGGHELSLTTGNAGGRLACGVVGLTPA

SEQ ID NO: 1113 - protein, 200 aa, Zea mays subsp. mays
  peptide (1)..(200): Ceres Seq. ID no. 15175522
MAANAVVSPSPFRPQPFLRSSFSGVSVKLTPQSITLSRSKPLTVFAATKKAVAVLKGTSAVEGVATLIQEDDGPTTVSVRITGLTPGLHGFHLHEYGDTTNGCISTGAHFNPNKLTHGAPEDEVRHAGDLGNIVANAEGVAEATIVDNQIPLSGPNSVVGRALVVHELEDDLGKGGHELSLTTGNAGGRLACGVVGLTPA

SEQ ID NO: 1114 - DNA, 961 bp, Zea mays subsp. mays
  misc_feature (1)..(961): Ceres Seq. ID no. 15176514
ctcagtctcccctactatggccttgcctatctccggcacgcgccacctcacgcgctccctcttgtccagtaccaccttactcgcgcctcctaagcttccttcctccgttcgctgcggtgggtttagctccggtcacgatgcggttgtacctcggtttacctcactccgatgccgagctaaccgttcaggctccgcttactcgccgctcaactccggctccaacttcagcgaccgacctccgacggagatggcgcctctgttcccgggatgcgattacgagcactggctgattgttatggacaagcccggcggcgaaggagcgacgaagcaggagatgattgattgttacgtacaaactttagctaaagtcgttggaagtgaggaagaggcgaagaagaggatttacaatgtttcgtgtgagaggtatttggggtttgggtgtgagattgatgaagagacatctactaagcttgaaggtttgcctggtgttctgtttgtgcttccggattcatatgtggatcctgagaacaaagattatggagcggagctatttgttaatggagagatagtccaacgatcaccagagaggcagaggagagttgagccacagccgcagagagcgcaagatagaccgagatacaatgacagaacgcgttactctcgccgcaaagaaaacacacgctgagccgcgactgaagaagatacgcgtacaccgtattgaatcaaatcgaaagcgagtacgatagtggtgatcatgaggatgatgttgctgctgccaggcgaaggttccatgttccaccccgttgctgctaatcgatcaactttggatattgttgcaaatgcttagtttcggtactgtgtaacatctttatatgtaataatgtaaattgaggttacttttactgttttagagaagacactgggatatttgggcatcaaaattcgttttcctttctagaac

SEQ ID NO: 1115 - protein, 227 aa, Zea mays subsp. mays
  peptide (1)..(227): Ceres Seq. ID no. 15176515
SVSPTMALPISGTRHLTRSLLSSTTLLAPPKLPSSVRCGGFSSGHDAVVPRFTSLRCRANRSGSAYSPLNSGSNFSDRPPTEMAPLFPGCDYEHWLIVMDKPGGEGATKQEMIDCYVQTLAKVVGSEEEAKKRIYNVSCERYLGFGCEIDEETSTKLEGLPGVLFVLPDSYVDPENKDYGAELFVNGEIVQRSPERQRRVEPQPQRAQDRPRYNDRTRYSRRKENTR

SEQ ID NO: 1116 - protein, 222 aa, Zea mays subsp. mays
  peptide (1)..(222): Ceres Seq. ID no. 15176516
MALPISGTRHLTRSLLSSTTLLAPPKLPSSVRCGGFSSGHDAVVPRFTSLRCRANRSGSAYSPLNSGSNFSDRPPTEMAPLFPGCDYEHWLIVMDKPGGEGATKQEMIDCYVQTLAKVVGSEEEAKKRIYNVSCERYLGFGCEIDEETSTKLEGLPGVLFVLPDSYVDPENKDYGAELFVNGEIVQRSPERQRRVEPQPQRAQDRPRYNDRTRYSRRKENTR

SEQ ID NO: 1117 - protein, 145 aa, Zea mays subsp. mays
  peptide (1)..(145): Ceres Seq. ID no. 15176517
MAPLFPGCDYEHWLIVMDKPGGEGATKQEMIDCYVQTLAKVVGSEEEAKKRIYNVSCERYLGFGCEIDEETSTKLEGLPGVLFVLPDSYVDPENKDYGAELFVNGEIVQRSPERQRRVEPQPQRAQDRPRYNDRTRYSRRKENTR

SEQ ID NO: 1118 - DNA, 744 bp, Zea mays subsp. mays
  misc_feature (1)..(744): Ceres Seq. ID no. 15178928
atcatcatcgtggaacgtggagctcacatactaaacaagatccgatctaaccccccggttctcgtcggaatctcttcacggttaaccggcgttcctcacccaccttttcgttccagttatggaagacgtgaagggaaaggagcttgttgatgatactcctcctcctgttgaacaaaatgatgaaactgagattcataaacagccatcgtctgagtccgaggaaaatgcgatcaagaaaaagtatggaggattgttgccaaagaagattcctttgatatccaaggatcatgagcgtgcgttttttgactcagctgattgggcattaggcaagcaaaaaggacaaaagccaaaagggcctttggaagctctccgaccaaaactgcagccaaccccgcaccagcaaccaagggcaagacgaatggccttatcttcaggcgataactctgaagacgctgaggctgacaccaacgaacctctggatgaccaacaagctagcgcatcagctgctgacaacgccaaggatgatggaggcatcgtcgatgctgctgacgccaaagacaacatcaagtcatgaacaaacatatcacaagtcagtttacagaagaataagcgaccaggcttgctttgcagtggttgtagtaatatcgagtctctctctttacattatattccatacttgggtaccagcaaatctgtatcaccatacaaaacctagtatctgaaacgtctatttggacgatttgc

SEQ ID NO: 1119 - protein, 151 aa, Zea mays subsp. mays
  peptide (1)..(151): Ceres Seq. ID no. 15178929
MEDVKGKELVDDTPPPVEQNDETEIHKQPSSESEENAIKKKYGGLLPKKIPLISKDHERAFFDSADWALGKQKGQKPKGPLEALRPKLQPTPHQQPRARRMALSSGDNSEDAEADTNEPLDDQQASASAADNAKDDGGIVDAADAKDNIKS

SEQ ID NO: 1120 - protein, 80 aa, Zea mays subsp. mays
  peptide (1)..(80): Ceres Seq. ID no. 15178930
MTNKLAHQLLTTPRMMEASSMLLTPKTTSSHEQTYHKSVYRRISDQACFAVVVVISSLSLYIIFHTWVPANLYHHTKPSI

SEQ ID NO: 1121 - DNA, 680 bp, Zea mays subsp. mays
  misc_feature (1)..(680): Ceres Seq. ID no. 15177478
acataaaccctagaaacgtctaagtgcgatctctctctctcttcctaaagatatgcgggtggtgaatccatccttgtgtatcgacggtgcacaaccattggtgtacctccctcctcctcgctcttctcattttcccgctaatggaaaattccatgggcgttgttactatcctacgagcgtttctatgcaatcccagagcaaaagatctgtctttgcatgtaacgctgccctgaatgcaaaatgcagtcaagggcaaacacagactgttactcgggaatcaccgacaattacacaagctcctacacatggaaaggagaaatccccaaagcttgatgacggtggaagcgggttcccaccccgggatgatggtggtggtgggggcggaggaggcggtggagagagcttctctggtggattcttccttttcgggtttcttatgttcatgggttacttgaaagatttggagggcgaacatgaaaccagccactagctagagaggggaggaaggggaaacagacagacagagagatctctagacgaaatagagataataaaaagtttatactagtgctagcaattaggcacatatttgtatgaatcagacagatttttgttatctcgacataaaacaaaatgcttcatctttataacaaatgttcaaagatttggaactgaggttt

SEQ ID NO: 1122 - protein, 145 aa, Zea mays subsp. mays
  peptide (1)..(145): Ceres Seq. ID no. 15177479
MRVVNPSLCIDGAQPLVYLPPPRSSHFPANGKFHGRCYYPTSVSMQSQSKRSVFACNAALNAKCSQGQTQTVTRESPTITQAPTHGKEKSPKLDDGGSGFPPRDDGGGGGGGGGGESFSGGFFLFGFLMFMGYLKDLEGEHETSH

SEQ ID NO: 1123 - protein, 101 aa, Zea mays subsp. mays
  peptide (1)..(101): Ceres Seq. ID no. 15177480
MQSQSKRSVFACNAALNAKCSQGQTQTVTRESPTITQAPTHGKEKSPKLDDGGSGFPPRDDGGGGGGGGGGESFSGGFFLFGFLMFMGYLKDLEGEHETSH

SEQ ID NO: 1124 - protein, 73 aa, Zea mays subsp. mays
  peptide (1)..(73): Ceres Seq. ID no. 15177481
MQNAVKGKHRLLLGNHRQLHKLLHMERRNPQSLMTVEAGSHPGMMVVVGAEEAVERASLVDSSFSGFLCSWVT

SEQ ID NO: 1125 - DNA, 978 bp, Zea mays subsp. mays
  misc_feature (1)..(978): Ceres Seq. ID no. 15178931
atccatttcatcaacttcaacgagagagagagagagagagagagagtaaagggagagtaaccaaaccctaatttctatctccttctcctctgaactgaaaagttccctctgctcgaaaagctcccatggcgtttcgaagaaactgtgggttggagctcttggtagcttctttaactctaaccttcgctctgattcagctagtggaggcgaactcagatggagatgctctatacgctcttcgacagagcttgtcggatccagaccatgtgctccagagctgggatcagaatcttgtcaatccttgcacctggttccatgtctcctgtaaccaagacagccgcgtcactcgtgtggatttgggtaattcaaacctttctggacatcttacccctgagcttggcaagctcgaacatctacagtatctggagctgtacaaaaacaacatccaaggaactataccttctgaacttggaaaccttaaaagtctcatcagcttggatctttacaacaacaatcttaccgggcagattcctacttctttggggaagttgaagtctctggtctttctccgcctcaatgacaaccggttgactggttcaatccctagagagctcaccaaaattccaagccttaaagtctttgatgtgtcgaacaatgatttgtgtggaactatcccaatagaaggaccttttgaacacattcctttggagaactttgagaacaactcgagattggagggaccggagttactcggtcttgcaagctacgacaccaactgcaactgagacaactgagacaacacttcaccacttttatcaaatctcacatctattattattgtaataagtatatatatgtcagtagttgaaaaacaaagaagcaaaaaaagagcccaaagactggtgtctgtttaagtaaaaacatatacatgcgactttcgtgtgttttgcattgagaagtaatattggtattggtagc

SEQ ID NO: 1126 - protein, 219 aa, Zea mays subsp. mays
  peptide (1)..(219): Ceres Seq. ID no. 15178932
MAFRRNCGLELLVASLTLTFALIQLVEANSDGDALYALRQSLSDPDHVLQSWDQNLVNPCTWFHVSCNQDSRVTRVDLGNSNLSGHLTPELGKLEHLQYLELYKNNIQGTIPSELGNLKSLISLDLYNNNLTGQIPTSLGKLKSLVFLRLNDNRLTGSIPRELTKIPSLKVFDVSNNDLCGTIPIEGPFEHIPLENFENNSRLEGPELLGLASYDTNCN

SEQ ID NO: 1127 - protein, 111 aa, Zea mays subsp. mays
  peptide (1)..(111): Ceres Seq. ID no. 15178933
MEMLYTLFDRACRIQTMCSRAGIRILSILAPGSMSPVTKTAASLVWIWVIQTFLDILPLSLASSNIYSIWSCTKTTSKELYLLNLETLKVSSAWIFTTTILPGRFLLLWGS

SEQ ID NO: 1128 - protein, 109 aa, Zea mays subsp. mays
  peptide (1)..(109): Ceres Seq. ID no. 15178934
MLYTLFDRACRIQTMCSRAGIRILSILAPGSMSPVTKTAASLVWIWVIQTFLDILPLSLASSNIYSIWSCTKTTSKELYLLNLETLKVSSAWIFTTTILPGRFLLLWGS

SEQ ID NO: 1129 - DNA, 785 bp, Zea mays subsp. mays
  misc_feature (1)..(785): Ceres Seq. ID no. 15174289
aaaatctagggttgatgagccaccgtgtatcgatcctctcttctcatttatctcccgtcatggcttcagagaaagaggctgctttagccgccactccttccgattctcccaccatatttgacaagatcatcagtaaagaaattccatccacagttgtttttgaggatgacaaggtcttggcctttagggacataactccacagggtcctgttcacatcctcctcattccaaaagtgagggatggtttaactggcctctctaaggctgaggagaggcacatcgacatcttgggccgccttctctacactgccaagcttgtagccaaacaagaaggcctagatgaaggtttcagaattgtgatcaacgatggtcctcaaggctatcagtcggtgtatcacattcatgttcatctcattggaggacgccaaatgaactggcctcctggctaaaagggtttgatcatctactagtgattgttgtcctggttataagaggaaccctaccctgagtttgctattgtcttcttctttctgaataaaaagagtgtgacataactttttatgattgttatgcgaaaccttggtctatggtttgaagagaatatttgactgttctcttttctggaaccctcttttttattgttgacttggtaaaacatttcaatggtaaaaaagcgtcaaataaatgagtgaatgttagagagttttctgtgtaagatttttagtgtaataatcatctttaggaaaataactaaggaatatactttgtaatattccctctatttc

SEQ ID NO: 1130 - protein, 148 aa, Zea mays subsp. mays
  peptide (1)..(148): Ceres Seq. ID no. 15174290
NLGLMSHRVSILSSHLSPVMASEKEAALAATPSDSPTIFDKIISKEIPSTVVFEDDKVLAFRDITPQGPVHILLIPKVRDGLTGLSKAEERHIDILGRLLYTAKLVAKQEGLDEGFRIVINDGPQGYQSVYHIHVHLIGGRQMNWPPG

SEQ ID NO: 1131 - protein, 144 aa, Zea mays subsp. mays
  peptide (1)..(144): Ceres Seq. ID no. 15174291
MSHRVSILSSHLSPVMASEKEAALAATPSDSPTIFDKIISKEIPSTVVFEDDKVLAFRDITPQGPVHILLIPKVRDGLTGLSKAEERHIDILGRLLYTAKLVAKQEGLDEGFRIVINDGPQGYQSVYHIHVHLIGGRQMNWPPG

SEQ ID NO: 1132 - protein, 129 aa, Zea mays subsp. mays
  peptide (1)..(129): Ceres Seq. ID no. 15174292
MASEKEAALAATPSDSPTIFDKIISKEIPSTVVFEDDKVLAFRDITPQGPVHILLIPKVRDGLTGLSKAEERHIDILGRLLYTAKLVAKQEGLDEGFRIVINDGPQGYQSVYHIHVHLIGGRQMNWPPG

SEQ ID NO: 1133 - DNA, 714 bp, Zea mays subsp. mays
  misc_feature (1)..(714): Ceres Seq. ID no. 15178866
acctttccccgagttccgacaatggcttcagcatcagcgacagccactcttctcaagcccactcctcttccaccccataaaccgatcatcaccgcctccgtatctcctcctctccctcctccacgtcgccacaacctcctccgccgagatttgctctccttatccgccgcatcgacgctacttctaacgcaatctctcccgtttctagctccgtcgccggcatccgccgccgaggacgaagagtacgtgaaagatacgtcggcggtgatctccaaagttcggacgacgctctcgatggagaggacagatccgaatgtggcggatgcggtggcggagctgagagaagtgtcgaactcgtgggttgctaagtacaggaaggagaaagctcttctcgggaaagcgtcgttcagggatatttactcggcgttgaatgctgtgtctggacattatgtgagttttggtccgacggctccgatcccggcgaagaggaaggcgaggattcttgaagagatggagactgctgagaaagctctctctagaggaagataaatttacagtgagacctaaccatttcttcttcttcttctccagttccttgtcgatgaagttttctttttacctttaaatgcttatatgagaagagaaacttgaaattgctcgtttgtttttgtaaaatacttcatgataatttacttaattatcatttacaataac

SEQ ID NO: 1134 - protein, 182 aa, Zea mays subsp. mays
  peptide (1)..(182): Ceres Seq. ID no. 15178867
TFPRVPTMASASATATLLKPTPLPPHKPIITASVSPPLPPPRRHNLLRRDLLSLSAASTLLLTQSLPFLAPSPASAAEDEEYVKDTSAVISKVRTTLSMERTDPNVADAVAELREVSNSWVAKYRKEKALLGKASFRDIYSALNAVSGHYVSFGPTAPIPAKRKARILEEMETAEKALSRGR

SEQ ID NO: 1135 - protein, 175 aa, Zea mays subsp. mays
  peptide (1)..(175): Ceres Seq. ID no. 15178868
MASASATATLLKPTPLPPHKPIITASVSPPLPPPRRHNLLRRDLLSLSAASTLLLTQSLPFLAPSPASAAEDEEYVKDTSAVISKVRTTLSMERTDPNVADAVAELREVSNSWVAKYRKEKALLGKASFRDIYSALNAVSGHYVSFGPTAPIPAKRKARILEEMETAEKALSRGR

SEQ ID NO: 1136 - DNA, 1045 bp, Zea mays subsp. mays
  misc_feature (1)..(1045): Ceres Seq. ID no. 15176130
attttgaaaaaatcaaaactttctataatttgtttcaagtaagaagaagaaaggagaagaatcaatgaatccagattccgattaccctcacctccccaacatcaagatccaccacccttcctcccctcgccactcccaccaccactcctcctccactccctccgccgccactcccacccccaccgccggagcccgccgtaaaatcggagtcgccgttgacctctccgaagaaagcgccttcgccgtccgctgggccgtcgatcactacatccgccccggagacgccgtcgtcatcctccacgtctcccccacctccgtcctcttcggcgccgactggggccccctccctctccagtctccgcctcctccgggccaccccacccaggaggatttcgacgccttcacgtcctccaaggtctccgatctcgcgaagcccctgaaggaggcggggttccctcacaagatccagatagtgaaggaccacgacatgagggagaggctgtgtttggaaatcgagaggctgaatctgagcgcggtgatcatggggagcagagggtttggagctgagaagaagagagggagcgatgggaagcttggctctgttagtgattattgtgttcaccactgtgtttgtcctgttgttgtcgtgaggtatcctgatgatcgtgacggtcctgctgctcctggggaggtgggtggaggtacgagggaagctattgtcactgtgaaggcggggagggatgatgatggcgaggatgatgaagctcataaggctaagattgctgctgcttccgctcatcatgaacacgtcaaagatgaataatgcgccttagtatctcattggattcaccctcttgcaaggttggatgattcgctatcttttgcaatcatcaagtccctggaatctcctctgaatttattatttcttcaatgtctttttttatatattattgactcgtatgtatgattttcgcattaaaacaatgaaattgctactaacattaaaaaaaaaaaaaatccttttaggattataatcttcatagtg

SEQ ID NO: 1137 - protein, 252 aa, Zea mays subsp. mays
  peptide (1)..(252): Ceres Seq. ID no. 15176131
MNPDSDYPHLPNIKIHHPSSPRHSHHHSSSTPSAATPTPTAGARRKIGVAVDLSEESAFAVRWAVDHYIRPGDAVVILHVSPTSVLFGADWGPLPLQSPPPPGHPTQEDFDAFTSSKVSDLAKPLKEAGFPHKIQIVKDHDMRERLCLEIERLNLSAVIMGSRGFGAEKKRGSDGKLGSVSDYCVHHCVCPVVVVRYPDDRDGPAAPGEVGGGTREAIVTVKAGRDDDGEDDEAHKAKIAAASAHHEHVKDE

SEQ ID NO: 1138 - DNA, 2191 bp, Zea mays subsp. mays
  misc_feature (1)..(2191): Ceres Seq. ID no. 15179424
gctggtgcttctacggggcctggcgatttgaattcgagtggtgcgtgtatagagcgtgagagagagaaaagagagtggctcttgcgctctgcagtccagttcttgaatccagagctgcgattcgtgctcgcctgacgccgatgggccggagcctgagcccgctgctacggcaggagctggacaacctggacaaggacgctgacagccgccgcgccgccatgaaggcgctcaagtcgtacgccagacacctggactccaagtccatcccgcacttcctcgccgaggtctccgacaccaccgcggccggcgccggcgccggcagcggcatgcccaccggcggcgagttcaccatctcgctctacgaggtgctggcgcgggtgcacggccgcaacatcgtgccgcagatcggcaacatcatggccaccatcatgtgcacgctctcctccagcgggggctccttcccgctccaccaggcctgctccaaggtggtgcccgccatcgcgcggcacggcatcgacccctccgcgcccgacggggagaaggccggcatcatcgcctccctctgcaggccgctctgcagcgcgctcatgggggggagccaggacgtcggcgccgcctccggcgcggcgctgtgcctgaaggcgctcgtcgagtccagcaactggaggttcgcgtccggggagctggtgaacgaggtctgcctcaaggtggccggggcgatgcacgacagcgcgacgcggtcgaacgcgcacatgggcctcgccatggccctggtgaagcacaacggcctgatcgcggaggcgtacgcgaggtccatcgtgcgctccgggctgcagatccttgatggggacacggcggatagcagctcccagaagcgcctctcggcgatccagatgatcaatttcttcatgaagttcgttgaccccaggtgcctgtcttcagagcttggcagggtgattgatgtgatggagcggtgccagaatgaccgcatgcctttcgtccgaggtgctgcgtttgaggcatcacagagtgcgaggaacatcgccgcgcagaagggatcaagacatgaggttggcacgagcccgatggttggctccaatttccacaagagaagggagaagagcccatgccggagcctctggggtgccaagcgcagccctgcagcctccaccatggctgctgcttctccagtccagttcagatccccggaatcgcaggttgtggattcatccatcatgaacggcagcacgctccacgactcaccggtctcagtcgggcagtcctcttgcaactttgatcagagtcggcgcacgaaccggaggttgtggagcaatgatgccgttgatgtttctctgaaggatggcttgttcattcagctttgctcaaacagcaattcctatgaagatgacttgggcgaggtctgtgacagtgaagtgactgatgctaactttgagtgtaccaacacatttgcagggtttgtgtcaccaagccacaatggttccatatcaagggacaagactcccagtcccagggcttcagacaggccgataaatattgatgacgtgaagatatactcaacaccaaggaagcttctccgattgcttcaaagctcatacgactctgactctgctagcaacatcggacagtccactgcaaagctcagaggcttgtcgtcaccagatcaggaacacaagggactagtgatctcatctgaacagatgcaatctctgcattcagacaacaagggtgatgagatgaaagatgagaacgaaaccatttatatgcagaacagcaaaggtcggactcagactctatccaatgctgatgcatcagtactttccactaccgaggctgagaacacatccatcaagacttcccctgaaattgagctcaatggggatgatgtctgtattacaagcagcatagggaagaccaggaagtatagagcaaaattcactttgtttctgagcgtgatcgtgatctttttagcaatcatcaccatgctcatcaggatagagaatgatgatgattcagcgtaccttgtccccacttaatattttgtatgcttcattgctgtctgtttaaattcctatttttattttatcactatagagtggtttgtgttttgaacaattttgcagtcatctatccatgaatgacagcaaataattaaattagaattttcatgctc

SEQ ID NO: 1139 - protein, 637 aa, Zea mays subsp. mays
  peptide (1)..(637): Ceres Seq. ID no. 15179425
MGRSLSPLLRQELDNLDKDADSRRAAMKALKSYARHLDSKSIPHFLAEVSDTTAAGAGAGSGMPTGGEFTISLYEVLARVHGRNIVPQIGNIMATIMCTLSSSGGSFPLHQACSKVVPAIARHGIDPSAPDGEKAGIIASLCRPLCSALMGGSQDVGAASGAALCLKALVESSNWRFASGELVNEVCLKVAGAMHDSATRSNAHMGLAMALVKHNGLIAEAYARSIVRSGLQILDGDTADSSSQKRLSAIQMINFFMKFVDPRCLSSELGRVIDVMERCQNDRMPFVRGAAFEASQSARNIAAQKGSRHEVGTSPMVGSNFHKRREKSPCRSLWGAKRSPAASTMAAASPVQFRSPESQVVDSSIMNGSTLHDSPVSVGQSSCNFDQSRRTNRRLWSNDAVDVSLKDGLFIQLCSNSNSYEDDLGEVCDSEVTDANFECTNTFAGFVSPSHNGSISRDKTPSPRASDRPINIDDVKIYSTPRKLLRLLQSSYDSDSASNIGQSTAKLRGLSSPDQEHKGLVISSEQMQSLHSDNKGDEMKDENETIYMQNSKGRTQTLSNADASVLSTTEAENTSIKTSPEIELNGDDVCITSSIGKTRKYRAKFTLFLSVIVIFLAIITMLIRIENDDDSAYLVPT

SEQ ID NO: 1140 - protein, 611 aa, Zea mays subsp. mays
  peptide (1)..(611): Ceres Seq. ID no. 15179426
MKALKSYARHLDSKSIPHFLAEVSDTTAAGAGAGSGMPTGGEFTISLYEVLARVHGRNIVPQIGNIMATIMCTLSSSGGSFPLHQACSKVVPAIARHGIDPSAPDGEKAGIIASLCRPLCSALMGGSQDVGAASGAALCLKALVESSNWRFASGELVNEVCLKVAGAMHDSATRSNAHMGLAMALVKHNGLIAEAYARSIVRSGLQILDGDTADSSSQKRLSAIQMINFFMKFVDPRCLSSELGRVIDVMERCQNDRMPFVRGAAFEASQSARNIAAQKGSRHEVGTSPMVGSNFHKRREKSPCRSLWGAKRSPAASTMAAASPVQFRSPESQVVDSSIMNGSTLHDSPVSVGQSSCNFDQSRRTNRRLWSNDAVDVSLKDGLFIQLCSNSNSYEDDLGEVCDSEVTDANFECTNTFAGFVSPSHNGSISRDKTPSPRASDRPINIDDVKIYSTPRKLLRLLQSSYDSDSASNIGQSTAKLRGLSSPDQEHKGLVISSEQMQSLHSDNKGDEMKDENETIYMQNSKGRTQTLSNADASVLSTTEAENTSIKTSPEIELNGDDVCITSSIGKTRKYRAKFTLFLSVIVIFLAIITMLIRIENDDDSAYLVPT

SEQ ID NO: 1141 - protein, 575 aa, Zea mays subsp. mays
  peptide (1)..(575): Ceres Seq. ID no. 15179427
MPTGGEFTISLYEVLARVHGRNIVPQIGNIMATIMCTLSSSGGSFPLHQACSKVVPAIARHGIDPSAPDGEKAGIIASLCRPLCSALMGGSQDVGAASGAALCLKALVESSNWRFASGELVNEVCLKVAGAMHDSATRSNAHMGLAMALVKHNGLIAEAYARSIVRSGLQILDGDTADSSSQKRLSAIQMINFFMKFVDPRCLSSELGRVIDVMERCQNDRMPFVRGAAFEASQSARNIAAQKGSRHEVGTSPMVGSNFHKRREKSPCRSLWGAKRSPAASTMAAASPVQFRSPESQVVDSSIMNGSTLHDSPVSVGQSSCNFDQSRRTNRRLWSNDAVDVSLKDGLFIQLCSNSNSYEDDLGEVCDSEVTDANFECTNTFAGFVSPSHNGSISRDKTPSPRASDRPINIDDVKIYSTPRKLLRLLQSSYDSDSASNIGQSTAKLRGLSSPDQEHKGLVISSEQMQSLHSDNKGDEMKDENETIYMQNSKGRTQTLSNADASVLSTTEAENTSIKTSPEIELNGDDVCITSSIGKTRKYRAKFTLFLSVIVIFLAIITMLIRIENDDDSAYLVPT

SEQ ID NO: 1142 - DNA, 842 bp, Zea mays subsp. mays
  misc_feature (1)..(842): Ceres Seq. ID no. 15178836
ctgaaactcttatcttttctccagacagagcaaaacagtctcacgatggctactaccacgtcatctccgccgtgtcatatctccgtctcattcctccgtcagcttcctccttgcaccactgttcagttcttcggtttctcaccgacccagcgtaaactgggcgggttaacggtagcccggaacaatctggcgcaggattttctcggggacttcggagctcgtgacccgtacccggcggagatagcgagccagttcggagataaggtgttgggaccccaaagcacagagcacaagattctgattcctaatgcctctgttctctccctctcgcagctcgaatgctcccctgtttcgccttctcaggctcctttatcccccgatgaggccaaaacgctcctccataaggttttgggatggagtatagtggaggatgaagcgggcggtctgaaaataagatgcatgtggaaggtgagggattttgggtgcggcgttgaactcataaacaggatccataaggtggctgacgcttctggtcattacccttctctccatttggaaagtcctacccaagttagagctgaactatctacctcttccattggtgggctgagcatgaacgatttcataatggcggcaaagatagatgatatcaagacttctgatctttcctcaaggaaaagagtctgggcataacaaacgtggatttttcattacttatctcatatttgtgacatttttgtatgataacaatataatataagtgatgtattcgttggtctttatgttaagttattatatagaaactatgtattattcatcatcatattggaaatcattttagc

SEQ ID NO: 1143 - protein, 230 aa, Zea mays subsp. mays
  peptide (1)..(230): Ceres Seq. ID no. 15178837
LKLLSFLQTEQNSLTMATTTSSPPCHISVSFLRQLPPCTTVQFFGFSPTQRKLGGLTVARNNLAQDFLGDFGARDPYPAEIASQFGDKVLGPQSTEHKILIPNASVLSLSQLECSPVSPSQAPLSPDEAKTLLHKVLGWSIVEDEAGGLKIRCMWKVRDFGCGVELINRIHKVADASGHYPSLHLESPTQVRAELSTSSIGGLSMNDFIMAAKIDDIKTSDLSSRKRVWA

SEQ ID NO: 1144 - protein, 215 aa, Zea mays subsp. mays
  peptide (1)..(215): Ceres Seq. ID no. 15178838
MATTTSSPPCHISVSFLRQLPPCTTVQFFGFSPTQRKLGGLTVARNNLAQDFLGDFGARDPYPAEIASQFGDKVLGPQSTEHKILIPNASVLSLSQLECSPVSPSQAPLSPDEAKTLLHKVLGWSIVEDEAGGLKIRCMWKVRDFGCGVELINRIHKVADASGHYPSLHLESPTQVRAELSTSSIGGLSMNDFIMAAKIDDIKTSDLSSRKRVWA

SEQ ID NO: 1145 - DNA, 1011 bp, Zea mays subsp. mays
  misc_feature (1)..(1011): Ceres Seq. ID no. 15178847
ataaaaactaaaaattaagaaatagcgtcgaacgttctctctccctctctcaagtaacagagatccaaatagatggagaagggagagtcaacaagcacgtcttactccgacaccaacggctcaaacgaaccagatcacgacttcgaatgcaacatctgcttcgagttagctcaagaccccatcgtcactctctgcggccacctcttctgctggccttgcttgtaccgttggcttcaccaccactctcactcccaagaatgccctgtctgcaaagctctcgtccaagacgacaagctcgtccctctctacggccgcggcaagaaccagaccgaccctaggaccaaacgttaccccgggatgcggattcccaacaggccagctggtcagagacccgagacggcctctcctcctcctcagcagcctcagaacgacgcggcgagtaactttttcaactacgggattggtttgatgggtgggtttatgcccatggcgactaccaggattgggaacttcagctttggggttggtgggttgttgccttctttgtttaactttcagttccatgggtttcctgacgcggcgctctatggcaccgcgccgggttacccttttggtggttaccataacggtttccgtggagttcctggtggtaacaatgaaccgacggcgcctggtggagggcacccaagcgatgcagctctgaagaatatcctcattgtcgttggaatctgcgtgttcttcttccttttattgtgaaaacagtttgggtttttttttttattatccaggtatgatagttgcaaactctcttacttggtttgaacaatgtcttgtatatacgttacggtaatagcctgagtatgtgtctccttttcctacgtttgttttttgctatttgaagaagattacttggatcttctatacacaactctcgttttttaatcttatttgcttttgacgttgtatctgcatcttatgagaactagttggtgtggaaaataactattgcat

SEQ ID NO: 1146 - protein, 227 aa, Zea mays subsp. mays
  peptide (1)..(227): Ceres Seq. ID no. 15178848
MEKGESTSTSYSDTNGSNEPDHDFECNICFELAQDPIVTLCGHLFCWPCLYRWLHHHSHSQECPVCKALVQDDKLVPLYGRGKNQTDPRTKRYPGMRIPNRPAGQRPETASPPPQQPQNDAASNFFNYGIGLMGGFMPMATTRIGNFSFGVGGLLPSLFNFQFHGFPDAALYGTAPGYPFGGYHNGFRGVPGGNNEPTAPGGGHPSDAALKNILIVVGICVFFFLLL

SEQ ID NO: 1147 - protein, 132 aa, Zea mays subsp. mays
  peptide (1)..(132): Ceres Seq. ID no. 15178849
MRIPNRPAGQRPETASPPPQQPQNDAASNFFNYGIGLMGGFMPMATTRIGNFSFGVGGLLPSLFNFQFHGFPDAALYGTAPGYPFGGYHNGFRGVPGGNNEPTAPGGGHPSDAALKNILIVVGICVFFFLLL

SEQ ID NO: 1148 - DNA, 1445 bp, Zea mays subsp. mays
  misc_feature (1)..(1445): Ceres Seq. ID no. 15176709
ctctcttcgctcagctcccacaagaaagggcgaagaatctctccctcctccttgaccttctcttcgccatcgattccctttgaggtgcaaaaatggttgaacagactcagcaacaaccctcgattctccagaaggcttcttctggccagctcatgcgctccggggtttctcaggacatccatggctacgcatctggtttccagaggcgtgcgacctacggaaactactcgaacgctgcgtttcagtaccctctcgcggcctcttccaggattgtggcgactactactacttctcctgtttttgtgcaagctccaagtgagaaaggattctctagcttcgctattgatttcttgatgggtggtgtttccgctgctgtctctaagaccgcggctgctccaattgagcgtgtgaagcttttgattcagaaccaggatgagatgcttaaggctggtaggttatctgagccttacaagggtattggtgattgtttcggaaggactattaaggatgaagggtttggttctttgtggagaggaaacactgctaacgttatccgttacttccccactcaggcattgaactttgcgttcaaagattacttcaagaggcttttcaactttaagaaggacagggatggttactggaagtggtttgctggtaacttgggatctggaggtgctgctggtgcatcttcccttctcttcgtgtactctcttgactatgcacgtacccgtctcgccaacgactccaaggcagccaagaagggaggtgaaaggcagttcaatggtcttgttgatgtctacaagaagactctcaagtccgatggtatcgctggactttaccgtggattcaacatctcctgtgttggtatcattgtctaccgtggtctctactttggtctgtatgactctttgaagcctctcctccccgctgacctccaggacagtttcttcgcttcctttgcccttggatggctcatcaccaacggtgctggtcttgcatcgtacccaatcgacacagtccgtagaagaatgatgatgacctccggtgaagccgtcaagtacaagagctccatggatgcattccaacagatcctgaagaaggaaggacccaagtctctgttcaagggtgctggtgccaacatcctccgtgctattgcaggtgctggtgtgctctctggatacgacaagctccagttacttcttctcggaaagaagtacggatctggatccggctaagcaatactaatccaccaaacagttaaaaagcttcggctttatttttatttttctcgatttaatttgcagttttttcagactttttttaaaaaaggtcaagatgttgatgaaatcttttgctataaaaactagagaggaggcaaggggaatttttcttattgaataaattttgtatggggatggagtttgacttcctcctttgaaccc

SEQ ID NO: 1149 - protein, 381 aa, Zea mays subsp. mays
  peptide (1)..(381): Ceres Seq. ID no. 15176710
MVEQTQQQPSILQKASSGQLMRSGVSQDIHGYASGFQRRATYGNYSNAAFQYPLAASSRIVATTTTSPVFVQAPSEKGFSSFAIDFLMGGVSAAVSKTAAAPIERVKLLIQNQDEMLKAGRLSEPYKGIGDCFGRTIKDEGFGSLWRGNTANVIRYFPTQALNFAFKDYFKRLFNFKKDRDGYWKWFAGNLGSGGAAGASSLLFVYSLDYARTRLANDSKAAKKGGERQFNGLVDVYKKTLKSDGIAGLYRGFNISCVGIIVYRGLYFGLYDSLKPLLPADLQDSFFASFALGWLITNGAGLASYPIDTVRRRMMMTSGEAVKYKSSMDAFQQILKKEGPKSLFKGAGANILRAIAGAGVLSGYDKLQLLLLGKKYGSGSG

SEQ ID NO: 1150 - protein, 361 aa, Zea mays subsp. mays
  peptide (1)..(361): Ceres Seq. ID no. 15176711
MRSGVSQDIHGYASGFQRRATYGNYSNAAFQYPLAASSRIVATTTTSPVFVQAPSEKGFSSFAIDFLMGGVSAAVSKTAAAPIERVKLLIQNQDEMLKAGRLSEPYKGIGDCFGRTIKDEGFGSLWRGNTANVIRYFPTQALNFAFKDYFKRLFNFKKDRDGYWKWFAGNLGSGGAAGASSLLFVYSLDYARTRLANDSKAAKKGGERQFNGLVDVYKKTLKSDGIAGLYRGFNISCVGIIVYRGLYFGLYDSLKPLLPADLQDSFFASFALGWLITNGAGLASYPIDTVRRRMMMTSGEAVKYKSSMDAFQQILKKEGPKSLFKGAGANILRAIAGAGVLSGYDKLQLLLLGKKYGSGSG

SEQ ID NO: 1151 - protein, 294 aa, Zea mays subsp. mays
  peptide (1)..(294): Ceres Seq. ID no. 15176712
MGGVSAAVSKTAAAPIERVKLLIQNQDEMLKAGRLSEPYKGIGDCFGRTIKDEGFGSLWRGNTANVIRYFPTQALNFAFKDYFKRLFNFKKDRDGYWKWFAGNLGSGGAAGASSLLFVYSLDYARTRLANDSKAAKKGGERQFNGLVDVYKKTLKSDGIAGLYRGFNISCVGIIVYRGLYFGLYDSLKPLLPADLQDSFFASFALGWLITNGAGLASYPIDTVRRRMMMTSGEAVKYKSSMDAFQQILKKEGPKSLFKGAGANILRAIAGAGVLSGYDKLQLLLLGKKYGSGSG

SEQ ID NO: 1152 - DNA, 1062 bp, Zea mays subsp. mays
  misc_feature (1)..(1062): Ceres Seq. ID no. 15178797
attcaaaacaaaacaccatacaacatggatcataagacaaacacgacactgcttttctcgctcttgttttccatcacgtacctcatcaccatcgcgacatcgaaagatctatgtaaccaaaacgacaaaaacaccctccttaaaatcaagaagtccctaaacaacccttaccacctcgcctcgtggcacccggaaaccgactgctgctcctggtactgcctcgaatgcggcgacgccaccgttaaccaccgcgtcatctccctaaccatattcgccggtcagatatccggtcagattccgcctgaagtgggtgacttaccgtatcttcagaatcttatgttccacaggatcactaacatcaccggtcagatcccatccaccatcaccaagcttaagtatctccgttctctcatgcttagctggttgaacctcaccggcccggttcctgatttccttagtcagctcatgaatcttgaatacttaagccttgccttcaatcagctctctggttccatacctagctctctcgctttgttacctaaactttcgtacattgatgttagtaggaataaacttacaggtacaatacctgaatcatttggatcgtttccagcagaagttcctcaccttatcttttcacacaatcagctctccggttctatacccaaatcactaggcaaccttgattttaaccggatagatttctcaaggaacaagctcacaggcgatgcttcgatgttgtttggagccaacaaaacgacgttttccattgacttatcaagaaacatgttccagtttgatctgtccagagttgtgctccatgagtcacttggtgtactggacttgaaccacaatgggatcacagggagtattccggttcagtggactgaatattctctccaaatcttaaatgttagctataacagactgtgtggacccatccccactggaggaagtcttcagagatttgattcttatacatattttcataacaagtgtttatgtggtgcacctcttgatagtagttgcaagtaataaaccaagcttatctctagttttccc

SEQ ID NO: 1153 - protein, 344 aa, Zea mays subsp. mays
  peptide (1)..(344): Ceres Seq. ID no. 15178798
IQNKTPYNMDHKTNTTLLFSLLFSITYLITIATSKDLCNQNDKNTLLKIKKSLNNPYHLASWHPETDCCSWYCLECGDATVNHRVISLTIFAGQISGQIPPEVGDLPYLQNLMFHRITNITGQIPSTITKLKYLRSLMLSWLNLTGPVPDFLSQLMNLEYLSLAFNQLSGSIPSSLALLPKLSYIDVSRNKLTGTIPESFGSFPAEVPHLIFSHNQLSGSIPKSLGNLDFNRIDFSRNKLTGDASMLFGANKTTFSIDLSRNMFQFDLSRVVLHESLGVLDLNHNGITGSIPVQWTEYSLQILNVSYNRLCGPIPTGGSLQRFDSYTYFHNKCLCGAPLDSSCK

SEQ ID NO: 1154 - protein, 336 aa, Zea mays subsp. mays
  peptide (1)..(336): Ceres Seq. ID no. 15178799
MDHKTNTTLLFSLLFSITYLITIATSKDLCNQNDKNTLLKIKKSLNNPYHLASWHPETDCCSWYCLECGDATVNHRVISLTIFAGQISGQIPPEVGDLPYLQNLMFHRITNITGQIPSTITKLKYLRSLMLSWLNLTGPVPDFLSQLMNLEYLSLAFNQLSGSIPSSLALLPKLSYIDVSRNKLTGTIPESFGSFPAEVPHLIFSHNQLSGSIPKSLGNLDFNRIDFSRNKLTGDASMLFGANKTTFSIDLSRNMFQFDLSRVVLHESLGVLDLNHNGITGSIPVQWTEYSLQILNVSYNRLCGPIPTGGSLQRFDSYTYFHNKCLCGAPLDSSCK

SEQ ID NO: 1155 - protein, 232 aa, Zea mays subsp. mays
  peptide (1)..(232): Ceres Seq. ID no. 15178800
MFHRITNITGQIPSTITKLKYLRSLMLSWLNLTGPVPDFLSQLMNLEYLSLAFNQLSGSIPSSLALLPKLSYIDVSRNKLTGTIPESFGSFPAEVPHLIFSHNQLSGSIPKSLGNLDFNRIDFSRNKLTGDASMLFGANKTTFSIDLSRNMFQFDLSRVVLHESLGVLDLNHNGITGSIPVQWTEYSLQILNVSYNRLCGPIPTGGSLQRFDSYTYFHNKCLCGAPLDSSCK

SEQ ID NO: 1156 - DNA, 881 bp, Zea mays subsp. mays
  misc_feature (1)..(881): Ceres Seq. ID no. 15178112
acaccttgtttgactcaacaacgactcgtctaaccctttagcagcagccatgacaactcctccttgccggaccataaacgctaataatgctatcgccgcgccatcgccttcgggaatgatcttccacggtaagaggctcgtgaaatcaagctcacctggcttgaatctcccgacgaagagattggcttggagcttaagttctccggggaggtttctctcttctccagtggcctctagttctacatcggcggctgtgacatcgaattctacgaatcgactggaagctttagaagaagggattgagaaggtcatttatcaatgtagattcatggcgtttcttggaactttaggatctcttttgggatcggttctgtgtttcatcaagggatgtcagtacgtcggagactcgtttgtgcagtactctgtgaaccgtgggaaggtgatattacttctggtagaagccatagatacataccttctaggaactgtgatgttagtcttcgggatgggcctttacgagctcttcattagcaacctcacaacttcggaaaccatttcacacgacagtgtttccaatagatcgagtctctttggcatgttccccttaaaggagcgacctcaatggttagaggtgaaaacagttagtgagctgaaaacgaagctgggacatgttatagtgatgctactgttgattggtttgttcgacaagagcaggaaagttgccatcacttctgtcgcggatttgctatgtatctctgcttctatctttctttcttcggcttgtctcttcttgctctctaggctcaatggctcacactgagttaatcctgttgccttttttaaacacatgacactttgtattatgtgtataatgttttagt

SEQ ID NO: 1157 - protein, 256 aa, Zea mays subsp. mays
  peptide (1)..(256): Ceres Seq. ID no. 15178113
MTTPPCRTINANNAIAAPSPSGMIFHGKRLVKSSSPGLNLPTKRLAWSLSSPGRFLSSPVASSSTSAAVTSNSTNRLEALEEGIEKVIYQCRFMAFLGTLGSLLGSVLCFIKGCQYVGDSFVQYSVNRGKVILLLVEAIDTYLLGTVMLVFGMGLYELFISNLTTSETISHDSVSNRSSLFGMFPLKERPQWLEVKTVSELKTKLGHVIVMLLLIGLFDKSRKVAITSVADLLCISASIFLSSACLFLLSRLNGSH

SEQ ID NO: 1158 - protein, 234 aa, Zea mays subsp. mays
  peptide (1)..(234): Ceres Seq. ID no. 15178114
MIFHGKRLVKSSSPGLNLPTKRLAWSLSSPGRFLSSPVASSSTSAAVTSNSTNRLEALEEGIEKVIYQCRFMAFLGTLGSLLGSVLCFIKGCQYVGDSFVQYSVNRGKVILLLVEAIDTYLLGTVMLVFGMGLYELFISNLTTSETISHDSVSNRSSLFGMFPLKERPQWLEVKTVSELKTKLGHVIVMLLLIGLFDKSRKVAITSVADLLCISASIFLSSACLFLLSRLNGSH

SEQ ID NO: 1159 - protein, 163 aa, Zea mays subsp. mays
  peptide (1)..(163): Ceres Seq. ID no. 15178115
MAFLGTLGSLLGSVLCFIKGCQYVGDSFVQYSVNRGKVILLLVEAIDTYLLGTVMLVFGMGLYELFISNLTTSETISHDSVSNRSSLFGMFPLKERPQWLEVKTVSELKTKLGHVIVMLLLIGLFDKSRKVAITSVADLLCISASIFLSSACLFLLSRLNGSH

SEQ ID NO: 1160 - DNA, 1081 bp, Zea mays subsp. mays
  misc_feature (1)..(1081): Ceres Seq. ID no. 15176822
aaaagcagcaagcttcatcatctccctctctctgtccgatctaatcgatccctcaatcactcaacgaagtctcatctttcgatctaatcgacaccccttttcgataatctcattgagatgagctctgaagcgtcggcggctggagacggcggcgaaacgagcggtgggccagcacccgcatacgacaaacagaaggagaaggcgcgcgtgagcaggacgtctctgatcctgtggcacgcgcaccagaacgacgcagccgcagtccggaagctcctggaggaagatccgtctctggttcacgccagagactacgacaagcgaacgcctctccacgtggcgtcgcttcacgggtggatcgacgtcgtcaaatgtctgatcgagtttggtgctgatgtcaacgctcaggacaggtggaagaacacgcctctggctgatgcagaaggtgctaggaagcagaaaatgatcgagctattgaaatctcatggcggtttatcttatggtcaaaacggaagtcactttgaaccaaagcctgtgccaccaccaattccaaagaagtgtgactgggagattgaacctgctgagcttgatttctctaacgccgccatgattgggaagggttcatttggtgagattgtgaaagcttattggagaggaacaccagtagctgtcaaacgtattcttccttctctctcagatgatagacttgttattcaggacttcaggcatgaggttgatttgctagttaagcttcgccattcgaatatagtgcagttcttaggagccgtaaccgaaagaaagccacttatgttaatcacagagtacttacgcgggggagatcttcaccaatacctcaaggagaagggaggtcttactccagcaactgctgtcaactttgccttggatatcgctaggtactttcaatctttttaacagtttgagatattatgtgaaaacttatacatggcctgactgagtgaatctattctattaaaacagcagtgtgacccattgataaaagtagagtccaattattatttttccaaaaaactgattattttataactgcttatattaaataact

SEQ ID NO: 1161 - protein, 270 aa, Zea mays subsp. mays
  peptide (1)..(270): Ceres Seq. ID no. 15176823
MSSEASAAGDGGETSGGPAPAYDKQKEKARVSRTSLILWHAHQNDAAAVRKLLEEDPSLVHARDYDKRTPLHVASLHGWIDVVKCLIEFGADVNAQDRWKNTPLADAEGARKQKMIELLKSHGGLSYGQNGSHFEPKPVPPPIPKKCDWEIEPAELDFSNAAMIGKGSFGEIVKAYWRGTPVAVKRILPSLSDDRLVIQDFRHEVDLLVKLRHSNIVQFLGAVTERKPLMLITEYLRGGDLHQYLKEKGGLTPATAVNFALDIARYFQSF

SEQ ID NO: 1162 - protein, 156 aa, Zea mays subsp. mays
  peptide (1)..(156): Ceres Seq. ID no. 15176824
MIELLKSHGGLSYGQNGSHFEPKPVPPPIPKKCDWEIEPAELDFSNAAMIGKGSFGEIVKAYWRGTPVAVKRILPSLSDDRLVIQDFRHEVDLLVKLRHSNIVQFLGAVTERKPLMLITEYLRGGDLHQYLKEKGGLTPATAVNFALDIARYFQSF

SEQ ID NO: 1163 - DNA, 1217 bp, Zea mays subsp. mays
  misc_feature (1)..(1217): Ceres Seq. ID no. 15178142
ccctccccgctcaccaccagtcaccaacgcccaccgggcctcgtccctcgtggcggcaactgggcggccgtcgctgccgccctacgccaggtgccgaggcgaccttcaggcccttggctggcgacgagcaccagtgcaccaccaatactctgagcctggctgccgaaagtgccttttggggttcttgtaatcttgttacattaggattcatttttgatgacttcatcaagaagcaagagcaagagcagaagtaggagccgcagtcgcagcaggagcaggagccgcagtcctcggcgaagagataggttgcgcagtgaacgtgcaccccaccgcagtcgtagccggagccgcagcccataccgtcgcagagaacgacgtggtcacagggattttgcatgcaagaactgccggagacctgggcacttcgctaaggagtgtccatctgcacctatgtgcaataactgtaaccttccaggccactttgcagcagaatgcaccttacaaactgtttgctggaactgcaaagagtctgggcacattgccagtgagtgcaagaacgaggccctatgccacgcctgcaacaagacaggtcacttggcacgtgactgccctacttcaggtgctaacgtcaagctatgcaacaaatgctttaaatcaggccacatcgccgttgactgcaccaacgaacgggcctgcaacaactgccgtcagccagggcacatagctcgggagtgcaagaacgacccggtctgcaacctgtgcaatgtctccggccacgtcgcgcgcgtctgcccaaagacgactctggcttcagtgatacagggcggcccgttccgagatatcctgtgccgcatctgcggtcagccggggcacatcagccgcaactgcatggcgaccatcatctgcgacacatgcggtgggagggggcacatgtcttatgagtgcccatcggcaagaatattcgggctccgcaggctctgaagatcttttcgccaagggctccgctttgttctgatggctgagtttcgccaggatgtttcatttgtttctgacagtattggaacagttttccttctgccgttgtagttgaggaatgattctgtaggatgtgttgcgggtgaaaactccttttttcccccttttaatcaggatagccctttgtgggctcaaacattgctgtaacggctcgtgtgaaaattgccaggtcatgatttaac

SEQ ID NO: 1164 - protein, 254 aa, Zea mays subsp. mays
  peptide (1)..(254): Ceres Seq. ID no. 15178143
MTSSRSKSKSRSRSRSRSRSRSRSPRRRDRLRSERAPHRSRSRSRSPYRRRERRGHRDFACKNCRRPGHFAKECPSAPMCNNCNLPGHFAAECTLQTVCWNCKESGHIASECKNEALCHACNKTGHLARDCPTSGANVKLCNKCFKSGHIAVDCTNERACNNCRQPGHIARECKNDPVCNLCNVSGHVARVCPKTTLASVIQGGPFRDILCRICGQPGHISRNCMATIICDTCGGRGHMSYECPSARIFGLRRL

SEQ ID NO: 1165 - protein, 176 aa, Zea mays subsp. mays
  peptide (1)..(176): Ceres Seq. ID no. 15178144
MCNNCNLPGHFAAECTLQTVCWNCKESGHIASECKNEALCHACNKTGHLARDCPTSGANVKLCNKCFKSGHIAVDCTNERACNNCRQPGHIARECKNDPVCNLCNVSGHVARVCPKTTLASVIQGGPFRDILCRICGQPGHISRNCMATIICDTCGGRGHMSYECPSARIFGLRRL

SEQ ID NO: 1166 - DNA, 1575 bp, Zea mays subsp. mays
  misc_feature (1)..(1575): Ceres Seq. ID no. 15180586
ctcacaggctcacacgatactttccccctccactagggttccccgtccgttccccctcggccgcatcagctgtttgaggcggcaaccaagggccgcggaagcatctgcgtcgagccatggataaggggatcttcaccaacgatggctccttcatggagaggttcaagcagatgcagcaggaggcgcaggagaagaaggccgctgctgcctccgcctcatcggctcccaagcatgcgaaccccaagcaggggtttgctgttgcggcaaacaagaggccattcgagctgaagaacgctgctccggtagcctcagctggtaagctggcctttagtctcaagaaggccaaggtcgccgttgcacctgtgtttgcagccgacgaggaggatgaggatgccgtggatgttgagagggaggagcccgccaaacgccagaagtctgtgcaagctgatgctcctgcggcagctgccccgtccggggctgttgccccacccccaccaaatgatatgacagtgagacaagtcgctgacaaactggcaagctttgttgccaaaaacgggagacagtttgagaatatcacacggcagaggaatcctggagatacaccattcaagtttctatttgacaaacactgtccagactacaaatattatgagtttcagcttgctgaagaggaaagggctcttgctcagtcaaaggaggctgaagcatcgaaagctaactctggcactgcaagcttcaaggcaccaggtggtacttatagaagctcatttgaacagaagtctaactatcagacacctgcatcagctttgtacggggcatatgagggtagttcttcccaaggaagctcttctagttacggtgatcatacagctccaccatcagatcctgtagcattgatggaattctatgcaaagaaggctgcactggaagaacggaagaggccaccaaggcagtcgaaagatgaaatgccgccacctccttctcttcaaggtcctcctaagaagggacaccacatgggtgatttcattcctcaagaagaacttgaaaagtttatggcacggtgtaatgatgctgcagcacaaaaggctaccaaagaagccgctgagaaggctaagattcaggcggacaatattgggcacaaacttttatctaagatgggttggagggaaggcgagggtcttgggagcgagagaagaggccgtgcagatcccgttatggctggagatgtgaagaaggatcatcttggtgttggggctgtccagcctggtgaggtcacatctgaagatgacatctatgagcaatacaagaaacggatgatgcttggataccgctataggccaaaccctctgaacaatccaaggaaatcatactactgatgcgggggagttcgtctgaggggagataaatgtcaagaagttcgttattcagcatatttcttggaatgccacagatgcaaggcttccgggggttctacaaagctttgttctttgtgtagtgtgtttatctttgtggatttaaatgtctgttcaaacgtgtatcatgtttcagacaatgatgtattgctttcttggatct

SEQ ID NO: 1167 - protein, 419 aa, Zea mays subsp. mays
  peptide (1)..(419): Ceres Seq. ID no. 15180587
MDKGIFTNDGSFMERFKQMQQEAQEKKAAAASASSAPKHANPKQGFAVAANKRPFELKNAAPVASAGKLAFSLKKAKVAVAPVFAADEEDEDAVDVEREEPAKRQKSVQADAPAAAAPSGAVAPPPPNDMTVRQVADKLASFVAKNGRQFENITRQRNPGDTPFKFLFDKHCPDYKYYEFQLAEEERALAQSKEAEASKANSGTASFKAPGGTYRSSFEQKSNYQTPASALYGAYEGSSSQGSSSSYGDHTAPPSDPVALMEFYAKKAALEERKRPPRQSKDEMPPPPSLQGPPKKGHHMGDFIPQEELEKFMARCNDAAAQKATKEAAEKAKIQADNIGHKLLSKMGWREGEGLGSERRGRADPVMAGDVKKDHLGVGAVQPGEVTSEDDIYEQYKKRMMLGYRYRPNPLNNPRKSYY

SEQ ID NO: 1168 - protein, 407 aa, Zea mays subsp. mays
  peptide (1)..(407): Ceres Seq. ID no. 15180588
MERFKQMQQEAQEKKAAAASASSAPKHANPKQGFAVAANKRPFELKNAAPVASAGKLAFSLKKAKVAVAPVFAADEEDEDAVDVEREEPAKRQKSVQADAPAAAAPSGAVAPPPPNDMTVRQVADKLASFVAKNGRQFENITRQRNPGDTPFKFLFDKHCPDYKYYEFQLAEEERALAQSKEAEASKANSGTASFKAPGGTYRSSFEQKSNYQTPASALYGAYEGSSSQGSSSSYGDHTAPPSDPVALMEFYAKKAALEERKRPPRQSKDEMPPPPSLQGPPKKGHHMGDFIPQEELEKFMARCNDAAAQKATKEAAEKAKIQADNIGHKLLSKMGWREGEGLGSERRGRADPVMAGDVKKDHLGVGAVQPGEVTSEDDIYEQYKKRMMLGYRYRPNPLNNPRKSYY

SEQ ID NO: 1169 - protein, 401 aa, Zea mays subsp. mays
  peptide (1)..(401): Ceres Seq. ID no. 15180589
MQQEAQEKKAAAASASSAPKHANPKQGFAVAANKRPFELKNAAPVASAGKLAFSLKKAKVAVAPVFAADEEDEDAVDVEREEPAKRQKSVQADAPAAAAPSGAVAPPPPNDMTVRQVADKLASFVAKNGRQFENITRQRNPGDTPFKFLFDKHCPDYKYYEFQLAEEERALAQSKEAEASKANSGTASFKAPGGTYRSSFEQKSNYQTPASALYGAYEGSSSQGSSSSYGDHTAPPSDPVALMEFYAKKAALEERKRPPRQSKDEMPPPPSLQGPPKKGHHMGDFIPQEELEKFMARCNDAAAQKATKEAAEKAKIQADNIGHKLLSKMGWREGEGLGSERRGRADPVMAGDVKKDHLGVGAVQPGEVTSEDDIYEQYKKRMMLGYRYRPNPLNNPRKSYY

SEQ ID NO: 1170 - DNA, 980 bp, Zea mays subsp. mays
  misc_feature (1)..(980): Ceres Seq. ID no. 15177927
atatccacacctgagtcccctccgccgcctgccgcactctcccgcgacgccaccaccacacgttcacggtagcgagagcttatcgtcgtcggcggcgaagatggtgtcgctgaagctgcagaagcggctcgccgcgagcgtcctcaagtgtgggaaaggcaaagtctggcttgaccccaatgaagtcagcgagatctccatggctaactcccgccagaacatccggaagttggttaagaatgggtttatcatcaggaagcctcagaaggttcactctaggtcccgtgcaagaagggcacatgaggccaagcagaagggaaggcactctggatatggcaagcgcaggggtaccagggaggctaggctccccaccaagattctgtggatgaggaggatgcgtgttctgaggcgcctgctctgcaagtaccgtgaggccaagaagatcgacaagcacatgtatcatgacatgtacatgaaggtcaagggtaatatgtttaagaacaagagggtgcttatggagagtatccacaagtccaaggctgagaaggccagagagaagacactttctgatcagtttgaggccaagcgtgcaaagagcaaggcaagccgtgagaggaagattgctaggagggaggagaggctggcccagggcccaagagaaccaacagcacctgtcgcagccccagctccatctactggggtgccaaagaaagcaaagaagtgaagtatggaaacaaagctgtagctttttggtactatataagcatgactttggagcacctgaagtattttgctgttatatagtttcgtgtctcaaatattctgagtcttgtatgtattctgcctgcgtttcagattcagattttttttttattttggacccaatcaaccctgcactgccttgtcgaggaccgtggtccgtggatggcaatggttcttacttcttactggttatattatatatgctgcaagattgctng

SEQ ID NO: 1171 - protein, 240 aa, Zea mays subsp. mays
  peptide (1)..(240): Ceres Seq. ID no. 15177928
YPHLSPLRRLPHSPATPPPHVHGSESLSSSAAKMVSLKLQKRLAASVLKCGKGKVWLDPNEVSEISMANSRQNIRKLVKNGFIIRKPQKVHSRSRARRAHEAKQKGRHSGYGKRRGTREARLPTKILWMRRMRVLRRLLCKYREAKKIDKHMYHDMYMKVKGNMFKNKRVLMESIHKSKAEKAREKTLSDQFEAKRAKSKASRERKIARREERLAQGPREPTAPVAAPAPSTGVPKKAKK

SEQ ID NO: 1172 - protein, 207 aa, Zea mays subsp. mays
  peptide (1)..(207): Ceres Seq. ID no. 15177929
MVSLKLQKRLAASVLKCGKGKVWLDPNEVSEISMANSRQNIRKLVKNGFIIRKPQKVHSRSRARRAHEAKQKGRHSGYGKRRGTREARLPTKILWMRRMRVLRRLLCKYREAKKIDKHMYHDMYMKVKGNMFKNKRVLMESIHKSKAEKAREKTLSDQFEAKRAKSKASRERKIARREERLAQGPREPTAPVAAPAPSTGVPKKAKK

SEQ ID NO: 1173 - protein, 174 aa, Zea mays subsp. mays
  peptide (1)..(174): Ceres Seq. ID no. 15177930
MANSRQNIRKLVKNGFIIRKPQKVHSRSRARRAHEAKQKGRHSGYGKRRGTREARLPTKILWMRRMRVLRRLLCKYREAKKIDKHMYHDMYMKVKGNMFKNKRVLMESIHKSKAEKAREKTLSDQFEAKRAKSKASRERKIARREERLAQGPREPTAPVAAPAPSTGVPKKAKK

SEQ ID NO: 1174 - DNA, 1966 bp, Zea mays subsp. mays
  misc_feature (1)..(1966): Ceres Seq. ID no. 15179554
  misc_feature (1)..(1966): Ortholog of  Ceres SEQ ID NO 15177814 as cited in SEQ ID NO 55489
aggatcccgttctcagtcgccagccactggtcacagccaccgtctccctccttccccaacctcgccgctatcaggtggtggatgcagcagcgcggccgctccttcaacagccgctctcggagcttctcccgcgcccgcgtcgccatcgagggatcttaatctcacagccatccctcgatcatttcgtttgaactcggttctgaaattctgactgacgaacgcacgcaacgacctaccgtgatggacgccgccgccgccgccaccgttgtttctcttaacgggaagatgggggccgaggagaggaaggcgcagaagagctactgggaggagcattccaagaacctcaccgtcgaggccatgatgctggactcccgcgccgctgatctcgacaaggaggagcgccctgaggtcctgtctttgcttccttcatatgaaggaaaatctgtactagagcttggtgctggaataggccgtttcactggagaactcgctaaaacagctgggaatgttcttgctctggattttattgaaagtgcaattaaaaagaatgaaagcattaatggtcactacaagaatgcatcctttatgtgtgctgatgtgacatcccaggacctagtgcttcaagctaactccatcgatctgatattttcaaattggttattgatgtatctttcagatgaagaggttgaacagctagttcagagaatggtgaaatggttgaaggttggtggctatatcttctttagggaatcttgcttccatcaatctggagattcaaaaaggaaagttaatccgacacactatagggaaccaagtttttatactaaggttttcaaagaatgccatacctttgatcaagatgggaattctttcgaactttctctggttacttgcaagtgtattggtgcttatgttaaaaacaagaaaaaccaaaaccagatatgttggctatggcaaaaggtccattcaacggaagataaaggatttcaaagatttttggacaatgtgcagtacaaagccagcggaatattacgttacgagcgcatttttggagaaggttatgtgagcactggtggagttgagactacaaaagaatttgtggacaagctggatctcaaacctggacataaggtgcttgatgttggatgtggaattgggggaggtgacttttatatggccgaaaaatatgatgctcatgttgttggtattgatctttccataaacatggtatcatttgcacttgagcgtgccattgggcgcagttgctcagtggagtttgaagttgctgattgcactacgaagacatacccagacaacacatttgatgtcatatacagccgtgatactatccttcacatacatgacaaaccctctttgttcaaaagtttcttcaactggctgaagcctgggggcaaggtccttatcagtgactactgcaggagtcctgggaaaccatcagaggaatttgcagcatacattaagcagagaggttatgacctacatgctgtggaggcttatggacagatgttgaagagtgctggttttcgtgatgtcattgctgaggatcgaactgatcagttccttggtgttttagataaggagttagctgaatttgaaaagaacaaggatgatttcctgtctgacttcacccaggaggactacgatgatatcgtgaacggttggaaggcaaaactgcagaggagttctgctggtgaacagaggtgggggctgttcatcgccaccaaatgatgatgaagatgtgggctggacatgaaaataaagcatccttttattataattgatgccgcattacttattctgaacccaggttgcctgggtcagtacctactaccctgtttatcgtagtacgtggagagaactcgtccagttttacattcccgtcactgctttgccggagtgctgtggcaatccataaagtctaataaagtaacaataagctgtctgc

SEQ ID NO: 1175 - protein, 502 aa, Zea mays subsp. mays
  peptide (1)..(502): Ceres Seq. ID no. 15179555
MDAAAAATVVSLNGKMGAEERKAQKSYWEEHSKNLTVEAMMLDSRAADLDKEERPEVLSLLPSYEGKSVLELGAGIGRFTGELAKTAGNVLALDFIESAIKKNESINGHYKNASFMCADVTSQDLVLQANSIDLIFSNWLLMYLSDEEVEQLVQRMVKWLKVGGYIFFRESCFHQSGDSKRKVNPTHYREPSFYTKVFKECHTFDQDGNSFELSLVTCKCIGAYVKNKKNQNQICWLWQKVHSTEDKGFQRFLDNVQYKASGILRYERIFGEGYVSTGGVETTKEFVDKLDLKPGHKVLDVGCGIGGGDFYMAEKYDAHVVGIDLSINMVSFALERAIGRSCSVEFEVADCTTKTYPDNTFDVIYSRDTILHIHDKPSLFKSFFNWLKPGGKVLISDYCRSPGKPSEEFAAYIKQRGYDLHAVEAYGQMLKSAGFRDVIAEDRTDQFLGVLDKELAEFEKNKDDFLSDFTQEDYDDIVNGWKAKLQRSSAGEQRWGLFIATK

SEQ ID NO: 1176 - protein, 487 aa, Zea mays subsp. mays
  peptide (1)..(487): Ceres Seq. ID no. 15179556
MGAEERKAQKSYWEEHSKNLTVEAMMLDSRAADLDKEERPEVLSLLPSYEGKSVLELGAGIGRFTGELAKTAGNVLALDFIESAIKKNESINGHYKNASFMCADVTSQDLVLQANSIDLIFSNWLLMYLSDEEVEQLVQRMVKWLKVGGYIFFRESCFHQSGDSKRKVNPTHYREPSFYTKVFKECHTFDQDGNSFELSLVTCKCIGAYVKNKKNQNQICWLWQKVHSTEDKGFQRFLDNVQYKASGILRYERIFGEGYVSTGGVETTKEFVDKLDLKPGHKVLDVGCGIGGGDFYMAEKYDAHVVGIDLSINMVSFALERAIGRSCSVEFEVADCTTKTYPDNTFDVIYSRDTILHIHDKPSLFKSFFNWLKPGGKVLISDYCRSPGKPSEEFAAYIKQRGYDLHAVEAYGQMLKSAGFRDVIAEDRTDQFLGVLDKELAEFEKNKDDFLSDFTQEDYDDIVNGWKAKLQRSSAGEQRWGLFIATK

SEQ ID NO: 1177 - protein, 463 aa, Zea mays subsp. mays
  peptide (1)..(463): Ceres Seq. ID no. 15179557
MMLDSRAADLDKEERPEVLSLLPSYEGKSVLELGAGIGRFTGELAKTAGNVLALDFIESAIKKNESINGHYKNASFMCADVTSQDLVLQANSIDLIFSNWLLMYLSDEEVEQLVQRMVKWLKVGGYIFFRESCFHQSGDSKRKVNPTHYREPSFYTKVFKECHTFDQDGNSFELSLVTCKCIGAYVKNKKNQNQICWLWQKVHSTEDKGFQRFLDNVQYKASGILRYERIFGEGYVSTGGVETTKEFVDKLDLKPGHKVLDVGCGIGGGDFYMAEKYDAHVVGIDLSINMVSFALERAIGRSCSVEFEVADCTTKTYPDNTFDVIYSRDTILHIHDKPSLFKSFFNWLKPGGKVLISDYCRSPGKPSEEFAAYIKQRGYDLHAVEAYGQMLKSAGFRDVIAEDRTDQFLGVLDKELAEFEKNKDDFLSDFTQEDYDDIVNGWKAKLQRSSAGEQRWGLFIATK

SEQ ID NO: 1178 - DNA, 1436 bp, Zea mays subsp. mays
  misc_feature (1)..(1436): Ceres Seq. ID no. 15180578
agtactagcagtagcactgcgccgcagcaatggtggtttccctcgccgaataaatctcaccggtcgcgcttcttggcgtgttcctccgctcgcctgggcttcgatctccagccctcgcgtgagcgcgggtgcggccgcggcgccgtggtcatggcgacggaggagtgggagctgcgggaggaggacgcctacgcctacgagttcgagttcgacctcgagaaccccttcaccagccccgccgacgagccgatcgccagtctcctcgacgccgagggccaccacgcgccctctatctccgccgcggcctcggccacccgccgcgccgccgccgccttcatctccaaggtgcgtttcggcggcgagctcgccgtgcacccgcgcgtcgcctacctcgcgctcaactacgtggatcgcttcctctccaagaggcaattggcgtgcgagcagcagccgtgggcgccgcgcctgctcgccatcagctgcctctccctcgccgccaagatgcagcgcgtcgcaacattctccaccgccgacattcagagggacgaagacttcatgttcgacgcggtgaccatccgtcgcatggagcgggtggtgcttggcgcgcttgagtggcgcgcgcgctccgtcacgccgctcgccttcctcggcttcttcctctccgcatgctatccgccgccgcagcaccccccacaggtagccgctgtcaaggcgcgcgccgtcgacctccttctccacgctcagcctgaggtgaagatggcggagttctcaccctccgtggtggcggcggcagcgctgctggccgccgccggagaggtcgccgccgcgaacctccacgcgttccaagccagcttggccgcctgtccctttgtaaatagcgagaagctgcgggagtgcggtgaggtgctggcagcggcgggcggcgtcgggcgggggcgagccgctccgagcgcggacacgcctgtgacggtgctcggtcaccagcgcagcgccagctccgcctcggagaccgactggattaacggcggcgacgcgaagaaacgctgcatgggcccaccatcgcaatgggggtaggcggcaggccgcaggccgagtcaagcgggtattgtcgcagctggatcgaagagtcggagattttactgcagccctgctcctttttttccaaattgtttttaccctttttcttttcccaattctttccttctactttaatgctctcgaggtaaagtgacgaggagtggtggtggtggctgtcatttactagtattcctttttcctagcatgtctttattttagcctagttatggtaatttttgcggcggtgctttggaaggtgaggacggtggatgaacatactgggatggaagagggggatgatgtgaaatggtaaaaaaaataaaaccaaaaggctggcatgttgctttgtcacctcaaat

SEQ ID NO: 1179 - protein, 357 aa, Zea mays subsp. mays
  peptide (1)..(357): Ceres Seq. ID no. 15180579
STSSSTAPQQWWFPSPNKSHRSRFLACSSARLGFDLQPSRERGCGRGAVVMATEEWELREEDAYAYEFEFDLENPFTSPADEPIASLLDAEGHHAPSISAAASATRRAAAAFISKVRFGGELAVHPRVAYLALNYVDRFLSKRQLACEQQPWAPRLLAISCLSLAAKMQRVATFSTADIQRDEDFMFDAVTIRRMERVVLGALEWRARSVTPLAFLGFFLSACYPPPQHPPQVAAVKARAVDLLLHAQPEVKMAEFSPSVVAAAALLAAAGEVAAANLHAFQASLAACPFVNSEKLRECGEVLAAAGGVGRGRAAPSADTPVTVLGHQRSASSASETDWINGGDAKKRCMGPPSQWG

SEQ ID NO: 1180 - protein, 307 aa, Zea mays subsp. mays
  peptide (1)..(307): Ceres Seq. ID no. 15180580
MATEEWELREEDAYAYEFEFDLENPFTSPADEPIASLLDAEGHHAPSISAAASATRRAAAAFISKVRFGGELAVHPRVAYLALNYVDRFLSKRQLACEQQPWAPRLLAISCLSLAAKMQRVATFSTADIQRDEDFMFDAVTIRRMERVVLGALEWRARSVTPLAFLGFFLSACYPPPQHPPQVAAVKARAVDLLLHAQPEVKMAEFSPSVVAAAALLAAAGEVAAANLHAFQASLAACPFVNSEKLRECGEVLAAAGGVGRGRAAPSADTPVTVLGHQRSASSASETDWINGGDAKKRCMGPPSQWG

SEQ ID NO: 1181 - protein, 190 aa, Zea mays subsp. mays
  peptide (1)..(190): Ceres Seq. ID no. 15180581
MQRVATFSTADIQRDEDFMFDAVTIRRMERVVLGALEWRARSVTPLAFLGFFLSACYPPPQHPPQVAAVKARAVDLLLHAQPEVKMAEFSPSVVAAAALLAAAGEVAAANLHAFQASLAACPFVNSEKLRECGEVLAAAGGVGRGRAAPSADTPVTVLGHQRSASSASETDWINGGDAKKRCMGPPSQWG

SEQ ID NO: 1182 - DNA, 2625 bp, Zea mays subsp. mays
  misc_feature (1)..(2625): Ceres Seq. ID no. 13586013
gcagcgaagcaggcctccttcttcacaagcgcttctgctaacaggcatcgtcgcatctctgtataggtatttctgaaaccagccgtcgtacgtccatcccaccgggagcaccggcgacgatgccgccgcgaacggtgtccgatgggggagacgacaacggcaccgacgttgctagccgaacgtcgtcgcaccgccgcacggagcacgggcatgggtacaaagtcggcgtcccaccggagaagaacctcctcgccgagatctctgacgcggtgaaggagacgttcttcgccgacgacccgctgcggcagtacaaggaccagcccaggtccaagaagatctggctcggcctgcagcacatcttcccggtgctcgactggagcaggcattactccctcggcaagttcaagggtgacttcatcgctgggctcaccattgccagcctctgcataccccaggacatcgggtattctaagcttgctaacttgccagcagaggtgggactatacagtagcttcgtgccgcctctgatatacgcagtgatgggcagctccagggacatagccatcggcccagtggccgtggtgtcgctgctgctcggtactctccttcagaatgagatcgaccccaagacacacccgctcgagtacaggcgcctagccttcacagcaacctttttcgcaggggtcactcaggcagccctcggattcttcaggctagggtttatcatagagttcttgtctcatgctgccattgtcggattcatggccggcgctgccatcaccattgcgcttcagcagctgaaaggattccttggaattgcaaacttcaccaagaaatccgatattgtatctgttatgaaatcagtttggggaaatgttcaccatgggtggaattggcagacaatactgataggagcgaccttcctggcattccttctggttgccaagtacattgggaaaaggaataaaaagctcttctgggtgtccgcaatcgcacctctcacttcggtgatcatatccacattttttgtgtacatcactcgtgcagataagcatggcgttgcaattgtcaagaacataaggaaaggcatcaacccaccttcagctagtctaatatacttcaccggcccatacttggcgacaggattcaaaattgggatagtagctggaatgataggcctaacggaagcgattgcaattggaagaacatttgcagccctcaaggattaccggatagatgggaacaaagaaatgatggctctagggaccatgaacattgttggttcactgacttcttgctacgtagccacaggttctttctcgcggtcagcagttaattacatggctggctgcaaaacagcagtgtcaaacgttgttatgtcaattgtcgtaatgcttactttgctactgatcaccccattgttcaagtacactccaaatgccatcctttcctcgatcatcatatcagcagtgcttggtttaattgactatgaatcggcttaccttatctggaaagttgacaaactggactttctagcatgcatgggagcattttttggagtcatattttcatcggtggagtatggcttgctcattgcggttgcaatatctcttgctaaaattcttctccaagtaacacggccaagaacagttttacttggaaaccttccacaaacaactatatacaggaatgtagaacagtatcctgatgctaccaaggttccaggggtgctgattgttagagtggactcagctatatacttcacaaactctaactatgttaaagagagaatcctgaggtggctaagagatgaggaggagcaacaacaggaccagaagttaacaaaaactgagtttctaattgttgacctgtctcctgtaattgatatcgacacaagtggaatccatgctttggaggagttggcgaaagctcttgaaaaacgcaaaattcagctggttcttaccaatcccgggccggcggtgatccagaagctccgctcagcgaaattcacggacatgattggtgaagacaacatattcctcacggtcggcgacgctgtgaagaaatttgctcctaagatggtcgataatgtctgatggagtttctgggtcatgacagtacgagcgagaagtctatctattttgtggcaaagttcagtggcaattatggatttatagagcagaaacaaaacagaacagaacgggagtaaataacatggttcgcggaatggtaaataaagaagatgctccggagttggagtgcatcacgtttgcgaggtgtggttggatagaaaacagatggtggcctagttgggcgtctatgtcagtccttgtggttgtggagtctgttccgcgttggcaagcactcagtgatggagatcaaatgcttcatggatcagcagatatgggtgcctgatgattaacatatcatcattgatcgtgaaagaagagttacctcgttggggtttcaggctttgtgtatatcttacagtacttagcccctttccttgtagtttatgtttttatgacgagcttttacatttggcttatatatgtatattctgtaatgttgatgcattgttaactgttaagtgttcctgaccaaaaaaaagggatgcaaaaacgt

SEQ ID NO: 1183 - protein, 658 aa, Zea mays subsp. mays
  peptide (1)..(658): Ceres Seq. ID no. 13586014
MPPRTVSDGGDDNGTDVASRTSSHRRTEHGHGYKVGVPPEKNLLAEISDAVKETFFADDPLRQYKDQPRSKKIWLGLQHIFPVLDWSRHYSLGKFKGDFIAGLTIASLCIPQDIGYSKLANLPAEVGLYSSFVPPLIYAVMGSSRDIAIGPVAVVSLLLGTLLQNEIDPKTHPLEYRRLAFTATFFAGVTQAALGFFRLGFIIEFLSHAAIVGFMAGAAITIALQQLKGFLGIANFTKKSDIVSVMKSVWGNVHHGWNWQTILIGATFLAFLLVAKYIGKRNKKLFWVSAIAPLTSVIISTFFVYITRADKHGVAIVKNIRKGINPPSASLIYFTGPYLATGFKIGIVAGMIGLTEAIAIGRTFAALKDYRIDGNKEMMALGTMNIVGSLTSCYVATGSFSRSAVNYMAGCKTAVSNVVMSIVVMLTLLLITPLFKYTPNAILSSIIISAVLGLIDYESAYLIWKVDKLDFLACMGAFFGVIFSSVEYGLLIAVAISLAKILLQVTRPRTVLLGNLPQTTIYRNVEQYPDATKVPGVLIVRVDSAIYFTNSNYVKERILRWLRDEEEQQQDQKLTKTEFLIVDLSPVIDIDTSGIHALEELAKALEKRKIQLVLTNPGPAVIQKLRSAKFTDMIGEDNIFLTVGDAVKKFAPKMVDNV

SEQ ID NO: 1184 - protein, 518 aa, Zea mays subsp. mays
  peptide (1)..(518): Ceres Seq. ID no. 13586015
MGSSRDIAIGPVAVVSLLLGTLLQNEIDPKTHPLEYRRLAFTATFFAGVTQAALGFFRLGFIIEFLSHAAIVGFMAGAAITIALQQLKGFLGIANFTKKSDIVSVMKSVWGNVHHGWNWQTILIGATFLAFLLVAKYIGKRNKKLFWVSAIAPLTSVIISTFFVYITRADKHGVAIVKNIRKGINPPSASLIYFTGPYLATGFKIGIVAGMIGLTEAIAIGRTFAALKDYRIDGNKEMMALGTMNIVGSLTSCYVATGSFSRSAVNYMAGCKTAVSNVVMSIVVMLTLLLITPLFKYTPNAILSSIIISAVLGLIDYESAYLIWKVDKLDFLACMGAFFGVIFSSVEYGLLIAVAISLAKILLQVTRPRTVLLGNLPQTTIYRNVEQYPDATKVPGVLIVRVDSAIYFTNSNYVKERILRWLRDEEEQQQDQKLTKTEFLIVDLSPVIDIDTSGIHALEELAKALEKRKIQLVLTNPGPAVIQKLRSAKFTDMIGEDNIFLTVGDAVKKFAPKMVDNV

SEQ ID NO: 1185 - protein, 444 aa, Zea mays subsp. mays
  peptide (1)..(444): Ceres Seq. ID no. 13586016
MAGAAITIALQQLKGFLGIANFTKKSDIVSVMKSVWGNVHHGWNWQTILIGATFLAFLLVAKYIGKRNKKLFWVSAIAPLTSVIISTFFVYITRADKHGVAIVKNIRKGINPPSASLIYFTGPYLATGFKIGIVAGMIGLTEAIAIGRTFAALKDYRIDGNKEMMALGTMNIVGSLTSCYVATGSFSRSAVNYMAGCKTAVSNVVMSIVVMLTLLLITPLFKYTPNAILSSIIISAVLGLIDYESAYLIWKVDKLDFLACMGAFFGVIFSSVEYGLLIAVAISLAKILLQVTRPRTVLLGNLPQTTIYRNVEQYPDATKVPGVLIVRVDSAIYFTNSNYVKERILRWLRDEEEQQQDQKLTKTEFLIVDLSPVIDIDTSGIHALEELAKALEKRKIQLVLTNPGPAVIQKLRSAKFTDMIGEDNIFLTVGDAVKKFAPKMVDNV

SEQ ID NO: 1186 - DNA, 1014 bp, Zea mays subsp. mays
  misc_feature (1)..(1014): Ceres Seq. ID no. 15180055
gtcggtagccgtcggttcacttctccaggtaaggaaagggttcgtactcatggcgccgccgcagccaaagtcgggccttttcgttggcatcaacaagggtcatgtcgtcaccaagcgcgagctgcctccccgcccgtgccaccgcaaggggaaatcaacgaagagggtgtctatggtcaggggcctgatcagagaggttgctgggtttgctccttatgagaagcgtatcactgagcagcggcgcttgcgcgagcggagccatggcggacgacgactacaacgaaattgacatggggtatgaggatgagcccccagaaccggagattgaggaaggagctgaagaagagcctgagaacaacgaagatgcccctgatgacgtcataggtggtgagggtgaagataaggaacaggaaaagaccaagcgtgaacgcaaaacaacaaaatacatgacgaagtacgaacgtgcgcgcatcctgggtacacgagccttgcagataagcatgaatgctccagtcatggttgagcttgagggagaaactgaccctcttgagattgcaatgaaggagctgagagcgcgcaagatacccttcacgatcagacggtacttacctgatggaagctatgaagactggggagtagacgagctcattgtggaggactcctggaaacgccaggttggtggagactgaagacggatctacttggcatggaaagggtatgtggtgcagtgggtgtttcctgtagttacaagtcttcgttgccactatgagtggatactgtggcgaatgaaccaagacgaaatgatgttatgttaacgtctgtggttgccttgaactctggaaccgtaatgctagcatggttgttggttgcgctatgcttgttttgtttgtttcagtttcagacatgcagttgcagcgtagccaaatgcgtgctttgtgtgcctaatatctgacactggatgtgatcagtgttgtttatgccaaaggttgagagctgggctccggtggttcctgg

SEQ ID NO: 1187 - protein, 157 aa, Zea mays subsp. mays
  peptide (1)..(157): Ceres Seq. ID no. 15180056
MRSVSLSSGACASGAMADDDYNEIDMGYEDEPPEPEIEEGAEEEPENNEDAPDDVIGGEGEDKEQEKTKRERKTTKYMTKYERARILGTRALQISMNAPVMVELEGETDPLEIAMKELRARKIPFTIRRYLPDGSYEDWGVDELIVEDSWKRQVGGD

SEQ ID NO: 1188 - protein, 142 aa, Zea mays subsp. mays
  peptide (1)..(142): Ceres Seq. ID no. 15180057
MADDDYNEIDMGYEDEPPEPEIEEGAEEEPENNEDAPDDVIGGEGEDKEQEKTKRERKTTKYMTKYERARILGTRALQISMNAPVMVELEGETDPLEIAMKELRARKIPFTIRRYLPDGSYEDWGVDELIVEDSWKRQVGGD

SEQ ID NO: 1189 - protein, 132 aa, Zea mays subsp. mays
  peptide (1)..(132): Ceres Seq. ID no. 15180058
MGYEDEPPEPEIEEGAEEEPENNEDAPDDVIGGEGEDKEQEKTKRERKTTKYMTKYERARILGTRALQISMNAPVMVELEGETDPLEIAMKELRARKIPFTIRRYLPDGSYEDWGVDELIVEDSWKRQVGGD

SEQ ID NO: 1190 - DNA, 1346 bp, Zea mays subsp. mays
  misc_feature (1)..(1346): Ceres Seq. ID no. 12633565
  misc_feature (1)..(1346): Ortholog of  Ceres SEQ ID NO 15171390 as cited in SEQ ID NO 51650
  misc_feature (1)..(1346): Ortholog of  Ceres SEQ ID NO 13594845 as cited in SEQ ID NO 51940
aatcccattttcggtgcccgcgcccgtgccgtaccgtccctatcacaccggatcgccactcgctcccccccaccccactccgccccacctccgcgcctcagatccatccccaaccggcaaccctagcgccgggttcctcctcctcggatccgcccgccgccgcgcggactccattgccagaggtgatcgagggggagagatagagcttgggtggtcggattagggagagagggaggggaggatgtccagacggtcgttgaacccgagccggcgggtggcggacgggggtctgccgacagtcggaggcctgttccaccccaagtcacgctcgcctcccgtgcttactattgccctagtcgtcctgggtgtcattcttctcgtcgcctacttcaacagcggctcaggtcggttaaagattctcggtgtaactgttacaagcagagagtctgtgaccaggtctgaaggttcttgcacatcagaagttatgcgggtgcttccatatcttaaaaaggcatatggaaatgccatgcaaaaggttctccatgtaggccctgatagttgtacagtagtttctaatttgttgaaagaaggaaaggttgaagcttggggagtggagccttatgatttggaagatactgacagtacttgcaaaagcctcgtgcgcaagggctttgtccgtatgtctgatattaagttcccccttccgtaccgtccagattcttttaatcttgttgtggtgtcagatgctttagattatctgaccccaaggtatctgaacaaaacacttccagatttagcaagggtttccacagatggccttgttatttttgctggcaacccaggtcagcagaaagctaaggtctcagaactaccaaaatttggaagaccggcaaagttgcggagttcttcatggtggacacggtactttgtccagaccggcttgacagagaacgaagggccgctgaagaaattcgaagaggctacatccaagaacaaatacaaaccaggttgtcagatcttccacctgagttcgccaaggtgatgcgcatccatagcaccttgaattgttgtcacaccccctgccctcctccggttggcttgctcattgttcgtgtggaggaaatcgtcgcaaaaaaagccatcaggaataggttagcttatgtagagaggctccgacacttgttgctagaaattcactctggaaattaaattgtgtccccaatgattgcaaactggagccccgctgggatatatatgttagaactttcacgctgttgtaccgctgtgctatccatgtattgagcagtttgaaatgtaaagctcttgatgatcaaaaaaaaaaaaaa

SEQ ID NO: 1191 - protein, 266 aa, Zea mays subsp. mays
  peptide (1)..(266): Ceres Seq. ID no. 12633566
MSRRSLNPSRRVADGGLPTVGGLFHPKSRSPPVLTIALVVLGVILLVAYFNSGSGRLKILGVTVTSRESVTRSEGSCTSEVMRVLPYLKKAYGNAMQKVLHVGPDSCTVVSNLLKEGKVEAWGVEPYDLEDTDSTCKSLVRKGFVRMSDIKFPLPYRPDSFNLVVVSDALDYLTPRYLNKTLPDLARVSTDGLVIFAGNPGQQKAKVSELPKFGRPAKLRSSSWWTRYFVQTGLTENEGPLKKFEEATSKNKYKPGCQIFHLSSPR

SEQ ID NO: 1192 - protein, 185 aa, Zea mays subsp. mays
  peptide (1)..(185): Ceres Seq. ID no. 12633567
MRVLPYLKKAYGNAMQKVLHVGPDSCTVVSNLLKEGKVEAWGVEPYDLEDTDSTCKSLVRKGFVRMSDIKFPLPYRPDSFNLVVVSDALDYLTPRYLNKTLPDLARVSTDGLVIFAGNPGQQKAKVSELPKFGRPAKLRSSSWWTRYFVQTGLTENEGPLKKFEEATSKNKYKPGCQIFHLSSPR

SEQ ID NO: 1193 - protein, 171 aa, Zea mays subsp. mays
  peptide (1)..(171): Ceres Seq. ID no. 12633568
MQKVLHVGPDSCTVVSNLLKEGKVEAWGVEPYDLEDTDSTCKSLVRKGFVRMSDIKFPLPYRPDSFNLVVVSDALDYLTPRYLNKTLPDLARVSTDGLVIFAGNPGQQKAKVSELPKFGRPAKLRSSSWWTRYFVQTGLTENEGPLKKFEEATSKNKYKPGCQIFHLSSPR

SEQ ID NO: 1194 - DNA, 1626 bp, Zea mays subsp. mays
  misc_feature (1)..(1626): Ceres Seq. ID no. 12350565
gcacgagaccattacctagaacatcctaatcgaaaaacggcctttgcatttgcatgccatgcgcacacaaacacatgacatgacatgacatgacacaccagacttgacgctctcctgtctttatatgccggcgcggcgcgcgggcgtgcgtgcgcgcgcagatggcggaggaggagcagatggcggagctggtgatggcgcagtgcggggtgccgagcggcggcgagggggggcgcgtggccgccgggattcgcgtgggacggcggcgccgcggacgcgtcgcgtgggatgtacggcgatgcggtgccgccgtcgctcagcctgttcgactgccgccggcagcgtcgcggcggacccgttccaggcggtgcagcaggcgccgggcgccggtggtggtggggtggacgacgtcgccgggtggcagtatgctgctgcggctgggagcgagctggaggcggtgcagctgcagcaggagcagcagccgcgcgatgcggactcggggtccgaggtcagcgacatgcagggggacccagaggacgacggcgacggcgacgcgcaggggcgtggcggcggcaagggcggcgggaagcggcagcagtgcaagaacctcgaggcggagcggaagcggcggaagaagctcaacgagcggctctacaagctcaggtcgctcgtcccgaacatctccaagatggaccgcgcggcgatcctcggggacgccatcgactacatcgtgggcctgcagaaccaggtgaaggcgctgcaggacgagctggaggacccggcggacggcgccggcgcccccgacgtcctcctggaccacccgccgccggcgagcctggtggggctggagaacgacgagtcgccgcccacgagccaccagcacccgctcgccgggaccaagagggcccgtgcggcggcggaggaggaggaggaggagaaggggaatgacatggagccgcaggtggaggtgcggcaggtggaggccaacgagttcttcctgcagatgctgtgcgagcgccggccccgggcgcttcgtccagatcatggactccatcgccgacctgggactggaggtcaccaacgtcaacgtcacctcccacgagagcctcgtcctcaacgtcttccgcgccgccaggcgggacaatgaggtggcagtgcaggcggacagactgagggactcgctgctggaggtgatgcgggagccgtacggcgtatggtcgtcgtcggcgccgcccgtggggatgagcggcagcggcatcgccgacgtgaagcatgacagcgtggacatgaagctcgatggcatcatcgacgggcaggcggcaccgagcgtcgcagtgggggtttcagaggatcactacggcggctacaaccatctcctccaatacctcgcttgatcattatttaattgcgttcgttcatgttgaaagttcgatcaaactatcaaaggatggatcaactaataaaaacgggatccatatataagtaactgtgaattgcgatcattaattgtatgcatacaagcatatggtcgtggattaaagtttgttaattgggttttctcactgcttttctggatctttcttgtgttggttcaaacgagggcggaataataaagctatttcctcc

SEQ ID NO: 1195 - protein, 340 aa, Zea mays subsp. mays
  peptide (1)..(340): Ceres Seq. ID no. 12350566
MPARRAGVRARADGGGGADGGAGDGAVRGAERRRGGARGRRDSRGTAAPRTRRVGCTAMRCRRRSACSTAAGSVAADPFQAVQQAPGAGGGGVDDVAGWQYAAAAGSELEAVQLQQEQQPRDADSGSEVSDMQGDPEDDGDGDAQGRGGGKGGGKRQQCKNLEAERKRRKKLNERLYKLRSLVPNISKMDRAAILGDAIDYIVGLQNQVKALQDELEDPADGAGAPDVLLDHPPPASLVGLENDESPPTSHQHPLAGTKRARAAAEEEEEEKGNDMEPQVEVRQVEANEFFLQMLCERRPRALRPDHGLHRRPGTGGHQRQRHLPREPRPQRLPRRQAGQ

SEQ ID NO: 1196 - protein, 282 aa, Zea mays subsp. mays
  peptide (1)..(282): Ceres Seq. ID no. 12350567
MRCRRRSACSTAAGSVAADPFQAVQQAPGAGGGGVDDVAGWQYAAAAGSELEAVQLQQEQQPRDADSGSEVSDMQGDPEDDGDGDAQGRGGGKGGGKRQQCKNLEAERKRRKKLNERLYKLRSLVPNISKMDRAAILGDAIDYIVGLQNQVKALQDELEDPADGAGAPDVLLDHPPPASLVGLENDESPPTSHQHPLAGTKRARAAAEEEEEEKGNDMEPQVEVRQVEANEFFLQMLCERRPRALRPDHGLHRRPGTGGHQRQRHLPREPRPQRLPRRQAGQ

SEQ ID NO: 1197 - protein, 219 aa, Zea mays subsp. mays
  peptide (1)..(219): Ceres Seq. ID no. 12350568
MYGDAVPPSLSLFDCRRQRRGGPVPGGAAGAGRRWWWGGRRRRVAVCCCGWERAGGGAAAAGAAAARCGLGVRGQRHAGGPRGRRRRRRAGAWRRQGRREAAAVQEPRGGAEAAEEAQRAALQAQVARPEHLQDGPRGDPRGRHRLHRGPAEPGEGAAGRAGGPGGRRRRPRRPPGPPAAGEPGGAGERRVAAHEPPAPARRDQEGPCGGGGGGGGEGE

SEQ ID NO: 1198 - DNA, 1176 bp, Zea mays subsp. mays
  misc_feature (1)..(1176): Ceres Seq. ID no. 12567026
gcacgagaccattacctagaacatcctaatcgaaaaacggcctcacactgcagaggcttggacggacgggatggacatggcgcggtacgagtcatgctaccggcactggatcgccgggcaggaggcaggcctcgccgagctcgaggcggcgtcggccaatgccgccgcgggccgggcaacggacgccgagctgcggaccgtggtggagcggtgcatgctcgggtaccaggactacgccacccgcaggcgcgcgctgtcgcgggaggacggcgtcgccttcttcgccccgccctggtgcaccgccttcgagaactccgtgctctggctcgggggctgccgcccttcgctcaccgtccgcctgctctacaacctctccggggagggcctggaggcgcaggtggaggagctgctcggcggcctcagccaacggcgtcatcccgaccggggccctggggatcacgtccgctcagctggtgctcatcaacgacctccacagccggacggtgcaccaggagaacgccctgtcggaccggctcgccaccctgcaggaggacatcgccgaccgcccgctcctgcccatcgtgcggcagcgcgagctcgctgccgcggcacggttgggagctgcagctgctgccagcggaagctgcgacggcgcggcgcggcggcggctcagggcggcccggctaggagccgcggacgccgaggtggacgcggcgctggacagctacaaggccgcgctgtcgcggctgctggtggaggccgacgagctgaggatggcgacggcgcgggcgctggcgacggagatcctgacgcctcggcaagcggtggagatgctggcggcaggcaagcacctgcacctctccgtccgcgactggagccgccgtagggaagcagcngctggcgcacagcaacagcttggcgggcagagcgccggaacggacaacaccgtncgnccgagcacatgaaaggcccgccattcctcgcccttgcctgcagctagttagtagcatcccgtgtgtagcttggacaccacacaacctctctagtacccgcctgtctttctatatagaccgatcgatcaccatgtgcatggcgtccattaatatgtacaaagttggtgcttggtgtttttgttcctaagaacctaaattaaataccgcagtgcttgcatgagtt

SEQ ID NO: 1199 - protein, 271 aa, Zea mays subsp. mays
  peptide (1)..(271): Ceres Seq. ID no. 12567027
MDMARYESCYRHWIAGQEAGLAELEAASANAAAGRATDAELRTVVERCMLGYQDYATRRRALSREDGVAFFAPPWCTAFENSVLWLGGCRPSLTVRLLYNLSGEGLEAQVEELLGGLSQRRHPDRGPGDHVRSAGAHQRPPQPDGAPGERPVGPARHPAGGHRRPPAPAHRAAARARCRGTVGSCSCCQRKLRRRGAAAAQGGPARSRGRRGGRGAGQLQGRAVAAAGGGRRAEDGDGAGAGDGDPDASASGGDAGGRQAPAPLRPRLEPP

SEQ ID NO: 1200 - protein, 269 aa, Zea mays subsp. mays
  peptide (1)..(269): Ceres Seq. ID no. 12567028
MARYESCYRHWIAGQEAGLAELEAASANAAAGRATDAELRTVVERCMLGYQDYATRRRALSREDGVAFFAPPWCTAFENSVLWLGGCRPSLTVRLLYNLSGEGLEAQVEELLGGLSQRRHPDRGPGDHVRSAGAHQRPPQPDGAPGERPVGPARHPAGGHRRPPAPAHRAAARARCRGTVGSCSCCQRKLRRRGAAAAQGGPARSRGRRGGRGAGQLQGRAVAAAGGGRRAEDGDGAGAGDGDPDASASGGDAGGRQAPAPLRPRLEPP

SEQ ID NO: 1201 - protein, 268 aa, Zea mays subsp. mays
  peptide (1)..(268): Ceres Seq. ID no. 12567029
  misc_feature (246)..(246): Xaa is any aa, unknown or other
  misc_feature (264)..(264): Xaa is any aa, unknown or other
  misc_feature (265)..(265): Xaa is any aa, unknown or other
MPPRAGQRTPSCGPWWSGACSGTRTTPPAGARCRGRTASPSSPRPGAPPSRTPCSGSGAAALRSPSACSTTSPGRAWRRRWRSCSAASANGVIPTGALGITSAQLVLINDLHSRTVHQENALSDRLATLQEDIADRPLLPIVRQRELAAAARLGAAAAASGSCDGAARRRLRAARLGAADAEVDAALDSYKAALSRLLVEADELRMATARALATEILTPRQAVEMLAAGKHLHLSVRDWSRRREAXAGAQQQLGGQSAGTDNTXXPST

SEQ ID NO: 1202 - DNA, 1567 bp, Zea mays subsp. mays
  misc_feature (1)..(1567): Ceres Seq. ID no. 15177742
  misc_feature (1)..(1567): Ortholog of  Ceres SEQ ID NO 15226750 as cited in SEQ ID NO 58711
aatccctcctcctccataagagacaagaacgaggtcgtctcgccatcgccgccactcctatttaagagctgccggaggtgggggcagatccggcgagccgttcccgctgtccagattcaggaactagactcctccggtccggtcctccccctcccgccccgtctcgctccagcggctccacgccaccgtttgccattcactgccagaatggcgctcaacaaggagtacacgtacgcggagctggagaaggagccgtactggccgttcgagaagctgcgggtctccatcaccggggccggcgggttcatcgcctcccacatcgcgcgccgcctcaagggcgagggccactacgtcgtcgcctccgactggaagaggaacgagcacatgcccgaggacatgttctgccacgagttccacctcgtggacctgagggtcatggacaactgcctcaaggtcaccacgggggttgaccacgtgttcaacctcgcggctgacatgggtgggatggggttcatccagtccaaccactccgtcatcatgtacaacaacaccatgatcagctttaacgtgcttgaggctgctagaattaacggcgtcaagaggttcttctatgcatcaagtgcctgcatctaccctgagttcaagcagctggaaactgtagttagcttgaaggagtccgatgcttggcctgccgagcctcaagatgcctatggcctggaaaaactcgcgactgaggagctgtgcaagcactatacaaaggattttggcatcgagtgccggattggtcgctttcacaacatatatggtcccttcggcacatggaaaggtggaagggagaaggcgcctgctgctttctgcaggaaggctctgacctccacagggcgctttgagatgtggggtgatggcctgcaaaccagatccttcacatttattgatgaatgtgttgaaggtgtccttaggttaacaaagtccgatttccgtgagcctgtaaacattggaagcgacgaaatggtgagcatgaacgagatggcggaaatagtcctgagctttgagaacaagcagctgcccatccaccacatccccgggccggagggcgtgcgtgggcgcaactcagacaacacgctcatcaaggagaagcttggctgggctccgactatgaggctgaaggacgggctgaggatcacgtactcctggatcaaggagcagcttgagaaggagaaggccgagggcatggatctgtcggtctacggatcatccaaggtcgtgcagacacaggccccggttcagctcggctccctccgcgccgctgatggcaaggagtgaactttggctgcgccggtcagttgcagggcatgatataccagtaatacacagctgtttcagtttccatgatttgtagtcaccatttcttgattcacatttgactccacaagagaagaccatttggacgatggatgttttgtcacaagttacgggattcagttcaaatttgaactgaatacaaaatatcctgacacgatatctgtcgtccaaacacttataataatttccacgctgttttttttcc

SEQ ID NO: 1203 - protein, 312 aa, Zea mays subsp. mays
  peptide (1)..(312): Ceres Seq. ID no. 15177743
MPEDMFCHEFHLVDLRVMDNCLKVTTGVDHVFNLAADMGGMGFIQSNHSVIMYNNTMISFNVLEAARINGVKRFFYASSACIYPEFKQLETVVSLKESDAWPAEPQDAYGLEKLATEELCKHYTKDFGIECRIGRFHNIYGPFGTWKGGREKAPAAFCRKALTSTGRFEMWGDGLQTRSFTFIDECVEGVLRLTKSDFREPVNIGSDEMVSMNEMAEIVLSFENKQLPIHHIPGPEGVRGRNSDNTLIKEKLGWAPTMRLKDGLRITYSWIKEQLEKEKAEGMDLSVYGSSKVVQTQAPVQLGSLRAADGKE

SEQ ID NO: 1204 - protein, 440 aa, Zea mays subsp. mays
  peptide (1)..(440): Ceres Seq. ID no. 15177744
NPSSSIRDKNEVVSPSPPLLFKSCRRWGQIRRAVPAVQIQELDSSGPVLPLPPRLAPAAPRHRLPFTARMALNKEYTYAELEKEPYWPFEKLRVSITGAGGFIASHIARRLKGEGHYVVASDWKRNEHMPEDMFCHEFHLVDLRVMDNCLKVTTGVDHVFNLAADMGGMGFIQSNHSVIMYNNTMISFNVLEAARINGVKRFFYASSACIYPEFKQLETVVSLKESDAWPAEPQDAYGLEKLATEELCKHYTKDFGIECRIGRFHNIYGPFGTWKGGREKAPAAFCRKALTSTGRFEMWGDGLQTRSFTFIDECVEGVLRLTKSDFREPVNIGSDEMVSMNEMAEIVLSFENKQLPIHHIPGPEGVRGRNSDNTLIKEKLGWAPTMRLKDGLRITYSWIKEQLEKEKAEGMDLSVYGSSKVVQTQAPVQLGSLRAADGKE

SEQ ID NO: 1205 - protein, 371 aa, Zea mays subsp. mays
  peptide (1)..(371): Ceres Seq. ID no. 15177745
MALNKEYTYAELEKEPYWPFEKLRVSITGAGGFIASHIARRLKGEGHYVVASDWKRNEHMPEDMFCHEFHLVDLRVMDNCLKVTTGVDHVFNLAADMGGMGFIQSNHSVIMYNNTMISFNVLEAARINGVKRFFYASSACIYPEFKQLETVVSLKESDAWPAEPQDAYGLEKLATEELCKHYTKDFGIECRIGRFHNIYGPFGTWKGGREKAPAAFCRKALTSTGRFEMWGDGLQTRSFTFIDECVEGVLRLTKSDFREPVNIGSDEMVSMNEMAEIVLSFENKQLPIHHIPGPEGVRGRNSDNTLIKEKLGWAPTMRLKDGLRITYSWIKEQLEKEKAEGMDLSVYGSSKVVQTQAPVQLGSLRAADGKE

SEQ ID NO: 1206 - DNA, 1787 bp, Zea mays subsp. mays
  misc_feature (1)..(1787): Ceres Seq. ID no. 12372734
atcagtgggtgggtgggtggttcgcctcctcatcctctcctccccgcacgtccacggcgatggcgcccgcgcccccgcactgctgacccacccccgccgcgcactctcatgaccgtggtttggtaggtggggcggaggttggtaggccgggacgtgccggcaggcggttacgggaggcgcggccgcgatcccgggccggatctggacgccgcgatggaggacgccgttgccgctgagaatgggatcgagggggagggctacgtcgtcgtcaaggcggcggcggccgcggaggcggagggggactccggcgccagcgatcgtggggatctcgccgcccccgctgaggacgcggcgccggccggatctgaggacgccccggccccggcggtgacgccggacgagaccgcggcacctgccaaggcgccggccaggaagggtggatccggggacgccgccggggtccggaaggcgaggccgcagaacggcagggtgcccgccgccgccgccaccgccgcgccgagggtgaagaagcccggggtcctctcgcagagcgcctccttcccggcgcggggtgccgccgccaagaaggcctcggcggttgctactcccaagcaggccaagggcgtcgtgaccaatggatcagaggcggcagcaggccgggcagccgagaagaaggcgaattcagcgcggacacctgtcgctcgccggtcgatgcctgtcaagtctggatcagcggatgcggccgcccccaaatgacgcaattcccgctgtccaagagccacatgaaaacaccgacaagccattgaaacaaatgcagccagggaaaacagaggatgatgtgcgctccaccacatcaagtaccaatactccgcgtgcagcagctcgcaagagtgctgctgttgctgctggttttagtttcagattggaggagcgtgctgagaagagaaaggagttcttccaaaagcttgaagagaaaatccacgcaaaggagctggaaaaaacaaatctgcaggagaaatctaaggagagccaagaggctgagatcaaactgctgaggaagagcctaacatttaaagccacacctatgccaagcttttacaaggagcagccacccaaagttgagttgaaaaagattcccccaacacgcgctaggtcgccaaagctcggccggcacaagccagccaattctgccactgctgcttctgcggatggttctgtatcatgtgagagcccacggagcactgcaaattcgggcaaggtaaatgaagcgatggaaaacaacaaacctcatgcccctgctagaaaacctgttcagaggccagtcatgaaagctccatcacaggcgtctgccaccacaaaggctgaagcaagacccgtggtcacaaggccaaagatctcaaactcgaaacctaaggcttcaagggcgaaggttgcgcgagcgcaagaaaccccaggctgaagcccctccttcagaacctgctgctccagaagatttcacggttgaacatggcattggagacgccacaggtcctgatctgaccgcgcaattggttgcttcgaacgaagtcccagtccatggttgatcagctgagcattttgcatatttattcccttcttgcagttctgtgaatagcgagggtgtgtgcttcattggaagttgaatcgctcgaagtgtcatggtttatcgtttccggagtagacatccattttgtttttcagcttgtcattgggcatgccatgtatattgcttggtattgtgttcttgtttaaaattcccagtcttgtgc

SEQ ID NO: 1207 - protein, 274 aa, Zea mays subsp. mays
  peptide (1)..(274): Ceres Seq. ID no. 12372735
MDQRRQQAGQPRRRRIQRGHLSLAGRCLSSLDQRMRPPPNDAIPAVQEPHENTDKPLKQMQPGKTEDDVRSTTSSTNTPRAAARKSAAVAAGFSFRLEERAEKRKEFFQKLEEKIHAKELEKTNLQEKSKESQEAEIKLLRKSLTFKATPMPSFYKEQPPKVELKKIPPTRARSPKLGRHKPANSATAASADGSVSCESPRSTANSGKVNEAMENNKPHAPARKPVQRPVMKAPSQASATTKAEARPVVTRPKISNSKPKASRAKVARAQETPG

SEQ ID NO: 1208 - protein, 240 aa, Zea mays subsp. mays
  peptide (1)..(240): Ceres Seq. ID no. 12372736
MRPPPNDAIPAVQEPHENTDKPLKQMQPGKTEDDVRSTTSSTNTPRAAARKSAAVAAGFSFRLEERAEKRKEFFQKLEEKIHAKELEKTNLQEKSKESQEAEIKLLRKSLTFKATPMPSFYKEQPPKVELKKIPPTRARSPKLGRHKPANSATAASADGSVSCESPRSTANSGKVNEAMENNKPHAPARKPVQRPVMKAPSQASATTKAEARPVVTRPKISNSKPKASRAKVARAQETPG

SEQ ID NO: 1209 - protein, 215 aa, Zea mays subsp. mays
  peptide (1)..(215): Ceres Seq. ID no. 12372737
MQPGKTEDDVRSTTSSTNTPRAAARKSAAVAAGFSFRLEERAEKRKEFFQKLEEKIHAKELEKTNLQEKSKESQEAEIKLLRKSLTFKATPMPSFYKEQPPKVELKKIPPTRARSPKLGRHKPANSATAASADGSVSCESPRSTANSGKVNEAMENNKPHAPARKPVQRPVMKAPSQASATTKAEARPVVTRPKISNSKPKASRAKVARAQETPG

SEQ ID NO: 1210 - DNA, 1571 bp, Zea mays subsp. mays
  misc_feature (1)..(1571): Ceres Seq. ID no. 13586135
  misc_feature (1)..(1571): Ortholog of  Ceres SEQ ID NO 13654329 as cited in SEQ ID NO 68717
attaatttagtcagcatcacatcgcaatcacaagactcctatacccaaacccacgccccccgcccccctattattctatatatataatacacacactagtgtggagtagtacttcaattggcgttggccgaagaagaggagaagcgaagcaagcaggcttcgagaacaagactgcagggggagggggaggaccaagcgaaaggggaactagagcaagatgggcggcgcactgctgcttgcgctcctcctcgtctctgctgctgccgcccctcaggtacttggagttggcaatggagacaatcacatgagaatcatccaggaggacatcatcgagacagtcaacaaccatcccagtgctgggtggacagcctcacgtaatccttacttttcaaactataccattgcgcaatttaagcacatacttggagtgaaaccagcaccacagaatgcactaagcaatgttcctgtcaaaacttattcaagatcactggaacttccaaaagagtttgacgctagatctgcatggtcccgttgcagcacaattgggaacatacttgatcaaggtcactgtggctcttgttgggcttttggtgctgtggagtgcctccaggaccgtttttgcattcacctcaacatgagcattttactttcagtcaatgacctactggcatgctgcggttttatgtgcggcgatgggtgtgatggaggctatcctatagaggcatggcgctactttgttcaaaatggtgttgttacggatgagtgtgatccatacttcgacccggtcggttgcaagcatcctggatgcgaacctgcttatcctacaccaaagtgtgaaaagaaatgcaaggagcagaaccaagtttggcaggaaaagaagcatttcagcattgatgcgtacagaataaattcagatccacatgacataatggcagaggtctacaaaaatggtcctgtagaagttgctttcacagtttacgaggatttcgcacactacaaatctggagtgtacaagcacatcaccggtggcattatgggtggccatgccgtcaagttgattggatggggaaccagtgatgctggagaagattactggcttctggcaaatcagtggaatagaggctggggcgatgatggatacttcaagatcataaggggcaaaaatgaatgtggcatcgaggagggcgttgttgctggaatgccatccacaaagaatatggttccaaacttcggcggtgccgttggaagagctatagtttaatggttacgtttgcatggcctcaaatgctgttggaattagctaaagtaattttaaaatgcaattgttaaagggccacgatggtgtatgtattttgtacactagctcatttcaaaggtcgttatgttgctggtgccacatcactttggtcaagtggaataatattaataagaactagaatttcgattcgaaaaaaaaaaaaaaaaaaaaaaaaaaaaaaaaaaaaaaaaaaaaaaaaaaaaaaaaaaaaaaaaaaaaaaaaaaaaaaaaaaaaaaaaaaaaaaaaaaaaaaaaaaaaaaaaaattttttttt

SEQ ID NO: 1211 - protein, 347 aa, Zea mays subsp. mays
  peptide (1)..(347): Ceres Seq. ID no. 15220786
MGGALLLALLLVSAAAAPQVLGVGNGDNHMRIIQEDIIETVNNHPSAGWTASRNPYFSNYTIAQFKHILGVKPAPQNALSNVPVKTYSRSLELPKEFDARSAWSRCSTIGNILDQGHCGSCWAFGAVECLQDRFCIHLNMSILLSVNDLLACCGFMCGDGCDGGYPIEAWRYFVQNGVVTDECDPYFDPVGCKHPGCEPAYPTPKCEKKCKEQNQVWQEKKHFSIDAYRINSDPHDIMAEVYKNGPVEVAFTVYEDFAHYKSGVYKHITGGIMGGHAVKLIGWGTSDAGEDYWLLANQWNRGWGDDGYFKIIRGKNECGIEEGVVAGMPSTKNMVPNFGGAVGRAIV

SEQ ID NO: 1212 - protein, 318 aa, Zea mays subsp. mays
  peptide (1)..(318): Ceres Seq. ID no. 15220787
MRIIQEDIIETVNNHPSAGWTASRNPYFSNYTIAQFKHILGVKPAPQNALSNVPVKTYSRSLELPKEFDARSAWSRCSTIGNILDQGHCGSCWAFGAVECLQDRFCIHLNMSILLSVNDLLACCGFMCGDGCDGGYPIEAWRYFVQNGVVTDECDPYFDPVGCKHPGCEPAYPTPKCEKKCKEQNQVWQEKKHFSIDAYRINSDPHDIMAEVYKNGPVEVAFTVYEDFAHYKSGVYKHITGGIMGGHAVKLIGWGTSDAGEDYWLLANQWNRGWGDDGYFKIIRGKNECGIEEGVVAGMPSTKNMVPNFGGAVGRAIV

SEQ ID NO: 1213 - protein, 208 aa, Zea mays subsp. mays
  peptide (1)..(208): Ceres Seq. ID no. 15220788
MSILLSVNDLLACCGFMCGDGCDGGYPIEAWRYFVQNGVVTDECDPYFDPVGCKHPGCEPAYPTPKCEKKCKEQNQVWQEKKHFSIDAYRINSDPHDIMAEVYKNGPVEVAFTVYEDFAHYKSGVYKHITGGIMGGHAVKLIGWGTSDAGEDYWLLANQWNRGWGDDGYFKIIRGKNECGIEEGVVAGMPSTKNMVPNFGGAVGRAIV

SEQ ID NO: 1214 - DNA, 1006 bp, Zea mays subsp. mays
  misc_feature (1)..(1006): Ceres Seq. ID no. 15180555
acacgttccctcgtcttttgtcagttggacaatccgcagctcctccatctcattcttccccccatcccatccccaaggttgaccggcgaaatcagcagtccgagaaccgcgagcttctgcctgatccagcctcatcccgccatggacgaatctgaggagcacagcaacggcggcgggcacccccacccgcaccacgggtacgagtggaagttcccggcggcgctgagcgcgaacacgacgagcgtgcacgtgacggcgctggacggcgtggtgaacgtgaactcgctgttcacggtggccgtgttcgtggggctgtcgctggcgaccccggggcagctgcggagcctggcgggggacccgcggtgcgacgccggcccgggcgtggcgcggtcgctgctggtgctggaggtggtggccttctcgtccttcctcttctccagcctggtggcgcagggcctgaagctggcgctcaacctcatcaactccaaggacccgcacgacgcggcgcgcgcccacatcgacgcccgcgtgctccgcctcggcatgctcgcctccgccgtcggatccgtcgtcggctgcgtcttcctcatgacgtccatggtcatggtcgtgcaggtccgcctcggcacgctgagctgccccaccgaccgcgccgccgccaaggccgccgcgggcctcgtcggcctcgtcaccaccgcgctcgctttctacgtgggcaccgtcttctacaccttcacccactgatgccagttccatgcatccgtgcgctgcatcccaaatccatctagcgttgcgttgcgttgcgttgcaaagaacacatcgccatcagtggtgtcggtgtgcgaggaaattgaaaggaggacatgcaatctgcgttattactttgatctgatgcgctgttcgtttttgttcgtgactaaagtttagttagtgttggatattagttataaatattaaatataaacttaattaagtttaataaattcatctgatcttttattttgct

SEQ ID NO: 1215 - protein, 247 aa, Zea mays subsp. mays
  peptide (1)..(247): Ceres Seq. ID no. 15180556
TRSLVFCQLDNPQLLHLILPPIPSPRLTGEISSPRTASFCLIQPHPAMDESEEHSNGGGHPHPHHGYEWKFPAALSANTTSVHVTALDGVVNVNSLFTVAVFVGLSLATPGQLRSLAGDPRCDAGPGVARSLLVLEVVAFSSFLFSSLVAQGLKLALNLINSKDPHDAARAHIDARVLRLGMLASAVGSVVGCVFLMTSMVMVVQVRLGTLSCPTDRAAAKAAAGLVGLVTTALAFYVGTVFYTFTH

SEQ ID NO: 1216 - protein, 200 aa, Zea mays subsp. mays
  peptide (1)..(200): Ceres Seq. ID no. 15180557
MDESEEHSNGGGHPHPHHGYEWKFPAALSANTTSVHVTALDGVVNVNSLFTVAVFVGLSLATPGQLRSLAGDPRCDAGPGVARSLLVLEVVAFSSFLFSSLVAQGLKLALNLINSKDPHDAARAHIDARVLRLGMLASAVGSVVGCVFLMTSMVMVVQVRLGTLSCPTDRAAAKAAAGLVGLVTTALAFYVGTVFYTFTH

SEQ ID NO: 1217 - DNA, 946 bp, Zea mays subsp. mays
  misc_feature (1)..(946): Ceres Seq. ID no. 13598846
agcgaccagccagtgatcgaccgaggcagagactgactactaggagcagagagcagcggagatggtgaagattccgagccccaggaggctgttcaggagccggtccaggagcaccaccatcatcggcggcggcggcgcggacatctgcgccatggtcgccgagcacgagaggatcgagtgggaggtgcggcccggcgggatgctggtgcagaagcggcgctcgacggaggacgacgcggcggcggccgtggagtacatcctggtgagagtctccaccaccgggtggcagtggcacgacgtctccatcgacgccaccgcaaccttcggcgacctgaaggtgatgctgtcgctggcgaccgggctgtggcccagggagcagaggctgctgtacaggggcaaggagagggacgactgcgagcacctgcacatggtgggggtccaggacaaggacaaggtgctgctcctggaggacccggccgtcaaggagaggaagctcaggtcaaccaccttggcgcagctcatgggcgtgccctgccactccttcatccaagtgtagagagaaacccccggggaatttcttgccatttttctcccgtctctcgtcgtcgttctccagcttgcctgcgtgagcgaagggtttcagtccagtctaaccgcgtttgttcagagcctgctgagttccatctcagggcttgaattcggccaatcgaatcaagacagtcgcaaacgataggatataaagatgatgaatacatggcgtaaattactgtgaacgggtacgtaatgtcatcccagtgccagtgtgtgtgagccagtagttctttggttccttgctctgtatatattctctttttttccttcctgagatcagcaaaacagttcggaattccatagatgctgctgtaaatcccttgtcttttttccacggaatgcagcccccttttct

SEQ ID NO: 1218 - protein, 164 aa, Zea mays subsp. mays
  peptide (1)..(164): Ceres Seq. ID no. 13598847
MVKIPSPRRLFRSRSRSTTIIGGGGADICAMVAEHERIEWEVRPGGMLVQKRRSTEDDAAAAVEYILVRVSTTGWQWHDVSIDATATFGDLKVMLSLATGLWPREQRLLYRGKERDDCEHLHMVGVQDKDKVLLLEDPAVKERKLRSTTLAQLMGVPCHSFIQV

SEQ ID NO: 1219 - protein, 134 aa, Zea mays subsp. mays
  peptide (1)..(134): Ceres Seq. ID no. 13598848
MVAEHERIEWEVRPGGMLVQKRRSTEDDAAAAVEYILVRVSTTGWQWHDVSIDATATFGDLKVMLSLATGLWPREQRLLYRGKERDDCEHLHMVGVQDKDKVLLLEDPAVKERKLRSTTLAQLMGVPCHSFIQV

SEQ ID NO: 1220 - protein, 118 aa, Zea mays subsp. mays
  peptide (1)..(118): Ceres Seq. ID no. 13598849
MLVQKRRSTEDDAAAAVEYILVRVSTTGWQWHDVSIDATATFGDLKVMLSLATGLWPREQRLLYRGKERDDCEHLHMVGVQDKDKVLLLEDPAVKERKLRSTTLAQLMGVPCHSFIQV

SEQ ID NO: 1221 - DNA, 925 bp, Zea mays subsp. mays
  misc_feature (1)..(925): Ceres Seq. ID no. 13600485
tatgaaaaatcaagatctcctgggaggttctttgacctagtttatcatgaaaatgcccgtgttctactccatgatgagagcatataccgatttgaatgttgctcgagtccgacaaggttgtctattcagctgatggaatatggtcacgaaaagccagaagtgactgcagtatcaattgaaccaaatttttcttcgtatctttttagcgagtacttgtgtagtacgccagacaagaaattatctgaaggcgtctaccttggaaggaataagcggaaatattcaaataatgatgaaccttcagattctttgaaggcaatggatggtatcaatgttgtgaatggtcttgaatgcaagatatcctgcaagacctcgaaagtttcatatgtccttgatactgaagatttcttgttccggcttcggaagagaaggaaaattttgcggggcgggaatgtgcccgaccgtttgcagatttcatcaatatctgctgcaaaagtgcagcgcttcaataggttcctatccaaaccataggatcatttggcatacaaatgtatcgaaacctgttgctggggtcccagctgcttggcttgaacaatgattccatcgacgtcgcggagtcccctttcggaataacagatgggaagacatagggtaaatacagcaaagcgaagcgagcatgtaggccacagtagtcagtctgttgttccgaaagatgtgtatatatgtattagcagcatgattgttctgattatctttttactgattttcgatggtaggtctattccatcaagtatttaactaatcatttgttgctgttggtataggtcttttgttcttttagccgtcgttttgcattgaagatatgtagccaaaattaaaaacctgtgtcgaacagttatgtagtcttggctccattaatcaaacggac

SEQ ID NO: 1222 - protein, 175 aa, Zea mays subsp. mays
  peptide (1)..(175): Ceres Seq. ID no. 15218951
YEKSRSPGRFFDLVYHENARVLLHDESIYRFECCSSPTRLSIQLMEYGHEKPEVTAVSIEPNFSSYLFSEYLCSTPDKKLSEGVYLGRNKRKYSNNDEPSDSLKAMDGINVVNGLECKISCKTSKVSYVLDTEDFLFRLRKRRKILRGGNVPDRLQISSISAAKVQRFNRFLSKP

SEQ ID NO: 1223 - protein, 131 aa, Zea mays subsp. mays
  peptide (1)..(131): Ceres Seq. ID no. 15218952
MEYGHEKPEVTAVSIEPNFSSYLFSEYLCSTPDKKLSEGVYLGRNKRKYSNNDEPSDSLKAMDGINVVNGLECKISCKTSKVSYVLDTEDFLFRLRKRRKILRGGNVPDRLQISSISAAKVQRFNRFLSKP

SEQ ID NO: 1224 - DNA, 1257 bp, Zea mays subsp. mays
  misc_feature (1)..(1257): Ceres Seq. ID no. 14303263
accagccatgactcctccgcttctcctctccctcctgctggtggcggcgaggtgctgccgctgctgccatggctggtcgtcgtttcagaagccggcggtgactgcggtgatcgctttcggagactccattgtggacccggggaacaacaacgggctgcatacggtgatcaaggccaaccatccgccctacggcaaggacttgttcaaccacgaggccaccggacgctactccaacggcctcattccaaccgacctaattgcccaggagctgggtgtgaagctgctgcttcctgcctacttgggcgtggatctgagcccggaggacctgctcaccggcgtcagcttcgcgtccggcgccaccgggttcgacccgctgactcccctcgtagtgagcgtcatctcgctggagcagcagctcgcctacttcgacgagtaccgcggcaagctggtggatatcgccggcgaggatgagacggcgaggatcatcgacggtgcgctgttcgtggtgtgcgcgggcaccgacgacgtggccaacacctacttcacgacgccgttccgcagcgcggagtacgacatcccgagctacgtggagctgctggtgggcggcgccgaggagttcctccgcaacgtcagctccaggggcgccaggaagatcggcttcgtggggatgccgcccgtggggtgcgtgccgtcgcagcggacgctgggcggtggcctcgccagggcgtgcgagcccaagcggaacgaggcggcgcagctgtacaacgccaggatccaggagatggtcgccgacgccgaccgagacttggcgacgaccatggtggtgttcctggacatctaccgcgtcctggacgacctgatggagcgcggggacaagtacggcttctctgagaccaccaggggatgctgcggcaccggcaccatcgaggtcacggggctctgcgactcccgcttcgtctccgtctgcgacaacgtctcgcagcacgtgttcttcgacagctaccaccccaccgagagagcctacaggatcatcgtcaaggacatctttgacaactacggacaagtgctcatcggatgatatatatctaccttgcttgagcgatcgagcatgcatgttcatcttcttcatctttatgtacgttcggctagctggcccaaagcctcaaggaggcccatttatcttcttcttactcctcctcgccccaagaataattaattgtaagcatgatctgcggaatcagacggggatggtctggt

SEQ ID NO: 1225 - protein, 358 aa, Zea mays subsp. mays
  peptide (1)..(358): Ceres Seq. ID no. 14303264
PAMTPPLLLSLLLVAARCCRCCHGWSSFQKPAVTAVIAFGDSIVDPGNNNGLHTVIKANHPPYGKDLFNHEATGRYSNGLIPTDLIAQELGVKLLLPAYLGVDLSPEDLLTGVSFASGATGFDPLTPLVVSVISLEQQLAYFDEYRGKLVDIAGEDETARIIDGALFVVCAGTDDVANTYFTTPFRSAEYDIPSYVELLVGGAEEFLRNVSSRGARKIGFVGMPPVGCVPSQRTLGGGLARACEPKRNEAAQLYNARIQEMVADADRDLATTMVVFLDIYRVLDDLMERGDKYGFSETTRGCCGTGTIEVTGLCDSRFVSVCDNVSQHVFFDSYHPTERAYRIIVKDIFDNYGQVLIG

SEQ ID NO: 1226 - protein, 356 aa, Zea mays subsp. mays
  peptide (1)..(356): Ceres Seq. ID no. 14303265
MTPPLLLSLLLVAARCCRCCHGWSSFQKPAVTAVIAFGDSIVDPGNNNGLHTVIKANHPPYGKDLFNHEATGRYSNGLIPTDLIAQELGVKLLLPAYLGVDLSPEDLLTGVSFASGATGFDPLTPLVVSVISLEQQLAYFDEYRGKLVDIAGEDETARIIDGALFVVCAGTDDVANTYFTTPFRSAEYDIPSYVELLVGGAEEFLRNVSSRGARKIGFVGMPPVGCVPSQRTLGGGLARACEPKRNEAAQLYNARIQEMVADADRDLATTMVVFLDIYRVLDDLMERGDKYGFSETTRGCCGTGTIEVTGLCDSRFVSVCDNVSQHVFFDSYHPTERAYRIIVKDIFDNYGQVLIG

SEQ ID NO: 1227 - DNA, 1692 bp, Zea mays subsp. mays
  misc_feature (1)..(1692): Ceres Seq. ID no. 15180663
  misc_feature (1)..(1692): Ortholog of  Ceres SEQ ID NO 12415963 as cited in SEQ ID NO 0
gaaaaaccatcctcctcgctcgcactgacaggcaggcagagagagagagacagagagccgaattgattgccgagggcagagcagcaacagcaacagtccacgaccgatcgcccggcccgcgcgcaggcaggcagcagccatgaaccacctgacgccggcgctccacggggcgatgcggccgccctcggcgcaggggcaggggctggcccggtacggctccgcgccgggctcgctcctagccgccatcgccgactccgtcacccgcggcgaccccgcgccgccgccgccgccgcccgtgagccggttctactccgccgagtcctcggggctcacctcctgcgagtccagctgccgcaccgactgcggacgcccgcccctcgagcgggcgtacggcggctccggcgagatccgcgtgccgccgccgctgcagcagcagcagcaccacctgctggctccccccgcggcctccccgctgttccgccacagcagctcccccgccgggctgctctcccgtctcatgaccgacccgcacggaatggcggcgaccggaggagcgatggggagctacacgcaggcgggcagcgacgccgcgctgggccacggccacgcgcagctcagctcgcagtggagcttctccaggcaggacctgccgcagatctcggagatggggatgataccggccgacatcggggagagcatcgtgggcgccggcgggtgcaacagctccagcgacgccgcgcagtcctcctcctacctctccaggaccttctccgtcggctcctgggacgacaccaactccatcatgttctcgtctgccccctgcaagaagcccaaggtggaccccgccgccggcgccgacgacatggtcaccaacttcagcaccattgacccgcagttcggcctgtccaactcatccctggagctgcccggcatggacgactacctgcagctgcagcaggactccgtcgcctgcagagtgcgtgcgaggcgtggctgcgcgactcacccgcggagcattgccgagagggaaagaaggacgaggatcagcaagaggctgaagaagctgcaagaccttgtgcccaacatggacaagcaaacgaatacgtcggacatgttggaccttgctgtggattacatcaaagagctcaaggaccaagtcgagaagctaaaacacgaccaagcaaactgctgttgcctaggcaacaagagctgctgctgatgctggagaagcagacggaggagggtttttatgccgtaacaatgtgactgttaaaccagagctgttgcttcaggagaccaggccgcgggcagaagtgcgtgacatgtggagcggcttccatgactcagcttcctcttttcttggttgttccacggactagcgacccggccggtgccaacggcttgaagactaggagataacaagtaggacgatgttgtaatttagttaccgcgacgcggtggctctggcttgcgtgtaaagaagtcctccctttcaacgcgactgggattgctgttgctggtaaaattgttgtaggaatatcatctgcgctccatttttcatcgagctcatcttttttttttttttttttttgtgtgtgtcactggattttggcaagaccgtaactcagaaaccgagcactgatcgagcgttcatgccaccccatacgaagtccaagagaattttagtatgcc

SEQ ID NO: 1228 - protein, 359 aa, Zea mays subsp. mays
  peptide (1)..(359): Ceres Seq. ID no. 15180664
MNHLTPALHGAMRPPSAQGQGLARYGSAPGSLLAAIADSVTRGDPAPPPPPPVSRFYSAESSGLTSCESSCRTDCGRPPLERAYGGSGEIRVPPPLQQQQHHLLAPPAASPLFRHSSSPAGLLSRLMTDPHGMAATGGAMGSYTQAGSDAALGHGHAQLSSQWSFSRQDLPQISEMGMIPADIGESIVGAGGCNSSSDAAQSSSYLSRTFSVGSWDDTNSIMFSSAPCKKPKVDPAAGADDMVTNFSTIDPQFGLSNSSLELPGMDDYLQLQQDSVACRVRARRGCATHPRSIAERERRTRISKRLKKLQDLVPNMDKQTNTSDMLDLAVDYIKELKDQVEKLKHDQANCCCLGNKSCC

SEQ ID NO: 1229 - protein, 348 aa, Zea mays subsp. mays
  peptide (1)..(348): Ceres Seq. ID no. 15180665
MRPPSAQGQGLARYGSAPGSLLAAIADSVTRGDPAPPPPPPVSRFYSAESSGLTSCESSCRTDCGRPPLERAYGGSGEIRVPPPLQQQQHHLLAPPAASPLFRHSSSPAGLLSRLMTDPHGMAATGGAMGSYTQAGSDAALGHGHAQLSSQWSFSRQDLPQISEMGMIPADIGESIVGAGGCNSSSDAAQSSSYLSRTFSVGSWDDTNSIMFSSAPCKKPKVDPAAGADDMVTNFSTIDPQFGLSNSSLELPGMDDYLQLQQDSVACRVRARRGCATHPRSIAERERRTRISKRLKKLQDLVPNMDKQTNTSDMLDLAVDYIKELKDQVEKLKHDQANCCCLGNKSCC

SEQ ID NO: 1230 - protein, 233 aa, Zea mays subsp. mays
  peptide (1)..(233): Ceres Seq. ID no. 15180666
MTDPHGMAATGGAMGSYTQAGSDAALGHGHAQLSSQWSFSRQDLPQISEMGMIPADIGESIVGAGGCNSSSDAAQSSSYLSRTFSVGSWDDTNSIMFSSAPCKKPKVDPAAGADDMVTNFSTIDPQFGLSNSSLELPGMDDYLQLQQDSVACRVRARRGCATHPRSIAERERRTRISKRLKKLQDLVPNMDKQTNTSDMLDLAVDYIKELKDQVEKLKHDQANCCCLGNKSCC

SEQ ID NO: 1231 - DNA, 1259 bp, Zea mays subsp. mays
  misc_feature (1)..(1259): Ceres Seq. ID no. 15180797
ctggatgtcgcgcctcgccgccgtcgcctgtgtcgcgctcgccgccaaggtcgaggaaacgcgcgtgccgctgctcctcgacctccagctctgcgccgccgccagctccgacgctgacgcagcggacgcggacgtgttcgaggccaagacggtgcgccggatggagctgctcgttctctccgcgctagggtggcggatgcaccctgtcacgcccttctcctacctccagcctgtcctcgccgacgctgcgatgcgcctacgcaactgcgaggccgtcctgctcgcggtcatggccgattggaggtggcctcggcaccggccctcggcgtgggccgccgccgcattgctcaccacagccggcggcggcgacgacgactcggagctgctcgcgctcatcaatgcccccgaggacgagaccgcggagtgcgccaagatcatctccgaggtgacaggcatgagcttccttgtctgcgacgtcggcggcatgatcgccgggaataagcgtaagcacgcggcggcgcggatgtactcgccgccgctgagcccgagcggcgtgatcggcgcgctgtcctgcttcagctgcgagagctcgttgtccgccacagcggactcgcgcaccctcgctactacggctgcgggggtcggcccgtgggcaccgtcagcgcccgtgtccgtgtcgtcttcccctgagcccccaggtcgggcccccaagcgcgcccggcggcgggggtcccgcatccgcttccccccgacgaggagagccgcgacgcctggccgtccacctgcgccgcgtgacgcaccgtgccggaacggtgcctatggcgagatcccccgctcaggtagtcaggtggcggtggggatataaaggagcatcagaatctcgcgccggtgacgagaacgaaccattttgcccattgccgcgagagatggggggctagattgcaagaagaaaaggatgtaatgtctgcatgctcatgtatggcagcacattttgcaatgatggttctcgatcgtaactgtttggggggatcgtaactgttcggctggctacaagccgacactgttgcagctgtttggactgctgcagctgcaatccatagagagaaaaatactgtagaagccgcagccgcagccggattgcagccgcagcaagccgcagcgaacaagcttattattagttgcaattgtagtgttgctagttcttgttggttcttggcattgcttgcttggaaggccaatgacaggggccgcctttgtcc

SEQ ID NO: 1232 - protein, 287 aa, Zea mays subsp. mays
  peptide (1)..(287): Ceres Seq. ID no. 15180798
WMSRLAAVACVALAAKVEETRVPLLLDLQLCAAASSDADAADADVFEAKTVRRMELLVLSALGWRMHPVTPFSYLQPVLADAAMRLRNCEAVLLAVMADWRWPRHRPSAWAAAALLTTAGGGDDDSELLALINAPEDETAECAKIISEVTGMSFLVCDVGGMIAGNKRKHAAARMYSPPLSPSGVIGALSCFSCESSLSATADSRTLATTAAGVGPWAPSAPVSVSSSPEPPGRAPKRARRRGSRIRFPPTRRAATPGRPPAPRDAPCRNGAYGEIPRSGSQVAVGI

SEQ ID NO: 1233 - protein, 286 aa, Zea mays subsp. mays
  peptide (1)..(286): Ceres Seq. ID no. 15180799
MSRLAAVACVALAAKVEETRVPLLLDLQLCAAASSDADAADADVFEAKTVRRMELLVLSALGWRMHPVTPFSYLQPVLADAAMRLRNCEAVLLAVMADWRWPRHRPSAWAAAALLTTAGGGDDDSELLALINAPEDETAECAKIISEVTGMSFLVCDVGGMIAGNKRKHAAARMYSPPLSPSGVIGALSCFSCESSLSATADSRTLATTAAGVGPWAPSAPVSVSSSPEPPGRAPKRARRRGSRIRFPPTRRAATPGRPPAPRDAPCRNGAYGEIPRSGSQVAVGI

SEQ ID NO: 1234 - protein, 234 aa, Zea mays subsp. mays
  peptide (1)..(234): Ceres Seq. ID no. 15180800
MELLVLSALGWRMHPVTPFSYLQPVLADAAMRLRNCEAVLLAVMADWRWPRHRPSAWAAAALLTTAGGGDDDSELLALINAPEDETAECAKIISEVTGMSFLVCDVGGMIAGNKRKHAAARMYSPPLSPSGVIGALSCFSCESSLSATADSRTLATTAAGVGPWAPSAPVSVSSSPEPPGRAPKRARRRGSRIRFPPTRRAATPGRPPAPRDAPCRNGAYGEIPRSGSQVAVGI

SEQ ID NO: 1235 - DNA, 974 bp, Zea mays subsp. mays
  misc_feature (1)..(974): Ceres Seq. ID no. 15175468
atcaaggctcacctccttccctctgttcccgtctcccccggcctctctcggcaagtcggcatccgtcctcgatccacgctcagctcgcctaaggactaagccatcagcgttcagcgatgagccggggcagcagcaacggcggcgtgaggagcgccgccaggctggaggagctgcagctggacctgtccccgccgccggtggggatggaggtggacggcgccgggggcgtccacggcgacagcgactcgtcgtcgtcgtcgccgccgagctcgtgcgtgtcgtcggacgggcggagctcgagcggcggcggcggcagcagccccgggggcagtaagtcgccgatggtgatcggcgcctgcacgcggtgcctcatgtactgcatggtggccaagaaggactacccgacctgcgtcaactgcaagcagccgtgcctggtggacctgctccacggcgaggccggccgtgttggcggcggcgccaggcaggccgccgccgccgctgacgacgacgacgacgacaagaagaagcaggtgcaccgccgtgagcgcaggtgaagtgaggccgccgtaagaagctggtggtggtgcccgtgcccgtgcccgcgccgcgcgcccagtggatgctcatacggagggtcagctaagctagctagctagctagctagcccggcgaagggcgaactgactgactgccgttggatcatccactggacagctagcccgcagggtgttaggatcggaggagctaaagctagctattagtacgtgtagcagcagcttagttcactcgatggatgctgctgctgttggagtaggtggttgttgtcatggtgagccgtgagcgtgggggcgtggggttatgtgtggtggactggagacttgtggttgtggaccgtggtggtgtctccggttgtaatcccccattccgttccagctgaagagaacatttgcaagctaatggaattatattagagt

SEQ ID NO: 1236 - protein, 145 aa, Zea mays subsp. mays
  peptide (1)..(145): Ceres Seq. ID no. 15175469
MSRGSSNGGVRSAARLEELQLDLSPPPVGMEVDGAGGVHGDSDSSSSSPPSSCVSSDGRSSSGGGGSSPGGSKSPMVIGACTRCLMYCMVAKKDYPTCVNCKQPCLVDLLHGEAGRVGGGARQAAAAADDDDDDKKKQVHRRERR

SEQ ID NO: 1237 - protein, 116 aa, Zea mays subsp. mays
  peptide (1)..(116): Ceres Seq. ID no. 15175470
MEVDGAGGVHGDSDSSSSSPPSSCVSSDGRSSSGGGGSSPGGSKSPMVIGACTRCLMYCMVAKKDYPTCVNCKQPCLVDLLHGEAGRVGGGARQAAAAADDDDDDKKKQVHRRERR

SEQ ID NO: 1238 - protein, 110 aa, Zea mays subsp. mays
  peptide (1)..(110): Ceres Seq. ID no. 15175471
SRLTSFPLFPSPPASLGKSASVLDPRSARLRTKPSAFSDEPGQQQRRREERRQAGGAAAGPVPAAGGDGGGRRRGRPRRQRLVVVVAAELVRVVGRAELERRRRQQPRGQ

SEQ ID NO: 1239 - DNA, 893 bp, Zea mays subsp. mays
  misc_feature (1)..(893): Ceres Seq. ID no. 13598935
atgagcacaccacactgcacgcccacaccacggaatagacctctcaacccagaacccagcaggcaccatggccgccgccgtgcccctcctcctccagctgctgctactgccactcctggtcgcgtcagcggcgggcggcggcggcggcgagaagagcacgcacatgaagctgtactggcacgacgtggtgagcgggccgagcccgacggcggtgcaggtggcgcgggcggcggtgaccaacacctccaagaccgccttcggcgtggtggtggtgatcgacgacccgctgacggagggcccggacctcaagtcctcgaagcccctcggccgcgctcagggcacgtacatcggcgccggcaaggacgagctgtccctcatgatgagcatgaacttcgtgttccaggccggcaagtacaacggtagcaccgtggccatcatgggccggaacgcggtgttcgacgccgtccgcgagatggctgtggtgggcggcaccggcgcgttcaggatggcgcgcggctacgcgcaggcccgcacgcacgccctcgacctcaacaccggcgacgccaccgtcgagtacaacctctacatcaagcactgaagtgaactgactgatcagttggtattgggaatgatacacaataataaatgaactggaaaagaataacctgatgatttttttgcttgggaaggaccagttgttcccacgtttgtgtcgatctacagtgtggcgactgttgcggtaacactacgtaaagaataatgacctgatggctttttttgtttaggaaaaaaaaaaaaaaaaaaaaaaaaaaaaaaaaaaaaaaaaaaaaaaaaaaattaaaaaaaaaaaaaaaaaggcttatcgataccgccaacctcragggggggcccgg

SEQ ID NO: 1240 - protein, 176 aa, Zea mays subsp. mays
  peptide (1)..(176): Ceres Seq. ID no. 15222455
MAAAVPLLLQLLLLPLLVASAAGGGGGEKSTHMKLYWHDVVSGPSPTAVQVARAAVTNTSKTAFGVVVVIDDPLTEGPDLKSSKPLGRAQGTYIGAGKDELSLMMSMNFVFQAGKYNGSTVAIMGRNAVFDAVREMAVVGGTGAFRMARGYAQARTHALDLNTGDATVEYNLYIKH

SEQ ID NO: 1241 - protein, 144 aa, Zea mays subsp. mays
  peptide (1)..(144): Ceres Seq. ID no. 15222456
MKLYWHDVVSGPSPTAVQVARAAVTNTSKTAFGVVVVIDDPLTEGPDLKSSKPLGRAQGTYIGAGKDELSLMMSMNFVFQAGKYNGSTVAIMGRNAVFDAVREMAVVGGTGAFRMARGYAQARTHALDLNTGDATVEYNLYIKH

SEQ ID NO: 1242 - protein, 140 aa, Zea mays subsp. mays
  peptide (1)..(140): Ceres Seq. ID no. 15222457
MSTPHCTPTPRNRPLNPEPSRHHGRRRAPPPPAAATATPGRVSGGRRRRREEHAHEAVLARRGERAEPDGGAGGAGGGDQHLQDRLRRGGGDRRPADGGPGPQVLEAPRPRSGHVHRRRQGRAVPHDEHELRVPGRQVQR

SEQ ID NO: 1243 - DNA, 791 bp, Zea mays subsp. mays
  misc_feature (1)..(791): Ceres Seq. ID no. 15179107
cagctcctcctccctcctatcatcctcttcctcaacgctccctcgtcattatataacacgaggatcagttcagagctgcttgacaaacactcacacctagcgaacagctatacacccaaccaggtggagagctgcaagccaccaagaccaaagtgatcgcaacctgtgcggcggcggcggcggcgacgatgagcaggaacaacggcaaggcgtcgaagctggagctcctgaggatgggcctgtcgagggcgaggggcgggccctcggcgacggcgcggcccggcggcggggacagcggcagcaacggccgcgcgacgacgtcgccgcgccgggtgtcctcctcgtcctcgtccaccgcgtcgccgccgagctcgtgcgtgtcgtccgagggcagccccgacgcggccgccgccgcgccggcgcccatggtcctggccgggtgcccccggtgcatgatgtacgtgatgctgtcccgcgaggacccccggtgcccccggtgccacaacgccgtgctgctcgacttcagcgagggcgaccagcgccgcccgcgtcagcgccggtgaaatggaaccaccacgagcgatcgagcacgtctgagttcgtcgttgccttcaagaagtcgtcgtcgtagcttcattttcccattcgcggccggagtttgtttcgattacccaaggaattattgcatagacctgtttcttccgagcggcacggtgccaaagggatcggtctaggtaataatttcatgctttgttagacaataataataagaataataatttcgtcttctc

SEQ ID NO: 1244 - protein, 124 aa, Zea mays subsp. mays
  peptide (1)..(124): Ceres Seq. ID no. 15179108
MSRNNGKASKLELLRMGLSRARGGPSATARPGGGDSGSNGRATTSPRRVSSSSSSTASPPSSCVSSEGSPDAAAAAPAPMVLAGCPRCMMYVMLSREDPRCPRCHNAVLLDFSEGDQRRPRQRR

SEQ ID NO: 1245 - protein, 109 aa, Zea mays subsp. mays
  peptide (1)..(109): Ceres Seq. ID no. 15179109
MGLSRARGGPSATARPGGGDSGSNGRATTSPRRVSSSSSSTASPPSSCVSSEGSPDAAAAAPAPMVLAGCPRCMMYVMLSREDPRCPRCHNAVLLDFSEGDQRRPRQRR

SEQ ID NO: 1246 - DNA, 709 bp, Zea mays subsp. mays
  misc_feature (1)..(709): Ceres Seq. ID no. 12633674
aatggatgagcacggggaaaaggaagagaacaagtctcaagattcggctttggcggcggagcagcgcgaggagacggcggcggcggagggagaggacacgtctgaggaatccacggaccagcgcgaggacgggcacgggtataaagcggacgaatcggcgggcctgctgcccgaggacgacgtgggctctggagaagcctcggcggcgccacacttcgggcacccgtgctcgttgttgcgcgcctgcgccggattcctgggcctgcacggctgcggcggcgatcagaagccggcggcggctgccgttgctgcatctgcagctgaagccgccacggcggcggcggcgagctcgtcccaggatgaagaagacggcggcgtcgacatggcgaaggctaacggtttctacatgcatgaggtgatcacccgcgtatgggcggtcgcggtgaggaggccgcggccgcggccgccggatcacgcgagagaagggagcggtggcaatggaggcgtacaccactaggagtagactcgccgcgcatggttgtctaccttggctcgctcatagcctccgcctacataaatattttgcccgtcagagatctgcggccgtctactgtctacatgcacctttaaataaatccatggctatgaagcatgaatgtctgatgtaattcatgtaggcttctccgatgcggacttcaaataagacaaa

SEQ ID NO: 1247 - protein, 171 aa, Zea mays subsp. mays
  peptide (1)..(171): Ceres Seq. ID no. 12633675
MDEHGEKEENKSQDSALAAEQREETAAAEGEDTSEESTDQREDGHGYKADESAGLLPEDDVGSGEASAAPHFGHPCSLLRACAGFLGLHGCGGDQKPAAAAVAASAAEAATAAAASSSQDEEDGGVDMAKANGFYMHEVITRVWAVAVRRPRPRPPDHAREGSGGNGGVHH

SEQ ID NO: 1248 - protein, 138 aa, Zea mays subsp. mays
  peptide (1)..(138): Ceres Seq. ID no. 12633676
WMSTGKRKRTSLKIRLWRRSSARRRRRRRERTRLRNPRTSARTGTGIKRTNRRACCPRTTWALEKPRRRHTSGTRARCCAPAPDSWACTAAAAIRSRRRLPLLHLQLKPPRRRRRARPRMKKTAASTWRRLTVSTCMR

SEQ ID NO: 1249 - protein, 137 aa, Zea mays subsp. mays
  peptide (1)..(137): Ceres Seq. ID no. 12633677
MSTGKRKRTSLKIRLWRRSSARRRRRRRERTRLRNPRTSARTGTGIKRTNRRACCPRTTWALEKPRRRHTSGTRARCCAPAPDSWACTAAAAIRSRRRLPLLHLQLKPPRRRRRARPRMKKTAASTWRRLTVSTCMR

SEQ ID NO: 1250 - DNA, 803 bp, Zea mays subsp. mays
  misc_feature (1)..(803): Ceres Seq. ID no. 14303280
atcctaatcgaaaactcgagtctggtcccccacccctcagcgcgacgaaggtaagatgttcctgcggaggatcctgaccggcgggggcggcctggcggccctgagggcggcgcgcgccgtgaaggagacgacggggatcgtgggccttgaggtggtgcctaacgcgcgagaggttctggtagggctctacgagcgcacgctcaaagagatcaaggccgtccccgaagacgagggttaccgcaaggccgttgaatccttcaccggtcaccgcctccagatctgccaggaggaggaggactggaagcgcatcgaggaccgaatcggatgcgggcaggtcgaggagctcatcgaggaggccgaggacgagctcaagctcatcgctaaaatgattgaatgggatccatggggtgttcccgatgactacgaatgtgaggtgattgaagacgacaccccaattcctaagcatgttcctcagcaccggcctgttcctcttcctgaggagttcttcaaggcactagatgctgtcaaatctgatcctgctcttcaaggcgatgctcctcctcaagtgaaggcgtaaggatggctgttcctggctaacgtcatttcacattttgccgcggtgggtagggactggtttcttgtgtcatttgccagcaatgcgcttgctctgagcagaataaatttctggtgagtaccatcaaagtgtgaatttgaacttagtgattcggcacagtaaacttgttgcccatgaaatactcgatgccctgaacatcgtttgttttgacgttataatcgatgttgac

SEQ ID NO: 1251 - protein, 173 aa, Zea mays subsp. mays
  peptide (1)..(173): Ceres Seq. ID no. 14303281
MFLRRILTGGGGLAALRAARAVKETTGIVGLEVVPNAREVLVGLYERTLKEIKAVPEDEGYRKAVESFTGHRLQICQEEEDWKRIEDRIGCGQVEELIEEAEDELKLIAKMIEWDPWGVPDDYECEVIEDDTPIPKHVPQHRPVPLPEEFFKALDAVKSDPALQGDAPPQVKA

SEQ ID NO: 1252 - DNA, 1112 bp, Zea mays subsp. mays
  misc_feature (1)..(1112): Ceres Seq. ID no. 14305465
ataatcggctcacttggccccccgcgcagcccgattccatccatgccgcggcgcccgcgtccactggtgtcgcgtcgcgctgcacgcatcggtggtgccaaggtggcgacctgacgcctacaaggaggcgtccgcgccgcgcctttcccagcttctgcgcgcggcgagatagggaggaggcggagccgcggaggagagagatggacccggagaagcagcgccagcacgacggcgcggtggatgcggacatcgagcggctccccgtcgacctcctcgctcacatcctctccctcctgtcgcccttccgcgacctgtccatggcggggggagtgagccggaggtggcgctgggcggtggagcggtcgctggcgtcgcggcggcggctgagcttcgcgggccagcgcaccggcgacgacaccgccgcgcgcctcgtccgcgccgccgtcaacctccgcgacctcgacatttcacgaagctgctggggctgccgaatcaccgacgatggcctcatcaagatttcgtccgcggattgcgtcggcaacctgacgtccatatcgctctggggattggccgggatcaccgataagggcgtggtccgtctggtttcgagggcttattctctgcagcacctgaatatcggtggaacgttcatcacagatgaatccctctacgcagtcgcaaacagctgcgcaaatcttaagagcatcatcctgtggagctgccgccacgtgacggagggcgggctggtggcgctggtgaacaagtgccggcggctggagtgcatcaacgtgggcgggatgcgggtcccgccggagagcttggtgggcctgctctccatcagccccgccctggagatcaggtccaccgcacgcatcctcaacctcaacctcaacgccggggtgcaggtctcctgatccatgtgtgtgtggcttgccatgagcccatgcatcgtcagaagggactcactcaccagacacacacacgtcatcgtgttgccataatgtttgttgtaaaaaaaaaacagatacgtcatcgtgattctatatatctcctatacatgttacacacaataaaccataaaatgaactgtacggccacagtgccttgcaagc

SEQ ID NO: 1253 - protein, 303 aa, Zea mays subsp. mays
  peptide (1)..(303): Ceres Seq. ID no. 14305466
NRLTWPPAQPDSIHAAAPASTGVASRCTHRWCQGGDLTPTRRRPRRAFPSFCARRDREEAEPRRREMDPEKQRQHDGAVDADIERLPVDLLAHILSLLSPFRDLSMAGGVSRRWRWAVERSLASRRRLSFAGQRTGDDTAARLVRAAVNLRDLDISRSCWGCRITDDGLIKISSADCVGNLTSISLWGLAGITDKGVVRLVSRAYSLQHLNIGGTFITDESLYAVANSCANLKSIILWSCRHVTEGGLVALVNKCRRLECINVGGMRVPPESLVGLLSISPALEIRSTARILNLNLNAGVQVS

SEQ ID NO: 1254 - protein, 237 aa, Zea mays subsp. mays
  peptide (1)..(237): Ceres Seq. ID no. 14305467
MDPEKQRQHDGAVDADIERLPVDLLAHILSLLSPFRDLSMAGGVSRRWRWAVERSLASRRRLSFAGQRTGDDTAARLVRAAVNLRDLDISRSCWGCRITDDGLIKISSADCVGNLTSISLWGLAGITDKGVVRLVSRAYSLQHLNIGGTFITDESLYAVANSCANLKSIILWSCRHVTEGGLVALVNKCRRLECINVGGMRVPPESLVGLLSISPALEIRSTARILNLNLNAGVQVS

SEQ ID NO: 1255 - protein, 198 aa, Zea mays subsp. mays
  peptide (1)..(198): Ceres Seq. ID no. 14305468
MAGGVSRRWRWAVERSLASRRRLSFAGQRTGDDTAARLVRAAVNLRDLDISRSCWGCRITDDGLIKISSADCVGNLTSISLWGLAGITDKGVVRLVSRAYSLQHLNIGGTFITDESLYAVANSCANLKSIILWSCRHVTEGGLVALVNKCRRLECINVGGMRVPPESLVGLLSISPALEIRSTARILNLNLNAGVQVS

SEQ ID NO: 1256 - DNA, 992 bp, Zea mays subsp. mays
  misc_feature (1)..(992): Ceres Seq. ID no. 13622393
gccttccctctgaaaactcttcattctcctctcctccgccgcgccgccaacttcccctcccgtcaactccggctcccgcgcgagatcgagctagcgtttggggttctcgagaccggctgccatggcgacagagcaagaggcggagaactacacggtggaggaccttgtggccctgaatccgtacaaccccgacatcctcaacgaccttgagaagttcgtcaacgagcaagttgcgtctcaaacatataacttggatgcaaatctcagccttcttcgcctgtaccagtttgagccaggaaggatgagcatacatattgtggcccacatactgatcaaggctctcatggcaatgccggcccctgacttcagtctttgcttattcttaattcctgaacatgtgcaaatggaagagcaattcaaggcattgatagttctttctcactatctagagactgctaggttcaggcagttttgggatgacgcagcaaacaaccgccacatattggaagcagttccaggttttgagcaggcaatccaatcctatgcaattcatgtactttccttgacataccagaaagttccaaggcatattcttgcagaggcaatcaacattgaaggtctcgctttggacaagtttcttgagtaccatgctgcgaactcaggttgggtaattgagaagggtgggcagtctcaagtgattgttcttccacgcaatgagttcaatcacccccagctcaagaagaacacagctgataccgttccatttgagcacctaacacgcatattccctgttcttagctgattcaggcgtagtgagagatatacaatagaactcagagcgagtgaagcttctctaagcaattgtatcatctcctttgtggtataccgtattttaagatctcggtatacctgttcttttttatggctgaattggtacctgcaacttggttattactataacgaaatgaccagttatgagattggtcggcccc

SEQ ID NO: 1257 - protein, 226 aa, Zea mays subsp. mays
  peptide (1)..(226): Ceres Seq. ID no. 13622394
MATEQEAENYTVEDLVALNPYNPDILNDLEKFVNEQVASQTYNLDANLSLLRLYQFEPGRMSIHIVAHILIKALMAMPAPDFSLCLFLIPEHVQMEEQFKALIVLSHYLETARFRQFWDDAANNRHILEAVPGFEQAIQSYAIHVLSLTYQKVPRHILAEAINIEGLALDKFLEYHAANSGWVIEKGGQSQVIVLPRNEFNHPQLKKNTADTVPFEHLTRIFPVLS

SEQ ID NO: 1258 - protein, 166 aa, Zea mays subsp. mays
  peptide (1)..(166): Ceres Seq. ID no. 13622395
MSIHIVAHILIKALMAMPAPDFSLCLFLIPEHVQMEEQFKALIVLSHYLETARFRQFWDDAANNRHILEAVPGFEQAIQSYAIHVLSLTYQKVPRHILAEAINIEGLALDKFLEYHAANSGWVIEKGGQSQVIVLPRNEFNHPQLKKNTADTVPFEHLTRIFPVLS

SEQ ID NO: 1259 - protein, 152 aa, Zea mays subsp. mays
  peptide (1)..(152): Ceres Seq. ID no. 13622396
MAMPAPDFSLCLFLIPEHVQMEEQFKALIVLSHYLETARFRQFWDDAANNRHILEAVPGFEQAIQSYAIHVLSLTYQKVPRHILAEAINIEGLALDKFLEYHAANSGWVIEKGGQSQVIVLPRNEFNHPQLKKNTADTVPFEHLTRIFPVLS

SEQ ID NO: 1260 - DNA, 1099 bp, Zea mays subsp. mays
  misc_feature (1)..(1099): Ceres Seq. ID no. 12377905
aagtcggtctctctctcactctctcttgtctccaagtttgtaaccctagccgccaagcttgaagctccagccgtgctcgtgtagggctgcaggccatccgggctccggcttccggcatccaccaggcgtccttagaatacggtgcagcgagcagcaagtcgccgagcagccgagccaccgccgagcagccgagccgccgccgagcgccgagtcttctctggtgtttgctaggggaccatggaggagcacggagcggaagacctcctgtgcgaggcgatgggatctgcggcgcaggtcgtggtggtagaggattgcgtggaggcaccgggggccttcgtcctccacctcctcctcaagcgcgcgctcgcaggctgcggctccgctgccttcctcgccctcgcgcagcccttctcccattacgaccgcgtcctgcgcaagatgggctgtaacctttccctgcataggaggaatgagaggcttcatttctttgaattgctaggattcccaggtggagcaagggaaggnaccattgctgatagctttgctctattgtncaatgaaattcaaagactggtggaggcaaacagggctggagaaaatgaaggccagttcnccatcgttatagacgacgcttccctgttggaagtcgtggcccttggttctgtaagcnatgtgctggatttcttgcactattgtttcacactcacgtntgagatgaattgcaagctagtgatcctcattcacgaggatatatacgcaaatgaggagaacatgggtctccttttacatctacgctacattgcggatcttgtgattaaagcagcacctttaagcactggtttggctgctgatgttcatggacagctggcggttgtgaacaagggtacattcagcgagcaaagggcaaaagcacagaaagtttggaacttccatttcaaaaagaaaacggtgctgacttnttctatccagggagtagacattagggaatacttgtatacagtagaaacaactctggttgtgataactgataaccagtgctgctattcttcgtgtaccttgtgctaaacacagtaaagttttgtccaatccttcatttcgc

SEQ ID NO: 1261 - protein, 275 aa, Zea mays subsp. mays
  peptide (1)..(275): Ceres Seq. ID no. 12377906
  misc_feature (96)..(96): Xaa is any aa, unknown or other
  misc_feature (106)..(106): Xaa is any aa, unknown or other
  misc_feature (126)..(126): Xaa is any aa, unknown or other
  misc_feature (145)..(145): Xaa is any aa, unknown or other
  misc_feature (158)..(158): Xaa is any aa, unknown or other
  misc_feature (241)..(241): Xaa is any aa, unknown or other
MEEHGAEDLLCEAMGSAAQVVVVEDCVEAPGAFVLHLLLKRALAGCGSAAFLALAQPFSHYDRVLRKMGCNLSLHRRNERLHFFELLGFPGGAREXTIADSFALLXNEIQRLVEANRAGENEGQFXIVIDDASLLEVVALGSVSXVLDFLHYCFTLTXEMNCKLVILIHEDIYANEENMGLLLHLRYIADLVIKAAPLSTGLAADVHGQLAVVNKGTFSEQRAKAQKVWNFHFKKKTVLTXSIQGVDIREYLYTVETTLVVITDNQCCYSSCTLC

SEQ ID NO: 1262 - protein, 262 aa, Zea mays subsp. mays
  peptide (1)..(262): Ceres Seq. ID no. 12377907
  misc_feature (83)..(83): Xaa is any aa, unknown or other
  misc_feature (93)..(93): Xaa is any aa, unknown or other
  misc_feature (113)..(113): Xaa is any aa, unknown or other
  misc_feature (132)..(132): Xaa is any aa, unknown or other
  misc_feature (145)..(145): Xaa is any aa, unknown or other
  misc_feature (228)..(228): Xaa is any aa, unknown or other
MGSAAQVVVVEDCVEAPGAFVLHLLLKRALAGCGSAAFLALAQPFSHYDRVLRKMGCNLSLHRRNERLHFFELLGFPGGAREXTIADSFALLXNEIQRLVEANRAGENEGQFXIVIDDASLLEVVALGSVSXVLDFLHYCFTLTXEMNCKLVILIHEDIYANEENMGLLLHLRYIADLVIKAAPLSTGLAADVHGQLAVVNKGTFSEQRAKAQKVWNFHFKKKTVLTXSIQGVDIREYLYTVETTLVVITDNQCCYSSCTLC

SEQ ID NO: 1263 - protein, 208 aa, Zea mays subsp. mays
  peptide (1)..(208): Ceres Seq. ID no. 12377908
  misc_feature (29)..(29): Xaa is any aa, unknown or other
  misc_feature (39)..(39): Xaa is any aa, unknown or other
  misc_feature (59)..(59): Xaa is any aa, unknown or other
  misc_feature (78)..(78): Xaa is any aa, unknown or other
  misc_feature (91)..(91): Xaa is any aa, unknown or other
  misc_feature (174)..(174): Xaa is any aa, unknown or other
MGCNLSLHRRNERLHFFELLGFPGGAREXTIADSFALLXNEIQRLVEANRAGENEGQFXIVIDDASLLEVVALGSVSXVLDFLHYCFTLTXEMNCKLVILIHEDIYANEENMGLLLHLRYIADLVIKAAPLSTGLAADVHGQLAVVNKGTFSEQRAKAQKVWNFHFKKKTVLTXSIQGVDIREYLYTVETTLVVITDNQCCYSSCTLC

SEQ ID NO: 1264 - DNA, 2152 bp, Zea mays subsp. mays
  misc_feature (1)..(2152): Ceres Seq. ID no. 14303276
ctcgtccacccattcctccgctcttccttaattcctcatttcctccacgtacgcgtgcatactctgcgagtccaggagatttttttccccttcttcacgatactctcgacgagagtgtctccatggccggaaaaggagacgggccggcgatcggcatcgacctcggtacgacctactcgtgcgtcggggtgtggcagcatgaccgagtcgagatcatcgccaacgaccagggcaaccgtacaacgccgtcttatgtcgcgttcaccgattcggagaggctcgtcggcgacgccgccaagaaccaggtcgccatgaaccccatcaacaccgtcttcgacgcgaagcggctcatcggccggcgcttctctgacacgtcggtgcagagtgacgccaagctatggcctttcaaagtgatcccgggctccggcgacaagcccatgatcggggtgcagttcaggggcgaggagaaacagttctcggccgaggagatcagctccatgatcctgaacaagatgaaggagacggccgaggcttacctcggcaccaccatcaagaacgctgtcgtcaccgtcccggcctacttcaacgactcccagcgccaggccaccaaggacgccggcgtcatctccggcctcaacgtcatgcgcatcatcaacgagcccaccgccgcggccatcgcatacgggctcgacaagaagtcgagcagcgacggcgagaagaacgtcctcatcttcgacctcggcggcggtacctttgacgtctcgctcctcaccatcgaggagggcatctttgaggtcaaggccaccgccggcgacacccacctgggaggcgaggacttcgacaaccggctcgtgaaccacttcgtccaggagttcaagaggaagaacaagaaggacatcactggcaaccccagggcgctccggcgactgaggaccgcctgcgagagggctaagaggacgctctcctccaccgcccaaaccaccatcgagatcgactcgctctatgagggcatcgacttctacacgaccatcacccgtgcccggttcgaggagctcaacatggacctcttccgcaagtgcatggagcccgtggagaagtgcctccgcgacgccaagatggacaagagcagcgtgcacgacgtcgttctcgtgggcggctccactcgcatcccccgcgtgcagcagctgctccaggacttcttcaacggcaaggagttgtgcaagagcatcaacccagacgaggctgtcgcgtacggagcggccgtccaggccgccatcctcactggcgagggcaatgagaaggttcaggatctgctcctgctcgacgtctcgccgctctcgctcggcctggagacggccggaggcgtcatgactgtgctcatccccaggaacaccaccatcccgacaaagaaggagcaggtcttctccacttactccgacaaccagcccggcgtgctcatccaggtgtacgaaggtgagagggccaggaccaaagacaacaatctgctcggcaagttcgagctctctggcatccctccggcgcccaggggcgtcccccagatcaccgtgtgtttcgacatggacgcgaacggcatcctcaacgtgtcagcggaggacaagaccaccggacagaagaataagatcacgatcaccaacgataagggacggctaagtaaggaggagatcgagaagatggtgcaggaggcagagaagtacaaagccgaggacgaggaacaccagaagaaggtgaacgccaagaacacgctcgagaactatgcctacaatatgcgcaacaccatcagagacgacaagatcgcctccaagctaccggtggacgacaagaaaaagatcgatgacgccgtcgagggggccatcaattggctcgacaacaaccagctcgccgaggttgatgagtttgaggacaagatgaaggagctggagggcatttgcaaccccatcatcgcgaagatgtatcagggcgccgctggtcctgacatggccggtggcatggatcgggatgcttcgccggctggtggcagcggtgctggacccaagatcgaagaagtcgactaaatgaggaaattcttatatatgtagttttgcttaaataattgcgtcaattacaaagtggatcttattattatttttatgcg

SEQ ID NO: 1265 - protein, 689 aa, Zea mays subsp. mays
  peptide (1)..(689): Ceres Seq. ID no. 14303277
RPPIPPLFLNSSFPPRTRAYSASPGDFFPLLHDTLDESVSMAGKGDGPAIGIDLGTTYSCVGVWQHDRVEIIANDQGNRTTPSYVAFTDSERLVGDAAKNQVAMNPINTVFDAKRLIGRRFSDTSVQSDAKLWPFKVIPGSGDKPMIGVQFRGEEKQFSAEEISSMILNKMKETAEAYLGTTIKNAVVTVPAYFNDSQRQATKDAGVISGLNVMRIINEPTAAAIAYGLDKKSSSDGEKNVLIFDLGGGTFDVSLLTIEEGIFEVKATAGDTHLGGEDFDNRLVNHFVQEFKRKNKKDITGNPRALRRLRTACERAKRTLSSTAQTTIEIDSLYEGIDFYTTITRARFEELNMDLFRKCMEPVEKCLRDAKMDKSSVHDVVLVGGSTRIPRVQQLLQDFFNGKELCKSINPDEAVAYGAAVQAAILTGEGNEKVQDLLLLDVSPLSLGLETAGGVMTVLIPRNTTIPTKKEQVFSTYSDNQPGVLIQVYEGERARTKDNNLLGKFELSGIPPAPRGVPQITVCFDMDANGILNVSAEDKTTGQKNKITITNDKGRLSKEEIEKMVQEAEKYKAEDEEHQKKVNAKNTLENYAYNMRNTIRDDKIASKLPVDDKKKIDDAVEGAINWLDNNQLAEVDEFEDKMKELEGICNPIIAKMYQGAAGPDMAGGMDRDASPAGGSGAGPKIEEVD

SEQ ID NO: 1266 - protein, 649 aa, Zea mays subsp. mays
  peptide (1)..(649): Ceres Seq. ID no. 14303278
MAGKGDGPAIGIDLGTTYSCVGVWQHDRVEIIANDQGNRTTPSYVAFTDSERLVGDAAKNQVAMNPINTVFDAKRLIGRRFSDTSVQSDAKLWPFKVIPGSGDKPMIGVQFRGEEKQFSAEEISSMILNKMKETAEAYLGTTIKNAVVTVPAYFNDSQRQATKDAGVISGLNVMRIINEPTAAAIAYGLDKKSSSDGEKNVLIFDLGGGTFDVSLLTIEEGIFEVKATAGDTHLGGEDFDNRLVNHFVQEFKRKNKKDITGNPRALRRLRTACERAKRTLSSTAQTTIEIDSLYEGIDFYTTITRARFEELNMDLFRKCMEPVEKCLRDAKMDKSSVHDVVLVGGSTRIPRVQQLLQDFFNGKELCKSINPDEAVAYGAAVQAAILTGEGNEKVQDLLLLDVSPLSLGLETAGGVMTVLIPRNTTIPTKKEQVFSTYSDNQPGVLIQVYEGERARTKDNNLLGKFELSGIPPAPRGVPQITVCFDMDANGILNVSAEDKTTGQKNKITITNDKGRLSKEEIEKMVQEAEKYKAEDEEHQKKVNAKNTLENYAYNMRNTIRDDKIASKLPVDDKKKIDDAVEGAINWLDNNQLAEVDEFEDKMKELEGICNPIIAKMYQGAAGPDMAGGMDRDASPAGGSGAGPKIEEVD

SEQ ID NO: 1267 - protein, 586 aa, Zea mays subsp. mays
  peptide (1)..(586): Ceres Seq. ID no. 14303279
MNPINTVFDAKRLIGRRFSDTSVQSDAKLWPFKVIPGSGDKPMIGVQFRGEEKQFSAEEISSMILNKMKETAEAYLGTTIKNAVVTVPAYFNDSQRQATKDAGVISGLNVMRIINEPTAAAIAYGLDKKSSSDGEKNVLIFDLGGGTFDVSLLTIEEGIFEVKATAGDTHLGGEDFDNRLVNHFVQEFKRKNKKDITGNPRALRRLRTACERAKRTLSSTAQTTIEIDSLYEGIDFYTTITRARFEELNMDLFRKCMEPVEKCLRDAKMDKSSVHDVVLVGGSTRIPRVQQLLQDFFNGKELCKSINPDEAVAYGAAVQAAILTGEGNEKVQDLLLLDVSPLSLGLETAGGVMTVLIPRNTTIPTKKEQVFSTYSDNQPGVLIQVYEGERARTKDNNLLGKFELSGIPPAPRGVPQITVCFDMDANGILNVSAEDKTTGQKNKITITNDKGRLSKEEIEKMVQEAEKYKAEDEEHQKKVNAKNTLENYAYNMRNTIRDDKIASKLPVDDKKKIDDAVEGAINWLDNNQLAEVDEFEDKMKELEGICNPIIAKMYQGAAGPDMAGGMDRDASPAGGSGAGPKIEEVD

SEQ ID NO: 1268 - DNA, 938 bp, Zea mays subsp. mays
  misc_feature (1)..(938): Ceres Seq. ID no. 14306355
actgctcgagctcagctcaagtaaccacagaaaatggcgtcacttctccgccctctcgtcctcgtgctcctgatcgcctcctgcacagcgcagcagtcaccgccggcgcagcccccgccaacgccgaacgcgccaccggccaactcgccgccccaggcgcctccagccggcaacccgccgccggcaggcaacccgccacccgcgcccaccgccactccacctccggccccgaccactccgcccccggccccgaccactcctcccccggctcccacaacgccgcccccggcgccgacaactccacctccggcccccaccacgccgcctccgtccccaccagcgtcgccaccgcccgctcccaccactccgccaccgtctcccccggcaagcccgccgcccgctcccgccaccccgccaccgtctccgcccatggcgccacctcccgccacgccccctccacccgccaccccgccgccaccggccgcgcccacgccggccccgagcgtgggtacggtggtggccgtggaggcggcggctacggcggtggcgggcgccgtgatggcggcggcggctacggcggtggcggcggcggctacggtggcggcggcggctacggtggtggtggcggcggctacggcggtggcaaccgtggcggcggctacggcaactccgacgggaactggaggaactgagcggtggggcccgcgcggccaagttatcctgttcgctaccgtgttgtttaccctagtccagagggtttatcttcgttcgtctcatgtttgttgttgcccatctgtgtttttgattgcaaggtcgctttgtgtcagttttagtgctgtgttcatcctcggctccagcagacccatgcatcaaccagcatggactgcggatcgatggatgctgttacccccgtcaggctttatcctaagttaatcttc

SEQ ID NO: 1269 - protein, 299 aa, Zea mays subsp. mays
  peptide (1)..(299): Ceres Seq. ID no. 14306356
MASLLRPLVLVLLIASCTAQQSPPAQPPPTPNAPPANSPPQAPPAGNPPPAGNPPPAPTATPPPAPTTPPPAPTTPPPAPTTPPPAPTTPPPAPTTPPPSPPASPPPAPTTPPPSPPASPPPAPATPPPSPPMAPPPATPPPPATPPPPAAPTPAPSVGTVVAVEAAATAVAGAVMAAAATAVAAAATVAAAATVVVAAATAVATVAAATATPTGTGGTERWGPRGQVILFATVLFTLVQRVYLRSSHVCCCPSVFLIARSLCVSFSAVFILGSSRPMHQPAWTADRWMLLPPSGFILS

SEQ ID NO: 1270 - protein, 229 aa, Zea mays subsp. mays
  peptide (1)..(229): Ceres Seq. ID no. 14306357
CSSSAQVTTENGVTSPPSRPRAPDRLLHSAAVTAGAAPANAERATGQLAAPGASSRQPAAGRQPATRAHRHSTSGPDHSAPGPDHSSPGSHNAAPGADNSTSGPHHAASVPTSVATARSHHSATVSPGKPAARSRHPATVSAHGATSRHAPSTRHPAATGRAHAGPERGYGGGRGGGGYGGGGRRDGGGGYGGGGGGYGGGGGYGGGGGGYGGGNRGGGYGNSDGNWRN

SEQ ID NO: 1271 - protein, 167 aa, Zea mays subsp. mays
  peptide (1)..(167): Ceres Seq. ID no. 14306358
MAPPPATPPPPATPPPPAAPTPAPSVGTVVAVEAAATAVAGAVMAAAATAVAAAATVAAAATVVVAAATAVATVAAATATPTGTGGTERWGPRGQVILFATVLFTLVQRVYLRSSHVCCCPSVFLIARSLCVSFSAVFILGSSRPMHQPAWTADRWMLLPPSGFILS

SEQ ID NO: 1272 - DNA, 1268 bp, Zea mays subsp. mays
  misc_feature (1)..(1268): Ceres Seq. ID no. 15180309
acctctctcctcccttccctcgcctcgctcctctctatcctcatcgagcagcagcggccgagaagcacgcattcagcagatccggggacacctcagctagggacgcagtggtacaagaaggcgccgtcgagtgccttgtctgggcgctcgacccctcctcctcctcgtcgtcgtcgaaggtgcgggaggtggccctccgcgccatcgacgtgttgtgcctgtcgccgcccaactctaccgggcgtctcctcgccgccgggttcctcgaccgcgtcctctccctcctccgcaatggcgacaacacgctgctgcggcactgcgcgctgaaggccgcgcaccgcctgtgctaggtgtcggaggaggtgaagaaggcgatgagcgacgccgggttcatgccggagctggtgggcgtcctcggcgcgtccagtaagtccctcgaggcacgggagatggcgggcgagtcgctgtgcgccctggttaccgtgccccgcaaccggaagcggttcgtccaggaggaccgcgacgtggcgcgggtgctgcagctgctgggccccgacgaggagaaggagaagcccgcgccggcgaggcggttcctgctttcgacggtggcgcacctcacggacagcagctccggccggaggaagatcatgtcctcggagcacatcaggaatctcgagaagcttgcggaggcctatgtcccagacgccaaacggatcgtgaagaggcttggcgggagcaggctgaggagcattttccatggcatttggagcctgtaatgttgtgttgtaacccttggaggcaagacaagcagtcaagcacgcagtagtagtgtctctggctaacacatacagtactattgttccttgcatcgtttgttactgtgaaggaatcaaagaatgagtcacccagtgatttgcggaacatggcggccgggatgatgatgagcccgccgaggctcagccccaacaacggctgggattagatggttggatgatcggatgacaggcaattgaaaaagagaattgatcttttttatgggcgaagtgttgaagatggctttggtgaaggaaatgtcttgttagcatcaagtaagtggcgatatcacaacccctacaagcttgtgccttaaaacaagaggatacaagaagttggagtgcttttgtgaaggcttttgcgaatcacttgaagcgttagtacttttgtgaatgattttgtaaagtgtttgcaaatatgtgcaaaacataataacatgtgtaggttttgtgaat

SEQ ID NO: 1273 - protein, 133 aa, Zea mays subsp. mays
  peptide (1)..(133): Ceres Seq. ID no. 15180310
MSDAGFMPELVGVLGASSKSLEAREMAGESLCALVTVPRNRKRFVQEDRDVARVLQLLGPDEEKEKPAPARRFLLSTVAHLTDSSSGRRKIMSSEHIRNLEKLAEAYVPDAKRIVKRLGGSRLRSIFHGIWSL

SEQ ID NO: 1274 - protein, 127 aa, Zea mays subsp. mays
  peptide (1)..(127): Ceres Seq. ID no. 15180311
MPELVGVLGASSKSLEAREMAGESLCALVTVPRNRKRFVQEDRDVARVLQLLGPDEEKEKPAPARRFLLSTVAHLTDSSSGRRKIMSSEHIRNLEKLAEAYVPDAKRIVKRLGGSRLRSIFHGIWSL

SEQ ID NO: 1275 - protein, 115 aa, Zea mays subsp. mays
  peptide (1)..(115): Ceres Seq. ID no. 15180312
LSPPFPRLAPLYPHRAAAAEKHAFSRSGDTSARDAVVQEGAVECLVWALDPSSSSSSSKVREVALRAIDVLCLSPPNSTGRLLAAGFLDRVLSLLRNGDNTLLRHCALKAAHRLC

SEQ ID NO: 1276 - DNA, 950 bp, Zea mays subsp. mays
  misc_feature (1)..(950): Ceres Seq. ID no. 14305363
agacctagaccctccaaaaacaactcaacaacaatgctcctcctcctcctcctgctcgtcgcctcctcctccctgtcccaggagggtgtcctcgccgacgtgccgccgtccaacaagctggtcttcatcctggcggggcagtccaacatggccggccgcggcggggtggtggcgaaccgctgggacggcgtggtgccgggcgactgcgcgccgtcccccgcggtgctgcgtctctcgcccgacctgcgctgggaggaggcgcgggagccgctgcacgccggcatcgacgccgccaaccacgccgtcggggtgggccccgggatggcgtttgccaacgcgctgctgcgctcgggccgcgcggggggcgccgtggtagggctcgtcccctgcgccgtgggaggcacgcggatggcagagtggggcaggggcaccgagctctacgccgagatgctgcgccgggccagggtcgccgtcgagacgggggggcgcatcggtgcgctgttgtggtaccagggggagagtgacaccgtccgctggtccgacgccaccgagtacggccgccggatggggatgctcgtccgtgatctccgcgccgatcttggcatcccgcacctcctcgtcatccaggtcgggttagcatcgggcctaggacagtatactcaagtcgtgagagacgctcagaaagggatcaaacttcgcaacgtcagattcgttgatgcgatggggttgccattgcaagacggccatctgcatctaagcacccaagctcaggtccagcttgggcgtatgttggctcagtcctatctaaattatggtacatcccaactctagctagtacttgtgagatagaaattcctgccctgtttggacgattcattgagaacccattcttataattattgttgtatggaatcaacttgttacagctcgatgcaatatcttcatcatct

SEQ ID NO: 1277 - protein, 276 aa, Zea mays subsp. mays
  peptide (1)..(276): Ceres Seq. ID no. 14305364
RPRPSKNNSTTMLLLLLLLVASSSLSQEGVLADVPPSNKLVFILAGQSNMAGRGGVVANRWDGVVPGDCAPSPAVLRLSPDLRWEEAREPLHAGIDAANHAVGVGPGMAFANALLRSGRAGGAVVGLVPCAVGGTRMAEWGRGTELYAEMLRRARVAVETGGRIGALLWYQGESDTVRWSDATEYGRRMGMLVRDLRADLGIPHLLVIQVGLASGLGQYTQVVRDAQKGIKLRNVRFVDAMGLPLQDGHLHLSTQAQVQLGRMLAQSYLNYGTSQL

SEQ ID NO: 1278 - protein, 265 aa, Zea mays subsp. mays
  peptide (1)..(265): Ceres Seq. ID no. 14305365
MLLLLLLLVASSSLSQEGVLADVPPSNKLVFILAGQSNMAGRGGVVANRWDGVVPGDCAPSPAVLRLSPDLRWEEAREPLHAGIDAANHAVGVGPGMAFANALLRSGRAGGAVVGLVPCAVGGTRMAEWGRGTELYAEMLRRARVAVETGGRIGALLWYQGESDTVRWSDATEYGRRMGMLVRDLRADLGIPHLLVIQVGLASGLGQYTQVVRDAQKGIKLRNVRFVDAMGLPLQDGHLHLSTQAQVQLGRMLAQSYLNYGTSQL

SEQ ID NO: 1279 - protein, 227 aa, Zea mays subsp. mays
  peptide (1)..(227): Ceres Seq. ID no. 14305366
MAGRGGVVANRWDGVVPGDCAPSPAVLRLSPDLRWEEAREPLHAGIDAANHAVGVGPGMAFANALLRSGRAGGAVVGLVPCAVGGTRMAEWGRGTELYAEMLRRARVAVETGGRIGALLWYQGESDTVRWSDATEYGRRMGMLVRDLRADLGIPHLLVIQVGLASGLGQYTQVVRDAQKGIKLRNVRFVDAMGLPLQDGHLHLSTQAQVQLGRMLAQSYLNYGTSQL

SEQ ID NO: 1280 - DNA, 839 bp, Zea mays subsp. mays
  misc_feature (1)..(839): Ceres Seq. ID no. 12588828
tcatcattcatcacatcgatggcatagccagcgaacggcagacggaatcgcgcctcccatcctctgctttccccaaaaggccagctccaccgcggcggcgccgctcctataaaccgtcagctccctctaggcgcgctttccccgcggcagcctgagcagccagccatgcctgggcggcgggcgatcgaggtccggcagctgctgccggccggcggtgacgccgcgacgccgaggtggcgcatgtcgctgcttgagaacacgttcaacgggttcgtgcagggcgccggcgccgaagccgtgttcgcggaggggtccctgttcagcccgttcctgttcggcaagttctttgacccagccgacccgttcccgctgtgggagttcgagccggacgcgctgctcgccgcgctgcgccgcggcaacgccaggaccgccgtcgactgggctgagaccgactccgattactacctcacagccgacgtgccaggtggaagtggaaggagatgcgacgtggaggtgagcggggacgcgatgaaggtggtcgacatcagcggcctgtggcgggcgccgccggcggacggccgggactggcgcgcgggccggtggtgggagcacggcttcgtccggcgggtggagctgccggaggacgcggagtggaggaaagtggaggcatgcttcgacgacagcgaggggtccctggagatcagggttcccaagaccgccgatgcccgccaggccacggcctgacgccgccgagaatcggaaccttgcaatgcgtgcgtgtcgctgaaaaacgatgtatgtgatatgttcttcagtgccagctgttgaattggctagct

SEQ ID NO: 1281 - protein, 192 aa, Zea mays subsp. mays
  peptide (1)..(192): Ceres Seq. ID no. 12588829
MPGRRAIEVRQLLPAGGDAATPRWRMSLLENTFNGFVQGAGAEAVFAEGSLFSPFLFGKFFDPADPFPLWEFEPDALLAALRRGNARTAVDWAETDSDYYLTADVPGGSGRRCDVEVSGDAMKVVDISGLWRAPPADGRDWRAGRWWEHGFVRRVELPEDAEWRKVEACFDDSEGSLEIRVPKTADARQATA

SEQ ID NO: 1282 - protein, 167 aa, Zea mays subsp. mays
  peptide (1)..(167): Ceres Seq. ID no. 12588830
MSLLENTFNGFVQGAGAEAVFAEGSLFSPFLFGKFFDPADPFPLWEFEPDALLAALRRGNARTAVDWAETDSDYYLTADVPGGSGRRCDVEVSGDAMKVVDISGLWRAPPADGRDWRAGRWWEHGFVRRVELPEDAEWRKVEACFDDSEGSLEIRVPKTADARQATA

SEQ ID NO: 1283 - protein, 100 aa, Zea mays subsp. mays
  peptide (1)..(100): Ceres Seq. ID no. 12588831
MRRGGERGRDEGGRHQRPVAGAAGGRPGLARGPVVGARLRPAGGAAGGRGVEESGGMLRRQRGVPGDQGSQDRRCPPGHGLTPPRIGTLQCVRVAEKRCM

SEQ ID NO: 1284 - DNA, 802 bp, Zea mays subsp. mays
  misc_feature (1)..(802): Ceres Seq. ID no. 15169763
  misc_feature (1)..(802): Ortholog of  Ceres SEQ ID NO 12586495 as cited in SEQ ID NO 64946
acagagcaaacaaagccaacgtgatcagagagggatatatagctagctagctagcatagcatggcgcttgtagccgacgacgacgccgagctcaaggccaaggccaaggccaaggccgaggtctactacggcgacgaggcctgtcagctgtgcgcgcagctcctgctgagggaagcaggcctccccaacggcctgctgccgctggaggacctgacggagtgcggctacgtccaggagaccgggtacgtgtggctgaagcagggcaggagggtcgaccacgtcttccggagcctcggacgcctcgtctcctacggcgccgagatcaccgggtacgccgagaagggccggatcaggaaggtgaaggggataaagaccagggagctcatgctgtgggtgcccgtcgaggagatcgccgctctcggcgacccggcggccggcgggaagcttgtctgcaagagcgttgctgggatcaccaggaccttccctgcgtcggccttccatgtccctgagaaggcggcggcggcggaggaggtgaaggtggactgtgccagggcgccgcccgccacaccggtgctcgtcctcatggacagatcaggagctccaccagttgttaagaacaactgatgcttgcgtgcttacgaacgaaagcgaaccatgcatgaccccccaaccaagttcatttcatcctttcatgcatgtactatgtatgtagctctacatatatatatatattgctactactatcaagcatgtatgtcgccgttgtggagacacatctattgatctatacatgagcttgtgg

SEQ ID NO: 1285 - protein, 187 aa, Zea mays subsp. mays
  peptide (1)..(187): Ceres Seq. ID no. 15169764
MALVADDDAELKAKAKAKAEVYYGDEACQLCAQLLLREAGLPNGLLPLEDLTECGYVQETGYVWLKQGRRVDHVFRSLGRLVSYGAEITGYAEKGRIRKVKGIKTRELMLWVPVEEIAALGDPAAGGKLVCKSVAGITRTFPASAFHVPEKAAAAEEVKVDCARAPPATPVLVLMDRSGAPPVVKNN

SEQ ID NO: 1286 - DNA, 2512 bp, Zea mays subsp. mays
  misc_feature (1)..(2512): Ceres Seq. ID no. 13623192
  misc_feature (1)..(2512): Ortholog of  Ceres SEQ ID NO 13594171 as cited in SEQ ID NO 60359
  misc_feature (1)..(2512): Ortholog of  Ceres SEQ ID NO 14301866 as cited in SEQ ID NO 60955
  misc_feature (1)..(2512): Ortholog of  Ceres SEQ ID NO 13590645 as cited in SEQ ID NO 62109
gtccccccccccccccaacgggtggaaaattagaattatgtgttgtttgtgaataaagataggcatataaagggacaaaattaacgaatctctctgataatccagtatcattgaatattatgctatatatctgaaagcagaggtcagaaaaaatcaatcgataacgtttctctcgtggatatcttgcttttactttttttaatttggctggaacttctgctcgcactttttaactcttcctgcctctagcacaatctctatatcctgtcgcaagtactacatataccattgatcattgccttcaatgcatcgtggtccaaaataaatggatctatgtgcatcattgaaattcaacgaccatgtgaatggtagtcagttggcagatataacttggagcagactgccttgctaacagttccatgtgaagttcaagtttggattctgtgtagattgttactatgaaatacaggcagtagcttttttcatataactttttcctggcacttccttttgccattataatgaagtgagaaagaggtctttggcctcttttaaatttgaactcttgtttctatttttgggtgctgcgtctcctgttaatttgtttagccctttgctgattagtgatttcttagttccctagtaatatatgttttggatgttgcagatagagtctctttctttaacattccatggacacgaccttattgtggattctgatttggagctgaactacggaaggtaaacacataaatacataatgctaccattcagttacgagctggtatgctcttggagcatgtcacttgtaccttttatctgttatatttttatttgatatatcaggcgatacggtttgcttgggttgaatggctgtggaaaatctactcttctcacagcaataggctgcagagaacttcctatccctgaacacatggacatataccatctaagccatgagattgaagcttctgacatgtctgcactgcaagccattgttagttgtgacgaagaaagagtgaagttggaaaaggaagctgaaattttggctgcacaggatgatggtggtggtgaagcattggagcgtgtttatgagcgtctagatgcaatggatgctggaactgcagaaaagcgagctgctgaaattttatttggtctgggttttgacaaacaaatgcaagcaaagaaaactaaagatttctctggaggttggcgtatgaggattgctttagcaagagcactgtttatgaatccaacaatccttttgcttgatgagcccacaaaccatctagatcttgaggcttgtgtctggttggaagagacactgaagaaatttgaccgcatacttgttgtcatatcacactcccaagattttctaaatggagtgtgtactaacattatccatatgcaaaacaagaagctcaagttatacaccggtaactacgatcagtatgttcaaactcgctccgatcttgaagagaatcaaatgaagcagtacaaatgggagcaggaacagattgcttcaatgaaggagtacattgctcgcttcggtcatggttctgcaaagcttgctcgtcaggctcagagcaaagagaaaactcttgcaaagatggagcgaggtggtctcaccgagaaggttgttagggacagagttctagtgttcaggtttacagatgttggcaaacttcctccacctgtgctgcagtttgttgaagtcaagtttgggtatacaccagataatctcatatacaagagtcttgactttggagttgatcttgactctagaatcgcattggttggtcccaatggtgcagggaagagcactcttctgaagcttatgactggtgaccttgctccattagatggcatggttcggcgccacaatcacctgcgcattgcacagtaccatcagcatcttgcggacaagctggatctggacatgccggctctggcttacatgatgaaggaataccctgggaccgaagaagagaagatgcgagctgctgttggcaggtttggcctatcaggaaaggcgcaggtgatgccaatgaggaatctttctgatgggcaaaggagccgtgtcatctttgcatggttggcatataggcagccgcaactgctactgctcgatgagccgacaaatcatttggacattgagaccattgactccctggcggaggcactgaatgagtgggatggtggtttggtcttggtgagccatgatttcaggctgatcaaccaggttgctcaagagatttgggtgtgtgagaatcaggcggtgacaaggtgggaaggtgatatcatggatttcaaggcacacttgaagagcaaggctggtttatctgattagagggctttttccagcaaccatgagctttttaactctgtatcacgaagtcccagttttccaatagcgaactatcagagtactttattgtatcggatttcttttgacttgcattgcaacctgattaccttatactacctggaatatttatttatatatcttttg

SEQ ID NO: 1287 - protein, 471 aa, Zea mays subsp. mays
  peptide (1)..(471): Ceres Seq. ID no. 13623193
MDIYHLSHEIEASDMSALQAIVSCDEERVKLEKEAEILAAQDDGGGEALERVYERLDAMDAGTAEKRAAEILFGLGFDKQMQAKKTKDFSGGWRMRIALARALFMNPTILLLDEPTNHLDLEACVWLEETLKKFDRILVVISHSQDFLNGVCTNIIHMQNKKLKLYTGNYDQYVQTRSDLEENQMKQYKWEQEQIASMKEYIARFGHGSAKLARQAQSKEKTLAKMERGGLTEKVVRDRVLVFRFTDVGKLPPPVLQFVEVKFGYTPDNLIYKSLDFGVDLDSRIALVGPNGAGKSTLLKLMTGDLAPLDGMVRRHNHLRIAQYHQHLADKLDLDMPALAYMMKEYPGTEEEKMRAAVGRFGLSGKAQVMPMRNLSDGQRSRVIFAWLAYRQPQLLLLDEPTNHLDIETIDSLAEALNEWDGGLVLVSHDFRLINQVAQEIWVCENQAVTRWEGDIMDFKAHLKSKAGLSD

SEQ ID NO: 1288 - protein, 457 aa, Zea mays subsp. mays
  peptide (1)..(457): Ceres Seq. ID no. 13623194
MSALQAIVSCDEERVKLEKEAEILAAQDDGGGEALERVYERLDAMDAGTAEKRAAEILFGLGFDKQMQAKKTKDFSGGWRMRIALARALFMNPTILLLDEPTNHLDLEACVWLEETLKKFDRILVVISHSQDFLNGVCTNIIHMQNKKLKLYTGNYDQYVQTRSDLEENQMKQYKWEQEQIASMKEYIARFGHGSAKLARQAQSKEKTLAKMERGGLTEKVVRDRVLVFRFTDVGKLPPPVLQFVEVKFGYTPDNLIYKSLDFGVDLDSRIALVGPNGAGKSTLLKLMTGDLAPLDGMVRRHNHLRIAQYHQHLADKLDLDMPALAYMMKEYPGTEEEKMRAAVGRFGLSGKAQVMPMRNLSDGQRSRVIFAWLAYRQPQLLLLDEPTNHLDIETIDSLAEALNEWDGGLVLVSHDFRLINQVAQEIWVCENQAVTRWEGDIMDFKAHLKSKAGLSD

SEQ ID NO: 1289 - protein, 413 aa, Zea mays subsp. mays
  peptide (1)..(413): Ceres Seq. ID no. 13623195
MDAGTAEKRAAEILFGLGFDKQMQAKKTKDFSGGWRMRIALARALFMNPTILLLDEPTNHLDLEACVWLEETLKKFDRILVVISHSQDFLNGVCTNIIHMQNKKLKLYTGNYDQYVQTRSDLEENQMKQYKWEQEQIASMKEYIARFGHGSAKLARQAQSKEKTLAKMERGGLTEKVVRDRVLVFRFTDVGKLPPPVLQFVEVKFGYTPDNLIYKSLDFGVDLDSRIALVGPNGAGKSTLLKLMTGDLAPLDGMVRRHNHLRIAQYHQHLADKLDLDMPALAYMMKEYPGTEEEKMRAAVGRFGLSGKAQVMPMRNLSDGQRSRVIFAWLAYRQPQLLLLDEPTNHLDIETIDSLAEALNEWDGGLVLVSHDFRLINQVAQEIWVCENQAVTRWEGDIMDFKAHLKSKAGLSD

SEQ ID NO: 1290 - DNA, 1645 bp, Zea mays subsp. mays
  misc_feature (1)..(1645): Ceres Seq. ID no. 15224641
agatgtgaggctaacattttcaaatgctatgaagtataatcctccaggcaatgatgtgcatatttttgctaaagaattgaatgaaatgtttgattcagaatgggaatcagtagaaaggaaatttagaggccgaaaccttggtcaagaccagcagacaatgaaggccataaaagttcgagctatgatggattcaaagtctacagttgctagagggccggttgcatgctcaaaccctaaaactttggttgctagaggtccagtagcttgctcaaattcgattgcaaagaagacactgacagatgcattatcctccaaagtaaaaatcaaattttccgtgcgcagctctgcgcatacctcttccaaagatatactcgttcaagcagctggtagcaaagaggggtccttaaatcactctgtccctactggcaacaaagaggcatcttcaaattgtactattcctatcgctaaggaggctaaaatatcaagggcacgagaaattgagcgctgctctggttcaattggaaaacaatcatggtcttgcaatgacacttctacttcacctctcgcttcctctgtgcaaggtgaggaaagttaccttcatgatgaacctttgtcaccaagcagggctcttcgtgcagcaatgctcaggagtcgttttgctgggactatagtgaaggctcaacagaaggcacttctagatcatgggaagaatatagaccctgtgaaattgcaattggaaaaggagaggctggaaaagaggcagcaagaagagaaagcaaggatcgaggcccaggtgaaggctgctgaagcagctgcacaacaaaagtttgaggaagaaatgaggatgaagagaaagcaggaaagggaggcagcacgcctggcactacgcatgatgaagaagactgttgatattgacaacagtgacttcctaaaggagctggagaacttcagcaaaacatggcaggcaaatccacctggcaaattaatcgtggattttatcagtggggacttgccaccggggttagggagtccgctggagaggctcggcctcttcatgaaggaagatttcgaggatgaggtagaacaggaaatggaggacagagtgtcaccctcaatggatgttgacatcaggaaagatttccaggaagacttaggacatgaaatgcaggacagtgcatcacccgtgactgtcattggcacaaagaatgacgtacagggagtggcaggacatgaaatggaggacagcggatcaccagccacagtcattgacacgaagaaagaagagacagaacatgagatggtggacagcgtatcacctttgatggatgttgacaaggaggaaggggagatcagctgctgacggtagctacacctctcttcacccgcataatttattgaggcagacatccttgcttggttgttagattaggcaatttcataagcagagtgatgcagaaacattagttttatctgctttcatcgtagaaccatgtggtgtggagaacatgtctcagacgaaatgacgagtggttttggatttgctgcggattttaattttcgtggtcttgtcagtctggcaagagtatgatgactctgtatgttgaatttgacctcccccgctggatgacatgtataaaaggatgag

SEQ ID NO: 1291 - protein, 452 aa, Zea mays subsp. mays
  peptide (1)..(452): Ceres Seq. ID no. 15224642
DVRLTFSNAMKYNPPGNDVHIFAKELNEMFDSEWESVERKFRGRNLGQDQQTMKAIKVRAMMDSKSTVARGPVACSNPKTLVARGPVACSNSIAKKTLTDALSSKVKIKFSVRSSAHTSSKDILVQAAGSKEGSLNHSVPTGNKEASSNCTIPIAKEAKISRAREIERCSGSIGKQSWSCNDTSTSPLASSVQGEESYLHDEPLSPSRALRAAMLRSRFAGTIVKAQQKALLDHGKNIDPVKLQLEKERLEKRQQEEKARIEAQVKAAEAAAQQKFEEEMRMKRKQEREAARLALRMMKKTVDIDNSDFLKELENFSKTWQANPPGKLIVDFISGDLPPGLGSPLERLGLFMKEDFEDEVEQEMEDRVSPSMDVDIRKDFQEDLGHEMQDSASPVTVIGTKNDVQGVAGHEMEDSGSPATVIDTKKEETEHEMVDSVSPLMDVDKEEGEISC

SEQ ID NO: 1292 - protein, 443 aa, Zea mays subsp. mays
  peptide (1)..(443): Ceres Seq. ID no. 15224643
MKYNPPGNDVHIFAKELNEMFDSEWESVERKFRGRNLGQDQQTMKAIKVRAMMDSKSTVARGPVACSNPKTLVARGPVACSNSIAKKTLTDALSSKVKIKFSVRSSAHTSSKDILVQAAGSKEGSLNHSVPTGNKEASSNCTIPIAKEAKISRAREIERCSGSIGKQSWSCNDTSTSPLASSVQGEESYLHDEPLSPSRALRAAMLRSRFAGTIVKAQQKALLDHGKNIDPVKLQLEKERLEKRQQEEKARIEAQVKAAEAAAQQKFEEEMRMKRKQEREAARLALRMMKKTVDIDNSDFLKELENFSKTWQANPPGKLIVDFISGDLPPGLGSPLERLGLFMKEDFEDEVEQEMEDRVSPSMDVDIRKDFQEDLGHEMQDSASPVTVIGTKNDVQGVAGHEMEDSGSPATVIDTKKEETEHEMVDSVSPLMDVDKEEGEISC

SEQ ID NO: 1293 - protein, 424 aa, Zea mays subsp. mays
  peptide (1)..(424): Ceres Seq. ID no. 15224644
MFDSEWESVERKFRGRNLGQDQQTMKAIKVRAMMDSKSTVARGPVACSNPKTLVARGPVACSNSIAKKTLTDALSSKVKIKFSVRSSAHTSSKDILVQAAGSKEGSLNHSVPTGNKEASSNCTIPIAKEAKISRAREIERCSGSIGKQSWSCNDTSTSPLASSVQGEESYLHDEPLSPSRALRAAMLRSRFAGTIVKAQQKALLDHGKNIDPVKLQLEKERLEKRQQEEKARIEAQVKAAEAAAQQKFEEEMRMKRKQEREAARLALRMMKKTVDIDNSDFLKELENFSKTWQANPPGKLIVDFISGDLPPGLGSPLERLGLFMKEDFEDEVEQEMEDRVSPSMDVDIRKDFQEDLGHEMQDSASPVTVIGTKNDVQGVAGHEMEDSGSPATVIDTKKEETEHEMVDSVSPLMDVDKEEGEISC

SEQ ID NO: 1294 - DNA, 2398 bp, Zea mays subsp. mays
  misc_feature (1)..(2398): Ceres Seq. ID no. 15226167
atggtatagatcgagccacagaggttagataaaagatcaacactaaaggcagtaattacatgatgccatgatcatataagcaaagattaatttaatctactatgaagcagcaaaaacgagtgtttattccaagaatttgtagggaggtattaaaaaatacataaaatatatatgcttagtcgataaagaagctttttatacttataaaatatttatacctagattggttttgtctaggtttgtcctcagccaaacctttttagcttttactgtcgacatctaaaattttacatagattgacaatacaagcaaggttgttgacattcctaaattcattgtgaaaactacttttatgatatataactcttccattgaatataatatatttttatggatgctgccagacaaaattagagtagctagtttgagtttggacaaacttagatggacctacatctgtgatcggatgaagtaatttattcaatctttacattgaatttcacttattatttcaactatagctgagttggactccttttcttttttttaaaaaaaaacattgactaaatttggatttcacctttttattctattaacttatatgtaccaaatattacagctcctggatgacagagcagataagaagcgtgcaggcttcatcgttctcatttcggatggtctagacggccagttcaaatggggagatgagagtatcacccccacggatcccatccgaggcctcctccgaaagtacccagtccacacctttggtttgggcaaggctcacgacccaagggcactgcactatatcgctaacatatcctacggaatctattcctccatcaccgacaacctcgagaacaagatcatagaggcatttgccgtctgcttagctgggttcaagaccgtagtagccgtcgacgtctgtgttgacatcaggtcaagcagtttgctgataacaaagatcgactctgggggttacatactccgggggagtaccggaggcatcttggttggcacactctatgctggggaggtgaaggacttcattgtctacttttcatatcataccgggagttggtcgagtggttaccatacaactttgaatgggattgctgctagtgtcacgtacaaggaagcgccgggcaggcagtcaactgccactgactcttgctcagtgtcactcccgattcacgtgaccgacaccgtgtatcctcctgaaaacccctgcccaccctaccccatggtcctgcagcagatggtgcggttcaaggtgctagacttgcttataagcgtcctgaaagaattcctggtcctgaagggggaggctgctagtgccgtccacgggaaggaaggaggagatgacccggtcttgcaggccatcgcagcgagcttgctgcagaggaagtggaaagagttcaagcagtccgatgaatcctggaaagaagccccgaggaacttccttgacctgggaggcatcgacaaggacatcaacaccatggtggatatcctggagcagggcttgggtgttggatgcatccactcatggctgtcgagctatcagatgcagcgcgcgacaattacaggcttgccaggatctcacatggttgcaaccggccaattccgcacgccagcgatgaacgcaatggtccaggaggcccataggcatttggccaaggaagcatctgcccaagatgcggggacgtcaattgtctgcaagcgcgccgttgagcttctagatggggtcaacaagcgattcgacctctggtgcaagctggaccatgacttgccgcgcactaaccaaccgtcatcgcaccaagaagaaggccatgagtcccgcgacatcaccgacgtcctgcatgggaacatcaaccgagcgaggcagcatgacatatacatggtacgtatatacatatctatggatctgaattcattaaggtcccattctgtgtttgtcttggatgcaggctgccgatcacgcgatcaagcaatggcggagcttcctcacatccgtggagaagacacatggccatgggccggacaagtaggcgcatgatgaggccaccggcagctaccacaaaccccagaacacagcgtgagtggtgttgtgtcgatgcagactcagacatactacaccatataaataaataaatttaatgagcgagaggccctgacaccagtgcctccgccgactccctccgatcctgagaataatatttgtgcgtactgtccctccgtcctcatggccattatattggtcatttgatttcccgtgtgttcactactgttgttctctaattactagtcctgatcagttccggacgactaagctgtaataatgtatcttttattttcttttttatattaatataaaagaccatatgtgtatgcgtcggtc

SEQ ID NO: 1295 - protein, 484 aa, Zea mays subsp. mays
  peptide (1)..(484): Ceres Seq. ID no. 15226168
MYQILQLLDDRADKKRAGFIVLISDGLDGQFKWGDESITPTDPIRGLLRKYPVHTFGLGKAHDPRALHYIANISYGIYSSITDNLENKIIEAFAVCLAGFKTVVAVDVCVDIRSSSLLITKIDSGGYILRGSTGGILVGTLYAGEVKDFIVYFSYHTGSWSSGYHTTLNGIAASVTYKEAPGRQSTATDSCSVSLPIHVTDTVYPPENPCPPYPMVLQQMVRFKVLDLLISVLKEFLVLKGEAASAVHGKEGGDDPVLQAIAASLLQRKWKEFKQSDESWKEAPRNFLDLGGIDKDINTMVDILEQGLGVGCIHSWLSSYQMQRATITGLPGSHMVATGQFRTPAMNAMVQEAHRHLAKEASAQDAGTSIVCKRAVELLDGVNKRFDLWCKLDHDLPRTNQPSSHQEEGHESRDITDVLHGNINRARQHDIYMVRIYISMDLNSLRSHSVFVLDAGCRSRDQAMAELPHIRGEDTWPWAGQVGA

SEQ ID NO: 1296 - protein, 270 aa, Zea mays subsp. mays
  peptide (1)..(270): Ceres Seq. ID no. 15226169
MVLQQMVRFKVLDLLISVLKEFLVLKGEAASAVHGKEGGDDPVLQAIAASLLQRKWKEFKQSDESWKEAPRNFLDLGGIDKDINTMVDILEQGLGVGCIHSWLSSYQMQRATITGLPGSHMVATGQFRTPAMNAMVQEAHRHLAKEASAQDAGTSIVCKRAVELLDGVNKRFDLWCKLDHDLPRTNQPSSHQEEGHESRDITDVLHGNINRARQHDIYMVRIYISMDLNSLRSHSVFVLDAGCRSRDQAMAELPHIRGEDTWPWAGQVGA

SEQ ID NO: 1297 - protein, 265 aa, Zea mays subsp. mays
  peptide (1)..(265): Ceres Seq. ID no. 15226170
MVRFKVLDLLISVLKEFLVLKGEAASAVHGKEGGDDPVLQAIAASLLQRKWKEFKQSDESWKEAPRNFLDLGGIDKDINTMVDILEQGLGVGCIHSWLSSYQMQRATITGLPGSHMVATGQFRTPAMNAMVQEAHRHLAKEASAQDAGTSIVCKRAVELLDGVNKRFDLWCKLDHDLPRTNQPSSHQEEGHESRDITDVLHGNINRARQHDIYMVRIYISMDLNSLRSHSVFVLDAGCRSRDQAMAELPHIRGEDTWPWAGQVGA

SEQ ID NO: 1298 - DNA, 614 bp, Zea mays subsp. mays
  misc_feature (1)..(614): Ceres Seq. ID no. 13623460
gcgcctgccgccggccaagttttgtccctctccctcgtccggttcggatcgtcgtcgccagccaggtgctggatccgtagcggcggcggcggccatggacaagagcatgctcggcgacctggatggcctccccgaggaggacaagatgtggatggccgccatgatcgaccagctccagatccacgacaggttcatgctataccaacgcatctcgtgggtggagcagggccgctgcttcgtggtgtggaagcccgtggagctggcgcgcgacctcctcccgctccacttcaagcactacaacttctcctttgtccgccagctcaacacctacgtgagtacatcaaaaacacactcgtccatctatacatcatatgttctgttggtgactgagattgttgttgcaaaacaaaggtctgctttggttcgatcagtgtgtcttttgtttatgtccaatgaaactgatggaagaaaaaagcctctcgatcggcggtgtcagagttgcctgtgacgatgtaaaaaacatgctagatgtagcaatgactaaacctgtgatgatggcatagttgtgcagaaagatttgacagggttgtgggatgttaatcttaatggaaagg

SEQ ID NO: 1299 - protein, 168 aa, Zea mays subsp. mays
  peptide (1)..(168): Ceres Seq. ID no. 13623461
RLPPAKFCPSPSSGSDRRRQPGAGSVAAAAAMDKSMLGDLDGLPEEDKMWMAAMIDQLQIHDRFMLYQRISWVEQGRCFVVWKPVELARDLLPLHFKHYNFSFVRQLNTYVSTSKTHSSIYTSYVLLVTEIVVAKQRSALVRSVCLLFMSNETDGRKKPLDRRCQSCL

SEQ ID NO: 1300 - protein, 137 aa, Zea mays subsp. mays
  peptide (1)..(137): Ceres Seq. ID no. 13623462
MDKSMLGDLDGLPEEDKMWMAAMIDQLQIHDRFMLYQRISWVEQGRCFVVWKPVELARDLLPLHFKHYNFSFVRQLNTYVSTSKTHSSIYTSYVLLVTEIVVAKQRSALVRSVCLLFMSNETDGRKKPLDRRCQSCL

SEQ ID NO: 1301 - protein, 133 aa, Zea mays subsp. mays
  peptide (1)..(133): Ceres Seq. ID no. 13623463
MLGDLDGLPEEDKMWMAAMIDQLQIHDRFMLYQRISWVEQGRCFVVWKPVELARDLLPLHFKHYNFSFVRQLNTYVSTSKTHSSIYTSYVLLVTEIVVAKQRSALVRSVCLLFMSNETDGRKKPLDRRCQSCL

SEQ ID NO: 1302 - DNA, 1208 bp, Zea mays subsp. mays
  misc_feature (1)..(1208): Ceres Seq. ID no. 15226728
gctcactagtcccccccccccgatcttcttaataagttggcgcaaggatacgaaggaagcactgaagaaagccagtttgaagacatgaaggattctgatccagttatggatgagttctatcgtagttgtgaattcccatcggttcctgacagtgaacctgagaccgtgtcttctgcgaaaccatactgctcagcgcccatccaagatgtgttacatgtacaaacagaagaacctcctagtaaaatagtgaaatccgattctagttcatcggatgagattaagaggataatggatggttcaaaccattatgaagttttgggtgtgcctcgtaatagaagcattgaccaaaaggccctgaaaaaagaatatcacagaatggtcctgcttgtacatcctgataaaaatatgggaaatccattggcttgtgaatctttcaaaaagcttcagtcagcttatgaggtcctctctgatttcacaaagaaaaacagctatgatcagcaactgaggaaagaagaatcacagaaaatgaccccaagatcacgtgctgtctcgcaacagagtggtgtagagtttctctcagaagagtccagacgcatacagtgcactaagtgtggtaatttccatatatggatatgcacgaagagaagcaaaacaaaagcaagattctgtcagggctgcgatcggtttcatcaagccaaggatggagatggatgggttgaaaccagattttcatcctccatcaagatggaaataccacgagcctttgtttgtgccgagagcaaaatatttgatgtgtctgagtgggctacctgccagggaatggagtgtaagcctaacactcacggtccaacttttatggtaaacatggtcggcgcagataggatgcctcagagatcctacagttcccggtatcccttcagcttggacgcagagatgatccccgacgatgaattcgagatgtggcttcagcaggcactggcgtcaggcgtcttcgctgacagcccgaagcgcaggaaaagctggagcccgttcaaactgcctcaaaagggaattaaaagttggcgaaggtcgtcatgagggtgtggcattatgcagcagctggggtctaggcggctacagcattggaaagaaggcgacaatacaaggcttcatgggtgtaaatagactgaccaacaatttgcctggatggataactaatttttgttccg

SEQ ID NO: 1303 - protein, 330 aa, Zea mays subsp. mays
  peptide (1)..(330): Ceres Seq. ID no. 15226729
MKDSDPVMDEFYRSCEFPSVPDSEPETVSSAKPYCSAPIQDVLHVQTEEPPSKIVKSDSSSSDEIKRIMDGSNHYEVLGVPRNRSIDQKALKKEYHRMVLLVHPDKNMGNPLACESFKKLQSAYEVLSDFTKKNSYDQQLRKEESQKMTPRSRAVSQQSGVEFLSEESRRIQCTKCGNFHIWICTKRSKTKARFCQGCDRFHQAKDGDGWVETRFSSSIKMEIPRAFVCAESKIFDVSEWATCQGMECKPNTHGPTFMVNMVGADRMPQRSYSSRYPFSLDAEMIPDDEFEMWLQQALASGVFADSPKRRKSWSPFKLPQKGIKSWRRSS

SEQ ID NO: 1304 - protein, 323 aa, Zea mays subsp. mays
  peptide (1)..(323): Ceres Seq. ID no. 15226730
MDEFYRSCEFPSVPDSEPETVSSAKPYCSAPIQDVLHVQTEEPPSKIVKSDSSSSDEIKRIMDGSNHYEVLGVPRNRSIDQKALKKEYHRMVLLVHPDKNMGNPLACESFKKLQSAYEVLSDFTKKNSYDQQLRKEESQKMTPRSRAVSQQSGVEFLSEESRRIQCTKCGNFHIWICTKRSKTKARFCQGCDRFHQAKDGDGWVETRFSSSIKMEIPRAFVCAESKIFDVSEWATCQGMECKPNTHGPTFMVNMVGADRMPQRSYSSRYPFSLDAEMIPDDEFEMWLQQALASGVFADSPKRRKSWSPFKLPQKGIKSWRRSS

SEQ ID NO: 1305 - protein, 262 aa, Zea mays subsp. mays
  peptide (1)..(262): Ceres Seq. ID no. 15226731
MDGSNHYEVLGVPRNRSIDQKALKKEYHRMVLLVHPDKNMGNPLACESFKKLQSAYEVLSDFTKKNSYDQQLRKEESQKMTPRSRAVSQQSGVEFLSEESRRIQCTKCGNFHIWICTKRSKTKARFCQGCDRFHQAKDGDGWVETRFSSSIKMEIPRAFVCAESKIFDVSEWATCQGMECKPNTHGPTFMVNMVGADRMPQRSYSSRYPFSLDAEMIPDDEFEMWLQQALASGVFADSPKRRKSWSPFKLPQKGIKSWRRSS

SEQ ID NO: 1306 - DNA, 2289 bp, Zea mays subsp. mays
  misc_feature (1)..(2289): Ceres Seq. ID no. 15226012
cccccccccccccccccccctttttcatctttgattttatctgaacagagacttgaactcgctatcaactttcagtagacctgctaaggagcgatctctgtccaattatcaaccagtgaatttatgccctgtaccatgaatagagatagtcaagaaattagactatttcaagttcagcgagagggactatatggcactggaggcgtctttcttagagtgattgaaaatacaatctacctcaaaactaataacatcgtcagagggaggaagatcagcttgcgtattggtgaagagaggatccttggttgaaagtgatgtttctccatatctttataaggttaaggaagagcagttggggttcttgtgaaacgtagattgtatgaggtctataaatttttatgctctatcattacttgaatgaatcatgtatcactggcaagcaacttcagctcatactctgtaggaattctaattcacattgcattctatttaattgtttgttttatgttccgttcacacgaccatgatttttgtttgcacaaatcactatatatatcctcgttgaattaaaagtccagcttttgtgtcataagcatattgtctatttccccttttggctattgcaaatagcaagtatagtttgttgtttaaatgttagtctattctgtttcaagaaaaaaagaatgcgccatcgctggggatgggtacgatgatcaagatcgtcgaacgacgaagggcaccgaggtgttcgtcagcgggttgccaatgtcgaccacggaaagcatgctcctctctcatctccacaccgtgcagtagctgctgcccgtagcatgtaatgcaatggaatgagttatcaaggcaactaacactgaacatagttcttgggctccttggcagcgtcgaggcatggtatctgcccacgccattgtcagggcctcctgagggtacccatgctcgacctacttcatcaaagatgtggtatggacaaatatacatgccactttccagatgaagtgaagagaccaaatgtggatgtcaatcaatctctagatgaaggaatgaaaggaaggagctaagttattgcactggatgtacggggtctagaaaaggtgtcactttgatgccatttattagtgctgttgtacaaaagaaaaggttgaattgatgaattcatgggctaccttataaaataaaactatattgaattcatgtgatcttgtgattttatgtaagactatcctataaataaaaactatgatttcactgtcttctctatgttgtagctagcagtgcaagcatagaacctatgaaacatggatacttggttacaaaattcaactttcagtcaagttttgttcaacaagggtctgattgagacttccatgaaactgatcgatttgtcgttgctgtcatgtatgtgaacttatggtttagaagcagctaagtttccaacatgttacatggtagggaatgtatttgctaacactatttgctagcactacaagttccgtatgccctatgtgatagatggaaagattgaatgaagggctgtcattatttgatgcaatactgattgttccaatgtttcaaattgtttggaccttcttctctatttgtacaggatttgtttactttcaagaatatcaagtatttgatacgctcaggataattatgtgtgtgttaggcatgacatttgtctttgttgggatctccttgctagcacccgatgacagtaaaggaaagatggttcaagcacctccgaggactccataattgacatagacagaaatggaaagatgccgatggaggagacagacacagatgatagcatctcctttgttacttctgtaaaatctgcatgctccatgtcccttggccttggggagagcaccataagcgcttcatcggtgcttgccatgcttatggtctcgtcaagaacgaacaaccggcttcagaggaatcggaaatgaccgtccaaagtatgcccctttaagaaccactgattggagtaacctatagccgatggtaatatataggtacacaggaaaggtctttgttttttatgttgcctagcgaatggcagtgaagtttttttgttgcttccaaaggcacaactgtttgttgtgatcgtagctagctataacacgagtgtatagttcaccgttgtacccttcaaaacactgtccatacctagctgcatatacatgtgtaagttttagaatacaacaaatttttggaagattaagattagatggagtagcatttgtcagcttttagcttgttgctact

SEQ ID NO: 1307 - protein, 81 aa, Zea mays subsp. mays
  peptide (1)..(81): Ceres Seq. ID no. 15226013
MERLNEGLSLFDAILIVPMFQIVWTFFSICTGFVYFQEYQVFDTLRIIMCVLGMTFVFVGISLLAPDDSKGKMVQAPPRTP

SEQ ID NO: 1308 - protein, 63 aa, Zea mays subsp. mays
  peptide (1)..(63): Ceres Seq. ID no. 15226014
MFQIVWTFFSICTGFVYFQEYQVFDTLRIIMCVLGMTFVFVGISLLAPDDSKGKMVQAPPRTP

SEQ ID NO: 1309 - protein, 61 aa, Zea mays subsp. mays
  peptide (1)..(61): Ceres Seq. ID no. 15226015
MPCTMNRDSQEIRLFQVQREGLYGTGGVFLRVIENTIYLKTNNIVRGRKISLRIGEERILG

SEQ ID NO: 1310 - protein, 54 aa, Zea mays subsp. mays
  peptide (1)..(54): Ceres Seq. ID no. 15226016
MLVYSVSRKKECAIAGDGYDDQDRRTTKGTEVFVSGLPMSTTESMLLSHLHTVQ

SEQ ID NO: 1311 - DNA, 1912 bp, Zea mays subsp. mays
  misc_feature (1)..(1912): Ceres Seq. ID no. 15225748
tcacctgtacgggcgacttcacctgcacgggcgcatccttcagccgatccgaagacaccatgcctccagggaggaagggaatacgaagcacaagggaacccccaccagaaatcacttctactgagtatgagaaacaaagggcagcaaatgtgatgaggaacaatcagatgttccaacggcttgggattaatcagttacgcacaatgatgactgctacaagagtaaagagcaaatatgatggtccagaggaatcagggtctttgtttgatggcgaggatagtgaaggctctgagccagaggaggattcccatgttgcacaaggtgtacgtagccacaacccaactcatgttgctgacaaacctacacaacaaacacgaggttctaaaagggttgtggcccctgatgttcatggacaacagattagattcactaggcaaaggagtgctgccataaatcaacaatcctccctaagcctaactactactacacaagctggttcaagagccaccacaaaccaagaatccacccaaaacttggctgctgcaacacaatttacttcaagtgttgccactgagcaagattacaccgcaggcctgactactactgcacaacctacttctcccacacaagctgaggtcactgaccacaatagagatgaagaattggtaccaaggcaaagaagtaggggcaaacaacttgaatccttgagcagagggttaggcactaagattccaatccaaatctctaatgggaagcgaaggccagagccacctattcaggctgcaaagtttgcatcggagggtgggatcatattgaggcaacacattccaatatttccgcactggaaggagtacaagaagcaagagaacgagggtaaaattacagactacattgggaagcttgctggtcaattcaccatggatgttgagagtaatgcagtaaaagatgcatgtgttgatatgctaaagggtggacagcgccaaatgaggtataggctgaaaaaaaagtacttcactggagttcctgcaaatcaagtgaggactacatcacctgtttcatgtatgactgatgatcaatggagagagttggtacaaatgtggtctagcccaaaccacaagaacaattgtgtgaagaacaaacttaatcgtgagaaggtgcaatttccacagtgcacaggatctcaatcatatgttgcaaaagcttatgtagtgagacaagaaaaatataaagatgtcgaacctagtgcaattgatcttttcaaggagatgcattgcagcaagaaaaaaggatttagtgaagttgttcagaaagccataggtgatatggaagcaatggtggcaacaccagctgaagatggacagcttgcaaagtctgcaacagaagttgtttccaatgtactgccgggttcaagtaaatttcttcacaatgctggccttttgccctcctccaagagaagcaacacagggactgtttcagcaagaatgcaagagcttcagtctcaattggacaatgagaggcgagaaaaagatggacttcgagaagatatggataccttaaaagccaagtcacaatcatctgaggcaaccattgctaatcaatcaactgagattgcagatttaaagaagtccttagcagaaaatagcatcctacttcgacagatattaagtattagtcgtgatcagctgaatccttaagcatgcttgctaagatgctggtgtcaaccatcctgaatacacatctcacaaaactgtggacctctttttatccttatgtttgctatatggaactgcaacttacagtctattatatgtgttctcttgctatagagttttagtacttgtctggttaaagaattatgaaccatgttcctttgtgtgttggacatattatgcttgaaatatatggatgttgg

SEQ ID NO: 1312 - protein, 563 aa, Zea mays subsp. mays
  peptide (1)..(563): Ceres Seq. ID no. 15225749
TCTGDFTCTGASFSRSEDTMPPGRKGIRSTREPPPEITSTEYEKQRAANVMRNNQMFQRLGINQLRTMMTATRVKSKYDGPEESGSLFDGEDSEGSEPEEDSHVAQGVRSHNPTHVADKPTQQTRGSKRVVAPDVHGQQIRFTRQRSAAINQQSSLSLTTTTQAGSRATTNQESTQNLAAATQFTSSVATEQDYTAGLTTTAQPTSPTQAEVTDHNRDEELVPRQRSRGKQLESLSRGLGTKIPIQISNGKRRPEPPIQAAKFASEGGIILRQHIPIFPHWKEYKKQENEGKITDYIGKLAGQFTMDVESNAVKDACVDMLKGGQRQMRYRLKKKYFTGVPANQVRTTSPVSCMTDDQWRELVQMWSSPNHKNNCVKNKLNREKVQFPQCTGSQSYVAKAYVVRQEKYKDVEPSAIDLFKEMHCSKKKGFSEVVQKAIGDMEAMVATPAEDGQLAKSATEVVSNVLPGSSKFLHNAGLLPSSKRSNTGTVSARMQELQSQLDNERREKDGLREDMDTLKAKSQSSEATIANQSTEIADLKKSLAENSILLRQILSISRDQLNP

SEQ ID NO: 1313 - protein, 544 aa, Zea mays subsp. mays
  peptide (1)..(544): Ceres Seq. ID no. 15225750
MPPGRKGIRSTREPPPEITSTEYEKQRAANVMRNNQMFQRLGINQLRTMMTATRVKSKYDGPEESGSLFDGEDSEGSEPEEDSHVAQGVRSHNPTHVADKPTQQTRGSKRVVAPDVHGQQIRFTRQRSAAINQQSSLSLTTTTQAGSRATTNQESTQNLAAATQFTSSVATEQDYTAGLTTTAQPTSPTQAEVTDHNRDEELVPRQRSRGKQLESLSRGLGTKIPIQISNGKRRPEPPIQAAKFASEGGIILRQHIPIFPHWKEYKKQENEGKITDYIGKLAGQFTMDVESNAVKDACVDMLKGGQRQMRYRLKKKYFTGVPANQVRTTSPVSCMTDDQWRELVQMWSSPNHKNNCVKNKLNREKVQFPQCTGSQSYVAKAYVVRQEKYKDVEPSAIDLFKEMHCSKKKGFSEVVQKAIGDMEAMVATPAEDGQLAKSATEVVSNVLPGSSKFLHNAGLLPSSKRSNTGTVSARMQELQSQLDNERREKDGLREDMDTLKAKSQSSEATIANQSTEIADLKKSLAENSILLRQILSISRDQLNP

SEQ ID NO: 1314 - protein, 513 aa, Zea mays subsp. mays
  peptide (1)..(513): Ceres Seq. ID no. 15225751
MRNNQMFQRLGINQLRTMMTATRVKSKYDGPEESGSLFDGEDSEGSEPEEDSHVAQGVRSHNPTHVADKPTQQTRGSKRVVAPDVHGQQIRFTRQRSAAINQQSSLSLTTTTQAGSRATTNQESTQNLAAATQFTSSVATEQDYTAGLTTTAQPTSPTQAEVTDHNRDEELVPRQRSRGKQLESLSRGLGTKIPIQISNGKRRPEPPIQAAKFASEGGIILRQHIPIFPHWKEYKKQENEGKITDYIGKLAGQFTMDVESNAVKDACVDMLKGGQRQMRYRLKKKYFTGVPANQVRTTSPVSCMTDDQWRELVQMWSSPNHKNNCVKNKLNREKVQFPQCTGSQSYVAKAYVVRQEKYKDVEPSAIDLFKEMHCSKKKGFSEVVQKAIGDMEAMVATPAEDGQLAKSATEVVSNVLPGSSKFLHNAGLLPSSKRSNTGTVSARMQELQSQLDNERREKDGLREDMDTLKAKSQSSEATIANQSTEIADLKKSLAENSILLRQILSISRDQLNP

SEQ ID NO: 1315 - DNA, 1575 bp, Zea mays subsp. mays
  misc_feature (1)..(1575): Ceres Seq. ID no. 13599832
gaggagagagagagctcactagtcccccccccccccccccccccgatggattaagaagcagtgattgttggttgctgttgaaggaagttgctttgggtggagaaaccatggattttccacctgagttgcaagaggttgcaggaactcttgttgcaatggtgaagggttcacctttagctgctaaagctattgggcaaatggcaaggagcaccaggagcacacggaaatggagaaccctggtgaacacagaaattagtaatgatatcattatctcttcatccaactcagttataaacacttgccaggtcatctccagcgctgctttgcatactgcagcatatttccatcaacttggaggttcagtcgctctcagttggtcaatatgtggatagctctcggtttcattcaatcatcagcagaagggaaagggctggaagaattagggcaaaaatactttgatgatctcctatcacgatccttctttggtactgcaaataaagaccagcaaacatattacttccttgatgacctaatgcacattttggcacagcacttctctgctcatgattgtatgaaaatcaacgagggcatccctgttgtgattccaccaacagttcgtcatctgtctgtttcaaccgattatttaccacagctgaagagcaaatacaggttgggaaggcttcaaacattgttagtcctcagaagctcgtcattatcttcaggtcatttgcctagaaaacttctggccaaatttaagaacttgcgggtcctggatctgagtggatctgatattgtagaattgccagaaagcattaatcagttggtacatcttcattacctagctatctgcagtataactaacaaacttcccaagactatatacatgcttaaacatcttgaggtgtgtgatatacctatattcttatttcatgatgatcatcctagaggtgttggtaaatctgttacagttaaacgtctcaaaacatgctgtggcaagcaggcaagatcagttaagtccttgattgatgtgtaaggactgttataggaattggattaaccttcacgacttattagtcattcgatcagccgatgtctgactttcagaatcaaattttacagtaatcccagcagcaggcatgaagtgcaatttttcttttcaattcgacaccttcaagctctagaatccatttctactcagcctgtttatgtgatttggtgtcagaataactccagtttggtggatcaagaatctggttgtgttggtttgtttgatagtcccaggttggtactttgcaacctttcaagccctctttattgcaggactacttggctgttttgcctatccgcaacttatgtatagttattttatttttacttttattttttttatttccatttgtaaggtattccattttggttttcactgccaactggtgcaaacaagaccgttgcaacagggaaaaaatagactatgataccataactaaaaaaaaaaaaaaaaaaactcgagggggggcccggtacccaattcgccctwkttaaacacaataaagttggaactggaggggtgaaagg

SEQ ID NO: 1316 - protein, 216 aa, Zea mays subsp. mays
  peptide (1)..(216): Ceres Seq. ID no. 15218626
MWIALGFIQSSAEGKGLEELGQKYFDDLLSRSFFGTANKDQQTYYFLDDLMHILAQHFSAHDCMKINEGIPVVIPPTVRHLSVSTDYLPQLKSKYRLGRLQTLLVLRSSSLSSGHLPRKLLAKFKNLRVLDLSGSDIVELPESINQLVHLHYLAICSITNKLPKTIYMLKHLEVCDIPIFLFHDDHPRGVGKSVTVKRLKTCCGKQARSVKSLIDV

SEQ ID NO: 1317 - protein, 166 aa, Zea mays subsp. mays
  peptide (1)..(166): Ceres Seq. ID no. 15218627
MHILAQHFSAHDCMKINEGIPVVIPPTVRHLSVSTDYLPQLKSKYRLGRLQTLLVLRSSSLSSGHLPRKLLAKFKNLRVLDLSGSDIVELPESINQLVHLHYLAICSITNKLPKTIYMLKHLEVCDIPIFLFHDDHPRGVGKSVTVKRLKTCCGKQARSVKSLIDV

SEQ ID NO: 1318 - protein, 153 aa, Zea mays subsp. mays
  peptide (1)..(153): Ceres Seq. ID no. 15218628
MKINEGIPVVIPPTVRHLSVSTDYLPQLKSKYRLGRLQTLLVLRSSSLSSGHLPRKLLAKFKNLRVLDLSGSDIVELPESINQLVHLHYLAICSITNKLPKTIYMLKHLEVCDIPIFLFHDDHPRGVGKSVTVKRLKTCCGKQARSVKSLIDV

SEQ ID NO: 1319 - DNA, 2120 bp, Zea mays subsp. mays
  misc_feature (1)..(2120): Ceres Seq. ID no. 13599881
taaatggcttacgcccgaggggcttattcttccttatcatggtatgatataattatcatacaaaaatgttacactgcttttacagggtgtacctcatctatttgcttgtacaattcatcttactactgctttgacaaacattggtctgcactgctttggtctgtgctttaggattctgtttcattgggagaaacaaatgcccttgcttacttttatttatgcttttctgaataattaagaagactagcctcatgttggaatcttcagcgttatatataatacaaaaaaagaggtttgcaatgaaaagttaaaaaggggacttttctccaatacaaggaatcatcttgacagaatataaaacttttcttctaaacatagcatacaatggttttagctgattattgtgtatttcagaagatggtgaattgtgtgaatacttccctagccctttttgctacatcgaggtcttcaggaggaaccttgcttttgacaccaggaatgttgtaagcattacagtatgcaattagttccttctttattaccatatatatgaacttaggtgttcctctactgaccaggcttcagaccaatctggagaagtgtcaggtcatacccatccagttatccatggtcaaacttgcctttgtacaggagattttcagctgtcagattgctcctttcccctgccactacttaggtgttcctctctcaatctacaagcctaaacacagtaaggattaaggagcagccgttgtatacttgtatataattgtggatagaattcccacttggatgggcaacatgctaaatttagctgggcgagctaccttggtgaaggtcacacactctgcaattccgatattcatctccattgacacctgtttgtcggtatgggccattgaacagattgatctgtcaccctactgagcttggtagggtatgccctcatattaaggtgggaatggcttcacataactgacccatatcgtacttggattgatcttctgagtctggcttgatggttcctcaattaagcatgtggctgatctgtgcaactgtgggtagataaattcattggatttttttttgctgaggttgctttttttgcatccgtgtctatgtcgacatagaggcatcattatggtgcatgataataaaaactatttgtaaacctttgttgtacatgcccagattggggaagactttacagtcgataactttactatatacccttctttgtcaaggctttgatgataagccaatggttaaaagggttgtcattgtaacccccacaagcttagttagcaactgggaatctgagataattaagtggttgaaaggcagagtgcaggtgctggccatctgtgaaagcacacgtgctgatgttctttccggaattgaaagtttcttaaaacccttgagccgtctccatgttttcttttgcttactaattatttgttaatatacactatactaaatgaaaatgtagctgcaagttaatgacaatttctgtggtgcatgaataatcttcaggtacttatcatatcttatgagactttccgcatgcattcttcatgcgcgcaccaagtgcgcgcagtgccataccgtggagcgaggtggcgcgcacaggcaggggcccaacctgcacggcctcttcggtcgtcagtcaggcaccaccctcggctaagcctactccacgaccaacaagaacatggtcatcgtctgggaggagggcaccctgtacgactacctcttcaaccccaagaagtacattctaggcacaaagatggtcttcccggggctcaagaagcccaaggaacgaaccgatctcatcgcctacttgacctatcgacgcaacaggggatactcacactgtcatccttagctctgtggcaataagtcgttcgtctgcaacacagccgacagaaaactgagcatgtgcttcagagaccaggcattattgaactttgctgccactaatttacattagatgaactgagttacagcagaatgaatttcctggatcctaaatgcagagaataaataaataaaaatatataaaaggaaaaaaaaaaaaaaaaaaaaaaaaaaaaaaaaaaaaacctcgagggggggcccgg

SEQ ID NO: 1320 - protein, 126 aa, Zea mays subsp. mays
  peptide (1)..(126): Ceres Seq. ID no. 13599882
MNNLQVLIISYETFRMHSSCAHQVRAVPYRGARWRAQAGAQPARPLRSSVRHHPRLSLLHDQQEHGHRLGGGHPVRLPLQPQEVHSRHKDGLPGAQEAQGTNRSHRLLDLSTQQGILTLSSLALWQ

SEQ ID NO: 1321 - protein, 111 aa, Zea mays subsp. mays
  peptide (1)..(111): Ceres Seq. ID no. 13599883
MHSSCAHQVRAVPYRGARWRAQAGAQPARPLRSSVRHHPRLSLLHDQQEHGHRLGGGHPVRLPLQPQEVHSRHKDGLPGAQEAQGTNRSHRLLDLSTQQGILTLSSLALWQ

SEQ ID NO: 1322 - protein, 104 aa, Zea mays subsp. mays
  peptide (1)..(104): Ceres Seq. ID no. 13599884
MIIKTICKPLLYMPRLGKTLQSITLLYTLLCQGFDDKPMVKRVVIVTPTSLVSNWESEIIKWLKGRVQVLAICESTRADVLSGIESFLKPLSRLHVFFCLLIIC

SEQ ID NO: 1323 - DNA, 787 bp, Zea mays subsp. mays
  misc_feature (1)..(787): Ceres Seq. ID no. 13599859
aaatccgatcgatctccgcggcctccagatcccccggcgggcggagacggcgagctccaggcggccaagaagcccccccctcgcagcgctcctctcctctgcctctccgaatcccttaccagggggaaaaaacattgcctgaaagttcttcaggccctggtgtagcagctgaattacccagtttaatggcgaagaacgagctttagatggtctaaagatggagatgagatagaagcaccacaaagtgtacagtggggtagcaaggatatgactgtcatgatgcctcagcgccaccgggctacagccaagaagcccatgtggataatcgtgctcttgtgcatggtttgcatcgtgctgattggggcttacgtcttcccaccgcggcgcttctctaactgctacctctctgcttcaagtgtatgcgcacctttcaaggattggctcccttctatgggccgtcgggagagaactgacgaggagattatttcatctgtagttattagggatatcctttcaatgcccatgcctatgccaaaaaatccaaagattgcccttatgttcttgacaccaggttcattgccctttgagaaattgtgggagaagtttttacagggacatgagggaagatactccatctatgtgcacgcatcacgtgaaaagcctgttcatactagttctttgtttgctggccgggatattcacagtgatgcggtagtatggggattgatttcaatggttgatgctgagaaaagattgttagcgaatgcactggaagatgttgataatc

SEQ ID NO: 1324 - protein, 173 aa, Zea mays subsp. mays
  peptide (1)..(173): Ceres Seq. ID no. 13599860
MTVMMPQRHRATAKKPMWIIVLLCMVCIVLIGAYVFPPRRFSNCYLSASSVCAPFKDWLPSMGRRERTDEEIISSVVIRDILSMPMPMPKNPKIALMFLTPGSLPFEKLWEKFLQGHEGRYSIYVHASREKPVHTSSLFAGRDIHSDAVVWGLISMVDAEKRLLANALEDVDN

SEQ ID NO: 1325 - protein, 170 aa, Zea mays subsp. mays
  peptide (1)..(170): Ceres Seq. ID no. 13599861
MMPQRHRATAKKPMWIIVLLCMVCIVLIGAYVFPPRRFSNCYLSASSVCAPFKDWLPSMGRRERTDEEIISSVVIRDILSMPMPMPKNPKIALMFLTPGSLPFEKLWEKFLQGHEGRYSIYVHASREKPVHTSSLFAGRDIHSDAVVWGLISMVDAEKRLLANALEDVDN

SEQ ID NO: 1326 - protein, 169 aa, Zea mays subsp. mays
  peptide (1)..(169): Ceres Seq. ID no. 13599862
MPQRHRATAKKPMWIIVLLCMVCIVLIGAYVFPPRRFSNCYLSASSVCAPFKDWLPSMGRRERTDEEIISSVVIRDILSMPMPMPKNPKIALMFLTPGSLPFEKLWEKFLQGHEGRYSIYVHASREKPVHTSSLFAGRDIHSDAVVWGLISMVDAEKRLLANALEDVDN

SEQ ID NO: 1327 - DNA, 781 bp, Zea mays subsp. mays
  misc_feature (1)..(781): Ceres Seq. ID no. 14305790
  misc_feature (1)..(781): Ortholog of  Ceres SEQ ID NO 15173164 as cited in SEQ ID NO 64434
gaatatatccatcctaacatccacccacccacacaccagacacacataccttattctccgccgtttcttggcctccggaaatctcctcccccaagttgcaagcatgggcgggttcagcctcagcggcgctacaggtctcgcggcgtaccgcgaggaagacgacgaggagctgttcgagacgtcgtcttcgatctccggcgactccgacgatgagggccaccagctctccgatggagaggggggcgcctatgatttgtcatctgtgatggcacagctccctgtcaagaaagggctatccagatactacgacggcaagtcccagtccttcgcgtgcatgtctgaagtgcgatgcctggaagatctgcgcaagaaagagacgccctacaagaagatcaagacatcaaggagtagcgtcgcgttagacgaagagcaggactgtcatacgccgggtcgtacgaacagcagcagagcgcccggaagttgttgcgcaaacctggtggctcggaacaacggcaaaaacatgctgtacagacctcccccagtccctgtaaacaaaagtggataccgtcagtaggctctaggacattactggatgatatctatccagggtttcacctcttgttttttttccatttttgagggattttgttgacaggcgtattggcctgtctcagatgtaatgtaagagggtttccttctctgctcttagcagagttatctcctatgatcttgtccatgagacattggttcgtgtaaataatagtgatgttgtaaccacttt

SEQ ID NO: 1328 - protein, 190 aa, Zea mays subsp. mays
  peptide (1)..(190): Ceres Seq. ID no. 14305791
NISILTSTHPHTRHTYLILRRFLASGNLLPQVASMGGFSLSGATGLAAYREEDDEELFETSSSISGDSDDEGHQLSDGEGGAYDLSSVMAQLPVKKGLSRYYDGKSQSFACMSEVRCLEDLRKKETPYKKIKTSRSSVALDEEQDCHTPGRTNSSRAPGSCCANLVARNNGKNMLYRPPPVPVNKSGYRQ

SEQ ID NO: 1329 - protein, 156 aa, Zea mays subsp. mays
  peptide (1)..(156): Ceres Seq. ID no. 14305792
MGGFSLSGATGLAAYREEDDEELFETSSSISGDSDDEGHQLSDGEGGAYDLSSVMAQLPVKKGLSRYYDGKSQSFACMSEVRCLEDLRKKETPYKKIKTSRSSVALDEEQDCHTPGRTNSSRAPGSCCANLVARNNGKNMLYRPPPVPVNKSGYRQ

SEQ ID NO: 1330 - protein, 102 aa, Zea mays subsp. mays
  peptide (1)..(102): Ceres Seq. ID no. 14305793
MAQLPVKKGLSRYYDGKSQSFACMSEVRCLEDLRKKETPYKKIKTSRSSVALDEEQDCHTPGRTNSSRAPGSCCANLVARNNGKNMLYRPPPVPVNKSGYRQ

SEQ ID NO: 1331 - DNA, 934 bp, Zea mays subsp. mays
  misc_feature (1)..(934): Ceres Seq. ID no. 13586712
agtccatgacaaggggctcggttagtccacagccctagaggctgcagctgcacacttctcttctctgttttcgccggttaaactttccccacttgttgctggccttcgaatctgtggtttgtttgagcttagcagggaagcgaagaacagggaagcaaggacatggatgctttcagtgcagtgatggacaaggtaaagagccacccagaaatgatggagaaggtcagtgcagtgatggacaaggtgaagaagagccacccagaagcggtggaaaaggtcaaggacgaggtgatgagccttgctgatgctctccatctgcgtagacatggatccaaagataaagaacctgagtctgaagagaaggccgaagaaggcgaggcagcgcagagcgtcgaagaggaggagggtacctctgctgacaagactgcagaacctaatgtgttggagcaggccgtacaggagattcaggctgtcgccgcagctttgcagcagacagcacctgaaactgaaactgaaattccagttgagactgctgctgctgctcctgaaacttcggctgaaggagacaagcctgaagacacaatcagggaggtggagaaagatgacccaaagaagcggctcgatttcgccgggttcttcgccatgctgtttgagaggttctgctccccggccaacaagaagaaagactgagtgattgcaggtcagctgtggatttctcgttttgtgatcttggacgtggaaattacattttacttgatgtatttattgtgggtggtgtacagtctgcacttgtgttctattaagataaatctgctcttgctttttttactttcttttgtgatgacagggcaatgattacattttacttgatgtatttattgtcgcccttgtggaattgatttaatttatgtgaacgattgatttatttagggtt

SEQ ID NO: 1332 - protein, 175 aa, Zea mays subsp. mays
  peptide (1)..(175): Ceres Seq. ID no. 13586713
MDAFSAVMDKVKSHPEMMEKVSAVMDKVKKSHPEAVEKVKDEVMSLADALHLRRHGSKDKEPESEEKAEEGEAAQSVEEEEGTSADKTAEPNVLEQAVQEIQAVAAALQQTAPETETEIPVETAAAAPETSAEGDKPEDTIREVEKDDPKKRLDFAGFFAMLFERFCSPANKKKD

SEQ ID NO: 1333 - protein, 168 aa, Zea mays subsp. mays
  peptide (1)..(168): Ceres Seq. ID no. 13586714
MDKVKSHPEMMEKVSAVMDKVKKSHPEAVEKVKDEVMSLADALHLRRHGSKDKEPESEEKAEEGEAAQSVEEEEGTSADKTAEPNVLEQAVQEIQAVAAALQQTAPETETEIPVETAAAAPETSAEGDKPEDTIREVEKDDPKKRLDFAGFFAMLFERFCSPANKKKD

SEQ ID NO: 1334 - protein, 159 aa, Zea mays subsp. mays
  peptide (1)..(159): Ceres Seq. ID no. 13586715
MMEKVSAVMDKVKKSHPEAVEKVKDEVMSLADALHLRRHGSKDKEPESEEKAEEGEAAQSVEEEEGTSADKTAEPNVLEQAVQEIQAVAAALQQTAPETETEIPVETAAAAPETSAEGDKPEDTIREVEKDDPKKRLDFAGFFAMLFERFCSPANKKKD

SEQ ID NO: 1335 - DNA, 789 bp, Zea mays subsp. mays
  misc_feature (1)..(789): Ceres Seq. ID no. 13599127
acaagaaaccaaaccgtgacgcagcacagccatggggaagcagctctgcgacatgcaccgctcgcgccgccgcgcccgcatcgtcgccgccgccctcctctccgccttcgccgccgccgccgccgcgctcacggtgtacctcgtcttccgtccgctgaagccgcaggcctccgtggtgcgcgtcgccgtgtaccgcatggccacggccgccgggaactcctcggaggggcgggccccgccgccgtacacgctcgcggcgagcgcgcggttcacggcgctgctgcacaacccgagcgaccgcgccgtggtgttctacgacggcctcttcgcctacgtgacgtaccgcggggagatggtggcgccccccgcgccgctgcccggggtggcccagggccgcggcgccgacgtggcgctgtcgccgcatttcggccttcgcggcgcggtgcccgtgccggtgtcggcagacgcggcacaagcgctggagggagactgcgcggcgggccgcgtggagctacgcctcgtcgtcatgggccgggtcaagtacatgagcgggccattcaggaccggatggcgcgggctatacctgcgctgcgatgtcaccgtcggcctcggggtggacgccaccgcgggcgacgacggagccggggacgtgccactgctcgagtaccccaagtgctccgtcgacgcttgagttgatccttgatcggcgcaatgcatgagcgctcagatgatcagattttcagaattctggtggagaataaggaattgggaaaagcatttttctgtgtc

SEQ ID NO: 1336 - protein, 231 aa, Zea mays subsp. mays
  peptide (1)..(231): Ceres Seq. ID no. 13599128
TRNQTVTQHSHGEAALRHAPLAPPRPHRRRRPPLRLRRRRRRAHGVPRLPSAEAAGLRGARRRVPHGHGRRELLGGAGPAAVHARGERAVHGAAAQPERPRRGVLRRPLRLRDVPRGDGGAPRAAARGGPGPRRRRGAVAAFRPSRRGARAGVGRRGTSAGGRLRGGPRGATPRRHGPGQVHERAIQDRMARAIPALRCHRRPRGGRHRGRRRSRGRATARVPQVLRRRLS

SEQ ID NO: 1337 - protein, 219 aa, Zea mays subsp. mays
  peptide (1)..(219): Ceres Seq. ID no. 13599129
MGKQLCDMHRSRRRARIVAAALLSAFAAAAAALTVYLVFRPLKPQASVVRVAVYRMATAAGNSSEGRAPPPYTLAASARFTALLHNPSDRAVVFYDGLFAYVTYRGEMVAPPAPLPGVAQGRGADVALSPHFGLRGAVPVPVSADAAQALEGDCAAGRVELRLVVMGRVKYMSGPFRTGWRGLYLRCDVTVGLGVDATAGDDGAGDVPLLEYPKCSVDA

SEQ ID NO: 1338 - protein, 212 aa, Zea mays subsp. mays
  peptide (1)..(212): Ceres Seq. ID no. 13599130
MHRSRRRARIVAAALLSAFAAAAAALTVYLVFRPLKPQASVVRVAVYRMATAAGNSSEGRAPPPYTLAASARFTALLHNPSDRAVVFYDGLFAYVTYRGEMVAPPAPLPGVAQGRGADVALSPHFGLRGAVPVPVSADAAQALEGDCAAGRVELRLVVMGRVKYMSGPFRTGWRGLYLRCDVTVGLGVDATAGDDGAGDVPLLEYPKCSVDA

SEQ ID NO: 1339 - DNA, 769 bp, Zea mays subsp. mays
  misc_feature (1)..(769): Ceres Seq. ID no. 12589616
  misc_feature (1)..(769): Ortholog of  Ceres SEQ ID NO 14301952 as cited in SEQ ID NO 0
atgcttctttaaattctgctgccattctgctaccgtgggcgtcgtacagcccccgttcccatagaggacagtctgctgccgcaagcctagcttcgtccacctctgaatcaagaaacaaaacaactaggcatggacgaccgcacctacaagggcggcatcaaggcgtactggaagcgccggggctactaccgcatggacggcgacgccgcgcggcgccgccagccgctccccaccgtggagctcggaggtggcgtcgcccaggcccaggcccaggcccagccgccgacgggggatggctcgggccggcgccggtgccgcgggtggcgcgtgcgccgcggccagctggggcggcggctgctccgcgcgctgtcccctcgccggtggctcatgcggctccgcgacgcgtacgtgtccgccatgctgcggctggcctcctcccccgccgtcgggtacggcgccggcgcgcccttttgcgccacggcgacccacggcgcggcggcggcggcggccttcgcgcggccggcgcagctcaaggagtacgacgagaaggtgctggtggagatctacaggtccatactcgcgcgcggcgggcctctcgccggcgcgcctgccgccgccacgctgcggctaccgacggctgtttgagcttgagcggcagaagagacgtgtgttcttcttgcttatttttattcttatgtgtcgcgacttgtactgagttgtaacttgcgtgcgccccacaagctagcgtttcttcttcgttcccaattcg

SEQ ID NO: 1340 - protein, 239 aa, Zea mays subsp. mays
  peptide (1)..(239): Ceres Seq. ID no. 12589617
ASLNSAAILLPWASYSPRSHRGQSAAASLASSTSESRNKTTRHGRPHLQGRHQGVLEAPGLLPHGRRRRAAPPAAPHRGARRWRRPGPGPGPAADGGWLGPAPVPRVARAPRPAGAAAAPRAVPSPVAHAAPRRVRVRHAAAGLLPRRRVRRRRALLRHGDPRRGGGGGLRAAGAAQGVRREGAGGDLQVHTRARRASRRRACRRHAAATDGCLSLSGRRDVCSSCLFLFLCVATCTEL

SEQ ID NO: 1341 - protein, 171 aa, Zea mays subsp. mays
  peptide (1)..(171): Ceres Seq. ID no. 12589618
MDDRTYKGGIKAYWKRRGYYRMDGDAARRRQPLPTVELGGGVAQAQAQAQPPTGDGSGRRRCRGWRVRRGQLGRRLLRALSPRRWLMRLRDAYVSAMLRLASSPAVGYGAGAPFCATATHGAAAAAAFARPAQLKEYDEKVLVEIYRSILARGGPLAGAPAAATLRLPTAV

SEQ ID NO: 1342 - protein, 150 aa, Zea mays subsp. mays
  peptide (1)..(150): Ceres Seq. ID no. 12589619
MDGDAARRRQPLPTVELGGGVAQAQAQAQPPTGDGSGRRRCRGWRVRRGQLGRRLLRALSPRRWLMRLRDAYVSAMLRLASSPAVGYGAGAPFCATATHGAAAAAAFARPAQLKEYDEKVLVEIYRSILARGGPLAGAPAAATLRLPTAV

SEQ ID NO: 1343 - DNA, 963 bp, Zea mays subsp. mays
  misc_feature (1)..(963): Ceres Seq. ID no. 14305967
  misc_feature (1)..(963): Ortholog of  Ceres SEQ ID NO 14309614 as cited in SEQ ID NO 52633
  misc_feature (1)..(963): Ortholog of  Ceres SEQ ID NO 12626306 as cited in SEQ ID NO 65869
atgtcatatacgtactgatacagggcgtgccgactttccagggcgccaattcccctccaagatccgtcttctccggccgctccacccaattcgtcgtcctccccgcctccggatctgaacatgagcgacgcgaccacggcccccgccaccggagccggggaccacgttgtcgatgccgccgcgcacaagccgccggctgccccgtcgccggacatggcaagcatcagacggggcgggagctccgtgaccgagacagtcacccaggcaacgcagcagcagcagtcgcggctggacgacgaccagctggcggagctgcgggagatattccggtccttcgaccgcaacgccgacggcagcctgacgcagctggagctgggctccttgctccggtccctgggcctgacgcccagcgccgaccagctcgacgcgctcatcacccgtgccgacaccaactccaacggcctcatcgagttctccgagtttgtggcgctcgtggcccccgacctcctccaagaccggtccccttactcggaggaccagctccgcaagctcttcgccatcttcgaccgcgacggcaacgggttcatcaccgcggccgagctggcgcactccatggccaagctcggccacgcgctcaccgtcaaggagctcacgggaatgatcaaggaggcagacaccgacggcgatggccgcatcaatttccaggagttctcgcgcgccatcaccgccgccgcatttgacaacatcttctcctgaccgaccgaccgaccgaggccgcaaacaggatgcgttgtgtcgatcatcgattcagttcttggtgattctcagttttcaatttgttcgtcttcttttggggagattaatttaggaagctatagatgaggtgaggtgttcttatgaataacagatcaaacaaaaaaggaatcaatttagggacaaattacatgcatggttgattgtgtt

SEQ ID NO: 1344 - protein, 245 aa, Zea mays subsp. mays
  peptide (1)..(245): Ceres Seq. ID no. 14305968
VIYVLIQGVPTFQGANSPPRSVFSGRSTQFVVLPASGSEHERRDHGPRHRSRGPRCRCRRAQAAGCPVAGHGKHQTGRELRDRDSHPGNAAAAVAAGRRPAGGAAGDIPVLRPQRRRQPDAAGAGLLAPVPGPDAQRRPARRAHHPCRHQLQRPHRVLRVCGARGPRPPPRPVPLLGGPAPQALRHLRPRRQRVHHRGRAGALHGQARPRAHRQGAHGNDQGGRHRRRWPHQFPGVLARHHRRRI

SEQ ID NO: 1345 - protein, 211 aa, Zea mays subsp. mays
  peptide (1)..(211): Ceres Seq. ID no. 14305969
MSDATTAPATGAGDHVVDAAAHKPPAAPSPDMASIRRGGSSVTETVTQATQQQQSRLDDDQLAELREIFRSFDRNADGSLTQLELGSLLRSLGLTPSADQLDALITRADTNSNGLIEFSEFVALVAPDLLQDRSPYSEDQLRKLFAIFDRDGNGFITAAELAHSMAKLGHALTVKELTGMIKEADTDGDGRINFQEFSRAITAAAFDNIFS

SEQ ID NO: 1346 - protein, 180 aa, Zea mays subsp. mays
  peptide (1)..(180): Ceres Seq. ID no. 14305970
MASIRRGGSSVTETVTQATQQQQSRLDDDQLAELREIFRSFDRNADGSLTQLELGSLLRSLGLTPSADQLDALITRADTNSNGLIEFSEFVALVAPDLLQDRSPYSEDQLRKLFAIFDRDGNGFITAAELAHSMAKLGHALTVKELTGMIKEADTDGDGRINFQEFSRAITAAAFDNIFS

SEQ ID NO: 1347 - DNA, 1079 bp, Zea mays subsp. mays
  misc_feature (1)..(1079): Ceres Seq. ID no. 13599102
accgcagcccgccccactaactattgactgtcggattccctacccgtcggcgacaatccgctgcccccaatctgcctggtaggtctcgcacctccggtcatggctgccgaagctggcccaatctccaaggtcctcatcgtcatagcaatgcagaaggaggcgacgccgctcgtccacaagttcaatctcgtcgaggcgcccgcccaccaatccacttttcctaaaggtgccccatgggtttggtaccatggcagctacaaaggcctccacattgaccttgtattgcctggaatggatgctgttcttggagtcgacagtgttggtacagtaccagtagctgttgtgactagtttctccattcaaacattgaagccagaccttatcattaatgcgggcactgctggtggcttcaaggccaaaggagcaagcattactgatgtattccttgcatcagatgttgcattccatgacaggaggataccaatacctatttttgacatgtatggaactggagcacgcaaaacttttgcagctcctaatatcttgaaggagctcaatttgaaggttggcaagttgtcgactggggattctctggatatgtgtccccaggataaggagttgatactgcgcaatgatgctacaataaaggacatggagggagctgctgtagcatatgtcgctgacatgttctcgacaccagcgatctttgtgaaagctgtgactgatatcgtggatggggtgaagccaacgtatgaggagtttctgcagaacctgattgccgtgacgacggcactggagctggcagtcaccaaagtggtggatttcatcagcgggaaacgcatctccgatctttgaaagctcgtggtcacgaaatccaacatccccctgctctgatgcacgatgctaggctaggatacaatacaacgttgggtcaatgattttttttggaggtgttctatacgtgaggttttaccccttttgcaatggctcttgatctattcctgaataccgaccagagcagttgtctcttgctaaacagaaggaatgtaaagtgagcaaacatgccattgatcgttgcg

SEQ ID NO: 1348 - protein, 251 aa, Zea mays subsp. mays
  peptide (1)..(251): Ceres Seq. ID no. 13599103
MAAEAGPISKVLIVIAMQKEATPLVHKFNLVEAPAHQSTFPKGAPWVWYHGSYKGLHIDLVLPGMDAVLGVDSVGTVPVAVVTSFSIQTLKPDLIINAGTAGGFKAKGASITDVFLASDVAFHDRRIPIPIFDMYGTGARKTFAAPNILKELNLKVGKLSTGDSLDMCPQDKELILRNDATIKDMEGAAVAYVADMFSTPAIFVKAVTDIVDGVKPTYEEFLQNLIAVTTALELAVTKVVDFISGKRISDL

SEQ ID NO: 1349 - protein, 235 aa, Zea mays subsp. mays
  peptide (1)..(235): Ceres Seq. ID no. 13599104
MQKEATPLVHKFNLVEAPAHQSTFPKGAPWVWYHGSYKGLHIDLVLPGMDAVLGVDSVGTVPVAVVTSFSIQTLKPDLIINAGTAGGFKAKGASITDVFLASDVAFHDRRIPIPIFDMYGTGARKTFAAPNILKELNLKVGKLSTGDSLDMCPQDKELILRNDATIKDMEGAAVAYVADMFSTPAIFVKAVTDIVDGVKPTYEEFLQNLIAVTTALELAVTKVVDFISGKRISDL

SEQ ID NO: 1350 - protein, 187 aa, Zea mays subsp. mays
  peptide (1)..(187): Ceres Seq. ID no. 13599105
MDAVLGVDSVGTVPVAVVTSFSIQTLKPDLIINAGTAGGFKAKGASITDVFLASDVAFHDRRIPIPIFDMYGTGARKTFAAPNILKELNLKVGKLSTGDSLDMCPQDKELILRNDATIKDMEGAAVAYVADMFSTPAIFVKAVTDIVDGVKPTYEEFLQNLIAVTTALELAVTKVVDFISGKRISDL

SEQ ID NO: 1351 - DNA, 998 bp, Zea mays subsp. mays
  misc_feature (1)..(998): Ceres Seq. ID no. 14306078
agctcttctcagggaatataccatccacagaaaaaaagcgtcccgcctcatcccgagatcagaatcagaggccacgcggcgatggcgatggcgatgccgatggcagtggcgcgggtgaccagcctcgcctgcgccccccgacaggcgcagcatcgccgccgccatagccttgccccgccgtgcgcctcgggtgcggtggaggtgcgggtctgcacgaaccgcacgtgcgcgcggcagggggggcgcgaggtcctggctgcgctcgcgggcctcgcaccgccggcggtcgacgtggcctcctgcgggtgcctcgggcgctgcggcgccgggcccaacgttgcggcgtccgtccctgggagcaccgcggtgttcggccacgtgggcacggcggcgcgaggcgcgcagctactggagcacctcctcggccccgcggaattcgatgcggccctagggctcaccgcgctggccacgagggagaaggcggaggctgccctcgagaagggaaacgcggacgaagcggaagcccttctcaccgaggtctggactggacgcatacgccagtctgcgattgtgcatgctctctcagttgctggatccgagtttgatgattacacttgtatgtttgcataggttattgggttcaatgcttgtggtggtctgcatttggtgtacatgagcaggtttgttccattgtttcgtgttcaatgtgcgacttgccgacttgtgtgctttgtgtaagtttggcatgaaacatcctgttgaaattacgcaggtctaaggcgagattggaaattggggatatccctggtgcacttggggatgctgaggaagcaataagaatagctcccagatttcctcaggtacttgctttagttagaacctccaaagttattgagtataacctttcttgtacaaccatattcatgttcttacatccatgggagtatattagtgtaaggttgaagaaatacaaatatcagtattggatgtctatgtct

SEQ ID NO: 1352 - protein, 209 aa, Zea mays subsp. mays
  peptide (1)..(209): Ceres Seq. ID no. 14306079
SSSQGIYHPQKKSVPPHPEIRIRGHAAMAMAMPMAVARVTSLACAPRQAQHRRRHSLAPPCASGAVEVRVCTNRTCARQGGREVLAALAGLAPPAVDVASCGCLGRCGAGPNVAASVPGSTAVFGHVGTAARGAQLLEHLLGPAEFDAALGLTALATREKAEAALEKGNADEAEALLTEVWTGRIRQSAIVHALSVAGSEFDDYTCMFA

SEQ ID NO: 1353 - protein, 182 aa, Zea mays subsp. mays
  peptide (1)..(182): Ceres Seq. ID no. 14306080
MAMAMPMAVARVTSLACAPRQAQHRRRHSLAPPCASGAVEVRVCTNRTCARQGGREVLAALAGLAPPAVDVASCGCLGRCGAGPNVAASVPGSTAVFGHVGTAARGAQLLEHLLGPAEFDAALGLTALATREKAEAALEKGNADEAEALLTEVWTGRIRQSAIVHALSVAGSEFDDYTCMFA

SEQ ID NO: 1354 - protein, 180 aa, Zea mays subsp. mays
  peptide (1)..(180): Ceres Seq. ID no. 14306081
MAMPMAVARVTSLACAPRQAQHRRRHSLAPPCASGAVEVRVCTNRTCARQGGREVLAALAGLAPPAVDVASCGCLGRCGAGPNVAASVPGSTAVFGHVGTAARGAQLLEHLLGPAEFDAALGLTALATREKAEAALEKGNADEAEALLTEVWTGRIRQSAIVHALSVAGSEFDDYTCMFA

SEQ ID NO: 1355 - DNA, 978 bp, Zea mays subsp. mays
  misc_feature (1)..(978): Ceres Seq. ID no. 15175941
atcgcaaaaaccacccaaggccaagtcgcatcgcagcagccaggcagatcgatcaacaccttaaaatcgagcgagctaagatgtgcccaatcaagagggagacgacgagcgccgagtccggctcgccgtgcagtagctccacctccacctcgtcgtcgtcggaacaccaccagaccgcgtgggcgtcgccgccgaagaagcggccggcggggcgcaccaagttccgggagacgcggcacccggtgttccgcggcgtgcggcgccggggccgcgccgggcggtgggtctgcgaggtgcgcgtgcccgggaggcgcggctgcaggctctggctcggcaccttcgacaccgccgaggccgcggcccgcgcgcacgacgccgcgatgctcgccgtcgccgccggcgccgcgcgcctcaacttcgcggactcggcgtggctgctcgccgtgccgacggcctcgtacgccagcttcgccgacgtccgccgcgccgtggcggaggccgtggagagcttcctgcgccgccgcgaggaggaggagggggacgcgctctcggccgcgtcctcgacgtcgcccaacgacaaggacggcgacgagtcctcctcggccaccaccaccgacgacgactcgccgttcgagctggacatgttcggtggcatgagctgggacctgtactacgcgaacttggcgcaggcgatgctcgtggagccaccgcccattgtccccgcgttatgcgacgacggcgtggcttccgaattgccgctctggagctactaggctaggactagtggtcgctgtactttcggtttttaccttttctcgttctcgtcgtgtcctgtgccacaatttggtaactgcacaaaggttactgctgcttctattaacgaaacagagcagattgggaaaaaaacagagcatggccgttgactttgtaatggtagcaaaaagtcttgagcttattattattatagtgttgactctc

SEQ ID NO: 1356 - protein, 256 aa, Zea mays subsp. mays
  peptide (1)..(256): Ceres Seq. ID no. 15175942
RKNHPRPSRIAAARQIDQHLKIERAKMCPIKRETTSAESGSPCSSSTSTSSSSEHHQTAWASPPKKRPAGRTKFRETRHPVFRGVRRRGRAGRWVCEVRVPGRRGCRLWLGTFDTAEAAARAHDAAMLAVAAGAARLNFADSAWLLAVPTASYASFADVRRAVAEAVESFLRRREEEEGDALSAASSTSPNDKDGDESSSATTTDDDSPFELDMFGGMSWDLYYANLAQAMLVEPPPIVPALCDDGVASELPLWSY

SEQ ID NO: 1357 - protein, 230 aa, Zea mays subsp. mays
  peptide (1)..(230): Ceres Seq. ID no. 15175943
MCPIKRETTSAESGSPCSSSTSTSSSSEHHQTAWASPPKKRPAGRTKFRETRHPVFRGVRRRGRAGRWVCEVRVPGRRGCRLWLGTFDTAEAAARAHDAAMLAVAAGAARLNFADSAWLLAVPTASYASFADVRRAVAEAVESFLRRREEEEGDALSAASSTSPNDKDGDESSSATTTDDDSPFELDMFGGMSWDLYYANLAQAMLVEPPPIVPALCDDGVASELPLWSY

SEQ ID NO: 1358 - protein, 218 aa, Zea mays subsp. mays
  peptide (1)..(218): Ceres Seq. ID no. 15175944
IAKTTQGQVASQQPGRSINTLKSSELRCAQSRGRRRAPSPARRAVAPPPPRRRRNTTRPRGRRRRRSGRRGAPSSGRRGTRCSAACGAGAAPGGGSARCACPGGAAAGSGSAPSTPPRPRPARTTPRCSPSPPAPRASTSRTRRGCSPCRRPRTPASPTSAAPWRRPWRASCAAARRRRGTRSRPRPRRRPTTRTATSPPRPPPPTTTRRSSWTCSVA

SEQ ID NO: 1359 - DNA, 635 bp, Zea mays subsp. mays
  misc_feature (1)..(635): Ceres Seq. ID no. 12634810
ccacacttccagacttggtaaccccaacggctacaagagaagagaagagcagcagagcagagcaggcagcacgcgaaagagagagagagacaactcgggcgcgatggacgtgtacatcgcggaggagtacgtggcccagcggcgcgccgagaggagggccgcgcgcgtcgccgcggctgcacgctgcggagaggagaaggcgcgggcggacagcgagcagaagcggcggtggacggaggacggcaagcggcctgccgacggcggcgatgccggcggtggcgccgccgccgccgcctggctgcaggcaggggaggacgccgttctcagctacttgtcggcttaggacacgtgcgtgcggtacgggcggacgtgtctccctgcgtgcgtacgtccagctaggcaatgcaaatagacacacatacacacacacatgcgccaatgccatgcacaatttgcgtggattgcgtttggtggagccaagtcagtcgcgtgcatgtggttgctgggcgataccagttcagctcatccacccttttttttttttttgccatggccaattggccgccaccgcgccacgtctcgcggatatagaagttcatgtctggcagtaaaaataaactggcctcgcttgatct

SEQ ID NO: 1360 - protein, 202 aa, Zea mays subsp. mays
  peptide (1)..(202): Ceres Seq. ID no. 12634811
TLPDLVTPTATREEKSSRAEQAARERERETTRARWTCTSRRSTWPSGAPRGGPRASPRLHAAERRRRGRTASRSGGGRRTASGLPTAAMPAVAPPPPPGCRQGRTPFSATCRLRTRACGTGGRVSLRAYVQLGNANRHTYTHTCANAMHNLRGLRLVEPSQSRACGCWAIPVQLIHPFFFFCHGQLAATAPRLADIEVHVWQ

SEQ ID NO: 1361 - protein, 114 aa, Zea mays subsp. mays
  peptide (1)..(114): Ceres Seq. ID no. 12634812
MPAVAPPPPPGCRQGRTPFSATCRLRTRACGTGGRVSLRAYVQLGNANRHTYTHTCANAMHNLRGLRLVEPSQSRACGCWAIPVQLIHPFFFFCHGQLAATAPRLADIEVHVWQ

SEQ ID NO: 1362 - protein, 113 aa, Zea mays subsp. mays
  peptide (1)..(113): Ceres Seq. ID no. 12634813
HTSRLGNPNGYKRREEQQSRAGSTRKRERDNSGAMDVYIAEEYVAQRRAERRAARVAAAARCGEEKARADSEQKRRWTEDGKRPADGGDAGGGAAAAAWLQAGEDAVLSYLSA

SEQ ID NO: 1363 - DNA, 735 bp, Zea mays subsp. mays
  misc_feature (1)..(735): Ceres Seq. ID no. 14306110
agtggtgcccacagctaaagccttgtgcaaaattatcattaagctgtcatcaatcatcatggctgccattacggcaggtctgctggtactcctcgctgctgccgtcgccgctccggcgcacgccacggactacacggtcggcgactcgtccgggtggagcagcggcgtggactacgccacctgggcgagcggcaagaccttcgctgctggggacaacctagtgttccagtacagcgcgatgcacacggtggtggaggtgagctccgcggactacggcgcgtgctcggccagcaactccatccagtcctacagcgaccagaacaccaagatcgcgctcacagcgcccggcacgcgctacttcatctgcggcaccccgggccactgcggcaacggcatgaagctcgccgtcacggtcgccgctgggaccgccaccaccaccccggcgtcatccccgcccgccgctgactcgcctccagagacagccacgccgtccgggtctacgcccacggcaacgacgtcgccgtcggcgcccacgacgaagcccacctcgagcagcactggcgctgcctgcggtggggaggcccggctcgctatgggcgttttggcctgggccgcgggcctcgccgggctcgccctgatgggttaggcaagaggcagtgctgtttccgttccatgcttttcctgttgcaggcttttgtggcccgttgtgtttaatctgaattcacgtctatggcc

SEQ ID NO: 1364 - protein, 214 aa, Zea mays subsp. mays
  peptide (1)..(214): Ceres Seq. ID no. 14306111
VVPTAKALCKIIIKLSSIIMAAITAGLLVLLAAAVAAPAHATDYTVGDSSGWSSGVDYATWASGKTFAAGDNLVFQYSAMHTVVEVSSADYGACSASNSIQSYSDQNTKIALTAPGTRYFICGTPGHCGNGMKLAVTVAAGTATTTPASSPPAADSPPETATPSGSTPTATTSPSAPTTKPTSSSTGAACGGEARLAMGVLAWAAGLAGLALMG

SEQ ID NO: 1365 - protein, 195 aa, Zea mays subsp. mays
  peptide (1)..(195): Ceres Seq. ID no. 14306112
MAAITAGLLVLLAAAVAAPAHATDYTVGDSSGWSSGVDYATWASGKTFAAGDNLVFQYSAMHTVVEVSSADYGACSASNSIQSYSDQNTKIALTAPGTRYFICGTPGHCGNGMKLAVTVAAGTATTTPASSPPAADSPPETATPSGSTPTATTSPSAPTTKPTSSSTGAACGGEARLAMGVLAWAAGLAGLALMG

SEQ ID NO: 1366 - protein, 135 aa, Zea mays subsp. mays
  peptide (1)..(135): Ceres Seq. ID no. 14306113
MHTVVEVSSADYGACSASNSIQSYSDQNTKIALTAPGTRYFICGTPGHCGNGMKLAVTVAAGTATTTPASSPPAADSPPETATPSGSTPTATTSPSAPTTKPTSSSTGAACGGEARLAMGVLAWAAGLAGLALMG

SEQ ID NO: 1367 - DNA, 930 bp, Zea mays subsp. mays
  misc_feature (1)..(930): Ceres Seq. ID no. 15178954
accgcttcaccatccccgccaggcccaccaccaccatggcctctccttcccccgcccgcgcctccggccggcgcgtgccgcccccgtgctgcacgaccgacgagaccctcgcgctcgcgcgggcctacaccgcgcgccgcctcgccgtcggccgtgagcacctgacctccgctgactgggccgccgtcgccgcggccgctccgtccaagacggccaggcagtgccgccacaaggtcgagaagctccgccgacgcctccggtccaaccgccgccgcccgtgcccgctcctcgacgccatcgacctcctcgacgtcccttccccgcccttcttctccaagtcccagtcccgatccacgtcccggtcctcgtcgccgccgccgccggcggcggcgatctcttcgccgtctcccccttcccctcccgcatccccgcccagaaagaggcggcgggacgatgccggggacgaggacggtgtgagcgatgtggtgggggctctgagggccatcggagagggtttcctgcgagcggaggagaggaggatggaggccgcccgggagacgcagaggatgcggatggagatggcgcttcggcaccttgatgcacagaggaggctcatggacgcgcttgtcggccgcatcgtcgacgccttggactgaagtggtgtcacaaagatgtctcatcgaggtttcttgcttgtcctcgttgcatgctagcttgcgagtttaggagtttcttagcgctgtttatgtgtagtagctgtgatggatctgtgatgtagttgaagcggacaagccttagtgatttcccacccttgtatttgcttaaaaggggagtttcttatgaagaagaggttgcacgtctgttgcctatgcctacttgcttctttgctctcatgtatcatgctatttaatttgtttgattttgtgttcc

SEQ ID NO: 1368 - protein, 217 aa, Zea mays subsp. mays
  peptide (1)..(217): Ceres Seq. ID no. 15178955
RFTIPARPTTTMASPSPARASGRRVPPPCCTTDETLALARAYTARRLAVGREHLTSADWAAVAAAAPSKTARQCRHKVEKLRRRLRSNRRRPCPLLDAIDLLDVPSPPFFSKSQSRSTSRSSSPPPPAAAISSPSPPSPPASPPRKRRRDDAGDEDGVSDVVGALRAIGEGFLRAEERRMEAARETQRMRMEMALRHLDAQRRLMDALVGRIVDALD

SEQ ID NO: 1369 - protein, 206 aa, Zea mays subsp. mays
  peptide (1)..(206): Ceres Seq. ID no. 15178956
MASPSPARASGRRVPPPCCTTDETLALARAYTARRLAVGREHLTSADWAAVAAAAPSKTARQCRHKVEKLRRRLRSNRRRPCPLLDAIDLLDVPSPPFFSKSQSRSTSRSSSPPPPAAAISSPSPPSPPASPPRKRRRDDAGDEDGVSDVVGALRAIGEGFLRAEERRMEAARETQRMRMEMALRHLDAQRRLMDALVGRIVDALD

SEQ ID NO: 1370 - DNA, 623 bp, Zea mays subsp. mays
  misc_feature (1)..(623): Ceres Seq. ID no. 14306148
acacgcaaacaaaaaaatggctcacctcttcagagagctgtctctgggtcactccaagcgagagacgacgccgccgccaccgtcgatggcatccacgattccctccgatctaccaccgtctccactcggacaactcgccgtccagttctccgaatccgacctccgcctcatttcctacgagatcttcgtcgccgcatgccgtagcgccaccgggaagcctctctcatccgccgtctcgtcactctccgttgctaatccggactctccgagcaacggcgcctctcccgcttctccagctgcccagcgttctctgaccgcagccgccgcgagcaagatgaagaaggccttggggatgaagtcgttgtcatccttatcgcctggatctaccaagagccctggctcgggctctggttcgggctctggctcgggtggtaagtcgaagcgccccactactgtcggtgagctgatgcggatccaaatgcgagtatcggagtccgtcgattcgcgcgttcgtagagctttccttaggatcgctgctagtcaggttagctcagttttttttttttttttttttttttgaattaaaatgttaaatttaaactcaaaaaaaaaaagacctttac

SEQ ID NO: 1371 - protein, 192 aa, Zea mays subsp. mays
  peptide (1)..(192): Ceres Seq. ID no. 14306149
HANKKMAHLFRELSLGHSKRETTPPPPSMASTIPSDLPPSPLGQLAVQFSESDLRLISYEIFVAACRSATGKPLSSAVSSLSVANPDSPSNGASPASPAAQRSLTAAAASKMKKALGMKSLSSLSPGSTKSPGSGSGSGSGSGGKSKRPTTVGELMRIQMRVSESVDSRVRRAFLRIAASQVSSVFFFFFFF

SEQ ID NO: 1372 - protein, 187 aa, Zea mays subsp. mays
  peptide (1)..(187): Ceres Seq. ID no. 14306150
MAHLFRELSLGHSKRETTPPPPSMASTIPSDLPPSPLGQLAVQFSESDLRLISYEIFVAACRSATGKPLSSAVSSLSVANPDSPSNGASPASPAAQRSLTAAAASKMKKALGMKSLSSLSPGSTKSPGSGSGSGSGSGGKSKRPTTVGELMRIQMRVSESVDSRVRRAFLRIAASQVSSVFFFFFFF

SEQ ID NO: 1373 - protein, 164 aa, Zea mays subsp. mays
  peptide (1)..(164): Ceres Seq. ID no. 14306151
MASTIPSDLPPSPLGQLAVQFSESDLRLISYEIFVAACRSATGKPLSSAVSSLSVANPDSPSNGASPASPAAQRSLTAAAASKMKKALGMKSLSSLSPGSTKSPGSGSGSGSGSGGKSKRPTTVGELMRIQMRVSESVDSRVRRAFLRIAASQVSSVFFFFFFF

SEQ ID NO: 1374 - DNA, 1018 bp, Zea mays subsp. mays
  misc_feature (1)..(1018): Ceres Seq. ID no. 15227057
acacagacaacaacgagttaacgaaagccttttatccaagctcagggaagggaagctcacagtttcgttggatccaatcttttatccaagctcagcgatggcttctcgtcagcagcatcctactagctaccacgccggcgagaccaaggcccgtgccgaggagaagacgggtcaagtgatgggggcgacgcaggagaaagggagggaggccaagcacaaggcgtccgacgcctccgaccgcgccatgggaatgggccacgacgccatggaggcgaccagggagaaggcgcgcgccgccgcggaccgaaccatggggatgggccacgacgccggggaggcggccaaggacagggcgtaccgggccaaggacgcggcctccggtgccgctggccgcgccagggacactgcgtccgacgcggccggcgctgccggggaccgcgcccgcgacggcgcgcagcagaccgggagctacgtcgcgcagacggccgaggccgccaggcagaaggcggccggcgccgcgctgtacgccaaggacaccgtggtggccggcaaggacaagaccggcgccctcctgcagcaggcaggggagaaggtgatgagcacggccgtgggggccaaggacacggttgtcagcacggccgtgggggccaaggacacggttgtcagcaccgccgtgggagccaaggacgcgatgatgaactcgctcggcatggccggcgaggacaaggacggcaccaccaccaccgacgccggcaaggacaccagcacccgcaagcctggcagggactattagaggacacggcagccaaacttctcagtgtttctgttccagaagtttctgatcccatcatttaggttcaaaagtttctcatttcatttcaaactttcagtgtttggtgcatgctgtaaactctcttcaggacgggtcgtttgacatttgtgtcgactgaagcctccgcgctttcgactcaacgatgtatatgtaataataaagtcgcaaagctgttgttttattttc

SEQ ID NO: 1375 - protein, 263 aa, Zea mays subsp. mays
  peptide (1)..(263): Ceres Seq. ID no. 15227058
HRQQRVNESLLSKLREGKLTVSLDPIFYPSSAMASRQQHPTSYHAGETKARAEEKTGQVMGATQEKGREAKHKASDASDRAMGMGHDAMEATREKARAAADRTMGMGHDAGEAAKDRAYRAKDAASGAAGRARDTASDAAGAAGDRARDGAQQTGSYVAQTAEAARQKAAGAALYAKDTVVAGKDKTGALLQQAGEKVMSTAVGAKDTVVSTAVGAKDTVVSTAVGAKDAMMNSLGMAGEDKDGTTTTDAGKDTSTRKPGRDY

SEQ ID NO: 1376 - protein, 231 aa, Zea mays subsp. mays
  peptide (1)..(231): Ceres Seq. ID no. 15227059
MASRQQHPTSYHAGETKARAEEKTGQVMGATQEKGREAKHKASDASDRAMGMGHDAMEATREKARAAADRTMGMGHDAGEAAKDRAYRAKDAASGAAGRARDTASDAAGAAGDRARDGAQQTGSYVAQTAEAARQKAAGAALYAKDTVVAGKDKTGALLQQAGEKVMSTAVGAKDTVVSTAVGAKDTVVSTAVGAKDAMMNSLGMAGEDKDGTTTTDAGKDTSTRKPGRDY

SEQ ID NO: 1377 - protein, 204 aa, Zea mays subsp. mays
  peptide (1)..(204): Ceres Seq. ID no. 15227060
MGATQEKGREAKHKASDASDRAMGMGHDAMEATREKARAAADRTMGMGHDAGEAAKDRAYRAKDAASGAAGRARDTASDAAGAAGDRARDGAQQTGSYVAQTAEAARQKAAGAALYAKDTVVAGKDKTGALLQQAGEKVMSTAVGAKDTVVSTAVGAKDTVVSTAVGAKDAMMNSLGMAGEDKDGTTTTDAGKDTSTRKPGRDY

SEQ ID NO: 1378 - DNA, 1558 bp, Zea mays subsp. mays
  misc_feature (1)..(1558): Ceres Seq. ID no. 13599205
atcgacccagccatctcctcaccctcgttcaccacacagtccgccactcctttagtagcttgtgatttgtacgtcgacgagatcactggtcgggtggcggacgacgacacatggggaagggtagtgtgggtgcatcatggtgggcgttcctcctgctcgccggcgtgctgctggtcgtagcagccacggccggggcggaggacggagtggtcgaacgggaccgcaaggaggacctgcggtggtgcaagcaggcgtgcgagtggcagtacggaaaggacaccccgcggaagagggaatgcgagagcgagtgccgcgagcggcaccagcaagctgacgcgggcgaggacggcgacagcggcgtggacgcctacgtctcccgctccgggaggggcgagtgccggcgccagtgcctgcgccgccacgagggccagccgtgggagacccaggagtgcatgaggcggtgccgccgccgcggactggccgtcgacatggagcaagagtacggtcgcggcagcgagagcgcgggcaagtgccgggagaggtgcgagcgccaccaccgcggggactggtgggagaggcagcgctgcctgatggactgcaagagccgggagcgggaggaggagggcggcagcggcggccggcgcggcgaggaggaggaggacagcggcgaccgctgcccttgcgagaagcagtgcgagggccaccacgaccgggaaagcaggcagcagtgcgtccaggcttgcgagcgccggcgacagcagcgcggcggcagccgtgactccaacgtcgacgaggacgacagcgaccggcggtgccagatgaaatgccggcgccacagcgatcggcaggcgaggcagtggtgcgtgcagcgctgcgagcgtaagcaacaggaggaggacgccgccgccgacgacgacaacagcggccggtgccagaagagatgccagcaccacagcgatcggcaggcgaggcagtggtgcgtgcagcgctgcgagcgtaagcaacaggaggacgccgccgccgacgacgacgagaacagcgaccggtgccagaaaagatgccagcagcacagcgactggatgaaaaggctgcggtgcatgcaacggtgcgggcgacaggaggagggcggcgcacgcgacgacgctgacgacgacgccagccacggcgaccggtgcgagaagaagtgccagcagcaccaccgcgactacgacaagcagcagcagtgcgtgcgcgactgccgccgcggccgtggctgggaaacggtggccggcgccatccttgaggtggtgtgacgatcgacgacgtgcatggcgtggcgcagagctaataataaaagggtagtgtacgcttaccgcgtacgtacgtgtcaccgggcgtggcactctccagtctccagggacccatccaccaagtgctactgctccttcgtagggagacgtgggaataaagagtggtagctgcatgcgcgtacggcggccatggctctccgatgagagagctagctgtgtacgtgtgttcgtgatgttgttccatgcatgacatgtatacgtcttgcctg

SEQ ID NO: 1379 - protein, 393 aa, Zea mays subsp. mays
  peptide (1)..(393): Ceres Seq. ID no. 13599206
MGKGSVGASWWAFLLLAGVLLVVAATAGAEDGVVERDRKEDLRWCKQACEWQYGKDTPRKRECESECRERHQQADAGEDGDSGVDAYVSRSGRGECRRQCLRRHEGQPWETQECMRRCRRRGLAVDMEQEYGRGSESAGKCRERCERHHRGDWWERQRCLMDCKSREREEEGGSGGRRGEEEEDSGDRCPCEKQCEGHHDRESRQQCVQACERRRQQRGGSRDSNVDEDDSDRRCQMKCRRHSDRQARQWCVQRCERKQQEEDAAADDDNSGRCQKRCQHHSDRQARQWCVQRCERKQQEDAAADDDENSDRCQKRCQQHSDWMKRLRCMQRCGRQEEGGARDDADDDASHGDRCEKKCQQHHRDYDKQQQCVRDCRRGRGWETVAGAILEVV

SEQ ID NO: 1380 - protein, 279 aa, Zea mays subsp. mays
  peptide (1)..(279): Ceres Seq. ID no. 13599207
MRRCRRRGLAVDMEQEYGRGSESAGKCRERCERHHRGDWWERQRCLMDCKSREREEEGGSGGRRGEEEEDSGDRCPCEKQCEGHHDRESRQQCVQACERRRQQRGGSRDSNVDEDDSDRRCQMKCRRHSDRQARQWCVQRCERKQQEEDAAADDDNSGRCQKRCQHHSDRQARQWCVQRCERKQQEDAAADDDENSDRCQKRCQQHSDWMKRLRCMQRCGRQEEGGARDDADDDASHGDRCEKKCQQHHRDYDKQQQCVRDCRRGRGWETVAGAILEVV

SEQ ID NO: 1381 - protein, 267 aa, Zea mays subsp. mays
  peptide (1)..(267): Ceres Seq. ID no. 13599208
MEQEYGRGSESAGKCRERCERHHRGDWWERQRCLMDCKSREREEEGGSGGRRGEEEEDSGDRCPCEKQCEGHHDRESRQQCVQACERRRQQRGGSRDSNVDEDDSDRRCQMKCRRHSDRQARQWCVQRCERKQQEEDAAADDDNSGRCQKRCQHHSDRQARQWCVQRCERKQQEDAAADDDENSDRCQKRCQQHSDWMKRLRCMQRCGRQEEGGARDDADDDASHGDRCEKKCQQHHRDYDKQQQCVRDCRRGRGWETVAGAILEVV

SEQ ID NO: 1382 - DNA, 1278 bp, Zea mays subsp. mays
  misc_feature (1)..(1278): Ceres Seq. ID no. 13600580
atgcgcgcgctactgcatctgcggctcatcaatccgtgcagtcccagagcaccccgtcttcccgctactcccgcaagggcgctcgtcgcttccttctccggggcgtggcaggcaccttctggtagagcgagagcgagagcagcgccgccggcagttcgcgctatggcgtcccagcaggtgttccgggctcagcagcagcagcagcagcagttcccggctcagcagcaggagtcccagccggggaaggagcacgcgatggacccccggcccgaggccatcgtccaggactacaaggccgccaacaagctcaaggacaaggtggcgctcgtgaccggcggcgactccggcatcgggcgcgccgtgtgcctgtgcttcgcgaaggagggcgcgacggtggccttcaccttcsgtgagggggcaggaggagaaggacgcggaggagacgctgcgtgcgctgcgcgacatcgggtccgagacgggcgcgcgcgagccgatggccctgcccgccgacctcgggtacgaggccaactgccgggaggtggtggagcgggtggcgtcggcgtacggcgggcgcatcgacgtggtggtgaacaacgcggcggagcagtacgagcgggagagcatcggggacgtgacggaggcggacctggagcgcgtgttccgcaccaacatcttctcctacttcctggtgtccaagcacgcggtgccgcgcatggagcccggcgcctgcatcatcaacacctcctccgtcaacgcgtacaagggcaacaagacgctgctggactacacggccaccaagggcgccatcgtggccttcacgcgcgcgctctcgctgcagctggccgacaggggcatccgcgtcaacggcgtcgcgccgggccccgtctggacgccgctcatcccggcgtccttcggcaaggagaaggtggagcagttcgggtcccaggtgcccatgaagcgcgccgcgcagccggccgagatcgcgcccagcttcgtcttcctcgccagcaaccaggattcgtcctacatgtctggccagatcctccacgtcaacggaggcgtcatcgtcaatagctagatacggaagctgttttgctgtcgtgtgatcgtgtccaagtccaagggaacaaagcgagtgtccgtgtgtaccagtcagtaccaggtagcagtgtcagtacgcgcacgcaggaaggcaaggcagggttcagttgtagcggtgtgtaatgctgtcagcacagcacttgtaaagaaggaacgtgtctgaataaatatgcgtcc

SEQ ID NO: 1383 - protein, 357 aa, Zea mays subsp. mays
  peptide (1)..(357): Ceres Seq. ID no. 15218975
  misc_feature (137)..(137): Xaa is any aa, unknown or other
MRALLHLRLINPCSPRAPRLPATPARALVASFSGAWQAPSGRARARAAPPAVRAMASQQVFRAQQQQQQQFPAQQQESQPGKEHAMDPRPEAIVQDYKAANKLKDKVALVTGGDSGIGRAVCLCFAKEGATVAFTFXEGAGGEGRGGDAACAARHRVRDGRARADGPARRPRVRGQLPGGGGAGGVGVRRAHRRGGEQRGGAVRAGEHRGRDGGGPGARVPHQHLLLLPGVQARGAAHGARRLHHQHLLRQRVQGQQDAAGLHGHQGRHRGLHARALAAAGRQGHPRQRRRAGPRLDAAHPGVLRQGEGGAVRVPGAHEARRAAGRDRAQLRLPRQQPGFVLHVWPDPPRQRRRHRQ

SEQ ID NO: 1384 - protein, 303 aa, Zea mays subsp. mays
  peptide (1)..(303): Ceres Seq. ID no. 15218976
  misc_feature (83)..(83): Xaa is any aa, unknown or other
MASQQVFRAQQQQQQQFPAQQQESQPGKEHAMDPRPEAIVQDYKAANKLKDKVALVTGGDSGIGRAVCLCFAKEGATVAFTFXEGAGGEGRGGDAACAARHRVRDGRARADGPARRPRVRGQLPGGGGAGGVGVRRAHRRGGEQRGGAVRAGEHRGRDGGGPGARVPHQHLLLLPGVQARGAAHGARRLHHQHLLRQRVQGQQDAAGLHGHQGRHRGLHARALAAAGRQGHPRQRRRAGPRLDAAHPGVLRQGEGGAVRVPGAHEARRAAGRDRAQLRLPRQQPGFVLHVWPDPPRQRRRHRQ

SEQ ID NO: 1385 - protein, 272 aa, Zea mays subsp. mays
  peptide (1)..(272): Ceres Seq. ID no. 15218977
  misc_feature (52)..(52): Xaa is any aa, unknown or other
MDPRPEAIVQDYKAANKLKDKVALVTGGDSGIGRAVCLCFAKEGATVAFTFXEGAGGEGRGGDAACAARHRVRDGRARADGPARRPRVRGQLPGGGGAGGVGVRRAHRRGGEQRGGAVRAGEHRGRDGGGPGARVPHQHLLLLPGVQARGAAHGARRLHHQHLLRQRVQGQQDAAGLHGHQGRHRGLHARALAAAGRQGHPRQRRRAGPRLDAAHPGVLRQGEGGAVRVPGAHEARRAAGRDRAQLRLPRQQPGFVLHVWPDPPRQRRRHRQ

SEQ ID NO: 1386 - DNA, 897 bp, Zea mays subsp. mays
  misc_feature (1)..(897): Ceres Seq. ID no. 14306264
acgcagtttctcgcgccatctgaagtcagctggggcgacgaagaaatgtcctctagcgatcaaaacccagctgccacacccgcgtcgtcgggccccgccgagccctcgccgccgggcaggccaacggcggtgtcctcgcgtgtcctcgacatgggcgcgcagctggcgcaggcgctgaagccggtgcggcagatgaagcagcacgcgtgcagcttcgcgctgtacgcccacgacttgcaccgccaggtggaggtccaccacttcgtcgcccggctcaaccaggacgtcctccagtgcgccgtctacgactccgacaagccctcggcccgcctcatcggcgtggagtacatcgtctccgacaccatcttcgagggcctggccccggacgagcagaggctgtggcactcgcacgcgtacgaggtgaaggccgggctgtggaccgacgtcggcgtgccggaggcgctgcagagctcggagatggcgagcctcgcaaggacgtacggcaagttctggtgcacctggcaggcggaccgcggcgacgcgctgcccctcggcgcgccggcgctcatggtgtcgccgcaggccgccgagcccggccgcgtgcgcggcgagctggtgcgcggccgtgacgagaggtacgggatcgacagctcggcaggggggctcaaggcggcgagggtggagatggacgagccggagtggatcaacccgaacgccgactactggcggctgcacggcaaggggttcgcggtagacgtcgtcccggccgagatgaagcgacacgcgcccttcccgtgagctgccggtcttcttgttgtgacacgtccgtaaggagcataaagatcgttcttgtatccagaggcgtattttgaagaagaagaaaaagagcttgtgttg

SEQ ID NO: 1387 - protein, 265 aa, Zea mays subsp. mays
  peptide (1)..(265): Ceres Seq. ID no. 14306265
TQFLAPSEVSWGDEEMSSSDQNPAATPASSGPAEPSPPGRPTAVSSRVLDMGAQLAQALKPVRQMKQHACSFALYAHDLHRQVEVHHFVARLNQDVLQCAVYDSDKPSARLIGVEYIVSDTIFEGLAPDEQRLWHSHAYEVKAGLWTDVGVPEALQSSEMASLARTYGKFWCTWQADRGDALPLGAPALMVSPQAAEPGRVRGELVRGRDERYGIDSSAGGLKAARVEMDEPEWINPNADYWRLHGKGFAVDVVPAEMKRHAPFP

SEQ ID NO: 1388 - protein, 250 aa, Zea mays subsp. mays
  peptide (1)..(250): Ceres Seq. ID no. 14306266
MSSSDQNPAATPASSGPAEPSPPGRPTAVSSRVLDMGAQLAQALKPVRQMKQHACSFALYAHDLHRQVEVHHFVARLNQDVLQCAVYDSDKPSARLIGVEYIVSDTIFEGLAPDEQRLWHSHAYEVKAGLWTDVGVPEALQSSEMASLARTYGKFWCTWQADRGDALPLGAPALMVSPQAAEPGRVRGELVRGRDERYGIDSSAGGLKAARVEMDEPEWINPNADYWRLHGKGFAVDVVPAEMKRHAPFP

SEQ ID NO: 1389 - protein, 215 aa, Zea mays subsp. mays
  peptide (1)..(215): Ceres Seq. ID no. 14306267
MGAQLAQALKPVRQMKQHACSFALYAHDLHRQVEVHHFVARLNQDVLQCAVYDSDKPSARLIGVEYIVSDTIFEGLAPDEQRLWHSHAYEVKAGLWTDVGVPEALQSSEMASLARTYGKFWCTWQADRGDALPLGAPALMVSPQAAEPGRVRGELVRGRDERYGIDSSAGGLKAARVEMDEPEWINPNADYWRLHGKGFAVDVVPAEMKRHAPFP

SEQ ID NO: 1390 - DNA, 1040 bp, Zea mays subsp. mays
  misc_feature (1)..(1040): Ceres Seq. ID no. 15224625
aagttccatcccatcccgccacgaaattctccacgctccgatccaatcgcaacaatgaagttcggcaagagcctcaacaaccagatcgtggagacgctcccggactggcgcgacaagttcctgtcctacaaggacctcaagaagcggctgaagcagatcggcgccggctctggcgagcggcggagcaagcgccagcgggtgagggacgggcgcggcggatcctcgccgcctgcgatgaccccggaggaggccggattcgtcgcgctcctcgacgccgagctcgacaagttcaacgccttcttcctcgagaaggaggaggactacgtcatccggctgaaggagttgcaggacagggtggtgagcgccgcggaggtggggtcggcggaggagctgctgcgggtgcgcaaggagatcgtcgacttccacggcgagatggtcttgctggagaactacagcgcgctcaactacaccgggctggtcaagatcctcaagaagtacgacaagaggaccggcgcgctgatccgcctgcccttcatccggaacgtgatgcaggagccgttctgcgccaccgacgtgctgtacaagctcgtcaaggggtgcgaggagatgctggaccagctcctcctgccccggaaccagcagcggcccgtgccgagcgacaacggcggggaaggagacagcgacggcgacgacgacaagcaacgaccggcggagccaggcgcctcatcgctgcccagcggcggcggcggtggcgctggcgacatggagctggaggagatcgaggacatggagagcatgtacatgaagagtacggtggccgcgctcagggcgctcagggagatcaggagcgggagctccacggtgagcgcgttctccctgccgccactacggtgattgacacgttgtgttcggttcagtagcgaagcgagacagaacggggccgactgcgctgttgctgtaggtagtgtttggttcaaagaagacacgaacaaaatgaaagaaaatctgtaaaatgatagtaatattcatctagtattccc

SEQ ID NO: 1391 - protein, 305 aa, Zea mays subsp. mays
  peptide (1)..(305): Ceres Seq. ID no. 15224626
VPSHPATKFSTLRSNRNNEVRQEPQQPDRGDAPGLARQVPVLQGPQEAAEADRRRLWRAAEQAPAGEGRARRILAACDDPGGGRIRRAPRRRARQVQRLLPREGGGLRHPAEGVAGQGGERRGGGVGGGAAAGAQGDRRLPRRDGLAGELQRAQLHRAGQDPQEVRQEDRRADPPALHPERDAGAVLRHRRAVQARQGVRGDAGPAPPAPEPAAARAERQRRGRRQRRRRRQATTGGARRLIAAQRRRRWRWRHGAGGDRGHGEHVHEEYGGRAQGAQGDQERELHGERVLPAATTVIDTLCSVQ

SEQ ID NO: 1392 - protein, 297 aa, Zea mays subsp. mays
  peptide (1)..(297): Ceres Seq. ID no. 15224627
KFHPIPPRNSPRSDPIATMKFGKSLNNQIVETLPDWRDKFLSYKDLKKRLKQIGAGSGERRSKRQRVRDGRGGSSPPAMTPEEAGFVALLDAELDKFNAFFLEKEEDYVIRLKELQDRVVSAAEVGSAEELLRVRKEIVDFHGEMVLLENYSALNYTGLVKILKKYDKRTGALIRLPFIRNVMQEPFCATDVLYKLVKGCEEMLDQLLLPRNQQRPVPSDNGGEGDSDGDDDKQRPAEPGASSLPSGGGGGAGDMELEEIEDMESMYMKSTVAALRALREIRSGSSTVSAFSLPPLR

SEQ ID NO: 1393 - protein, 279 aa, Zea mays subsp. mays
  peptide (1)..(279): Ceres Seq. ID no. 15224628
MKFGKSLNNQIVETLPDWRDKFLSYKDLKKRLKQIGAGSGERRSKRQRVRDGRGGSSPPAMTPEEAGFVALLDAELDKFNAFFLEKEEDYVIRLKELQDRVVSAAEVGSAEELLRVRKEIVDFHGEMVLLENYSALNYTGLVKILKKYDKRTGALIRLPFIRNVMQEPFCATDVLYKLVKGCEEMLDQLLLPRNQQRPVPSDNGGEGDSDGDDDKQRPAEPGASSLPSGGGGGAGDMELEEIEDMESMYMKSTVAALRALREIRSGSSTVSAFSLPPLR

SEQ ID NO: 1394 - DNA, 893 bp, Zea mays subsp. mays
  misc_feature (1)..(893): Ceres Seq. ID no. 14306309
aaccatcaggacgcggacgcggacgcggacgcggctcacatcaaacacccccttcagctgtgctcagtgctcactgccgcaaaaccacagccacacagggaagcgcccagcgccctttcacatcaccacatccacgctcctccgttccatggccatgtcgagcagcgccagcaagaagcaagcccaggcccaggcccaggcccagaaggccgggcggaggcccccggcggtgtcgtcggccgcggccgcggacgcggagatgcagagggtgttctcgcgcatcgacgcggacggcgacgggcggatctcgccgtcggagctggcggcggtgtcgcgcgccatctccccgccggcgagctcctcgcacgggcggcgcgaggtggcggccatgatggaggagctggacacggaccgcgacggcttcgtggacctgggcgagttcagggcgttccacgcgcgcggcggcggcgttggcggcgacgacgacgacgacgcggagctccgcgccgccttcgccgtgtacgacgccgacggcgacgggcgcatcacggcggccgagctgggcagcgtgctcgcccgcattggcgaggggtgcagcgccgaggagtgccgccggatgatcgccggcgtcgacgccgacggcgacggctgcgtcgggttcgaggagttcaagatgatgatgcgcagcccccagccccagccccaggccggcgccggagtgactgccgtgccggacaaggccaaggaggagtgacgggtgtaggtgtaggtgtactcaccagggcatcagtctgggggaagggatcgagttcctctgcctcttctgttgctttcacctcctctggagaggcatgaaaatactcaacttgctgcataagactacttattactgt

SEQ ID NO: 1395 - protein, 284 aa, Zea mays subsp. mays
  peptide (1)..(284): Ceres Seq. ID no. 14306310
NHQDADADADAAHIKHPLQLCSVLTAAKPQPHREAPSALSHHHIHAPPFHGHVEQRQQEASPGPGPGPEGRAEAPGGVVGRGRGRGDAEGVLAHRRGRRRADLAVGAGGGVARHLPAGELLARAARGGGHDGGAGHGPRRLRGPGRVQGVPRARRRRWRRRRRRRGAPRRLRRVRRRRRRAHHGGRAGQRARPHWRGVQRRGVPPDDRRRRRRRRRLRRVRGVQDDDAQPPAPAPGRRRSDCRAGQGQGGVTGVGVGVLTRASVWGKGSSSSASSVAFTSSGEA

SEQ ID NO: 1396 - protein, 250 aa, Zea mays subsp. mays
  peptide (1)..(250): Ceres Seq. ID no. 14306311
TIRTRTRTRTRLTSNTPFSCAQCSLPQNHSHTGKRPAPFHITTSTLLRSMAMSSSASKKQAQAQAQAQKAGRRPPAVSSAAAADAEMQRVFSRIDADGDGRISPSELAAVSRAISPPASSSHGRREVAAMMEELDTDRDGFVDLGEFRAFHARGGGVGGDDDDDAELRAAFAVYDADGDGRITAAELGSVLARIGEGCSAEECRRMIAGVDADGDGCVGFEEFKMMMRSPQPQPQAGAGVTAVPDKAKEE

SEQ ID NO: 1397 - protein, 201 aa, Zea mays subsp. mays
  peptide (1)..(201): Ceres Seq. ID no. 14306312
MAMSSSASKKQAQAQAQAQKAGRRPPAVSSAAAADAEMQRVFSRIDADGDGRISPSELAAVSRAISPPASSSHGRREVAAMMEELDTDRDGFVDLGEFRAFHARGGGVGGDDDDDAELRAAFAVYDADGDGRITAAELGSVLARIGEGCSAEECRRMIAGVDADGDGCVGFEEFKMMMRSPQPQPQAGAGVTAVPDKAKEE

SEQ ID NO: 1398 - DNA, 452 bp, Zea mays subsp. mays
  misc_feature (1)..(452): Ceres Seq. ID no. 13600592
ctagctcgtgcatgccgccctgagcgccactgcacagacgcgcagagacagacattgcgactttgcgagagacaaaacctcccagataacgcccgcgcgctccccgatggcgtcgtcgtgccagaacgtggagattcccggcaagccgacggagacggggacggcgctgctggagacggcgacgggcaccatccaggggttcgcgccgctgagccagatccaccagcacctgtgcgcgttccacttctacgcggacgacatggggcggcaggtggaggcgcaccacttctgcgcgcacctgaacgaggacgtgcggcagtgcctcatcttcgacgggcccggcgccggcgcgcgcctcatcggcgtggagtacatcgtctccgagacggtgttcctgacgctgcccgacgccgagaagccgctgtggcacacgcacgagttcgaggtgaagg

SEQ ID NO: 1399 - protein, 150 aa, Zea mays subsp. mays
  peptide (1)..(150): Ceres Seq. ID no. 13600593
LARACRPERHCTDAQRQTLRLCERQNLPDNARALPDGVVVPERGDSRQADGDGDGAAGDGDGHHPGVRAAEPDPPAPVRVPLLRGRHGAAGGGAPLLRAPERGRAAVPHLRRARRRRAPHRRGVHRLRDGVPDAARRREAAVAHARVRGE

SEQ ID NO: 1400 - protein, 115 aa, Zea mays subsp. mays
  peptide (1)..(115): Ceres Seq. ID no. 13600594
MASSCQNVEIPGKPTETGTALLETATGTIQGFAPLSQIHQHLCAFHFYADDMGRQVEAHHFCAHLNEDVRQCLIFDGPGAGARLIGVEYIVSETVFLTLPDAEKPLWHTHEFEVK

SEQ ID NO: 1401 - DNA, 1085 bp, Zea mays subsp. mays
  misc_feature (1)..(1085): Ceres Seq. ID no. 14312711
aaacaggcgacccgcgtgtcagagatgcagcatagcatggacgcgggcgaggtgcggcactggaacgcggacgtgaacggcgtctccatccacgtcgccgagcggggccccgaggatgggccggcggtgctcctcctccacggcttcccggagctctggctctcgtggcgccaccagatggccgcgctcgccgcccgcgggttccgtgcgctagcccccgacctccgcggctacggcgactcctccgcgccgtccgaccccgccgcctactccatcttccacatcgtcggcgacgtcgtcgcgctcctcgaccacctccaactcacaaaggtgttcgtggcggggcacgactggggcgcgcatgcggcgtggctcctctgcctgttccggccggaccgggtgcgcgccgccgtcgttctgggggtaccgtactccgctcgacacgcacacgctcgccccatcacggaggccttcgcggcgtttggcgagggcttttacataaatcagttgcaggaggctggaagagctgagagcgcattcgcccgttacgatgtcgcaactgtcctaaaaaagttctactccatcgaaatagatgatgtcaccgctcctcctggggtggagatcatagacttcctggaggcgtctccctcgccacttccttggatcagcgaggaagaactgggccagtatgctgagaagtttcacaagtccgggttcactggacccctcaactactaccgcatgtcggagacgaactcgagactccttgcaccctggaacggagcgaagattacagtgcctgtgaagttcatagctggcgataaggacatcggtgcccagtcctttggaactggggagtacatcaagagcgcggagttcgagtccaccgttccagatcttgaagtcaccgtcatcgagggccaccattttctccagcaggaacaggccgagagggtgaactcggagatggtttcctacctcgtcaggtttactagctagccagtaaagaaatctttctgaactgaagtcttgaagagctgaataaagtgtgagctaggcatttgctcttgcttctttctcacctc

SEQ ID NO: 1402 - protein, 332 aa, Zea mays subsp. mays
  peptide (1)..(332): Ceres Seq. ID no. 14312712
KQATRVSEMQHSMDAGEVRHWNADVNGVSIHVAERGPEDGPAVLLLHGFPELWLSWRHQMAALAARGFRALAPDLRGYGDSSAPSDPAAYSIFHIVGDVVALLDHLQLTKVFVAGHDWGAHAAWLLCLFRPDRVRAAVVLGVPYSARHAHARPITEAFAAFGEGFYINQLQEAGRAESAFARYDVATVLKKFYSIEIDDVTAPPGVEIIDFLEASPSPLPWISEEELGQYAEKFHKSGFTGPLNYYRMSETNSRLLAPWNGAKITVPVKFIAGDKDIGAQSFGTGEYIKSAEFESTVPDLEVTVIEGHHFLQQEQAERVNSEMVSYLVRFTS

SEQ ID NO: 1403 - protein, 324 aa, Zea mays subsp. mays
  peptide (1)..(324): Ceres Seq. ID no. 14312713
MQHSMDAGEVRHWNADVNGVSIHVAERGPEDGPAVLLLHGFPELWLSWRHQMAALAARGFRALAPDLRGYGDSSAPSDPAAYSIFHIVGDVVALLDHLQLTKVFVAGHDWGAHAAWLLCLFRPDRVRAAVVLGVPYSARHAHARPITEAFAAFGEGFYINQLQEAGRAESAFARYDVATVLKKFYSIEIDDVTAPPGVEIIDFLEASPSPLPWISEEELGQYAEKFHKSGFTGPLNYYRMSETNSRLLAPWNGAKITVPVKFIAGDKDIGAQSFGTGEYIKSAEFESTVPDLEVTVIEGHHFLQQEQAERVNSEMVSYLVRFTS

SEQ ID NO: 1404 - protein, 320 aa, Zea mays subsp. mays
  peptide (1)..(320): Ceres Seq. ID no. 14312714
MDAGEVRHWNADVNGVSIHVAERGPEDGPAVLLLHGFPELWLSWRHQMAALAARGFRALAPDLRGYGDSSAPSDPAAYSIFHIVGDVVALLDHLQLTKVFVAGHDWGAHAAWLLCLFRPDRVRAAVVLGVPYSARHAHARPITEAFAAFGEGFYINQLQEAGRAESAFARYDVATVLKKFYSIEIDDVTAPPGVEIIDFLEASPSPLPWISEEELGQYAEKFHKSGFTGPLNYYRMSETNSRLLAPWNGAKITVPVKFIAGDKDIGAQSFGTGEYIKSAEFESTVPDLEVTVIEGHHFLQQEQAERVNSEMVSYLVRFTS

SEQ ID NO: 1405 - DNA, 750 bp, Zea mays subsp. mays
  misc_feature (1)..(750): Ceres Seq. ID no. 12634896
aattgggccagtttgtagtacccttgtttatatcggatacccaagagagccgtggagactggagagggaggaacgagggagctcgctctgctcttccttgttggcaatagcccaaggccccaagacggcagcacgcacaatgaagccatcctgtgcagcacttgttccaggccttcttcttctagccactcttgcagttgcagctggcgcaggtgccgcctcttcatcatctcctccgtcgtcttccctcggcaagcatccagcagagctggtccttcttggtcgcaaaggccgagaacttggccagctgtcatcatcatcatcaggataccgttattaccagcaccagagcaagcagatgcagcaacctgaggaagctgcggctacggaggtgaagcagcccgaggagaaggaggaggaggaggaggaggaggcaaaggtgcggtggacagcgggccagggcgcggacgccgagcctgggctgatctacagcgcggactacagcggcgtggccatgcatgctggctctccgccgacgacgaagccgaagcacaggcaccccagaccgtaggacgtttttttcctcctttcctggttgtgttcgtcagtctatgccttgtccttacgttgtcgacttgctgtgtagtttttaccgttggattgtacaagcaccgctgccggccgtctctgtaaataaactaggccttgcttctgttgctctaaaaaaaaaaaaaaagaaacaaaccgggg

SEQ ID NO: 1406 - protein, 189 aa, Zea mays subsp. mays
  peptide (1)..(189): Ceres Seq. ID no. 12634897
IGPVCSTLVYIGYPREPWRLEREERGSSLCSSLLAIAQGPKTAARTMKPSCAALVPGLLLLATLAVAAGAGAASSSSPPSSSLGKHPAELVLLGRKGRELGQLSSSSSGYRYYQHQSKQMQQPEEAAATEVKQPEEKEEEEEEEAKVRWTAGQGADAEPGLIYSADYSGVAMHAGSPPTTKPKHRHPRP

SEQ ID NO: 1407 - protein, 143 aa, Zea mays subsp. mays
  peptide (1)..(143): Ceres Seq. ID no. 12634898
MKPSCAALVPGLLLLATLAVAAGAGAASSSSPPSSSLGKHPAELVLLGRKGRELGQLSSSSSGYRYYQHQSKQMQQPEEAAATEVKQPEEKEEEEEEEAKVRWTAGQGADAEPGLIYSADYSGVAMHAGSPPTTKPKHRHPRP

SEQ ID NO: 1408 - DNA, 915 bp, Zea mays subsp. mays
  misc_feature (1)..(915): Ceres Seq. ID no. 12634899
gatttatcaacatgcaaattctattgtgaaagtaattctcacggttaatctagaagcttgtaaatctcattatgatgtcacattagtatataaattctctgtgtgcatgtctttctgtgacacacaggagctattacaagtgcacgagctcccggtgcggcgcgaagaagcacgtggagaaatctatggacgactcagagatgctgatcgtcacgtacgagggttcgcacctgcacggcccacagccgctcttcccgcgtcgacagtggctgtcggttgacctgtccggcgcgggggtagcggcctcgaagacgaagcagcagcagaccaggtcctcctccccggccgcgtcagccacgctcgcaagcgacgacgggggcggcggctggccaccgagcctgcaaataatgacgcgcaacgccgagacgcgaggaggagggctcacggctgatgcaggcgagagcgagacgacgccggggcttcagagcggacgcacgggtgtgaccgcggactcgtgcgacgatggctccaccgcctccgtgccgccgccgccgcagactgctccctcgtttcactgtgactcgccgcctacgacctggtcctggtcgtgccttgactacaccctcgcctggtcccctgaagctcctctgcttcagtagaagccggtaaactagcttgtttaggaacaggatatgcatacatagatctcaaagagatcgaaagataagagaccccagctgtttattatattccatgcaaaaaaaaaactcaagtgactaaagccagaacgctgacgtgaagctacctaagttggtgcagcgacagtgataaaaaggctaagcacttttctagttaaccagctatactattattgtacagtgatatatatagatgccaatgtgtgcccttagcact

SEQ ID NO: 1409 - protein, 157 aa, Zea mays subsp. mays
  peptide (1)..(157): Ceres Seq. ID no. 12634900
MDDSEMLIVTYEGSHLHGPQPLFPRRQWLSVDLSGAGVAASKTKQQQTRSSSPAASATLASDDGGGGWPPSLQIMTRNAETRGGGLTADAGESETTPGLQSGRTGVTADSCDDGSTASVPPPPQTAPSFHCDSPPTTWSWSCLDYTLAWSPEAPLLQ

SEQ ID NO: 1410 - protein, 152 aa, Zea mays subsp. mays
  peptide (1)..(152): Ceres Seq. ID no. 12634901
MLIVTYEGSHLHGPQPLFPRRQWLSVDLSGAGVAASKTKQQQTRSSSPAASATLASDDGGGGWPPSLQIMTRNAETRGGGLTADAGESETTPGLQSGRTGVTADSCDDGSTASVPPPPQTAPSFHCDSPPTTWSWSCLDYTLAWSPEAPLLQ

SEQ ID NO: 1411 - protein, 92 aa, Zea mays subsp. mays
  peptide (1)..(92): Ceres Seq. ID no. 12634902
IYQHANSIVKVILTVNLEACKSHYDVTLVYKFSVCMSFCDTQELLQVHELPVRREEARGEIYGRLRDADRHVRGFAPARPTAALPASTVAVG

SEQ ID NO: 1412 - DNA, 960 bp, Zea mays subsp. mays
  misc_feature (1)..(960): Ceres Seq. ID no. 14306406
  misc_feature (1)..(960): Ortholog of  Ceres SEQ ID NO 13661778 as cited in SEQ ID NO 61468
  misc_feature (1)..(960): Ortholog of  Ceres SEQ ID NO 15178824 as cited in SEQ ID NO 0
actacgcgcgaggcacggcacggcacggcacgaccgagctccagtctgcccccgcccccgcccccatccgcacgtccgccttgatccggcaaatggcgtcgccggcgcggcggctcctgcagaccaactccgtgcagtacccgacgctccccgcggccgacccgccgagcgcgctggccgtcgactccgacgtggtggtcatcctcgccgcgctcctctgcgcgctcatctgcgtcgtggggctggcctccgtggcccggtgcgcgcgctcccgcgccgcgcccgccgccgccgccaggagggggctcaggaagaaggcgctcagggcgctgccgagcctcgcgtacgaggacgccgtggcggcccgggccggggccggggacggggccggggacggggcggcggaggtcctggcggagtgcgccatctgcctgtcggagttcgcgccacgggaggaggtccgcgtgctgccgcagtgcggccacgccttccacgtcgcctgcatcgacacctggctcgccgcccactcctcctgtccctcgtgccgccgcgtcctcgtcgtcggcgacgacgccagtaagcgcccgccccaccagcctaagcgctgccgcaagtgcgacgcggccatggacgagccctcctcgtcgtccggttccgccggcgccacgcctgccggttcctgacccttctcaccagtgccacagccacgccaccaccgccgccagtttctagcaactgggccggcaatcttagctccactggaattccctcatcatcaggcgccgccggtttctagcaactgggttggcaatctttagctccactccacttcattccaaggattcgaacgttgatgctgtaaattgcaggttggtcgattatgtacatatttattttcagattagaaacatgctaaagtatcgtgtgaatgtgaatctcagaaacagaatctttcttcgc

SEQ ID NO: 1413 - protein, 226 aa, Zea mays subsp. mays
  peptide (1)..(226): Ceres Seq. ID no. 14306407
YARGTARHGTTELQSAPAPAPIRTSALIRQMASPARRLLQTNSVQYPTLPAADPPSALAVDSDVVVILAALLCALICVVGLASVARCARSRAAPAAAARRGLRKKALRALPSLAYEDAVAARAGAGDGAGDGAAEVLAECAICLSEFAPREEVRVLPQCGHAFHVACIDTWLAAHSSCPSCRRVLVVGDDASKRPPHQPKRCRKCDAAMDEPSSSSGSAGATPAGS

SEQ ID NO: 1414 - protein, 196 aa, Zea mays subsp. mays
  peptide (1)..(196): Ceres Seq. ID no. 14306408
MASPARRLLQTNSVQYPTLPAADPPSALAVDSDVVVILAALLCALICVVGLASVARCARSRAAPAAAARRGLRKKALRALPSLAYEDAVAARAGAGDGAGDGAAEVLAECAICLSEFAPREEVRVLPQCGHAFHVACIDTWLAAHSSCPSCRRVLVVGDDASKRPPHQPKRCRKCDAAMDEPSSSSGSAGATPAGS

SEQ ID NO: 1415 - protein, 192 aa, Zea mays subsp. mays
  peptide (1)..(192): Ceres Seq. ID no. 14306409
LRARHGTARHDRAPVCPRPRPHPHVRLDPANGVAGAAAPADQLRAVPDAPRGRPAERAGRRLRRGGHPRRAPLRAHLRRGAGLRGPVRALPRRARRRRQEGAQEEGAQGAAEPRVRGRRGGPGRGRGRGRGRGGGGPGGVRHLPVGVRATGGGPRAAAVRPRLPRRLHRHLARRPLLLSLVPPRPRRRRRRQ

SEQ ID NO: 1416 - DNA, 1248 bp, Zea mays subsp. mays
  misc_feature (1)..(1248): Ceres Seq. ID no. 12365169
  misc_feature (1)..(1248): Ortholog of  Ceres SEQ ID NO 12609869 as cited in SEQ ID NO 52065
  misc_feature (1)..(1248): Ortholog of  Ceres SEQ ID NO 14301506 as cited in SEQ ID NO 61159
  misc_feature (1)..(1248): Ortholog of  Ceres SEQ ID NO 13597124 as cited in SEQ ID NO 64173
  misc_feature (1)..(1248): Ortholog of  Ceres SEQ ID NO 12780602 as cited in SEQ ID NO 65695
atcggtgatcggtctcctatgttcacacctgtttgctctcttttcttcccccgttcacctcgcgtgcgccacccacctagggtgaccgccgccgcccttcgcccagccgcccgggttgcgctttgccggcgacgagcgcccaccgcacccccaccatattggtcactggaggattgctgcggttggtaaggatgagcaaaggcccagttccgtttgccaacatcgggaagagagcaaaagatctcctgtacaaggactacaactttgaccaaaagttttctttgtcgacgtctagcggctctggtttgaatctcacagccactggtgtaaagatcaacgaagacttcattggtgatatacggacacagcataaaagcagtagaactactattgatgtcaccgttgatagtgattctaaagtgtcgaccacagtcactgttgatgaagcactaactggtttgaagacttcattcgccttcaaggtccccgatcacaagtctgggaagcttgatctgcaatatgcgcacaatcgtttttcattgaactcgaccattggtttgacatcagcacctttggttgaactggctgcaactgtcggcacaagtgaacttagcattggtgctgaggttgggtttgacagtacttcagctgctgttactaagtacaactcaggaattggatacaacaagtccgatttctcagcttccttactactggctgataaaggggagactttgaaggcatcttacgttcatttgttcaatccgaccaatggagctacagttgcagctgaggtaacacacaagctgaagaccagagagaactatttcacagttgggagctcccatgcccttgatccttcaacattgctaaagacgagattcagcaactccgggaaggtcggtcttctctgtcagcatgagtggaggccgaaatctcttgtgactctttcagctgagtatgatccaaaggtggtaagtgcgccttcaagaatcggcatggccatatcgctcaagccttgagctgggttaagtcaccttctataaaacagtacaagcataccgtctccaagaacacaagctttggagcgatacctagaacaaccctccattttagcctttttttattttgtaagagtctcttgcaaaggagtattgtcgcttgtcagggagttagacttgttttgtggaacgtttccattagagccaactccacacgaaggattgaaaatacagaggtttgcgttag

SEQ ID NO: 1417 - protein, 276 aa, Zea mays subsp. mays
  peptide (1)..(276): Ceres Seq. ID no. 12365170
MSKGPVPFANIGKRAKDLLYKDYNFDQKFSLSTSSGSGLNLTATGVKINEDFIGDIRTQHKSSRTTIDVTVDSDSKVSTTVTVDEALTGLKTSFAFKVPDHKSGKLDLQYAHNRFSLNSTIGLTSAPLVELAATVGTSELSIGAEVGFDSTSAAVTKYNSGIGYNKSDFSASLLLADKGETLKASYVHLFNPTNGATVAAEVTHKLKTRENYFTVGSSHALDPSTLLKTRFSNSGKVGLLCQHEWRPKSLVTLSAEYDPKVVSAPSRIGMAISLKP

SEQ ID NO: 1418 - DNA, 1431 bp, Zea mays subsp. mays
  misc_feature (1)..(1431): Ceres Seq. ID no. 13494461
  misc_feature (1)..(1431): Ortholog of  Ceres SEQ ID NO 13639663 as cited in SEQ ID NO 57850
  misc_feature (1)..(1431): Ortholog of  Ceres SEQ ID NO 15224330 as cited in SEQ ID NO 58808
aaccttctttccgctcacgacctgagtcccctctcccaggcccaggcagccgccgcccgtctctctctctcctccgagtcccttctcccaccgccgcaagcgctcgcccgagccacctccctctctccctgtggcctgaccgtgatttgggcgtggcatcctaaggcggtcaagattcgagaggctggaggaaccaagcgtagggcctccgccaccacgtcgtcgtccgcgcgcgccgcccgccggcgcaaggaggcgccacagcctccgacgcctagggagatgggggccgattactacaaggtcctcggcgtcgaccgcggcgccggcgacgacgacctcaagaaggcctaccggaagctcgccatgcgatggcaccccgacaagaacaccaccaacaagaaggaggcagaaaccaagttcaaggatatctctgttgcatatgaggtccttagtgatcccaagaaacgtgcaatctatgatcagctaggagaagaaggcttcaaggggcagccgcccccaggagcaggaggttctggcgcatttcccttcttccctggcggggctcattccaccgctccccattttaatcacaggagtgcggatgatatatttaaggagttctttggatcccctggcatgggtggcatgagagcggaaccaggattccagaggtcaatgtttggcaacgatatcttctcttcacgctttggcgctgagggttccaccagtatgcagcagccaccacgcaaggcagctgcaattgagaacccacttccagtcagccttgcagatctgtacaagggcgtcacgaaaaagatgaaaatctcaagagaggctatagatgccagcgggagaatctcaaacgcagaggatattctgacaatagaagtaaggcctggttggaagaagggaacaaagattacatttcccgacaaggggaatgaagctccaaacatgaaagctgctgatattgttttcatcctcgatgagaagccccatgatgttttcactcgggatgggaatgatcttgtggtgactgagaaaatctcgctggtggaagcgctgactggatatactgcacgtgtcactacgctcgatgggcggagcctatcattgcccatcaactcgataatccatccgagctatgaagaggtagttcctagagagggcatgccaatacccaaggacccctctaagaagggaaatctgcggattaagttcaacataatgttcccttctaggctgacgtctgatcagaaggctggtctcaaaaggatattgggttcttaggccgcctcaaatgacattttatagtgaaaggtattgtgaatatcgccagtaattggctaggtagattatttatttatttatgtaacatatctgtaacggatggttataatgtgtcagatttttatctcattattattt

SEQ ID NO: 1419 - protein, 430 aa, Zea mays subsp. mays
  peptide (1)..(430): Ceres Seq. ID no. 13494462
NLLSAHDLSPLSQAQAAAARLSLSSESLLPPPQALARATSLSPCGLTVIWAWHPKAVKIREAGGTKRRASATTSSSARAARRRKEAPQPPTPREMGADYYKVLGVDRGAGDDDLKKAYRKLAMRWHPDKNTTNKKEAETKFKDISVAYEVLSDPKKRAIYDQLGEEGFKGQPPPGAGGSGAFPFFPGGAHSTAPHFNHRSADDIFKEFFGSPGMGGMRAEPGFQRSMFGNDIFSSRFGAEGSTSMQQPPRKAAAIENPLPVSLADLYKGVTKKMKISREAIDASGRISNAEDILTIEVRPGWKKGTKITFPDKGNEAPNMKAADIVFILDEKPHDVFTRDGNDLVVTEKISLVEALTGYTARVTTLDGRSLSLPINSIIHPSYEEVVPREGMPIPKDPSKKGNLRIKFNIMFPSRLTSDQKAGLKRILGS

SEQ ID NO: 1420 - protein, 336 aa, Zea mays subsp. mays
  peptide (1)..(336): Ceres Seq. ID no. 13494463
MGADYYKVLGVDRGAGDDDLKKAYRKLAMRWHPDKNTTNKKEAETKFKDISVAYEVLSDPKKRAIYDQLGEEGFKGQPPPGAGGSGAFPFFPGGAHSTAPHFNHRSADDIFKEFFGSPGMGGMRAEPGFQRSMFGNDIFSSRFGAEGSTSMQQPPRKAAAIENPLPVSLADLYKGVTKKMKISREAIDASGRISNAEDILTIEVRPGWKKGTKITFPDKGNEAPNMKAADIVFILDEKPHDVFTRDGNDLVVTEKISLVEALTGYTARVTTLDGRSLSLPINSIIHPSYEEVVPREGMPIPKDPSKKGNLRIKFNIMFPSRLTSDQKAGLKRILGS

SEQ ID NO: 1421 - protein, 308 aa, Zea mays subsp. mays
  peptide (1)..(308): Ceres Seq. ID no. 13494464
MRWHPDKNTTNKKEAETKFKDISVAYEVLSDPKKRAIYDQLGEEGFKGQPPPGAGGSGAFPFFPGGAHSTAPHFNHRSADDIFKEFFGSPGMGGMRAEPGFQRSMFGNDIFSSRFGAEGSTSMQQPPRKAAAIENPLPVSLADLYKGVTKKMKISREAIDASGRISNAEDILTIEVRPGWKKGTKITFPDKGNEAPNMKAADIVFILDEKPHDVFTRDGNDLVVTEKISLVEALTGYTARVTTLDGRSLSLPINSIIHPSYEEVVPREGMPIPKDPSKKGNLRIKFNIMFPSRLTSDQKAGLKRILGS

SEQ ID NO: 1422 - DNA, 1394 bp, Zea mays subsp. mays
  misc_feature (1)..(1394): Ceres Seq. ID no. 12353583
  misc_feature (1)..(1394): Ortholog of  Ceres SEQ ID NO 13638160 as cited in SEQ ID NO 58847
agatcccctcacagtcatcctccacccaccccacccaccgcctccgcctctctctctctctcgtttgttcgtctcggcttccggtcgccgattcttctctgcgcaaaagattcctggtggtggtgcccgtaccttgctccacgcctcgctcgcgtcgcgtgcatggggctggacgtcggcggcatcgggatgggcctggatctgggtctggacctcgggctgttcgccgcgcggagcgccggagggatggcggccgcggccaagggtgcgccggcggagatcgagtcctgcatcaggagcctcgaggaggagcgccggaagatcgaggtgttcaggcgcgagctcccgctctgcgtgcgtctcctcgccgatgtaatcgacgaattgaaggatgaggccgccaagagaggcggagacgcggaggccaaggccgacgacggcgataagcggaaatggatgagcaccgctcagctgtggctcgacagcgacgccaaatccgacgagtctgacaaagagcaactgagtgaaatcacttcgccggagcccaagttgctcggtggcgcacccatgcccataagggccgttgcggcggtgccacccctgccgcctccattcttcaggagagaagacagctctgccggcagtggtctgtcgctggtaccacccgcagctaagccgccgattcctcccatgtctgccagcgacaacgcgagcggcagattctgtgccactatgccaccgtctggctctggggccaacttgcactctcaggctcagcagcaagccaggaaggcgaggcggtgctggtcgccggagcttcaccggctgtttgttgccgccttgcatcaactcggcggccctcaagttgctactccgaagcagatcagggaggtgatgaaggtggacgggcttacaaacgatgaagtgaaaagccatctccagaagtaccggctgcacaacagaagatcccccggcgtcgtggctccggtgagccagtcggtcatgctggcgggcggcctctgggctcctcctcatcaggagcaaagcagctcgcagtccgggtctccccagggcccgcttcagttctctggatccggtgtagcggccaccgtcggcggcgatagcagcagcagcgacgaggacgacaagtccgaaggctacagccggaaatacgtgtaaaggccgcgttcgacggatgagagtgtagagatagcgtcgcggcttctgcttgcccgtctgtggcaataacagattcatcagtcttgagagaggttgtagtgcgtgcgcccaagagctcaactgatcatgggttggattgtttgtttgtcatgtacgtacatggaaagctgatggcttcctgacttttaatttctgggcaggtcccaaaattttcg

SEQ ID NO: 1423 - protein, 392 aa, Zea mays subsp. mays
  peptide (1)..(392): Ceres Seq. ID no. 12353584
RSPHSHPPPTPPTASASLSLSFVRLGFRSPILLCAKDSWWWCPYLAPRLARVACMGLDVGGIGMGLDLGLDLGLFAARSAGGMAAAAKGAPAEIESCIRSLEEERRKIEVFRRELPLCVRLLADVIDELKDEAAKRGGDAEAKADDGDKRKWMSTAQLWLDSDAKSDESDKEQLSEITSPEPKLLGGAPMPIRAVAAVPPLPPPFFRREDSSAGSGLSLVPPAAKPPIPPMSASDNASGRFCATMPPSGSGANLHSQAQQQARKARRCWSPELHRLFVAALHQLGGPQVATPKQIREVMKVDGLTNDEVKSHLQKYRLHNRRSPGVVAPVSQSVMLAGGLWAPPHQEQSSSQSGSPQGPLQFSGSGVAATVGGDSSSSDEDDKSEGYSRKYV

SEQ ID NO: 1424 - protein, 338 aa, Zea mays subsp. mays
  peptide (1)..(338): Ceres Seq. ID no. 12353585
MGLDVGGIGMGLDLGLDLGLFAARSAGGMAAAAKGAPAEIESCIRSLEEERRKIEVFRRELPLCVRLLADVIDELKDEAAKRGGDAEAKADDGDKRKWMSTAQLWLDSDAKSDESDKEQLSEITSPEPKLLGGAPMPIRAVAAVPPLPPPFFRREDSSAGSGLSLVPPAAKPPIPPMSASDNASGRFCATMPPSGSGANLHSQAQQQARKARRCWSPELHRLFVAALHQLGGPQVATPKQIREVMKVDGLTNDEVKSHLQKYRLHNRRSPGVVAPVSQSVMLAGGLWAPPHQEQSSSQSGSPQGPLQFSGSGVAATVGGDSSSSDEDDKSEGYSRKYV

SEQ ID NO: 1425 - protein, 329 aa, Zea mays subsp. mays
  peptide (1)..(329): Ceres Seq. ID no. 12353586
MGLDLGLDLGLFAARSAGGMAAAAKGAPAEIESCIRSLEEERRKIEVFRRELPLCVRLLADVIDELKDEAAKRGGDAEAKADDGDKRKWMSTAQLWLDSDAKSDESDKEQLSEITSPEPKLLGGAPMPIRAVAAVPPLPPPFFRREDSSAGSGLSLVPPAAKPPIPPMSASDNASGRFCATMPPSGSGANLHSQAQQQARKARRCWSPELHRLFVAALHQLGGPQVATPKQIREVMKVDGLTNDEVKSHLQKYRLHNRRSPGVVAPVSQSVMLAGGLWAPPHQEQSSSQSGSPQGPLQFSGSGVAATVGGDSSSSDEDDKSEGYSRKYV

SEQ ID NO: 1426 - DNA, 1325 bp, Zea mays subsp. mays
  misc_feature (1)..(1325): Ceres Seq. ID no. 12411183
  misc_feature (1)..(1325): Ortholog of  Ceres SEQ ID NO 15171228 as cited in SEQ ID NO 56948
  misc_feature (1)..(1325): Ortholog of  Ceres SEQ ID NO 13597134 as cited in SEQ ID NO 64501
  misc_feature (1)..(1325): Ortholog of  Ceres SEQ ID NO 15174333 as cited in SEQ ID NO 0
  misc_feature (1)..(1325): Ortholog of  Ceres SEQ ID NO 15179047 as cited in SEQ ID NO 0
gcaaaaagtcgccctcttcctccactcgccgacacacacggcgcaaatccccacaaccccaagcgggcgggcggacttccacccaccttctcgcgcggcgacgtgctcggctcgcttccagccacctcgctcgccgcccgcctcggaatccccgccgcgagatcttgttccccggaggatggaggtgaaaacagtaaaagttagcaatctttcattaaatgctttgaaaagagagatcacagagttcttcagtttctcaggagatatagaatatgttgaaatgcaaagtgaatctgaatggtcacagcttgcttatgtcacatttaaagactcacagggagcagacactgctgttcttctctcgggggcaacaatcgtggatcgtgctgtcattataactcctgctgagaactatcagctgcctctggaagcacacaaacaattatcgggagcaaacgtctctactgaatcagcagtaaggaaggcagaagatgttgtgagcagcatgctggccaagggcttcgtcctcagcaaagacgcactcaacttggcaagatcatttgacgagcgtcacaacatcctatccaacgccactgccactgttgcatccctagaccgccagtatggcctgagcgaaaagatcagtctcggaagggccattgtcggcagcaaggtcaaggaggtggacgagcggtaccaggtctcagaactcaccaagtccgccttggctgccgccgagcagaaagccagcgtcgcgggctccgctatactgagcaaccagtatgtctcggctggtgcctcgtggctaacaagcgcgttcgatatggtaacgaaggcagcgggcgacatgacctcgatggccaaagataaggtggagagggccgaggaggagaggaaagccatcatgtgggaggagaggagtgggctggtcagcgagtacgcgaagatccatcttgacgagccctcttcgtgggagcccgcggttctgcctctggaatcagtggacgagcagaagctccaagctgtctgacacgcagagaccgagtctctcgcacgaaattcttttttgcagctcgtcctatatatagattgttctttttcgtcggtgcactggatcaaaacaattgcgcttgtcggccagtgccgtgtaaatttctgagagttggtcttgtgttattaccaggttttgttcgtttctttcgttttggagagagtggtgctaccagcactactacactagactactctgtgtgaatggaatactactgtactttgtctcttcttctactactactacagaaacataatataacttccttcgttag

SEQ ID NO: 1427 - protein, 342 aa, Zea mays subsp. mays
  peptide (1)..(342): Ceres Seq. ID no. 12411184
QKVALFLHSPTHTAQIPTTPSGRADFHPPSRAATCSARFQPPRSPPASESPPRDLVPRRMEVKTVKVSNLSLNALKREITEFFSFSGDIEYVEMQSESEWSQLAYVTFKDSQGADTAVLLSGATIVDRAVIITPAENYQLPLEAHKQLSGANVSTESAVRKAEDVVSSMLAKGFVLSKDALNLARSFDERHNILSNATATVASLDRQYGLSEKISLGRAIVGSKVKEVDERYQVSELTKSALAAAEQKASVAGSAILSNQYVSAGASWLTSAFDMVTKAAGDMTSMAKDKVERAEEERKAIMWEERSGLVSEYAKIHLDEPSSWEPAVLPLESVDEQKLQAV

SEQ ID NO: 1428 - protein, 283 aa, Zea mays subsp. mays
  peptide (1)..(283): Ceres Seq. ID no. 12411185
MEVKTVKVSNLSLNALKREITEFFSFSGDIEYVEMQSESEWSQLAYVTFKDSQGADTAVLLSGATIVDRAVIITPAENYQLPLEAHKQLSGANVSTESAVRKAEDVVSSMLAKGFVLSKDALNLARSFDERHNILSNATATVASLDRQYGLSEKISLGRAIVGSKVKEVDERYQVSELTKSALAAAEQKASVAGSAILSNQYVSAGASWLTSAFDMVTKAAGDMTSMAKDKVERAEEERKAIMWEERSGLVSEYAKIHLDEPSSWEPAVLPLESVDEQKLQAV

SEQ ID NO: 1429 - protein, 249 aa, Zea mays subsp. mays
  peptide (1)..(249): Ceres Seq. ID no. 12411186
MQSESEWSQLAYVTFKDSQGADTAVLLSGATIVDRAVIITPAENYQLPLEAHKQLSGANVSTESAVRKAEDVVSSMLAKGFVLSKDALNLARSFDERHNILSNATATVASLDRQYGLSEKISLGRAIVGSKVKEVDERYQVSELTKSALAAAEQKASVAGSAILSNQYVSAGASWLTSAFDMVTKAAGDMTSMAKDKVERAEEERKAIMWEERSGLVSEYAKIHLDEPSSWEPAVLPLESVDEQKLQAV

SEQ ID NO: 1430 - DNA, 1997 bp, Zea mays subsp. mays
  misc_feature (1)..(1997): Ceres Seq. ID no. 12372765
  misc_feature (1)..(1997): Ortholog of  Ceres SEQ ID NO 13598582 as cited in SEQ ID NO 65294
  misc_feature (1)..(1997): Ortholog of  Ceres SEQ ID NO 15176114 as cited in SEQ ID NO 67627
  misc_feature (1)..(1997): Ortholog of  Ceres SEQ ID NO 15176145 as cited in SEQ ID NO 0
attcagatttcatcctcggcgtcgtctcctgtcctctccacgccaagcaacctccccaccccgccccaccctccatgctcgcctcgagatcttagcgggcagctccggagagcgccgacgagccccctgatccctcctcgccgccgccgccaaccgaccgggggaggagaggaggggaggggagcgatggagaccgccgactactccgggaagctcttcgtcggcggcatctcatgggagacggacgaggaccgcctccgcgagtacttcggccgcttcggtgaggtcactgaggccgtcatcatgcgggaccgcagcacgggccgcgctcgagggttcggtttcgtggtctttgctgacgccacggtcgccgagcgcgtcaccatcgaaaaacacatgatcgacggccgaatggtggaggccaagaaggctgttcccagggatgaccacagtattgtgagcaagagcaacacaagcagcatagggtcacctgggccgggccgtaccagaaagatctttgttggaggtctgccctcaaatgttacagaggctgacttcagggggtattttgagcagttcggtgtcataactgatgtggttgtgatgtatgatcacaacacacagagaccgaggggctttggattcatcacctatgattcagaagatgctgtggacaaagccctgcacaagagctttcatgagctaaatggtaaaatggttgaggtcaagaaggctgttccaaaggagcagtctcctggacctgttgcacgctcacctgcaggagtggggcagaactatgctatgaacagggttcatagcttcttgaatgacttcaaccaaggttacaatccgaaccctataggaggttatggcatgagggtggatggaaggtttggccagctttcaggtgcacgaaatgggctctcttcttttggcccaggttatgggatgggtatgaacgttgaaggtaggatgagtggaacttttggtgcaaactctggtttcatcagtaactccaatgggaggcaaatgggttcatacttcaatggaagttcgaatagattgagtagttctattgggtatcttggttatgactcaggatcgatgttgagttccatgtctaggaattttaatgcaggtgtaaactacccgatcaatcctacaaacatgagtgcttttgctgcccttggaaatgggggtggcgtcaattatatgggtctcccttctattgcccctgagttggcccagttgggcaacatttcaagccttgggtcagggaactttagccgtggagctggagttaataacttaagcttaccttctggctcctatgggaggagcaattcaactggtacaattggtgaacctttttctgcatcaggcaatgcatatgaagtgaacaacccagatacatatgggaacaactctatttatggtggaacatcctggaggttcccttcatctgaagttgacgtgccttctttcagtcatgatcttggaaatgttgatccgaatatgaaatcagacatatcagcaaattacatgggaaattattctgttagcaacaatcagccaagcagaggtatcacttcatagtgggagtattactacacattcatatatgacttgggatagatgaagcacccattcagtcaggcagccaggtgcgtgcatggcactgtgaatgggtgatatgtcaggttagttttgtctagctgaccagcggtgtggtttacaacaccaacatgctagagggggaggaagcggatacagaaacattttctgaggggcttctttttctttgagtcatgtttttagttttgattcctgcgcgtggctagctccttttggtttttgaatgagatgtgtagtggtgattattgcggcgcatattttagagatcgtggttcttccaacataagctggaaaaagaagtctgtatacggatgaacatgtataccaaccaaagggatgctgtattatcttgcccatttgtt

SEQ ID NO: 1431 - protein, 531 aa, Zea mays subsp. mays
  peptide (1)..(531): Ceres Seq. ID no. 12372766
IQISSSASSPVLSTPSNLPTPPHPPCSPRDLSGQLRRAPTSPLIPPRRRRQPTGGGEEGRGAMETADYSGKLFVGGISWETDEDRLREYFGRFGEVTEAVIMRDRSTGRARGFGFVVFADATVAERVTIEKHMIDGRMVEAKKAVPRDDHSIVSKSNTSSIGSPGPGRTRKIFVGGLPSNVTEADFRGYFEQFGVITDVVVMYDHNTQRPRGFGFITYDSEDAVDKALHKSFHELNGKMVEVKKAVPKEQSPGPVARSPAGVGQNYAMNRVHSFLNDFNQGYNPNPIGGYGMRVDGRFGQLSGARNGLSSFGPGYGMGMNVEGRMSGTFGANSGFISNSNGRQMGSYFNGSSNRLSSSIGYLGYDSGSMLSSMSRNFNAGVNYPINPTNMSAFAALGNGGGVNYMGLPSIAPELAQLGNISSLGSGNFSRGAGVNNLSLPSGSYGRSNSTGTIGEPFSASGNAYEVNNPDTYGNNSIYGGTSWRFPSSEVDVPSFSHDLGNVDPNMKSDISANYMGNYSVSNNQPSRGITS

SEQ ID NO: 1432 - protein, 469 aa, Zea mays subsp. mays
  peptide (1)..(469): Ceres Seq. ID no. 12372767
METADYSGKLFVGGISWETDEDRLREYFGRFGEVTEAVIMRDRSTGRARGFGFVVFADATVAERVTIEKHMIDGRMVEAKKAVPRDDHSIVSKSNTSSIGSPGPGRTRKIFVGGLPSNVTEADFRGYFEQFGVITDVVVMYDHNTQRPRGFGFITYDSEDAVDKALHKSFHELNGKMVEVKKAVPKEQSPGPVARSPAGVGQNYAMNRVHSFLNDFNQGYNPNPIGGYGMRVDGRFGQLSGARNGLSSFGPGYGMGMNVEGRMSGTFGANSGFISNSNGRQMGSYFNGSSNRLSSSIGYLGYDSGSMLSSMSRNFNAGVNYPINPTNMSAFAALGNGGGVNYMGLPSIAPELAQLGNISSLGSGNFSRGAGVNNLSLPSGSYGRSNSTGTIGEPFSASGNAYEVNNPDTYGNNSIYGGTSWRFPSSEVDVPSFSHDLGNVDPNMKSDISANYMGNYSVSNNQPSRGITS

SEQ ID NO: 1433 - protein, 430 aa, Zea mays subsp. mays
  peptide (1)..(430): Ceres Seq. ID no. 12372768
MRDRSTGRARGFGFVVFADATVAERVTIEKHMIDGRMVEAKKAVPRDDHSIVSKSNTSSIGSPGPGRTRKIFVGGLPSNVTEADFRGYFEQFGVITDVVVMYDHNTQRPRGFGFITYDSEDAVDKALHKSFHELNGKMVEVKKAVPKEQSPGPVARSPAGVGQNYAMNRVHSFLNDFNQGYNPNPIGGYGMRVDGRFGQLSGARNGLSSFGPGYGMGMNVEGRMSGTFGANSGFISNSNGRQMGSYFNGSSNRLSSSIGYLGYDSGSMLSSMSRNFNAGVNYPINPTNMSAFAALGNGGGVNYMGLPSIAPELAQLGNISSLGSGNFSRGAGVNNLSLPSGSYGRSNSTGTIGEPFSASGNAYEVNNPDTYGNNSIYGGTSWRFPSSEVDVPSFSHDLGNVDPNMKSDISANYMGNYSVSNNQPSRGITS

SEQ ID NO: 1434 - DNA, 1746 bp, Zea mays subsp. mays
  misc_feature (1)..(1746): Ceres Seq. ID no. 12373429
  misc_feature (1)..(1746): Ortholog of  Ceres SEQ ID NO 14315362 as cited in SEQ ID NO 59401
gaggaaaaacttttttgaaaacaaaaaaccccccactcccacgtcccaccacctcgcctcggccgctgcgacagtgcatacgccccctcccctcctgactcctgttgcgtatacaccgtatgtgtctactgtgactccgggtcccgggggggtaagcgaccgagcaaggcttcgtctccggcggcggaggcggatctgggagggatggggaaccggataggcgggcggcgcaagtcgggggtggaggagcggttcacgcggccgcagggtctctacgaccacaaggacatcgaccagaagaagctgcgcaagctcatcctcgaggccaagctcgcgccctgctacccgggcgccgacgacgccgcgcccggcggaggggacctcgaggagtgccccatctgcttcctgtactacccaagcctcaaccgttcaaagtgttgctcaaaggggatatgtacagagtgttttcttcaaatgaaaccaactcatactgctcgacctacacagtgcccattctgcaaaacgcctaattatgctgtggagtatcgtggtgtgaaaacaaaggaggaaaggagcatagagcagtttgaagaacagaaagtcatagaagcacagttgaggatgcgccaaaaagaactccaagatgaagaagctaaaatgagaagaaaacagggcaggtgttcttctagcagaacggtaacaccaacaacagaagttgagtatcgagatatttgcagcacatccttttcagtgccatcatatcaatgtactgagcaaggaaatgaatgctgttcatctgaaccttcatgctctagccaggctaacaggcggcctttccattctagacacaaccgtgatgataatgttgacatgaatctggagaacatgatggttatggaagcaatttggcgttccattcagcaggaacaaggacatctagtaaatcctgtttgtggcagctactttcctgtaattgagccaccatcacgtgaaaggcaggcatttcttccggctgctcctctagaaatgcctcatccaggtggatactcttgtgttgcggctttggctgagcaccagccaccaagcatggatttctcttacatggctggcagtagcacatacccagtctttgacatgatccgccgaccgtgcaacatgtctagtggaagcttgtgcagcgtcgagaacagttcactagacacctggagcgggatggcaccaaattacagcagaggagtggtaagagaggagggagagtgctcaaccgaccactggtcggagggtgcggaggcgggaacaagctatgccggatcggacatcatggtggatgcaggggccatgcaaccgctgcctttcgctgagaatttcaccatggctccaagccacttccgcccggagagcatcgaggagcagatgatgttttccatggccgtgtcactagcagaaggtcatcatggtaggacgcaagcgcaaggtctggcatggttgtaagttgtataacactaattttgacgccttgatccctgcccctttctgttggttcgacctgcttcccctgcacctctgcttttttgccactttgtttagctttttgctccttttttttcttttctttcttttttgcatgtgtttcttcatggcttgatatagatcttgctatagtcctccattgtcattgcttatatgtatgtaaaatggaatatgtggaaataggaaagaaaatgggtcgaaagttcttttgccggt

SEQ ID NO: 1435 - protein, 428 aa, Zea mays subsp. mays
  peptide (1)..(428): Ceres Seq. ID no. 12373430
MGNRIGGRRKSGVEERFTRPQGLYDHKDIDQKKLRKLILEAKLAPCYPGADDAAPGGGDLEECPICFLYYPSLNRSKCCSKGICTECFLQMKPTHTARPTQCPFCKTPNYAVEYRGVKTKEERSIEQFEEQKVIEAQLRMRQKELQDEEAKMRRKQGRCSSSRTVTPTTEVEYRDICSTSFSVPSYQCTEQGNECCSSEPSCSSQANRRPFHSRHNRDDNVDMNLENMMVMEAIWRSIQQEQGHLVNPVCGSYFPVIEPPSRERQAFLPAAPLEMPHPGGYSCVAALAEHQPPSMDFSYMAGSSTYPVFDMIRRPCNMSSGSLCSVENSSLDTWSGMAPNYSRGVVREEGECSTDHWSEGAEAGTSYAGSDIMVDAGAMQPLPFAENFTMAPSHFRPESIEEQMMFSMAVSLAEGHHGRTQAQGLAWL

SEQ ID NO: 1436 - protein, 338 aa, Zea mays subsp. mays
  peptide (1)..(338): Ceres Seq. ID no. 12373431
MKPTHTARPTQCPFCKTPNYAVEYRGVKTKEERSIEQFEEQKVIEAQLRMRQKELQDEEAKMRRKQGRCSSSRTVTPTTEVEYRDICSTSFSVPSYQCTEQGNECCSSEPSCSSQANRRPFHSRHNRDDNVDMNLENMMVMEAIWRSIQQEQGHLVNPVCGSYFPVIEPPSRERQAFLPAAPLEMPHPGGYSCVAALAEHQPPSMDFSYMAGSSTYPVFDMIRRPCNMSSGSLCSVENSSLDTWSGMAPNYSRGVVREEGECSTDHWSEGAEAGTSYAGSDIMVDAGAMQPLPFAENFTMAPSHFRPESIEEQMMFSMAVSLAEGHHGRTQAQGLAWL

SEQ ID NO: 1437 - protein, 289 aa, Zea mays subsp. mays
  peptide (1)..(289): Ceres Seq. ID no. 12373432
MRQKELQDEEAKMRRKQGRCSSSRTVTPTTEVEYRDICSTSFSVPSYQCTEQGNECCSSEPSCSSQANRRPFHSRHNRDDNVDMNLENMMVMEAIWRSIQQEQGHLVNPVCGSYFPVIEPPSRERQAFLPAAPLEMPHPGGYSCVAALAEHQPPSMDFSYMAGSSTYPVFDMIRRPCNMSSGSLCSVENSSLDTWSGMAPNYSRGVVREEGECSTDHWSEGAEAGTSYAGSDIMVDAGAMQPLPFAENFTMAPSHFRPESIEEQMMFSMAVSLAEGHHGRTQAQGLAWL

SEQ ID NO: 1438 - DNA, 1818 bp, Zea mays subsp. mays
  misc_feature (1)..(1818): Ceres Seq. ID no. 13492735
  misc_feature (1)..(1818): Ortholog of  Ceres SEQ ID NO 14304823 as cited in SEQ ID NO 54902
atcccgggatcctcgttttgtttcccttcccccacccttcctcttcctccctatctatcagcactgctcgccggcgccgcctctgcaaaaggctcacttttgcctccggaacccagcggaatccgccggcggaccggaaacactccctcgcccccctcaccccctgtctgcccggccgtcggagcgcgtcgcctccgggcgtgcagcagcagtccgtggaggtggagccgggaggaggaggaggaggacgaggacgaggcataatctgccgagagcgggacagcaggagtgggctgctccgctcgcgctggagccaaagctactgattgccttgtcctgaccagcgaaagagggatctttgggaggcaatcagaggtgttcggtttggtcaaacaaagctcagctctcttgggatgcttgctgcgagctgcttgtgttcatacttgagagaataaaacagtgcatcatcttgctgtcttgtccttcgtgattggaagagaaaacgtgctgctgttcttgctatgtctgtctcggagaaggtggcgccatcgaagtcatcagtttcttcgtcgtcagatttggatccgctgctgaaggatctcacggagaagaagttgacctttaggaggaacgtggtgtcattggcagctgagctcaaggatgcgaggaacaagcttgcctcccaggagcagctgtttgtaaaggaatctcaaactagaaaggttgttgagacaaaggcaaggagcatggaagaggaagtaagcaagctgcagaaatgcttgcaggacaaggatgagcaactgcgttcatccgcaagtagcacggaacagtacctccatgagttggatgatcttagaacacaactgtcaattactcaagctacagcagaagcgagtgctgcatcagccaagtcagctcaggtgcagtgcttgtcattgctgaaagagctgaatgagaaggacatctcgctcaaagagcatgagcttcgagtgaacaagctaggtgagcagctcgatcttctccagaaggatctacaagcaagggagctctcacaaatgcaacttaaggatgaagttctaagaattgagaccgacatcatggatgcaattgccaaagctgggtctaggtctgacaaagacaatgagcttttaaagatcttatctgacgtttcaccaaggaatgtccagaacctcaacagccttttgaatgctaagaatacagaaattgcgaggttgagagaggaaatcagaatattatctgctcactggacgaacaaaaccaaggaacttgaatcacagttagaaaagcagcgaagaactgatcaggagctgaagaagagggtcctgaagcttgaattttgccttcaagaatctcagtcccagatgcgaaaattaaagaggatgggggagaaaagagacaaggctctcaaggagctcatggaccaggtggccatgaagcagcccaacagcatgtgccatggaaacaaggataatttctgggagagccagggcttcaggttcattgcctctatgtcgatgctggcgctagtgatcctcgcaaagcgttgaagcggcatagtttaagcagatgtgaatgtagcgtttacattagcttgtaggcttgggcagttgtgcatactgcatgccaaaatttgccgacatccaatcctagtctgtaaactgtaaaaatagttgtggcctgtaatccgtagcgcagtttctgctagttcatgtaaacccatataagctgtcttgtagtcacagctagtgaatgtcagctcatgtagtcaagaatctacaaccttataatttcagttcc

SEQ ID NO: 1439 - protein, 348 aa, Zea mays subsp. mays
  peptide (1)..(348): Ceres Seq. ID no. 13492736
MSVSEKVAPSKSSVSSSSDLDPLLKDLTEKKLTFRRNVVSLAAELKDARNKLASQEQLFVKESQTRKVVETKARSMEEEVSKLQKCLQDKDEQLRSSASSTEQYLHELDDLRTQLSITQATAEASAASAKSAQVQCLSLLKELNEKDISLKEHELRVNKLGEQLDLLQKDLQARELSQMQLKDEVLRIETDIMDAIAKAGSRSDKDNELLKILSDVSPRNVQNLNSLLNAKNTEIARLREEIRILSAHWTNKTKELESQLEKQRRTDQELKKRVLKLEFCLQESQSQMRKLKRMGEKRDKALKELMDQVAMKQPNSMCHGNKDNFWESQGFRFIASMSMLALVILAKR

SEQ ID NO: 1440 - protein, 273 aa, Zea mays subsp. mays
  peptide (1)..(273): Ceres Seq. ID no. 13492737
MEEEVSKLQKCLQDKDEQLRSSASSTEQYLHELDDLRTQLSITQATAEASAASAKSAQVQCLSLLKELNEKDISLKEHELRVNKLGEQLDLLQKDLQARELSQMQLKDEVLRIETDIMDAIAKAGSRSDKDNELLKILSDVSPRNVQNLNSLLNAKNTEIARLREEIRILSAHWTNKTKELESQLEKQRRTDQELKKRVLKLEFCLQESQSQMRKLKRMGEKRDKALKELMDQVAMKQPNSMCHGNKDNFWESQGFRFIASMSMLALVILAKR

SEQ ID NO: 1441 - DNA, 1524 bp, Zea mays subsp. mays
  misc_feature (1)..(1524): Ceres Seq. ID no. 12374227
  misc_feature (1)..(1524): Ortholog of  Ceres SEQ ID NO 14312844 as cited in SEQ ID NO 55601
  misc_feature (1)..(1524): Ortholog of  Ceres SEQ ID NO 14312866 as cited in SEQ ID NO 55630
  misc_feature (1)..(1524): Ortholog of  Ceres SEQ ID NO 13597376 as cited in SEQ ID NO 64002
  misc_feature (1)..(1524): Ortholog of  Ceres SEQ ID NO 13503573 as cited in SEQ ID NO 65402
  misc_feature (1)..(1524): Ortholog of  Ceres SEQ ID NO 13659615 as cited in SEQ ID NO 67248
taaaatcattgcagccctggtcctcacaacactctgtatatttgttctgaagcaatctcctggttttggtggcaatagtgtgttttctcgccatgaacatggggttacccacgtcttagtaacaggaggagctggttatattggttcacatgctgctttaaggctcttaaaggataactatcgagttactatcgtggataatctatctagaggaaacatgggagcagtaaaggttctgcagggcttatttccgcagcctgggagactacaattcatctttgctgatctggggaaccagaaatctgtatcctcatttatgcttctaaagctgctttgcttgtgccttttctgcttatggagagttacatccaaagtcttcttttcacttaactggctgccaggtcaacaagatatttgctgaaaatgcatttgatgctgtgatgcactttgcagctgttgcttatgtgggagagagcacattggaaccccttaggtactatcacaatattacatcgaacacactactgattttggaggctatggcatctcatggagtccaaacccttatttactccagtacatgtgctacctacggagaaccagataagatgcctattacagaagccacacctcagttccctatcaatccatatggaaaagctaagaaaatggcagaggatatcataatagatttctcaaactcaaagggagctgacatggctgtcatgattttaagatatttcaatgttattggatctgaccctgagggaagattaggtgaggctcctaggccagaacttcgagagcatggtcggatatctggggcttgctttgatgcagcattaggagtcattccaggattaaaggttaaaggaacagattatcccacagctgatggaacctgcataagagattatattgatgtcacagatttagttgatgctcatgtgaaagcactcaacaaggcagagcctagaaaagtcggcatttacaatgttggaacaggaagaggtcgctcagttaatgagtttgttgatgcctgcaagaaggcaactggggtcaacatcaaaattgagtacctcaacagaaggccaggagattatgcagaagtatacagcgacccaacaaagataaacaaggagctcaactggacagctcattataccgatctcaaagagagcctatcagtcgcatggaggtggcaaaagtcgcatccgcgtggctacgggccaaactaaatatagcctgctgatctataattcacttaatcgtcaatacatattagttctttagttagagatacaagatcttgctgcgatactcctcaaaatcagtccttcgtattcttctttctctcgtcctttttatttcaaaagtttgcatttttggctagcagaaacatgaatggtgatttggatgaaaaaaaggacctgtgatgacaatttcattgtttctgacacattgttggtaaaaaaaatgtaaattgcttcagccaatgagctgcaagattgattgaattgagtt

SEQ ID NO: 1442 - protein, 265 aa, Zea mays subsp. mays
  peptide (1)..(265): Ceres Seq. ID no. 12374228
MHFAAVAYVGESTLEPLRYYHNITSNTLLILEAMASHGVQTLIYSSTCATYGEPDKMPITEATPQFPINPYGKAKKMAEDIIIDFSNSKGADMAVMILRYFNVIGSDPEGRLGEAPRPELREHGRISGACFDAALGVIPGLKVKGTDYPTADGTCIRDYIDVTDLVDAHVKALNKAEPRKVGIYNVGTGRGRSVNEFVDACKKATGVNIKIEYLNRRPGDYAEVYSDPTKINKELNWTAHYTDLKESLSVAWRWQKSHPRGYGPN

SEQ ID NO: 1443 - protein, 232 aa, Zea mays subsp. mays
  peptide (1)..(232): Ceres Seq. ID no. 12374229
MASHGVQTLIYSSTCATYGEPDKMPITEATPQFPINPYGKAKKMAEDIIIDFSNSKGADMAVMILRYFNVIGSDPEGRLGEAPRPELREHGRISGACFDAALGVIPGLKVKGTDYPTADGTCIRDYIDVTDLVDAHVKALNKAEPRKVGIYNVGTGRGRSVNEFVDACKKATGVNIKIEYLNRRPGDYAEVYSDPTKINKELNWTAHYTDLKESLSVAWRWQKSHPRGYGPN

SEQ ID NO: 1444 - protein, 209 aa, Zea mays subsp. mays
  peptide (1)..(209): Ceres Seq. ID no. 12374230
MPITEATPQFPINPYGKAKKMAEDIIIDFSNSKGADMAVMILRYFNVIGSDPEGRLGEAPRPELREHGRISGACFDAALGVIPGLKVKGTDYPTADGTCIRDYIDVTDLVDAHVKALNKAEPRKVGIYNVGTGRGRSVNEFVDACKKATGVNIKIEYLNRRPGDYAEVYSDPTKINKELNWTAHYTDLKESLSVAWRWQKSHPRGYGPN

SEQ ID NO: 1445 - DNA, 1385 bp, Zea mays subsp. mays
  misc_feature (1)..(1385): Ceres Seq. ID no. 12349947
  misc_feature (1)..(1385): Ortholog of  Ceres SEQ ID NO 12474685 as cited in SEQ ID NO 88
  misc_feature (1)..(1385): Ortholog of  Ceres SEQ ID NO 13638574 as cited in SEQ ID NO 51223
  misc_feature (1)..(1385): Ortholog of  Ceres SEQ ID NO 14311531 as cited in SEQ ID NO 51466
  misc_feature (1)..(1385): Ortholog of  Ceres SEQ ID NO 15170465 as cited in SEQ ID NO 52798
  misc_feature (1)..(1385): Ortholog of  Ceres SEQ ID NO 15177112 as cited in SEQ ID NO 55956
  misc_feature (1)..(1385): Ortholog of  Ceres SEQ ID NO 12610790 as cited in SEQ ID NO 56123
  misc_feature (1)..(1385): Ortholog of  Ceres SEQ ID NO 13655636 as cited in SEQ ID NO 63519
  misc_feature (1)..(1385): Ortholog of  Ceres SEQ ID NO 13655896 as cited in SEQ ID NO 64970
  misc_feature (1)..(1385): Ortholog of  Ceres SEQ ID NO 12627322 as cited in SEQ ID NO 67162
attaaaaactcgggccagcaagaaagaaaaaaaaccacaacaagagagagagagagagagagagagagagacagagacagagagagactgccaacgaggcgaagcagccggccaatctagcatccgcgcgcggggtctgagagcagagcggcagggcgccatggcggcatcggtggcgctgagcagcgggcaccggatgccggcggtggggctgggcgtgtggcggatggagaaggcggacatccgcggcctcatccacacagcgctccgcgtcggctaccgccacctggactgcgccgctgactaccagaacgaagctgaagttggtgacgcgctcgcagaggcattccagaccggactcgtcaagcgggaggacctgttcatcacaaccaagctgtggaactcagaccatgggcatgtgcttgaagcctgcaaggacagcctgaagaagctgcagctagactatctcgacctctacctcatccatttcccagtagccactcggcacaccggagtcggcacgacttctagcgctctgggtgacgatggcgtgctggacatcgacaccactatctccctggaaacgacatggcacgcgatggaagagcttgtttccatggggctggtgcgcagcattggaatcagcaactacgacatcttcctcaccagagactgcctggcctacgccaagataaagccggcggtgaaccagatcgagacgcacccttacttccagcgcgactctcttgtcaagttctgccagaagcacgggatctgcgtgaccgcgcacaccccgctgggtggctccaccgccaacgccgagtggttcgggacggtgtcgtgcctggacgaccctgtcatcaagagcttggctgacaagtacggcaagacgccggcgcagctcgtcctccgctggggtctgcagcgggacacggtggtgatccccaagacctccaaggtggagaggctgcaggagaactttgacgtcttcggtttcgacatctccggcgaggacatggagaggatgaaggccgtggaccggaagtaccggactaaccagcctgccaagttctggggcatcgacctctatgcttagcttttagttcggttgcgttgcgtcgcccccccccccagacaagacagcatcaataatgaggattccctcagacggcatcagtcaaagtcacgaggatctcagacagcatcttccatcacatgtgacggtgtgaggctgatggtagggtttggtgtctccacgtgtccctctctctttcagctcagcttcatcaccatgtagactacgcagtgtttgcctccgattatttactgtttttcttccttacaaatccgtacatatctttactggtaggttgaacaatttgctg

SEQ ID NO: 1446 - protein, 364 aa, Zea mays subsp. mays
  peptide (1)..(364): Ceres Seq. ID no. 12349948
LKTRASKKEKKPQQERERERERETETERDCQRGEAAGQSSIRARGLRAERQGAMAASVALSSGHRMPAVGLGVWRMEKADIRGLIHTALRVGYRHLDCAADYQNEAEVGDALAEAFQTGLVKREDLFITTKLWNSDHGHVLEACKDSLKKLQLDYLDLYLIHFPVATRHTGVGTTSSALGDDGVLDIDTTISLETTWHAMEELVSMGLVRSIGISNYDIFLTRDCLAYAKIKPAVNQIETHPYFQRDSLVKFCQKHGICVTAHTPLGGSTANAEWFGTVSCLDDPVIKSLADKYGKTPAQLVLRWGLQRDTVVIPKTSKVERLQENFDVFGFDISGEDMERMKAVDRKYRTNQPAKFWGIDLYA

SEQ ID NO: 1447 - protein, 311 aa, Zea mays subsp. mays
  peptide (1)..(311): Ceres Seq. ID no. 12349949
MAASVALSSGHRMPAVGLGVWRMEKADIRGLIHTALRVGYRHLDCAADYQNEAEVGDALAEAFQTGLVKREDLFITTKLWNSDHGHVLEACKDSLKKLQLDYLDLYLIHFPVATRHTGVGTTSSALGDDGVLDIDTTISLETTWHAMEELVSMGLVRSIGISNYDIFLTRDCLAYAKIKPAVNQIETHPYFQRDSLVKFCQKHGICVTAHTPLGGSTANAEWFGTVSCLDDPVIKSLADKYGKTPAQLVLRWGLQRDTVVIPKTSKVERLQENFDVFGFDISGEDMERMKAVDRKYRTNQPAKFWGIDLYA

SEQ ID NO: 1448 - protein, 299 aa, Zea mays subsp. mays
  peptide (1)..(299): Ceres Seq. ID no. 12349950
MPAVGLGVWRMEKADIRGLIHTALRVGYRHLDCAADYQNEAEVGDALAEAFQTGLVKREDLFITTKLWNSDHGHVLEACKDSLKKLQLDYLDLYLIHFPVATRHTGVGTTSSALGDDGVLDIDTTISLETTWHAMEELVSMGLVRSIGISNYDIFLTRDCLAYAKIKPAVNQIETHPYFQRDSLVKFCQKHGICVTAHTPLGGSTANAEWFGTVSCLDDPVIKSLADKYGKTPAQLVLRWGLQRDTVVIPKTSKVERLQENFDVFGFDISGEDMERMKAVDRKYRTNQPAKFWGIDLYA

SEQ ID NO: 1449 - DNA, 1522 bp, Zea mays subsp. mays
  misc_feature (1)..(1522): Ceres Seq. ID no. 13498918
  misc_feature (1)..(1522): Ortholog of  Ceres SEQ ID NO 15177012 as cited in SEQ ID NO 56256
  misc_feature (1)..(1522): Ortholog of  Ceres SEQ ID NO 14314300 as cited in SEQ ID NO 57386
  misc_feature (1)..(1522): Ortholog of  Ceres SEQ ID NO 14311993 as cited in SEQ ID NO 60371
  misc_feature (1)..(1522): Ortholog of  Ceres SEQ ID NO 13596509 as cited in SEQ ID NO 62004
  misc_feature (1)..(1522): Ortholog of  Ceres SEQ ID NO 13500385 as cited in SEQ ID NO 67583
acataggtgccggactcgtcccagcgaagaaccggacgagcgagcaagaggcctcctcctcaagcttcgaatcctccccttccgcgctttccctccccctcctcctcctcccctttccagtccccaccccagcgaagcttccaaagccgccccaaccccaacggccgcccggcctgatcgagcatacagctgccgcggccctccccgccccgcacgcgacctcggagccatggagaagtacgagctgctgaaggacatcggcgccggcaacttcggcgtggcgcggctcatgcggaacaaggagaccaaggaggctggtcgccatgaagtacatcccccggggccaaaagatcgacgagaatgtggcgagggagatcatcaaccaccgctcgctgcgccaccccaacatcatccggttcaaggaggtggtgctgacgccgacgcacctggcgatcgtgatggagtacgccgccggcggcgagctgttcgaccggatctgcaacgccgggaggttcagcgaggacgaggcgaggtacttcttccagcagctgatttgtggcgtcagctactgccactccatgcaaatctgccaccgagacttgaagctggagaacacgctgctggacggcagcccggcgcctcgcctcaagatctgcgacttcggttactccaagtcgtcgctgctgcactcgaagcccaagtcgacggtcggcacgccggcgtacatcgcccccgaggtgctctcccgccgggaatacgacggcaagacagccgatgtgtggtcctgtggagtcactctttatgtgatgctggtcggtggttacccttttgaggacccagacgacccaaagaatttcagaaagacgatcgggaggatcatgtcaatccaatacaaaataccagagtatgtgcacgtgtcgcaagactgcaaggagctgctttcaaggatctttgttgcaaactctgcaaagagaataacgatcagggagatcaggaaccacccctggttcctgaagaacctgcccagagagctcacggaggctgcgcaggccatgtactacaagaaagacaacagcgccccgacctactccgtccagtccgtggaggagatcatgaagatcgtggagaaggcgcggacgccgcctccttcctccacccctgtggctggcttcggttgggcggaggaggacgagcaggaggacagcaaggaaccagacgaggaacacgaggacggcgaggacgagtacgagaagcaggtgaagcaagtccacgccagcggggagtttcatctcagctgctgatggttttcgccggcctgctagtctgtggtaccagccgatgatggacctgctagtctgtggtcttgtttccaagttttctttcattttttctttcttttgctgtggtgccgcaagactgcaacagttgtaaattattgaagggggttccagcgttgcccttgtattgactgattcaaactagcatggggaacatgattatggaataaaacaggtcgttgagc

SEQ ID NO: 1450 - protein, 325 aa, Zea mays subsp. mays
  peptide (1)..(325): Ceres Seq. ID no. 13498919
MKYIPRGQKIDENVAREIINHRSLRHPNIIRFKEVVLTPTHLAIVMEYAAGGELFDRICNAGRFSEDEARYFFQQLICGVSYCHSMQICHRDLKLENTLLDGSPAPRLKICDFGYSKSSLLHSKPKSTVGTPAYIAPEVLSRREYDGKTADVWSCGVTLYVMLVGGYPFEDPDDPKNFRKTIGRIMSIQYKIPEYVHVSQDCKELLSRIFVANSAKRITIREIRNHPWFLKNLPRELTEAAQAMYYKKDNSAPTYSVQSVEEIMKIVEKARTPPPSSTPVAGFGWAEEDEQEDSKEPDEEHEDGEDEYEKQVKQVHASGEFHLSC

SEQ ID NO: 1451 - protein, 280 aa, Zea mays subsp. mays
  peptide (1)..(280): Ceres Seq. ID no. 13498920
MEYAAGGELFDRICNAGRFSEDEARYFFQQLICGVSYCHSMQICHRDLKLENTLLDGSPAPRLKICDFGYSKSSLLHSKPKSTVGTPAYIAPEVLSRREYDGKTADVWSCGVTLYVMLVGGYPFEDPDDPKNFRKTIGRIMSIQYKIPEYVHVSQDCKELLSRIFVANSAKRITIREIRNHPWFLKNLPRELTEAAQAMYYKKDNSAPTYSVQSVEEIMKIVEKARTPPPSSTPVAGFGWAEEDEQEDSKEPDEEHEDGEDEYEKQVKQVHASGEFHLSC

SEQ ID NO: 1452 - protein, 276 aa, Zea mays subsp. mays
  peptide (1)..(276): Ceres Seq. ID no. 13498921
HRCRTRPSEEPDERARGLLLKLRILPFRAFPPPPPPPLSSPHPSEASKAAPTPTAARPDRAYSCRGPPRPARDLGAMEKYELLKDIGAGNFGVARLMRNKETKEAGRHEVHPPGPKDRRECGEGDHQPPLAAPPQHHPVQGGGADADAPGDRDGVRRRRRAVRPDLQRREVQRGRGEVLLPAADLWRQLLPLHANLPPRLEAGEHAAGRQPGASPQDLRLRLLQVVAAALEAQVDGRHAGVHRPRGALPPGIRRQDSRCVVLWSHSLCDAGRWLPF

SEQ ID NO: 1453 - DNA, 1756 bp, Zea mays subsp. mays
  misc_feature (1)..(1756): Ceres Seq. ID no. 12374223
  misc_feature (1)..(1756): Ortholog of  Ceres SEQ ID NO 14313288 as cited in SEQ ID NO 67419
gcacgagaccattacctagaacatcctaatcgaaaaaactgcaggtttatttgcgtggcgtccagtgcagaggccagccggagccggcgctgtacaacggaggcattctcaagttcggcagcagcagcagcggcggcggcgatccggacgggtaccgcacgacggagaccggcgtcttctccccggcgttcgtggtgtacaacctcaacaagaccaccatgtacaccttctcatgctgggtgaagctggaaggcgcgtactcggctctgatcaccgcgaggctggcgccggacaacaccggcgccaggtgcatcgccacggtggttgccaggagcgactgctgggccttcgtcaagggcggattcgtcctggactggccgacgcagacctcggtcatcttctttcagaatgctgacaagacgcccatgaagatcaccgtggcgagcgggtcgctgcagccgttcaccacggaccagtgggcgatgcaccagcaggataccatccggaagaggaggaagcgcgtggcgaccatccacgtggccgacccgcagggcgcccgcgtggtgggcgcgtccgtgtcggtgcagcagacggccaaggacttcccgatcggttcggcgatcgcgtccaccatccttgggaaccaggcgtaccagcagtggttcgtggaccggttcaacgcggcggtgttcgaggacgagctcaagtggtactcgacggagcccatgtcgggtcagctgcgcttcgacgtgccggaccagatgctggcgttcgtgcggtcgcaccgggtgatggtgcgcggccacaacatcttctgggagaaccaggacgcgacgccccggtgggtgaagaacctgacggcggacgacctccgcgccgccgtcaacacgcgcatccagagcctcatgacccgctaccgcggcgagttcgcgcactgggacgtgaacaacgagatgctgcactacaacttctacgagcagcggctggggcccaacgcgtccgcggagttcttcagcgtcgcgcaggacgccgacccgctggccacgctcttcatgaacgagtacaacgtcatcgagacctgcgacgaccccttctccaccgtcgacacgtacgtggccaagctcaaggacctccgcaccgccggcgccatcctggaagggatcggcctggagggacacttctccaagcccaacatcccgctcatgagggccatactcgacaagctcgccaccctggggctgcccatctggttcaccgagatcgacatcagcaacaagttcgacgcgcagacgcaggccgcctacctggaacaggtgctgcgggaggcatactcgcacccggccgtcagcggcgtcatgctgtggacggcgctgcaccccagcggctgctaccagatgtgcctcaccgactggaacctcagcaacctgcccacgggggacgtggtcgaccgcctgctcaacgagtggcggacgctgcaggcggccggccagaccgacgcgcacggcgcctacagcttcaccggctacctgggggagtacgtcctcactgtcagctacaacaacaggaccacgcagtccaccttctcgctgtcgccgggagacgagaccaggcacatcaacgttcagatgtgacgcgccaacattatatttagggctcctctcctcacggtccgatccatacctggatcggactacttattactagctaatgtagtgactgttgtggaagaagattgcacagtcaatctatgtttctc

SEQ ID NO: 1454 - protein, 470 aa, Zea mays subsp. mays
  peptide (1)..(470): Ceres Seq. ID no. 12374224
MYTFSCWVKLEGAYSALITARLAPDNTGARCIATVVARSDCWAFVKGGFVLDWPTQTSVIFFQNADKTPMKITVASGSLQPFTTDQWAMHQQDTIRKRRKRVATIHVADPQGARVVGASVSVQQTAKDFPIGSAIASTILGNQAYQQWFVDRFNAAVFEDELKWYSTEPMSGQLRFDVPDQMLAFVRSHRVMVRGHNIFWENQDATPRWVKNLTADDLRAAVNTRIQSLMTRYRGEFAHWDVNNEMLHYNFYEQRLGPNASAEFFSVAQDADPLATLFMNEYNVIETCDDPFSTVDTYVAKLKDLRTAGAILEGIGLEGHFSKPNIPLMRAILDKLATLGLPIWFTEIDISNKFDAQTQAAYLEQVLREAYSHPAVSGVMLWTALHPSGCYQMCLTDWNLSNLPTGDVVDRLLNEWRTLQAAGQTDAHGAYSFTGYLGEYVLTVSYNNRTTQSTFSLSPGDETRHINVQM

SEQ ID NO: 1455 - protein, 401 aa, Zea mays subsp. mays
  peptide (1)..(401): Ceres Seq. ID no. 12374225
MKITVASGSLQPFTTDQWAMHQQDTIRKRRKRVATIHVADPQGARVVGASVSVQQTAKDFPIGSAIASTILGNQAYQQWFVDRFNAAVFEDELKWYSTEPMSGQLRFDVPDQMLAFVRSHRVMVRGHNIFWENQDATPRWVKNLTADDLRAAVNTRIQSLMTRYRGEFAHWDVNNEMLHYNFYEQRLGPNASAEFFSVAQDADPLATLFMNEYNVIETCDDPFSTVDTYVAKLKDLRTAGAILEGIGLEGHFSKPNIPLMRAILDKLATLGLPIWFTEIDISNKFDAQTQAAYLEQVLREAYSHPAVSGVMLWTALHPSGCYQMCLTDWNLSNLPTGDVVDRLLNEWRTLQAAGQTDAHGAYSFTGYLGEYVLTVSYNNRTTQSTFSLSPGDETRHINVQM

SEQ ID NO: 1456 - protein, 382 aa, Zea mays subsp. mays
  peptide (1)..(382): Ceres Seq. ID no. 12374226
MHQQDTIRKRRKRVATIHVADPQGARVVGASVSVQQTAKDFPIGSAIASTILGNQAYQQWFVDRFNAAVFEDELKWYSTEPMSGQLRFDVPDQMLAFVRSHRVMVRGHNIFWENQDATPRWVKNLTADDLRAAVNTRIQSLMTRYRGEFAHWDVNNEMLHYNFYEQRLGPNASAEFFSVAQDADPLATLFMNEYNVIETCDDPFSTVDTYVAKLKDLRTAGAILEGIGLEGHFSKPNIPLMRAILDKLATLGLPIWFTEIDISNKFDAQTQAAYLEQVLREAYSHPAVSGVMLWTALHPSGCYQMCLTDWNLSNLPTGDVVDRLLNEWRTLQAAGQTDAHGAYSFTGYLGEYVLTVSYNNRTTQSTFSLSPGDETRHINVQM

SEQ ID NO: 1457 - DNA, 1091 bp, Zea mays subsp. mays
  misc_feature (1)..(1091): Ceres Seq. ID no. 12351358
  misc_feature (1)..(1091): Ortholog of  Ceres SEQ ID NO 12583421 as cited in SEQ ID NO 56410
  misc_feature (1)..(1091): Ortholog of  Ceres SEQ ID NO 15169300 as cited in SEQ ID NO 59572
  misc_feature (1)..(1091): Ortholog of  Ceres SEQ ID NO 15176407 as cited in SEQ ID NO 59620
  misc_feature (1)..(1091): Ortholog of  Ceres SEQ ID NO 13596876 as cited in SEQ ID NO 62696
  misc_feature (1)..(1091): Ortholog of  Ceres SEQ ID NO 13655442 as cited in SEQ ID NO 64359
  misc_feature (1)..(1091): Ortholog of  Ceres SEQ ID NO 14303652 as cited in SEQ ID NO 67569
accaataaaaaggtagagaatacaagaaaccgtcacgaccgcctccgcagtgctctaccatccgttccatggcgccgccgctcgccctgtttcttctcgccgccatcgtgctctcgcgggccgtctcccacggccacggcggcggcggcggcttctacgacccggcgagcgtcactcagctctcctcgcgccccagggcgttcctgtacagcggcttcctctcggacaccgagtgcgaccacatcgtcagcctggcgaaaggcagcatggagaagtcgatggtggcggataacgactccgggaagagtgtggcgagccaggcgcgcaccagctccggcaccttcttggccaagcgcgaggatgagatcgtgtctgcgattgagaaacgcgtagctgcttggacatttctcccggaagaaaacgccgaatcactccaggtcctgcgctacgaaaccggccagaagtatgacgcccacttcgactatttccacgacagaaacaacctgaagctcggcggccagcgagttgcgaccgtccttatgtacctcacagatgtcaagaaaggtggagagactgtatttccaaacgctgagggaagccatttacagtacaaggacgaaacttggtcggagtgttcaagatctggcctggcagtgaagccaaagaaaggagacgcgctactgttcttcaacctccacgtcaacgccacagccgatacaggcagtctccacgggagctgcccggtgatcgagggcgagaaatggtcggcgacgaaatggatccacgtcaggtcgttcgacaaccccccagacgtgaggacggacgcgccgtgctccgacgacaaggagctctgccctagatgggctgctatcggggagtgccacaggaacccgacgtacatggttgggaccaaagacactctcgggttttgccgcaagagctgcgggatctgtgatgcttgaacgtgttttgggggtagattttgatcccatcatgttttcaataacagatgaatcagtaacctagtgtaatgcgaatttcggtacagtcgcctccattggactgtttcgtccaccagatgttctaatact

SEQ ID NO: 1458 - protein, 297 aa, Zea mays subsp. mays
  peptide (1)..(297): Ceres Seq. ID no. 12351359
MAPPLALFLLAAIVLSRAVSHGHGGGGGFYDPASVTQLSSRPRAFLYSGFLSDTECDHIVSLAKGSMEKSMVADNDSGKSVASQARTSSGTFLAKREDEIVSAIEKRVAAWTFLPEENAESLQVLRYETGQKYDAHFDYFHDRNNLKLGGQRVATVLMYLTDVKKGGETVFPNAEGSHLQYKDETWSECSRSGLAVKPKKGDALLFFNLHVNATADTGSLHGSCPVIEGEKWSATKWIHVRSFDNPPDVRTDAPCSDDKELCPRWAAIGECHRNPTYMVGTKDTLGFCRKSCGICDA

SEQ ID NO: 1459 - protein, 231 aa, Zea mays subsp. mays
  peptide (1)..(231): Ceres Seq. ID no. 12351360
MEKSMVADNDSGKSVASQARTSSGTFLAKREDEIVSAIEKRVAAWTFLPEENAESLQVLRYETGQKYDAHFDYFHDRNNLKLGGQRVATVLMYLTDVKKGGETVFPNAEGSHLQYKDETWSECSRSGLAVKPKKGDALLFFNLHVNATADTGSLHGSCPVIEGEKWSATKWIHVRSFDNPPDVRTDAPCSDDKELCPRWAAIGECHRNPTYMVGTKDTLGFCRKSCGICDA

SEQ ID NO: 1460 - protein, 227 aa, Zea mays subsp. mays
  peptide (1)..(227): Ceres Seq. ID no. 12351361
MVADNDSGKSVASQARTSSGTFLAKREDEIVSAIEKRVAAWTFLPEENAESLQVLRYETGQKYDAHFDYFHDRNNLKLGGQRVATVLMYLTDVKKGGETVFPNAEGSHLQYKDETWSECSRSGLAVKPKKGDALLFFNLHVNATADTGSLHGSCPVIEGEKWSATKWIHVRSFDNPPDVRTDAPCSDDKELCPRWAAIGECHRNPTYMVGTKDTLGFCRKSCGICDA

SEQ ID NO: 1461 - DNA, 1935 bp, Zea mays subsp. mays
  misc_feature (1)..(1935): Ceres Seq. ID no. 12341425
  misc_feature (1)..(1935): Ortholog of  Ceres SEQ ID NO 14315515 as cited in SEQ ID NO 57454
attttttctccaaccctttcccctctctttctctctctcatctaccctctctctaaaagactggatacagaacgaggaaaacaaacacccgaaaagaaaggaagaagaggagaagaacaccaaacaagcagaacttttttttttgagaactccataggctgtggaattgtctccaggaatcccctctgggtttgacgagattcatacagagaaatacttcttgattttccccctttcttttgctcaagaatttacctgtacaggcgaaaccgcttctttgttcccttttttttctgtgtttgttttattgggattttcctctggtccgttcttcttcacctgtgaggtggtgagaagcagagagaatcatggggaagcaaggaccctgccgtcattgtggagtcacaagtactcccctgtggcgaaatgggccaccagataagccggtgctctgcaatgcatgtggctcgagatggagaacaaagggttcattggcaaactacactccaatgcatcgcaaggacgatattgatgacgatgaacccagagttagcaagctgaagccaccgacatcaaagctgaagtcacagaagaaaaaaccaaatcacattataatggagaatgggccattttctggtcagaatttccgaaagatgggggatgtcgaccaaagttatcggtctagttcgggatctgcagtatcatactctgagagttgtgccccatatggtgctgctgatgcaagtgaaatgactggttcagcacagtcgcatgcttgggagtccctagtgccatcaagaaagaggagctgtgtcacccgtccgaagccttcccctgtagaaaagcttgcaaaagatctaaacttcatcatgcatgaagagcagttatattacccttcaggatcatcggaggaagacctactataccatagtgaaactcctgtcggttcctttgagatgggctctggaagtgtgcttctaagacatccaaactcgaaatcactggagaaagaatcagaagcaagctctattcctgcagataataaatcatatattacaagtgaatcctactcgggctctgcctcgtttgccattcacaatggaaacaaggcagcaattaacttaaacgcttcaaatgcaaggctgaagaagtcgccgctgcatatggaagacaatgctagaaggggagtagggagcatcagtggtccggaaggctttaccaagtctactatgaaaccactcaaaagaccccgtgacacccaatttcagattgatgcagaactagaaggtaccatgaggagtcctctaagaggtctaaaatctggtgctttggctcagtttgaaagttcatctttgccaaaatctggctacaccaccaaagattcaacctgcactggaggagcacttaatttattcatgttacccccagaaaagttattagtggtccctcctcagtatgtcgaccctgatcaagacttgctgctggagatacctctcaatgcacgacacccagaggcagaacttctgtgtcaaccatctcagctgatgagctctataagccgcagctccacctctatgggtggggttgctgaaggagaagggtgcctgaagcaaccatagtctcaggtcacatcagcaaggagcttaggaacagccagtagttgcagtttactttagcctcctggatcttgacgcctccatttactgatcaccaatgggcgttatgcatccgtcattccctaatttacataacaatgtgcgtcatcttccaacttggcgaattgtccgttcagctaacatttgtagcatgcttttggattgggtttctgctggttgtctgtagcatatggtccgtggagaaagtattatctccgtgtgaaaaaaatatcaccttattgcagggaaatgaaaaaaagaggatactggagagttatgc

SEQ ID NO: 1462 - protein, 416 aa, Zea mays subsp. mays
  peptide (1)..(416): Ceres Seq. ID no. 12341426
MGKQGPCRHCGVTSTPLWRNGPPDKPVLCNACGSRWRTKGSLANYTPMHRKDDIDDDEPRVSKLKPPTSKLKSQKKKPNHIIMENGPFSGQNFRKMGDVDQSYRSSSGSAVSYSESCAPYGAADASEMTGSAQSHAWESLVPSRKRSCVTRPKPSPVEKLAKDLNFIMHEEQLYYPSGSSEEDLLYHSETPVGSFEMGSGSVLLRHPNSKSLEKESEASSIPADNKSYITSESYSGSASFAIHNGNKAAINLNASNARLKKSPLHMEDNARRGVGSISGPEGFTKSTMKPLKRPRDTQFQIDAELEGTMRSPLRGLKSGALAQFESSSLPKSGYTTKDSTCTGGALNLFMLPPEKLLVVPPQYVDPDQDLLLEIPLNARHPEAELLCQPSQLMSSISRSSTSMGGVAEGEGCLKQP

SEQ ID NO: 1463 - protein, 369 aa, Zea mays subsp. mays
  peptide (1)..(369): Ceres Seq. ID no. 12341427
MHRKDDIDDDEPRVSKLKPPTSKLKSQKKKPNHIIMENGPFSGQNFRKMGDVDQSYRSSSGSAVSYSESCAPYGAADASEMTGSAQSHAWESLVPSRKRSCVTRPKPSPVEKLAKDLNFIMHEEQLYYPSGSSEEDLLYHSETPVGSFEMGSGSVLLRHPNSKSLEKESEASSIPADNKSYITSESYSGSASFAIHNGNKAAINLNASNARLKKSPLHMEDNARRGVGSISGPEGFTKSTMKPLKRPRDTQFQIDAELEGTMRSPLRGLKSGALAQFESSSLPKSGYTTKDSTCTGGALNLFMLPPEKLLVVPPQYVDPDQDLLLEIPLNARHPEAELLCQPSQLMSSISRSSTSMGGVAEGEGCLKQP

SEQ ID NO: 1464 - protein, 334 aa, Zea mays subsp. mays
  peptide (1)..(334): Ceres Seq. ID no. 12341428
MENGPFSGQNFRKMGDVDQSYRSSSGSAVSYSESCAPYGAADASEMTGSAQSHAWESLVPSRKRSCVTRPKPSPVEKLAKDLNFIMHEEQLYYPSGSSEEDLLYHSETPVGSFEMGSGSVLLRHPNSKSLEKESEASSIPADNKSYITSESYSGSASFAIHNGNKAAINLNASNARLKKSPLHMEDNARRGVGSISGPEGFTKSTMKPLKRPRDTQFQIDAELEGTMRSPLRGLKSGALAQFESSSLPKSGYTTKDSTCTGGALNLFMLPPEKLLVVPPQYVDPDQDLLLEIPLNARHPEAELLCQPSQLMSSISRSSTSMGGVAEGEGCLKQP

SEQ ID NO: 1465 - DNA, 1677 bp, Zea mays subsp. mays
  misc_feature (1)..(1677): Ceres Seq. ID no. 12357902
  misc_feature (1)..(1677): Ortholog of  Ceres SEQ ID NO 13659033 as cited in SEQ ID NO 66372
  misc_feature (1)..(1677): Ortholog of  Ceres SEQ ID NO 13655724 as cited in SEQ ID NO 68973
  misc_feature (1)..(1677): Ortholog of  Ceres SEQ ID NO 15180366 as cited in SEQ ID NO 0
actgtctccacaaacaaaattgtagagtcggagaccaacgccacgccgacatcgacagcactgatccgacaagtcgccgtttctgccctaagcacggacgctgtcggtcacactcgcctcttgttttctcccgagccccatccttccctcccggtctctccttgcgagctagtaccctacttgctccacagtgccacaccgctcgcgctggagtatgggttcgagcccgatgtggtggtcaggaccaccaccgtcgccgtggagccgcggtttagggaaatggtgggcgctggtagggccattcgtggtgaaggccgtcgggttcctgctgctcgcgggcctcttgttccgggtgctctggtcctttccgtcctctccggcgccggcgttgcagatcacaaaaggaaaatgcagtcttttcaatggggaatggataccaaacccctctggtccagcctatacaaatgcaagctgtcgatttattgacgatcaccagaactgcatgatgaatggtagacctgataaggaatatctacattggaagtggaaaccttatggatgtgatcttccaccatttgatgcagtaagatttctagattctatgagaaacaaaggttggggactaattggtgactccatcctccgtaaccaagttcagtcattgctttgccttctgtctaaggctgaagaacctgttgaggtttaccatgataacgaattcaaaaacaggagatggcacttccaatcctacaacttcacagtgtccatcgtctgggctcctttcctcatcaaatctggtatttttgagaatgaggatggcgtgtctacctctgaaatacagctccaccttgatatactcgatgctaactggacaagtcagtatgagagctttgactatattattatttctggcggacaatggtttctgaggacagcggtctactgggagaacggtgcagtggttggtggtcataattctcagaacaagaacctcgctgaacttggttttgagcacctgtatcggaaaactctacaaaacgttttcaacttcatcgtctcagcgaaacacaagccagtaattttcttcaggacctggtcacctgatcacttcgaggatggagagtggttcagcggtgggtcttgtcgcaggaaattgccctacaacaagggagagtacagagagggtaacatcgagcgtgtcatgagacagatcgagcttgagtccttcaacaaggctgtagccgcgcttaggggttcagcggacgtggatagactgagactgatggatacctacagcctctcgtccttgagaccggacggccacgttgggccttacagaacaccctatccctttgcaaggggcagcagtaaatccacgcccgtccaaaatgattgcttgcactggtgtgtaccaggccccattgatgcatggaatgatcttgttatgaagatggccctggatccatgaaaaccttatggatttgtatggtgtgctcttatggagtaagtagcagctaagtgggcacaaaaaagtgtgtccgttttggtttagctgtaaaataggagtgctagcaaatagagaaacctcagggttggctttgttgcaaagatatgtgtatgttgttttaaagctttataagtttcaactgggcagatactgccagttgttcctggttt

SEQ ID NO: 1466 - protein, 417 aa, Zea mays subsp. mays
  peptide (1)..(417): Ceres Seq. ID no. 12357903
MGSSPMWWSGPPPSPWSRGLGKWWALVGPFVVKAVGFLLLAGLLFRVLWSFPSSPAPALQITKGKCSLFNGEWIPNPSGPAYTNASCRFIDDHQNCMMNGRPDKEYLHWKWKPYGCDLPPFDAVRFLDSMRNKGWGLIGDSILRNQVQSLLCLLSKAEEPVEVYHDNEFKNRRWHFQSYNFTVSIVWAPFLIKSGIFENEDGVSTSEIQLHLDILDANWTSQYESFDYIIISGGQWFLRTAVYWENGAVVGGHNSQNKNLAELGFEHLYRKTLQNVFNFIVSAKHKPVIFFRTWSPDHFEDGEWFSGGSCRRKLPYNKGEYREGNIERVMRQIELESFNKAVAALRGSADVDRLRLMDTYSLSSLRPDGHVGPYRTPYPFARGSSKSTPVQNDCLHWCVPGPIDAWNDLVMKMALDP

SEQ ID NO: 1467 - protein, 412 aa, Zea mays subsp. mays
  peptide (1)..(412): Ceres Seq. ID no. 12357904
MWWSGPPPSPWSRGLGKWWALVGPFVVKAVGFLLLAGLLFRVLWSFPSSPAPALQITKGKCSLFNGEWIPNPSGPAYTNASCRFIDDHQNCMMNGRPDKEYLHWKWKPYGCDLPPFDAVRFLDSMRNKGWGLIGDSILRNQVQSLLCLLSKAEEPVEVYHDNEFKNRRWHFQSYNFTVSIVWAPFLIKSGIFENEDGVSTSEIQLHLDILDANWTSQYESFDYIIISGGQWFLRTAVYWENGAVVGGHNSQNKNLAELGFEHLYRKTLQNVFNFIVSAKHKPVIFFRTWSPDHFEDGEWFSGGSCRRKLPYNKGEYREGNIERVMRQIELESFNKAVAALRGSADVDRLRLMDTYSLSSLRPDGHVGPYRTPYPFARGSSKSTPVQNDCLHWCVPGPIDAWNDLVMKMALDP

SEQ ID NO: 1468 - protein, 321 aa, Zea mays subsp. mays
  peptide (1)..(321): Ceres Seq. ID no. 12357905
MMNGRPDKEYLHWKWKPYGCDLPPFDAVRFLDSMRNKGWGLIGDSILRNQVQSLLCLLSKAEEPVEVYHDNEFKNRRWHFQSYNFTVSIVWAPFLIKSGIFENEDGVSTSEIQLHLDILDANWTSQYESFDYIIISGGQWFLRTAVYWENGAVVGGHNSQNKNLAELGFEHLYRKTLQNVFNFIVSAKHKPVIFFRTWSPDHFEDGEWFSGGSCRRKLPYNKGEYREGNIERVMRQIELESFNKAVAALRGSADVDRLRLMDTYSLSSLRPDGHVGPYRTPYPFARGSSKSTPVQNDCLHWCVPGPIDAWNDLVMKMALDP

SEQ ID NO: 1469 - DNA, 1462 bp, Zea mays subsp. mays
  misc_feature (1)..(1462): Ceres Seq. ID no. 12345814
  misc_feature (1)..(1462): Ortholog of  Ceres SEQ ID NO 15226378 as cited in SEQ ID NO 62741
  misc_feature (1)..(1462): Ortholog of  Ceres SEQ ID NO 15169639 as cited in SEQ ID NO 64624
  misc_feature (1)..(1462): Ortholog of  Ceres SEQ ID NO 13595998 as cited in SEQ ID NO 68161
  misc_feature (1)..(1462): Ortholog of  Ceres SEQ ID NO 14303635 as cited in SEQ ID NO 68503
cctgtttgtttacccagattatctggcgtgtttctgttgggcggcgggcttctctgatccgataggggcaaaaacgattcggtagattataatggcaatgatgggtaatttctaggaaacttgaaagggtagtggggaagtgggaaaaaaataatctgaaataagcacctcctcacttgcttatggattatcataatccaaggggttagattatataatctgggcaaataagctagactgtttgtttgcctcttaggattatttaatccagattatataatctgggggtaaacaaacaggcccttaaagtctcttctttcccttttgtgatgggaacctttggccaattatgcagccgagcatttcgggctgccactgccgccaccgtcgcaggccaagggcaaggacttcaagaagggcgccaacttcgccatcaccggcgcgacggccctggagtactccttcttcaaggcgcacggcatcgaccagcgcatctggaacaccggctccatcaacacccagatcggctggctccaggacatgaagccgtccctctgtaaatcggagcaagactgcaaggattacttcagcaaatccctgttcgtcgtcggggagttcgggggcaacgactacaacgcgccgctcttctccggcgtcccattttctgatgtcaagacttacgtgccccttgttgcaaaggctatcgccaatggcgttgagaaactgatcgagcttggggcaacagacctcctggtgcctggcgttctcccaattggctgcttcccgttgtacctgacgctgtacaacaccagcagcaaagcagattacaacgcccggaccgggtgccttcggaggtacaaccgcctggccttccaccacaacagggagctgaagcagcagcttgacgagcttcagaagaagtaccccaagacgaagatcatgtatggagattacttcaaggctgcactgcagtttgtcgtcaaccctgggaaatttggtttcagcacggctttgcaagcgtgctgcggcgccggagggcagggcaactacaacttcaacctgaagaagaagtgtggcgagcagggcgcgagcgtgtgctccaacccgtcgtcgtacgtgagctgggatggcatccacatgaccgaagctgcgtacagaaaggtcgccgatggctggttgaatggcccgtatgctcagcccccaattctcaagtcatgatcgagattactaggctgtgcgtaacagccgccgcagctgcatgctgcggctagagatatatatgaggagtgtttcaggcaatagatatgctaagttatggtaaagctatttggtctgttcattggaagatctgtataaactgcgccggtatagatatgttcccagctgaaatggctctagcncagatgtgcatggcatgttctctgattcttttcatttgttctaaaaaaatattgcggcagtg

SEQ ID NO: 1470 - protein, 225 aa, Zea mays subsp. mays
  peptide (1)..(225): Ceres Seq. ID no. 12345815
MKPSLCKSEQDCKDYFSKSLFVVGEFGGNDYNAPLFSGVPFSDVKTYVPLVAKAIANGVEKLIELGATDLLVPGVLPIGCFPLYLTLYNTSSKADYNARTGCLRRYNRLAFHHNRELKQQLDELQKKYPKTKIMYGDYFKAALQFVVNPGKFGFSTALQACCGAGGQGNYNFNLKKKCGEQGASVCSNPSSYVSWDGIHMTEAAYRKVADGWLNGPYAQPPILKS

SEQ ID NO: 1471 - DNA, 1299 bp, Zea mays subsp. mays
  misc_feature (1)..(1299): Ceres Seq. ID no. 12373989
  misc_feature (1)..(1299): Ortholog of  Ceres SEQ ID NO 14308359 as cited in SEQ ID NO 55097
  misc_feature (1)..(1299): Ortholog of  Ceres SEQ ID NO 15169195 as cited in SEQ ID NO 55200
  misc_feature (1)..(1299): Ortholog of  Ceres SEQ ID NO 13596689 as cited in SEQ ID NO 62728
agactggaaaagcatcggcacgggcggtaggataaagtagcatagcataccacaaaaggtgctgcttgacagatggcaagcttcccacacctcacgcagatggagcatggcctagccagtggtgcctcccatggcacgccgagcttcttcttctgccatggcacagccacggcggattcagcctcgctggagacctcgtctggtgttctcgacacctccccacgaggcacttcttctggcgacaacaaggcctgcaggaagcacaaggaagatagtggtgccagcttcagctctgctcgctccaaggactcaaactcaaaggaaagcagcaaaaggagcggaggaaaaagagacagaagcagcaagaaggtggacgaggaggagcccaaggggtacatacatgtcagggcgaggagaggacaagcaacggacaaccacagccttgcagagagggtgaggagggagagaatcagtgagaggatgagggtgttgcaggccctggtccctggctgtgataaggtcactggaaaagccctcattttggacgagatcatcaattatgtgcagtccttgcagaaccaagttgagttcctttccatgaggattgcttccctgagccctgtgctgtatggttttggcatggacagtagtgatgctttcagtgaccttataactcagaagatcgaagggatggcccaccatgaggcgttcgcgatgcctagcagctctgtcctgaacggcactccgtcggaagctctcgtggacacgcacacctccagctcctccccgtcctacgaggtccacggcgacggcggcaccgccagcgtctctttccctcaggacagtggcagctacatggtgcaaacagtaggtgagccaaggcaagagctgttcagccaagtggtgttcagtaaccacatgtgccctttccagtagggagagagcgagaggatggaaggacgacaggaagcaataatgttgagatcctatggaggtggaggccaccaccagacgagtttgtgatgttggacgcaatccatcccctcgtcggtggccgtaacgggaacccctgcggtagctagcattagcagtagtaataatagtaggctgttggttacatcatcctgttagatctcaaggtctctgtcggtaccgcatcatctagtaggcattgttgctgcttagcttttgggctctcttattaccaagggttgcatgcatgccattgtattgtactctccaattggaaaaaaaagaaaaaaaatatcatttgttcataaacacagtcaatttgtgctc

SEQ ID NO: 1472 - protein, 287 aa, Zea mays subsp. mays
  peptide (1)..(287): Ceres Seq. ID no. 12373990
MASFPHLTQMEHGLASGASHGTPSFFFCHGTATADSASLETSSGVLDTSPRGTSSGDNKACRKHKEDSGASFSSARSKDSNSKESSKRSGGKRDRSSKKVDEEEPKGYIHVRARRGQATDNHSLAERVRRERISERMRVLQALVPGCDKVTGKALILDEIINYVQSLQNQVEFLSMRIASLSPVLYGFGMDSSDAFSDLITQKIEGMAHHEAFAMPSSSVLNGTPSEALVDTHTSSSSPSYEVHGDGGTASVSFPQDSGSYMVQTVGEPRQELFSQVVFSNHMCPFQ

SEQ ID NO: 1473 - protein, 278 aa, Zea mays subsp. mays
  peptide (1)..(278): Ceres Seq. ID no. 12373991
MEHGLASGASHGTPSFFFCHGTATADSASLETSSGVLDTSPRGTSSGDNKACRKHKEDSGASFSSARSKDSNSKESSKRSGGKRDRSSKKVDEEEPKGYIHVRARRGQATDNHSLAERVRRERISERMRVLQALVPGCDKVTGKALILDEIINYVQSLQNQVEFLSMRIASLSPVLYGFGMDSSDAFSDLITQKIEGMAHHEAFAMPSSSVLNGTPSEALVDTHTSSSSPSYEVHGDGGTASVSFPQDSGSYMVQTVGEPRQELFSQVVFSNHMCPFQ

SEQ ID NO: 1474 - protein, 151 aa, Zea mays subsp. mays
  peptide (1)..(151): Ceres Seq. ID no. 12373992
MRVLQALVPGCDKVTGKALILDEIINYVQSLQNQVEFLSMRIASLSPVLYGFGMDSSDAFSDLITQKIEGMAHHEAFAMPSSSVLNGTPSEALVDTHTSSSSPSYEVHGDGGTASVSFPQDSGSYMVQTVGEPRQELFSQVVFSNHMCPFQ

SEQ ID NO: 1475 - DNA, 1461 bp, Zea mays subsp. mays
  misc_feature (1)..(1461): Ceres Seq. ID no. 12341538
  misc_feature (1)..(1461): Ortholog of  Ceres SEQ ID NO 13596281 as cited in SEQ ID NO 68146
cttttctttccagcctcaaatcccgtttttcccatcccgtgaagaaccatggcacggtactccccaccgtcgctgcgctgcttcttccgctgcgccgccagctccgcctcccgagccgtaggcagcggcactcggaagaagaaccttgtattcttgggctctccccaggtcgccgcctcggtcctggacaagctgctgggcgcgtccggctccccggaatccgcatttcaggtggctgccgtcgtgacgcagccgccggccgccaagaacagggggaggaagttgatgccgtcggccgtcgcgcagttagcgctcgatcgcgggttcccagaggaactcatcttcacgccagaacgagcccgagaagagtcgttcctgtcggccttgaaggaagtggaaccggatgtttgcataactgctgcttacgggaacattctgccccagaaatttcttgatatcccatcgtgcggcacagttaatatacacccaagtttgttgcctctatatcgtggtgcagctcctgtgcagagggcactgcaggatggtgttgcagaaacaggtgtttcccttgcatatactgtccgtgcattggatgcaggtccagtgattgcgtgtgaaaggttttctgttgatgaatgtattaaggcaccagagctactttctatgctgtttcatttaggatccaagctattgattaatgaacttccatccattcttgatggttcggctaaagataaggcacaaccacaggatgactccaaagctacactggcaccaaagttaaattctgaggagtcatggctatcgtttgacgaagaagctaaagtgctgcataacaaggtgcgggcatttgcaggatggcctgggacgcgcgcaaagctgcaactcataaaccaaaacagtgtacccgatgtactagagattaaggttatcagcacgaaggtttcaacatcatgtgtcaaagttggagatgaaaacgagatactattctctgggagctcgttgctgattccttgcagtggttcgacctggctcgaggtgttggagcttcaactccctggaaagaaagtaacaaaggcacaagatttttggaatggtttgcgtggtcagaagctgatgaaattgccatagggggatatctgcattcgcagcacaggagtgtgcctatatgcatagcaagggttattgaggtcagtcattgcgcgaacataagcagggtagtgctagaagcctatatgcggagatctcggttttatgactaccttttccttctggtaaacttggtgctataaactcgtaactcagttacattaggcatgccatttgtattgcttcctcaatttcagaaaacacactgctgtaactatttcagttattcaatttttcactgtcataactgagctacaaacatttgagaaataatacagttatgtggtgagtaataaggcaataatttgccgt

SEQ ID NO: 1476 - protein, 360 aa, Zea mays subsp. mays
  peptide (1)..(360): Ceres Seq. ID no. 12341539
MARYSPPSLRCFFRCAASSASRAVGSGTRKKNLVFLGSPQVAASVLDKLLGASGSPESAFQVAAVVTQPPAAKNRGRKLMPSAVAQLALDRGFPEELIFTPERAREESFLSALKEVEPDVCITAAYGNILPQKFLDIPSCGTVNIHPSLLPLYRGAAPVQRALQDGVAETGVSLAYTVRALDAGPVIACERFSVDECIKAPELLSMLFHLGSKLLINELPSILDGSAKDKAQPQDDSKATLAPKLNSEESWLSFDEEAKVLHNKVRAFAGWPGTRAKLQLINQNSVPDVLEIKVISTKVSTSCVKVGDENEILFSGSSLLIPCSGSTWLEVLELQLPGKKVTKAQDFWNGLRGQKLMKLP

SEQ ID NO: 1477 - protein, 281 aa, Zea mays subsp. mays
  peptide (1)..(281): Ceres Seq. ID no. 12341540
MPSAVAQLALDRGFPEELIFTPERAREESFLSALKEVEPDVCITAAYGNILPQKFLDIPSCGTVNIHPSLLPLYRGAAPVQRALQDGVAETGVSLAYTVRALDAGPVIACERFSVDECIKAPELLSMLFHLGSKLLINELPSILDGSAKDKAQPQDDSKATLAPKLNSEESWLSFDEEAKVLHNKVRAFAGWPGTRAKLQLINQNSVPDVLEIKVISTKVSTSCVKVGDENEILFSGSSLLIPCSGSTWLEVLELQLPGKKVTKAQDFWNGLRGQKLMKLP

SEQ ID NO: 1478 - DNA, 1429 bp, Zea mays subsp. mays
  misc_feature (1)..(1429): Ceres Seq. ID no. 12341429
  misc_feature (1)..(1429): Ortholog of  Ceres SEQ ID NO 13600485 as cited in SEQ ID NO 1221
aaagaggaacacttctgtgttttcgaagatgaagctgtagatggaacttctaaacaaaatgaaggttctaccagcagatctccccagggtagacctaagaattatctcaagttttcaggcaaggatcattcaggtgcagaaaatgaaggtaacaagagagcccagaggtctgcagaggatagtgaaaatgcatctgaggctgatgaagatatctctggcagtgaatctgctggtgatgaggagtcttctcatgaagatcaggaggaagaagaggatgatatggatcttgatacaaaggcaaaaaatgactgcagagcagaggtaaatagggaggcacagggtttggatggaggaacatcattgtcattttcagaatgtttgcaaagtacagttaaaccaatttccaagtatgtttccactgcattaccaaaccatgaaaagaaactttctcacatattttatggaaatgactcattttatgttctgttcaggctacatcagatcttttatgagagaatattgtcagctaagacaaactgttccacatcagacaataactggaaagcttcaaggcacataaattctccagatcaatattcaaggtttatcagtgcactatacaacttgcttgatggttcttctgaccacaccaaatttgaagatgactgccgctccatcattgggactcagtcatatgttctctttactatagataaactgatatacaaaattgtgaagcagcttcaagcattagcatctgatgaaatggacaaccagcttctccagctttatttatatgaaaagtcgaggtctcctgggagcttctttgatctggtttatcacgaaaatgcacgagcccttctacatgatgacaacatataccgttttgaatgtcattctgatcctacagaattaactattcagctcatggagtatgggaatgaaaaacctgagttgactgctgtctcatttgatccaaccttttcaccgtatctttataatggttatctgtcaagtattgatgataccaaattggttgatgacgtcttccttaggaggaataagcggaagcaagggaggaatgatgactcccctacttccttgaagatcatggacaatgtcatgtttgctaatggtcttgaatgcaagatatcttgcgaatcttcaaaagtctcttatgtcctcgatactgaggatgtcttatttcgtacgagaaagaggagaagctctatctagtggaaccatgcctgcgctgcaaagacaaattttgtgaaaattaacaccgtaaaatcgatagtttcatttatctcttcagaccgtatagggtcttgtggtagagttatgttaattacaatggcatgcactggtgggatcctcgtgttgttgatctgtcacttcactggaatatattggtgattctttgtgtttc

SEQ ID NO: 1479 - protein, 411 aa, Zea mays subsp. mays
  peptide (1)..(411): Ceres Seq. ID no. 12341430
KEEHFCVFEDEAVDGTSKQNEGSTSRSPQGRPKNYLKFSGKDHSGAENEGNKRAQRSAEDSENASEADEDISGSESAGDEESSHEDQEEEEDDMDLDTKAKNDCRAEVNREAQGLDGGTSLSFSECLQSTVKPISKYVSTALPNHEKKLSHIFYGNDSFYVLFRLHQIFYERILSAKTNCSTSDNNWKASRHINSPDQYSRFISALYNLLDGSSDHTKFEDDCRSIIGTQSYVLFTIDKLIYKIVKQLQALASDEMDNQLLQLYLYEKSRSPGSFFDLVYHENARALLHDDNIYRFECHSDPTELTIQLMEYGNEKPELTAVSFDPTFSPYLYNGYLSSIDDTKLVDDVFLRRNKRKQGRNDDSPTSLKIMDNVMFANGLECKISCESSKVSYVLDTEDVLFRTRKRRSSI

SEQ ID NO: 1480 - protein, 318 aa, Zea mays subsp. mays
  peptide (1)..(318): Ceres Seq. ID no. 12341431
MDLDTKAKNDCRAEVNREAQGLDGGTSLSFSECLQSTVKPISKYVSTALPNHEKKLSHIFYGNDSFYVLFRLHQIFYERILSAKTNCSTSDNNWKASRHINSPDQYSRFISALYNLLDGSSDHTKFEDDCRSIIGTQSYVLFTIDKLIYKIVKQLQALASDEMDNQLLQLYLYEKSRSPGSFFDLVYHENARALLHDDNIYRFECHSDPTELTIQLMEYGNEKPELTAVSFDPTFSPYLYNGYLSSIDDTKLVDDVFLRRNKRKQGRNDDSPTSLKIMDNVMFANGLECKISCESSKVSYVLDTEDVLFRTRKRRSSI

SEQ ID NO: 1481 - DNA, 1534 bp, Zea mays subsp. mays
  misc_feature (1)..(1534): Ceres Seq. ID no. 12373985
  misc_feature (1)..(1534): Ortholog of  Ceres SEQ ID NO 13591224 as cited in SEQ ID NO 64140
ggtgtaactctaattcctagccccgagactgacgccggctgcctcgctccatttctaatccggtaatcccccctcccgagtccaaaccctaaacctaaacccctcacccggcgccgccgccgccaccgccgccgccccgaggccccatcccagcgcaaccgacttccgcctcggattgaagcaatgtcgtcggacgacgaggtcagggaggagaaggagctcgacctctcctccaacgatgtcgtcaccaagtacaagactgccgccgaaatcctgaacaacgctctgaagctggttgtgtctgagtgcaagccaaaagcaaagattgttgacctttgtgagaagggtgactctttcataagagagcaaactgggaatgtctacaagaatgcaaagaggaagattgaaaggggcattgctttcccaacctgtgtttctgtgaacaacacagtctgccacttctccccgcttaccacagatgatgcagttctggaagaaaatgatatggttaaaattgacatggggtgtcatattgatggctttattgctgtggtggcacatacacatgtaattgcaaatgggcctgtcacaggaagagcagctgatgttcttgctgctgccaacacagcagcagaagttgcaatgaggcttgtcagacctgggaagaagaataaggatgttactgaagcaattcagaaagttgctcctgtttatgattgcaaaattgtggaaggtgttcttagccatcaactgaagcaatttgtgattgatggtaacaaagttgtgctaagtgtctccaatgctgatacaaaggttgatgatgctgaatttgaagaaaatgaagtctatgcaatcgatattgtcaccagcactggggaggggaagcccaagttattggatgagaagcagaccaccatctacaaaagggctgtagacaagaattataacctgaagatgaaagcgtcaagatttattttcagtgaaatcagccagaagttcccaatcatgcccttcactgctagggcattagaagagaagcgtgcacgcttaggcttggtggaatgcatgaaccatgagctattgcagccgtaccctgtacttcatgagaagccaggtgaccttgttgcacacataaagttcactgtgctgctaatgcccaatggatcggataggattacatcatatccgctacaggagttaaagccaacaaaatccattgaagacaatgctgagataaaggcatggcttgctttggggacgaaatcaaagaagaagggtggtggaaagaagaagaaaggcaagaaaggagatgcagcaggagatcccatggaggcgacaaacgatgctacaagccaagaataattctgatttttggaattactgcacccagcattttctctcttgtttcttcgctgcatctgatggtgttatattacattcagttgcgaaaaaatgaatacttttttctagtgtctaagaaacgaagcatcctgttgcacattatcgcatccaatggcacaaagataattatctg

SEQ ID NO: 1482 - protein, 392 aa, Zea mays subsp. mays
  peptide (1)..(392): Ceres Seq. ID no. 12373986
MSSDDEVREEKELDLSSNDVVTKYKTAAEILNNALKLVVSECKPKAKIVDLCEKGDSFIREQTGNVYKNAKRKIERGIAFPTCVSVNNTVCHFSPLTTDDAVLEENDMVKIDMGCHIDGFIAVVAHTHVIANGPVTGRAADVLAAANTAAEVAMRLVRPGKKNKDVTEAIQKVAPVYDCKIVEGVLSHQLKQFVIDGNKVVLSVSNADTKVDDAEFEENEVYAIDIVTSTGEGKPKLLDEKQTTIYKRAVDKNYNLKMKASRFIFSEISQKFPIMPFTARALEEKRARLGLVECMNHELLQPYPVLHEKPGDLVAHIKFTVLLMPNGSDRITSYPLQELKPTKSIEDNAEIKAWLALGTKSKKKGGGKKKKGKKGDAAGDPMEATNDATSQE

SEQ ID NO: 1483 - protein, 285 aa, Zea mays subsp. mays
  peptide (1)..(285): Ceres Seq. ID no. 12373987
MVKIDMGCHIDGFIAVVAHTHVIANGPVTGRAADVLAAANTAAEVAMRLVRPGKKNKDVTEAIQKVAPVYDCKIVEGVLSHQLKQFVIDGNKVVLSVSNADTKVDDAEFEENEVYAIDIVTSTGEGKPKLLDEKQTTIYKRAVDKNYNLKMKASRFIFSEISQKFPIMPFTARALEEKRARLGLVECMNHELLQPYPVLHEKPGDLVAHIKFTVLLMPNGSDRITSYPLQELKPTKSIEDNAEIKAWLALGTKSKKKGGGKKKKGKKGDAAGDPMEATNDATSQE

SEQ ID NO: 1484 - protein, 280 aa, Zea mays subsp. mays
  peptide (1)..(280): Ceres Seq. ID no. 12373988
MGCHIDGFIAVVAHTHVIANGPVTGRAADVLAAANTAAEVAMRLVRPGKKNKDVTEAIQKVAPVYDCKIVEGVLSHQLKQFVIDGNKVVLSVSNADTKVDDAEFEENEVYAIDIVTSTGEGKPKLLDEKQTTIYKRAVDKNYNLKMKASRFIFSEISQKFPIMPFTARALEEKRARLGLVECMNHELLQPYPVLHEKPGDLVAHIKFTVLLMPNGSDRITSYPLQELKPTKSIEDNAEIKAWLALGTKSKKKGGGKKKKGKKGDAAGDPMEATNDATSQE

SEQ ID NO: 1485 - DNA, 1781 bp, Zea mays subsp. mays
  misc_feature (1)..(1781): Ceres Seq. ID no. 12353639
  misc_feature (1)..(1781): Ortholog of  Ceres SEQ ID NO 13662984 as cited in SEQ ID NO 64419
ctccgtcccctcctcctgcgaaggctcctccagcaccactagctagagctaaccccgtgctgctgctgctgctactacctgctgccgcgcgccgttcgttgccgtgcgggcgtgttgtggtccgctgatctcgttcgcgggacgccggggggtggtggtggtggcagcggtggttggtggtgcgcggcgtgaaagaaagaaagaaaaaaaaaaggcccgccgctttgcgctgctctgcttccgtaggtgtcacgagatttggccctagcctttcgctttcctttttcatctcgctcacaagggaagggaccgagggacgagggagacgttggggaggggagcgagcgagccgtaacatccgagctgttccaatggcgacccctgccgttgctttcgtcgccagcgctttgttggggcggtggtagcgctaggagcggagcagtactaggttggtaggtggttgtagctttgcgcgtgacccgagcgcgcgctcgctcgctcctgtgcctctctacctcgcttgcgtgcgccgggaaggcagtgggtggctggtcggttctcgcaagaggttgctggtgctgttcctcctcccccggttgatgagcatggggcattgctccgagcagcggacggggttcgaggtgactaaggactggaacggcgccgaccagttcgcgatccggtccccgcggggggcgtccgttcgggtctgcctgcacggcgggcaggtcgtctcgtggaggaaccaccgcggcgaggagctcctcttcagcagcagcaaggcaatcttcaagccgccaagagcgacccgtggtggcattccgatatgcttcccacagtttggaaactgtggaacattggagcagcatggatttgcaaggaacaagatatggacaatagacgatgaggctccacctctaaattatggtgataataacagcaacaaagcttctgttgaccttctgctaaagccatctgaagatgacctgaagtgctggccacactgttttgagttacgtctcagagtctctctttcaatggatggagacctttcactgatatcacgggtcagaaatgttaatgggaagccattcagtttcgcatttgcttaccatacatacctttctgtttctgacatcagtgaagtgaggatagaaggtctggagacccttgattatcttgacaaccttagccagcgggaacgttttaccgaacagggagatgccataacatttgaatcagaggttgatcgagtctatgttggctgcccaggcgtaatagctgttcttgaccatggaaagaaacgcacattcatcgtgcggaaagaagggcttcctgatattgttgtgtggaacccctgggagaagaagtccaagacgatggcagacttcggcgacgacgagtacaagcagatgctgtgcgtggatgcagccgcggtcgagagggccatcacgctgaagcccggggaggagtggacggggaagctggagctctccgccgtggcgtcgaccaactgcagcgaccacctggatcgcccgggcaggctgtagagcgctgggtgggtgggttcgttcgcccctgacgaaaggcatgtactagttttttttcatgtacatgggggcgctaggtccggcccttgcaggctgcagtatcatctacctgtcaggtgtgtcatgtgtgagtttaaacttatgtcagatccaagtattgctgtgatcgacatgttcgatgttcctggactgcgaagtctcaagcgcaggctgttcgtttggctggctttt

SEQ ID NO: 1486 - protein, 316 aa, Zea mays subsp. mays
  peptide (1)..(316): Ceres Seq. ID no. 12353640
MSMGHCSEQRTGFEVTKDWNGADQFAIRSPRGASVRVCLHGGQVVSWRNHRGEELLFSSSKAIFKPPRATRGGIPICFPQFGNCGTLEQHGFARNKIWTIDDEAPPLNYGDNNSNKASVDLLLKPSEDDLKCWPHCFELRLRVSLSMDGDLSLISRVRNVNGKPFSFAFAYHTYLSVSDISEVRIEGLETLDYLDNLSQRERFTEQGDAITFESEVDRVYVGCPGVIAVLDHGKKRTFIVRKEGLPDIVVWNPWEKKSKTMADFGDDEYKQMLCVDAAAVERAITLKPGEEWTGKLELSAVASTNCSDHLDRPGRL

SEQ ID NO: 1487 - protein, 314 aa, Zea mays subsp. mays
  peptide (1)..(314): Ceres Seq. ID no. 12353641
MGHCSEQRTGFEVTKDWNGADQFAIRSPRGASVRVCLHGGQVVSWRNHRGEELLFSSSKAIFKPPRATRGGIPICFPQFGNCGTLEQHGFARNKIWTIDDEAPPLNYGDNNSNKASVDLLLKPSEDDLKCWPHCFELRLRVSLSMDGDLSLISRVRNVNGKPFSFAFAYHTYLSVSDISEVRIEGLETLDYLDNLSQRERFTEQGDAITFESEVDRVYVGCPGVIAVLDHGKKRTFIVRKEGLPDIVVWNPWEKKSKTMADFGDDEYKQMLCVDAAAVERAITLKPGEEWTGKLELSAVASTNCSDHLDRPGRL

SEQ ID NO: 1488 - protein, 170 aa, Zea mays subsp. mays
  peptide (1)..(170): Ceres Seq. ID no. 12353642
MDGDLSLISRVRNVNGKPFSFAFAYHTYLSVSDISEVRIEGLETLDYLDNLSQRERFTEQGDAITFESEVDRVYVGCPGVIAVLDHGKKRTFIVRKEGLPDIVVWNPWEKKSKTMADFGDDEYKQMLCVDAAAVERAITLKPGEEWTGKLELSAVASTNCSDHLDRPGRL

SEQ ID NO: 1489 - DNA, 1335 bp, Zea mays subsp. mays
  misc_feature (1)..(1335): Ceres Seq. ID no. 12367315
  misc_feature (1)..(1335): Ortholog of  Ceres SEQ ID NO 13574538 as cited in SEQ ID NO 15165
  misc_feature (1)..(1335): Ortholog of  Ceres SEQ ID NO 14315874 as cited in SEQ ID NO 59983
  misc_feature (1)..(1335): Ortholog of  Ceres SEQ ID NO 13589000 as cited in SEQ ID NO 60876
  misc_feature (1)..(1335): Ortholog of  Ceres SEQ ID NO 14302787 as cited in SEQ ID NO 65398
gggaatcaatcacgcacacgcgcacgcaccgccacccttcccgaaaagtctcctcacctcccggtcccggcctcccttcctctctctccccccctctcaaacatccccgcgccgatggatctccgcctcgcccactaggcctccggcgcgaccgagggtgggcagggggatggggctcctcgggcggaggacgttgctgcggctcctcgccctcgcttccgcggccgtcgccgtcgccgtcaccgtggaagcctacgagggcgacgctgatccgctctacagagcttgtgtggaaggatgccaaaagacaggctccctgaaggagacttctattaaacattgtatggtgccaaccgatggccaacctgttgacaagtcatggtacacgcatgagccactgtacttgcaatggaaggactggaactgcaagagtgaatgcagataccactgtatgatggaaagggagaatgaaagggcaaagcttggcctccagcctgttaagtatcatggaaaatggcctttgaagcgtgcctctgtgtttcaggaacctttatctgcagctctctctgcgcttactcttgttgtgcaatttaatgggtggctatcatttttcctcttgctttattataaacttcctctgcggccagaaactcacaagacatactatgaatacactggcttgtggcacatctatgggctccttgccatgaattcatggttctggagtgccatatatcacagttgtgacacaatttggacagaaaaactatatttttcatcagatgctgcctttctggggtattccctcattttggcgatactgcggactttaaatttaagagacgaagcatctagagttatggttgccgctcctattctagcatttgtgacaacccacattctgtacctcaacttctacgaacttgacaaaggcctgaacatgaaggtttgtactgtgataatcattgctcagtgtctcctatgggcactgtgggctgtcatgactcggcatccttcacggctgaagatcatatttgttgccatcggaggtgcggctgcggtacttctggaagcttctgacattcctccgcgatggggatatgtggatggccgtgctatatgccttgctgtggctatcccccttttacctttggtggagctttgccaaggaagatgcggagatgcgaacgtcagcaatcctgaagaaggcacgttaacaagtcgcctgtgtgataatttcatgcctgcgcccagccattgtaaagataaaagtttcacttgtaatcttaggtaactactaacttagcatgtgaattaccgtcttatttttgttcc

SEQ ID NO: 1490 - protein, 430 aa, Zea mays subsp. mays
  peptide (1)..(430): Ceres Seq. ID no. 12367316
GINHAHAHAPPPFPKSLLTSRSRPPFLSLPPSQTSPRRWISASPTRPPARPRVGRGMGLLGRRTLLRLLALASAAVAVAVTVEAYEGDADPLYRACVEGCQKTGSLKETSIKHCMVPTDGQPVDKSWYTHEPLYLQWKDWNCKSECRYHCMMERENERAKLGLQPVKYHGKWPLKRASVFQEPLSAALSALTLVVQFNGWLSFFLLLYYKLPLRPETHKTYYEYTGLWHIYGLLAMNSWFWSAIYHSCDTIWTEKLYFSSDAAFLGYSLILAILRTLNLRDEASRVMVAAPILAFVTTHILYLNFYELDKGLNMKVCTVIIIAQCLLWALWAVMTRHPSRLKIIFVAIGGAAAVLLEASDIPPRWGYVDGRAICLAVAIPLLPLVELCQGRCGDANVSNPEEGTLTSRLCDNFMPAPSHCKDKSFTCNLR

SEQ ID NO: 1491 - protein, 374 aa, Zea mays subsp. mays
  peptide (1)..(374): Ceres Seq. ID no. 12367317
MGLLGRRTLLRLLALASAAVAVAVTVEAYEGDADPLYRACVEGCQKTGSLKETSIKHCMVPTDGQPVDKSWYTHEPLYLQWKDWNCKSECRYHCMMERENERAKLGLQPVKYHGKWPLKRASVFQEPLSAALSALTLVVQFNGWLSFFLLLYYKLPLRPETHKTYYEYTGLWHIYGLLAMNSWFWSAIYHSCDTIWTEKLYFSSDAAFLGYSLILAILRTLNLRDEASRVMVAAPILAFVTTHILYLNFYELDKGLNMKVCTVIIIAQCLLWALWAVMTRHPSRLKIIFVAIGGAAAVLLEASDIPPRWGYVDGRAICLAVAIPLLPLVELCQGRCGDANVSNPEEGTLTSRLCDNFMPAPSHCKDKSFTCNLR

SEQ ID NO: 1492 - protein, 316 aa, Zea mays subsp. mays
  peptide (1)..(316): Ceres Seq. ID no. 12367318
MVPTDGQPVDKSWYTHEPLYLQWKDWNCKSECRYHCMMERENERAKLGLQPVKYHGKWPLKRASVFQEPLSAALSALTLVVQFNGWLSFFLLLYYKLPLRPETHKTYYEYTGLWHIYGLLAMNSWFWSAIYHSCDTIWTEKLYFSSDAAFLGYSLILAILRTLNLRDEASRVMVAAPILAFVTTHILYLNFYELDKGLNMKVCTVIIIAQCLLWALWAVMTRHPSRLKIIFVAIGGAAAVLLEASDIPPRWGYVDGRAICLAVAIPLLPLVELCQGRCGDANVSNPEEGTLTSRLCDNFMPAPSHCKDKSFTCNLR

SEQ ID NO: 1493 - DNA, 863 bp, Zea mays subsp. mays
  misc_feature (1)..(863): Ceres Seq. ID no. 12411158
  misc_feature (1)..(863): Ortholog of  Ceres SEQ ID NO 15168856 as cited in SEQ ID NO 56354
  misc_feature (1)..(863): Ortholog of  Ceres SEQ ID NO 13583591 as cited in SEQ ID NO 63084
atcccaattcttgcctaccggctaccgctgctcctgttaggagtacttgccaattactgttggaatcaccttcnccgcctcctcgagaaccaattctagcctaaaacccgcagtgatccgcccaactcccgacccactcatggtcgatcggcgcggccgctgaactgcctgcggcgggggcgagaggacgcgggtcgaggcgggcgatggccgggctggcggggaggcctggttcctggggcggccttgtgctgcgggtggggcaggctctcttcgccgccgcctgcatcggcgtcatgggcagctcgctcggattcgccagctacaccgccttctgctacttgattgcgtcaatggggcttcaaatgctgtggagtttcggacttgcatgtcttgatggatatgccattagagccaataaagatctcaccagtcccattctattgagcttgtttgtcgttggagactgggtaacagcaatcctgtcattcgccgcatcaagctcagctgccggtgtagtaatcctatttcaaaaggacgtgctcttctgcagaaggtatccccagctcccctgcggaaaatacgagctcgccacggcgttcgccttcctgtcttgggcgctcagtgcgacatcagcattgatcatgttttggctcctggctgcgttctgattttgtgtaaaaattttgtgacagcgatgttcatagtgcccacttcgctgttctctcatcgcattcttttacgaccatgtcacatatttagagccacatagccccccccccccccccaccccccaaaaaaaagaatgttgggatcatgtaaagtccttgaagggaacagttactaatggaagaaattcactg

SEQ ID NO: 1494 - protein, 154 aa, Zea mays subsp. mays
  peptide (1)..(154): Ceres Seq. ID no. 12411159
MAGLAGRPGSWGGLVLRVGQALFAAACIGVMGSSLGFASYTAFCYLIASMGLQMLWSFGLACLDGYAIRANKDLTSPILLSLFVVGDWVTAILSFAASSSAAGVVILFQKDVLFCRRYPQLPCGKYELATAFAFLSWALSATSALIMFWLLAAF

SEQ ID NO: 1495 - protein, 124 aa, Zea mays subsp. mays
  peptide (1)..(124): Ceres Seq. ID no. 12411160
MGSSLGFASYTAFCYLIASMGLQMLWSFGLACLDGYAIRANKDLTSPILLSLFVVGDWVTAILSFAASSSAAGVVILFQKDVLFCRRYPQLPCGKYELATAFAFLSWALSATSALIMFWLLAAF

SEQ ID NO: 1496 - protein, 105 aa, Zea mays subsp. mays
  peptide (1)..(105): Ceres Seq. ID no. 12411161
MGLQMLWSFGLACLDGYAIRANKDLTSPILLSLFVVGDWVTAILSFAASSSAAGVVILFQKDVLFCRRYPQLPCGKYELATAFAFLSWALSATSALIMFWLLAAF

SEQ ID NO: 1497 - DNA, 893 bp, Zea mays subsp. mays
  misc_feature (1)..(893): Ceres Seq. ID no. 12414333
  misc_feature (1)..(893): Ortholog of  Ceres SEQ ID NO 13637980 as cited in SEQ ID NO 58973
  misc_feature (1)..(893): Ortholog of  Ceres SEQ ID NO 12624081 as cited in SEQ ID NO 61729
  misc_feature (1)..(893): Ortholog of  Ceres SEQ ID NO 13599435 as cited in SEQ ID NO 0
gcacgagaccattacctagaacatcctaatcgaaaaaagagccgtcgaagccgaagcagagcacgacggacaaaaatatggcagggaaagccggcggactcaaaggggttgccctcatcggcggcagcgccaacagcacggtcgctggggtcattcacttcttcgaggacccctccaccaggtacaccgaggtgaggggcaaggtcacgggcttgactccgggaaggcatggattccacatccacgtcttcggcgacactaccaatggctgcaactcaaccggtccccattttaaccctcataataaaccccatggagctccatttgacgacgaacgacatttgggcgacctgggaaatatagtagccaatgaagatggagatgcagaagtgttcataagagacttacagatttcattgagtgggcctcattccattctgggaagggcagttgttgtacatgctgatcctgatgacctagggaggggtggccatgaactgagtaagtcaacaggaaacgcaggagctagaattggatgtggtatcattggaattcagtcatcagtttgacaaataacggcttagtagcaccagaaaaagagggggtcatgattccacagtctgtgcaatgtgctggttcagggacatggaaatggtgttcgttgttctggaccgtttgaagactaaatatctccagccatgtatacaataattttgtcagtgagaggaaattgcttgtaaaatcttgtattgacttatatcactggttaccagcagcaataagtctatatgtaaaacttctcgatttgtatatcagctatgtttcgtgtggagaagggaagcgaacgcaagtcagctttttgtgagtgcattccgttcagttcttacttggtc

SEQ ID NO: 1498 - protein, 163 aa, Zea mays subsp. mays
  peptide (1)..(163): Ceres Seq. ID no. 12414334
MAGKAGGLKGVALIGGSANSTVAGVIHFFEDPSTRYTEVRGKVTGLTPGRHGFHIHVFGDTTNGCNSTGPHFNPHNKPHGAPFDDERHLGDLGNIVANEDGDAEVFIRDLQISLSGPHSILGRAVVVHADPDDLGRGGHELSKSTGNAGARIGCGIIGIQSSV

SEQ ID NO: 1499 - DNA, 1291 bp, Zea mays subsp. mays
  misc_feature (1)..(1291): Ceres Seq. ID no. 12414321
  misc_feature (1)..(1291): Ortholog of  Ceres SEQ ID NO 14310369 as cited in SEQ ID NO 54765
  misc_feature (1)..(1291): Ortholog of  Ceres SEQ ID NO 13638746 as cited in SEQ ID NO 59296
  misc_feature (1)..(1291): Ortholog of  Ceres SEQ ID NO 13596474 as cited in SEQ ID NO 62169
  misc_feature (1)..(1291): Ortholog of  Ceres SEQ ID NO 13598714 as cited in SEQ ID NO 62656
  misc_feature (1)..(1291): Ortholog of  Ceres SEQ ID NO 14302434 as cited in SEQ ID NO 63410
  misc_feature (1)..(1291): Ortholog of  Ceres SEQ ID NO 13597519 as cited in SEQ ID NO 64759
  misc_feature (1)..(1291): Ortholog of  Ceres SEQ ID NO 13587054 as cited in SEQ ID NO 0
gccaagcaggtctcagcgaggttttctgctataaataaggcatcgtccaggcaaacaattaatagggcaaagcaaatcaaggacgctctgcacgtactattcatcttccattgttgctttgctttgctttgcttaccggcaaccatggccagcactcgtgcagcagcaactctccttttgctcctcgcgctcgccggcacctcgtcggcgcagctgttccacgggcttctactcctactcgtgccccggcgtgtacggcgccgtcaagtcggtgatgcagtccgccatcgccagggagaagcgcatgggggccctccatcctccgcctcttcttccacgactgcttcgtccagggctgcgacgcgtcgctgctgctggacgacacgcccagcttccagggcgagaagatggccaaccctaacaacggctccgtcaggggattcgaggtcatcgacgccgtcaagtccgccgtcgaaaagctgtgccccggcgtcgtctcctgcgccgacatcctcgccatcgccgccagggacagcgtcgtcatcctgggtggtccgacctgggacgtgaaggtcgggcggcgggactccacgacggcgagcttcagcggcgccaacaacaacatcccgccgccgacgtcgggcctcgccaacctcacgtcgctcttcgccgcgcagggactttctcagaaggacatggtcgcgctctctggtgctcacaccatcgggcaggcacgctgcaccaacttcagagcccacatctacaacgacaccgacatcgacgctgccttcgcgagaacgaggcagtcaggctgcccaagcacctcaggcgccggcggcgacaacaacctggcgccattggacctccagacccctaccgtcttcgagaacaactactacaggaacctcctcgccaagaaggggctcctgcactccgaccaggagctcttcaatggcggagccaccgacgcgctggtccagtcctacgtcgggagccagagcgcgttcttcgcggatttcgtggcgggcatgatcaagatgggcgacatcacaccgctgaccggctccaacaacggacagataaggaagaactgcagaagagtcaattagcagatagctagctagggtcactaattaagacccatgcatggctgttgaactgcaagctaagtaaacactatgtgagatcgtcgcgttgatgtgctcacatgtcgtctttttatttgggtgaaggatggatgcatgtatcagatcacttgttgtttaattaatgccatttcagtctttgtccg

SEQ ID NO: 1500 - protein, 233 aa, Zea mays subsp. mays
  peptide (1)..(233): Ceres Seq. ID no. 12414322
MANPNNGSVRGFEVIDAVKSAVEKLCPGVVSCADILAIAARDSVVILGGPTWDVKVGRRDSTTASFSGANNNIPPPTSGLANLTSLFAAQGLSQKDMVALSGAHTIGQARCTNFRAHIYNDTDIDAAFARTRQSGCPSTSGAGGDNNLAPLDLQTPTVFENNYYRNLLAKKGLLHSDQELFNGGATDALVQSYVGSQSAFFADFVAGMIKMGDITPLTGSNNGQIRKNCRRVN

SEQ ID NO: 1501 - protein, 189 aa, Zea mays subsp. mays
  peptide (1)..(189): Ceres Seq. ID no. 12414323
AKQVSARFSAINKASSRQTINRAKQIKDALHVLFIFHCCFALLCLPATMASTRAAATLLLLLALAGTSSAQLFHGLLLLLVPRRVRRRQVGDAVRHRQGEAHGGPPSSASSSTTASSRAATRRCCWTTRPASRARRWPTLTTAPSGDSRSSTPSSPPSKSCAPASSPAPTSSPSPPGTASSSWVVRPGT

SEQ ID NO: 1502 - protein, 141 aa, Zea mays subsp. mays
  peptide (1)..(141): Ceres Seq. ID no. 12414324
MASTRAAATLLLLLALAGTSSAQLFHGLLLLLVPRRVRRRQVGDAVRHRQGEAHGGPPSSASSSTTASSRAATRRCCWTTRPASRARRWPTLTTAPSGDSRSSTPSSPPSKSCAPASSPAPTSSPSPPGTASSSWVVRPGT

SEQ ID NO: 1503 - DNA, 1676 bp, Zea mays subsp. mays
  misc_feature (1)..(1676): Ceres Seq. ID no. 12361385
  misc_feature (1)..(1676): Ortholog of  Ceres SEQ ID NO 13591098 as cited in SEQ ID NO 64770
acctcgtggactccttccccacaaaactaaaccctcgcttcggaggcgcgtgaacccaagaccgacaggcgaacgaagcgagggtcctcacaaccaccatcccctgctgcaacgacgccatcgccaaccccgacgagggtcgcatggtgggccactactggctccgcgacccggccctcgctcccaactccttcctccggaacaagatcgagaccgcactcgacagaatcctcgccttctctcaagatgtcgtctctggaaagattctttccccatctggtcgtttcacttcaattctctctataggaatcggagggtcagctttgggccctcaatttgttgctgaggcacttgcgcctgataaccctccactgaagataagatttattgacaacaccgatcctgctgggattgatcatcaaattgctcaactaggacctgaactggcaactactcttgtaattgtcatttctaagagtggaggcacacctgaaacccgcaatgggctactggaagtacagaaagccttcagagatgcaggtctgcaattctcgaaacagggtgttgcaatcactcaagaaaattctctgttggataacactgccagaatagagggatggttagctcggtttcctatgtttgactgggttggtggtaggacttcagaaatgtcagctgttggtttacttccagctgcattgcagggtattgatatcaaggaaatgctagttggtgcagctttaatggatgaggaaacccggaacactgtggttaaagcaaatccagcagcattgcttgcattatgttggtattgggcatcggaagggataggcaaaaaggatatggttgtgcttccttacaaggatagtttattacttttgagtagatatttgcaacaacttgtcatggaatctcttggaaaagaattcgacctggatggcaaccgtgttaatcaagggctaactgtatatggtaacaaaggaagcactgaccagcatgcttacattcagcagctgagagaaggtgtacaaaacttctttgttacgtttattgaggtcttgcgtgacaggcctgctggacatgattgggagcttgaacctggagtcacgtgtggtgactatttgtttgggatgttgcagggaacccgttctgctctttatgcaaatgaccgggagtctatctctgttactgtgcaagaggtaactcctagagctgttggagcactgattgcactttatgaacgtgctgtggggatttatgcttctttggtaaatatcaatgcctatcatcagcctggtgttgaggctgggaaaaaggcagcaggagaagtattggcccttcagaaaagggttctgactgtattaaaggaggccatctgcgagaaccctactgagccattgactctagatgaaattgcagatcgctgccattgccctgaagatattgagatgatctacaaaataatccagcacatggctgctaacgacagagcacttatagcagaaggcagctgcggctctcctcgcagtgttaaggtgtacctcggtgaatgcagtgtggacgaagatatgcaggccgcatagattctgtgtctggatccgtgtaacattgttggaataaatcagaagcaacacaatagcgatgctatgcatgggtgtcgctgatgctgatgtctc

SEQ ID NO: 1504 - protein, 479 aa, Zea mays subsp. mays
  peptide (1)..(479): Ceres Seq. ID no. 12361386
MVGHYWLRDPALAPNSFLRNKIETALDRILAFSQDVVSGKILSPSGRFTSILSIGIGGSALGPQFVAEALAPDNPPLKIRFIDNTDPAGIDHQIAQLGPELATTLVIVISKSGGTPETRNGLLEVQKAFRDAGLQFSKQGVAITQENSLLDNTARIEGWLARFPMFDWVGGRTSEMSAVGLLPAALQGIDIKEMLVGAALMDEETRNTVVKANPAALLALCWYWASEGIGKKDMVVLPYKDSLLLLSRYLQQLVMESLGKEFDLDGNRVNQGLTVYGNKGSTDQHAYIQQLREGVQNFFVTFIEVLRDRPAGHDWELEPGVTCGDYLFGMLQGTRSALYANDRESISVTVQEVTPRAVGALIALYERAVGIYASLVNINAYHQPGVEAGKKAAGEVLALQKRVLTVLKEAICENPTEPLTLDEIADRCHCPEDIEMIYKIIQHMAANDRALIAEGSCGSPRSVKVYLGECSVDEDMQAA

SEQ ID NO: 1505 - protein, 315 aa, Zea mays subsp. mays
  peptide (1)..(315): Ceres Seq. ID no. 12361387
MFDWVGGRTSEMSAVGLLPAALQGIDIKEMLVGAALMDEETRNTVVKANPAALLALCWYWASEGIGKKDMVVLPYKDSLLLLSRYLQQLVMESLGKEFDLDGNRVNQGLTVYGNKGSTDQHAYIQQLREGVQNFFVTFIEVLRDRPAGHDWELEPGVTCGDYLFGMLQGTRSALYANDRESISVTVQEVTPRAVGALIALYERAVGIYASLVNINAYHQPGVEAGKKAAGEVLALQKRVLTVLKEAICENPTEPLTLDEIADRCHCPEDIEMIYKIIQHMAANDRALIAEGSCGSPRSVKVYLGECSVDEDMQAA

SEQ ID NO: 1506 - protein, 304 aa, Zea mays subsp. mays
  peptide (1)..(304): Ceres Seq. ID no. 12361388
MSAVGLLPAALQGIDIKEMLVGAALMDEETRNTVVKANPAALLALCWYWASEGIGKKDMVVLPYKDSLLLLSRYLQQLVMESLGKEFDLDGNRVNQGLTVYGNKGSTDQHAYIQQLREGVQNFFVTFIEVLRDRPAGHDWELEPGVTCGDYLFGMLQGTRSALYANDRESISVTVQEVTPRAVGALIALYERAVGIYASLVNINAYHQPGVEAGKKAAGEVLALQKRVLTVLKEAICENPTEPLTLDEIADRCHCPEDIEMIYKIIQHMAANDRALIAEGSCGSPRSVKVYLGECSVDEDMQAA

SEQ ID NO: 1507 - DNA, 1377 bp, Zea mays subsp. mays
  misc_feature (1)..(1377): Ceres Seq. ID no. 12341432
  misc_feature (1)..(1377): Ortholog of  Ceres SEQ ID NO 14304148 as cited in SEQ ID NO 57313
  misc_feature (1)..(1377): Ortholog of  Ceres SEQ ID NO 13598513 as cited in SEQ ID NO 64102
  misc_feature (1)..(1377): Ortholog of  Ceres SEQ ID NO 14302224 as cited in SEQ ID NO 64268
acaatccatgcggcggcatatggcgcccatcaaggagcaaaaacacacgacaagcgcagaacagcaggtgatgctggatgccgagctccagctgtggaaccacaccttcggctacgtcaagtccatggcgctcaaggccgcgatcgacctcggcatacccgaggccatccaccagcacggcggcacggccaccctcccacaaatagtcaccagggtcacgctccacccgtccaagacaccatgcctgcggcgcctcatgcgcgtgctcaccctcaccggcgtcttcggcgcgcaggaggcgcacgacgacgacggcggctgtgacgacgagctcgtctacacgctcacgccggcatcccgtctcctcgtcggctcaccggggcagaacgtgggccctttcctgaccgtgatgctcggccccatcttcatgtcgtccttcctcgacctccgcgggtggttccagcacgagacgccggacccgtcccccttcaagatgacgcacgggcgggacatatgggagctggccgcccacgacgccgccttcggcaggctcttcgacgccggcatggtcgctgacagcagcttcatcatggacgtcgtggtcagggagtgtggtggcgtgttcgaggggatcagctccctcgtcgacgtcgccggcgggctcggtggcgccacacagaccatcgcgaaggcgttcccgaacctggagtgcagcgtgctggatctcccaaacgtcgtcgccagcgctcccactgataccgccgtgaagtatgtcgccggtgacatgttcgagagcgttccggcggcagacgctgtcttcctcaagggtgatgccgactgtgtcaagatactgaagaactgcaagaaggccataccggctcaaggaggcaaggtgataatactggatatcgtggttggagcagggtcgtcatgcgaccggaagaatgtggagacgcaatgcttgtttgatctcttcatcatgtttatcaacggtgccgaacgagatgagcgacagtggaagaagatcatctttgaagctggctttacatcttacaagatcatacctgtcctaggcattagatccataattgaagtctgcctatagaaactaatataattaaggatgaaaacgggtcaggttcgggttgagttgagcaaaattctacccgggatggcatccttaaagtctacataaacccactcacgatcgtacccacgagtgcaattctaaacccgcacgtaaaccggtcaggtttgaggtattgtatacttttaaataataattcaactctctctactactgtacgtcacaccttttccttcgttcacctctccttgctcccccatatttaaatagtaataaagttaaaattattc

SEQ ID NO: 1508 - protein, 367 aa, Zea mays subsp. mays
  peptide (1)..(367): Ceres Seq. ID no. 12341433
QSMRRHMAPIKEQKHTTSAEQQVMLDAELQLWNHTFGYVKSMALKAAIDLGIPEAIHQHGGTATLPQIVTRVTLHPSKTPCLRRLMRVLTLTGVFGAQEAHDDDGGCDDELVYTLTPASRLLVGSPGQNVGPFLTVMLGPIFMSSFLDLRGWFQHETPDPSPFKMTHGRDIWELAAHDAAFGRLFDAGMVADSSFIMDVVVRECGGVFEGISSLVDVAGGLGGATQTIAKAFPNLECSVLDLPNVVASAPTDTAVKYVAGDMFESVPAADAVFLKGDADCVKILKNCKKAIPAQGGKVIILDIVVGAGSSCDRKNVETQCLFDLFIMFINGAERDERQWKKIIFEAGFTSYKIIPVLGIRSIIEVCL

SEQ ID NO: 1509 - protein, 365 aa, Zea mays subsp. mays
  peptide (1)..(365): Ceres Seq. ID no. 12341434
MRRHMAPIKEQKHTTSAEQQVMLDAELQLWNHTFGYVKSMALKAAIDLGIPEAIHQHGGTATLPQIVTRVTLHPSKTPCLRRLMRVLTLTGVFGAQEAHDDDGGCDDELVYTLTPASRLLVGSPGQNVGPFLTVMLGPIFMSSFLDLRGWFQHETPDPSPFKMTHGRDIWELAAHDAAFGRLFDAGMVADSSFIMDVVVRECGGVFEGISSLVDVAGGLGGATQTIAKAFPNLECSVLDLPNVVASAPTDTAVKYVAGDMFESVPAADAVFLKGDADCVKILKNCKKAIPAQGGKVIILDIVVGAGSSCDRKNVETQCLFDLFIMFINGAERDERQWKKIIFEAGFTSYKIIPVLGIRSIIEVCL

SEQ ID NO: 1510 - protein, 361 aa, Zea mays subsp. mays
  peptide (1)..(361): Ceres Seq. ID no. 12341435
MAPIKEQKHTTSAEQQVMLDAELQLWNHTFGYVKSMALKAAIDLGIPEAIHQHGGTATLPQIVTRVTLHPSKTPCLRRLMRVLTLTGVFGAQEAHDDDGGCDDELVYTLTPASRLLVGSPGQNVGPFLTVMLGPIFMSSFLDLRGWFQHETPDPSPFKMTHGRDIWELAAHDAAFGRLFDAGMVADSSFIMDVVVRECGGVFEGISSLVDVAGGLGGATQTIAKAFPNLECSVLDLPNVVASAPTDTAVKYVAGDMFESVPAADAVFLKGDADCVKILKNCKKAIPAQGGKVIILDIVVGAGSSCDRKNVETQCLFDLFIMFINGAERDERQWKKIIFEAGFTSYKIIPVLGIRSIIEVCL

SEQ ID NO: 1511 - DNA, 1266 bp, Zea mays subsp. mays
  misc_feature (1)..(1266): Ceres Seq. ID no. 12405230
  misc_feature (1)..(1266): Ortholog of  Ceres SEQ ID NO 14306439 as cited in SEQ ID NO 53628
  misc_feature (1)..(1266): Ortholog of  Ceres SEQ ID NO 12611235 as cited in SEQ ID NO 56101
  misc_feature (1)..(1266): Ortholog of  Ceres SEQ ID NO 15226202 as cited in SEQ ID NO 65001
  misc_feature (1)..(1266): Ortholog of  Ceres SEQ ID NO 15177896 as cited in SEQ ID NO 0
agttcctaccaactcccgttgttgcctacggcgattccaaattcccatctgccctcctgctgctccactccactccactccaggctcttttccctgctcctgtgggctgtggcgagcgcaaaccagcctcgcttcccaaaccctagctcctcgctctcccgcccgcgtggcctgccaggcaaccacccccggatcaactccgtacagcgtgcctccgcctcccggactccagcggcggcgggatgtggtctcactccaaggacttgctcgagatcgagcccctcgagctccgattcccattcgagacaaagaagcagatctcgtgctctatgcagttgacaaaccgaacagatgactacatcggctttaaggttaagacgacgagcccgaagaagtactgtgtccggcccaacagcggcatcgtgccacctcggtccaccagcgatgtcattgtgacaatgcaagcacaaaaggaggcgccaccggacatgcagtgcaaggacaagtttcttgtgcaaagtgtcgttgtggcggaagggaccttagtcaaggacatcactggcgatatgtttaccaaagaatcagctaatgtggtggatgaggttaagctgaaggtcgtctacatcccaccacccaaaccgccatccccagtgcatgaggaatctgaagaaggctcatcaccccgaccttcattgtccgatggaattaacttgaattatcaagagacaacgagggaatctgataagtcactgttgttctcggctgtaaaaactcatatagatcaaaaggactacacctccgagacatctgctttgatttcaaagttgacagaagagagaaactctgccattcagcagaacaataagcttcgagaggaactggaccttacgaggagggaagccaacaagcagaatggtggattctcctttgtggtcgtggtggccattgctctcctgggaatgctactgggatatatcatgaagagatagatgggctcataatgactcggcctcatgttagaccgttttcctcacagtattgaatattgtctaatgcacttatcacatgcacactgctactccatagcatattcatctggtgtcttacgtgatctgtttcgtgcttgggattgggatgactagtcaccagtcgcaacacaggctgtcaaacaatggtctgtgtgcttaatcttgttttagctgttatgttagtgtgtgcaactaaaactgggtaattaatgatgtcgttttggtcgaccgtttgtgc

SEQ ID NO: 1512 - protein, 248 aa, Zea mays subsp. mays
  peptide (1)..(248): Ceres Seq. ID no. 12405231
MWSHSKDLLEIEPLELRFPFETKKQISCSMQLTNRTDDYIGFKVKTTSPKKYCVRPNSGIVPPRSTSDVIVTMQAQKEAPPDMQCKDKFLVQSVVVAEGTLVKDITGDMFTKESANVVDEVKLKVVYIPPPKPPSPVHEESEEGSSPRPSLSDGINLNYQETTRESDKSLLFSAVKTHIDQKDYTSETSALISKLTEERNSAIQQNNKLREELDLTRREANKQNGGFSFVVVVAIALLGMLLGYIMKR

SEQ ID NO: 1513 - protein, 219 aa, Zea mays subsp. mays
  peptide (1)..(219): Ceres Seq. ID no. 12405232
MQLTNRTDDYIGFKVKTTSPKKYCVRPNSGIVPPRSTSDVIVTMQAQKEAPPDMQCKDKFLVQSVVVAEGTLVKDITGDMFTKESANVVDEVKLKVVYIPPPKPPSPVHEESEEGSSPRPSLSDGINLNYQETTRESDKSLLFSAVKTHIDQKDYTSETSALISKLTEERNSAIQQNNKLREELDLTRREANKQNGGFSFVVVVAIALLGMLLGYIMKR

SEQ ID NO: 1514 - protein, 176 aa, Zea mays subsp. mays
  peptide (1)..(176): Ceres Seq. ID no. 12405233
MQAQKEAPPDMQCKDKFLVQSVVVAEGTLVKDITGDMFTKESANVVDEVKLKVVYIPPPKPPSPVHEESEEGSSPRPSLSDGINLNYQETTRESDKSLLFSAVKTHIDQKDYTSETSALISKLTEERNSAIQQNNKLREELDLTRREANKQNGGFSFVVVVAIALLGMLLGYIMKR

SEQ ID NO: 1515 - DNA, 1764 bp, Zea mays subsp. mays
  misc_feature (1)..(1764): Ceres Seq. ID no. 13636367
  misc_feature (1)..(1764): Ortholog of  Ceres SEQ ID NO 15177298 as cited in SEQ ID NO 52711
aaccgaggcggtcaggctccctcctccttcctcctccctgcaaatcctgcaggcaccaccgctcgttttcctgtccgggggacaggagagaaggggagagaccgagagagggtgaggcgcggcgtccgcccgatctgctccgccccccgaagcagcctgtcacgtcgtcctcactctcagcaaccagcgaaaatgggtgccggaggcaggatgaccgagaaggagcgggagaagcatgagcaggagcaggtcgcccgtgctaccggcggtggcgcggcagtgcagcggtcgccggtggagaagccgccgttcacgttggggcagatcaagaaggcgatcccgccgcactgcttcgagcgctccgtgctgaggtccttctcgtacgtggcccacgacctgtcgctcgccgcggcgctcctctacctcgcggtggccgtgataccggcgctaccctgcccgctccgctacgcggcctggccgctgtactgggtggcccaggggtgcgtgtgcacgggcgtgtgggtgatcgcgcacgagtgcggccaccacgccttctccgaccacgcgctcctggacgacgccgtcggcctggcgctgcactcggcgctgctggtgccctacttctcgtggaagtacagccaccggcgccaccactccaacacggggtccctggagcgcgacgaggtgttcgtgccgaggaccaaggaggcgctgccgtggtacgccccgtacgtgcacggcagccccgcgggccggctggcgcacgtcgccgtgcagctcaccctgggctggccgctgtacctggccaccaacgcgtcggggcgcccgtacccgcgcttcgcctgccacttcgacccctacggcccgatctacggcgaccgggagcgcgcccagatcttcgtctcggacgccggcgtcgcggccgtggcgttcgggctgtacaagctggcggcggcgttcgggctctggtgggtggtgcgcgtgtacgccgtgccgctgctgatcgtcaacgcgtggctggtgctcatcacgtacctgcagcacacccacccggcgctgccccactacgactcgggcgagtgggactggctgcgcggcgcgctcgccaccgtcgaccgagactacggcgtcctcaaccgcgtgttccaccacatcacggacacgcacgtcgcgcaccacctcttctccaccatgccgcactaccacgccgtggaggccaccagggcgatcaggcccgtcctcggcgagtactaccagttcgacccgacccctgtcgccaaggccacctggcgcgaggccagggagtgcatctacgtcgagcctgagaaccgcaaccgcaagggcgtcttctggtacaacagcaagttctagccgccgcttgctttttccctaggaatgggaggagaaatcaggatgagaagatggtaatgtctgcatctacctgtctaatggttagtcaccagtctttagacaggaagagagcatttgggcttcagaaaaggaggcttactgcactactgcagtgccatcgctagatttaaggcaaattcagtgtgtctgtgcccatggctgtgagctttgggtactctcaagtagtcaagttctcttgtttttgtttttagtcgtcgctgttgtaggcttgccggcggcggtcgttgcgtggccgcgccttgtcgtgtgcgtcttgccatctcttcgtgctcccttcgtgttgttgtaaaacactagtctggtgtctttggcggaataacagatcgtcgaacg

SEQ ID NO: 1516 - protein, 456 aa, Zea mays subsp. mays
  peptide (1)..(456): Ceres Seq. ID no. 13636368
NRGGQAPSSFLLPANPAGTTARFPVRGTGEKGRDRERVRRGVRPICSAPRSSLSRRPHSQQPAKMGAGGRMTEKEREKHEQEQVARATGGGAAVQRSPVEKPPFTLGQIKKAIPPHCFERSVLRSFSYVAHDLSLAAALLYLAVAVIPALPCPLRYAAWPLYWVAQGCVCTGVWVIAHECGHHAFSDHALLDDAVGLALHSALLVPYFSWKYSHRRHHSNTGSLERDEVFVPRTKEALPWYAPYVHGSPAGRLAHVAVQLTLGWPLYLATNASGRPYPRFACHFDPYGPIYGDRERAQIFVSDAGVAAVAFGLYKLAAAFGLWWVVRVYAVPLLIVNAWLVLITYLQHTHPALPHYDSGEWDWLRGALATVDRDYGVLNRVFHHITDTHVAHHLFSTMPHYHAVEATRAIRPVLGEYYQFDPTPVAKATWREARECIYVEPENRNRKGVFWYNSKF

SEQ ID NO: 1517 - protein, 392 aa, Zea mays subsp. mays
  peptide (1)..(392): Ceres Seq. ID no. 13636369
MGAGGRMTEKEREKHEQEQVARATGGGAAVQRSPVEKPPFTLGQIKKAIPPHCFERSVLRSFSYVAHDLSLAAALLYLAVAVIPALPCPLRYAAWPLYWVAQGCVCTGVWVIAHECGHHAFSDHALLDDAVGLALHSALLVPYFSWKYSHRRHHSNTGSLERDEVFVPRTKEALPWYAPYVHGSPAGRLAHVAVQLTLGWPLYLATNASGRPYPRFACHFDPYGPIYGDRERAQIFVSDAGVAAVAFGLYKLAAAFGLWWVVRVYAVPLLIVNAWLVLITYLQHTHPALPHYDSGEWDWLRGALATVDRDYGVLNRVFHHITDTHVAHHLFSTMPHYHAVEATRAIRPVLGEYYQFDPTPVAKATWREARECIYVEPENRNRKGVFWYNSKF

SEQ ID NO: 1518 - protein, 386 aa, Zea mays subsp. mays
  peptide (1)..(386): Ceres Seq. ID no. 13636370
MTEKEREKHEQEQVARATGGGAAVQRSPVEKPPFTLGQIKKAIPPHCFERSVLRSFSYVAHDLSLAAALLYLAVAVIPALPCPLRYAAWPLYWVAQGCVCTGVWVIAHECGHHAFSDHALLDDAVGLALHSALLVPYFSWKYSHRRHHSNTGSLERDEVFVPRTKEALPWYAPYVHGSPAGRLAHVAVQLTLGWPLYLATNASGRPYPRFACHFDPYGPIYGDRERAQIFVSDAGVAAVAFGLYKLAAAFGLWWVVRVYAVPLLIVNAWLVLITYLQHTHPALPHYDSGEWDWLRGALATVDRDYGVLNRVFHHITDTHVAHHLFSTMPHYHAVEATRAIRPVLGEYYQFDPTPVAKATWREARECIYVEPENRNRKGVFWYNSKF

SEQ ID NO: 1519 - DNA, 1677 bp, Zea mays subsp. mays
  misc_feature (1)..(1677): Ceres Seq. ID no. 13498877
  misc_feature (1)..(1677): Ortholog of  Ceres SEQ ID NO 14301475 as cited in SEQ ID NO 62936
  misc_feature (1)..(1677): Ortholog of  Ceres SEQ ID NO 13596935 as cited in SEQ ID NO 63031
  misc_feature (1)..(1677): Ortholog of  Ceres SEQ ID NO 13657610 as cited in SEQ ID NO 66165
  misc_feature (1)..(1677): Ortholog of  Ceres SEQ ID NO 15179123 as cited in SEQ ID NO 0
aacaacgcctcctccagtccttcttcgtaagccttcaaaccgacgaatttgagcaactgcacccagagcgcgatccattgccggggaagaagcaacttgttgcgagcctcctctatggcgagctccgaccatggttccaccaccgcccccaaggacgtgccgggcagctacggcctgccgctggtgggcgccgtgcgcgaccgcctcgacttctactacttccaggggcaggacaagtacttcgagtcccgcgtggagcgctacggctccaccgtggtgcgcatgaacgtgccgccgggccccttcatggcgcgcgacccgcgggtggtggcggtcctggacgccaagagcttccccgtgctcttcgacatggacaaggtggagaagaaggacctgttcacgggcacctacatgccgtccacctccctcaccggcggctaccgcgtctgctcgtacctggacccctccgagcccacccacaccaaggtgaagcagctgctcttctccctcctgctctcccgcaaggacgacgtgatccccaccttccgctccaacttctcctcgctcctcgccaccgtggaggcggagctggccaagggcggcaaggccgagttcaacaagctcaacgacgtcacctccttcgacttcatcggcgaggcctacttcggcgtgcgcccctcggcgaccgagctcggcaagggcgggccgagcaaggcggccaagtggctcatctggcagctccacccgctggtcacgctcggcctccccatggtcctggaggagccgctgctccacacgttccacctcccgcctttcctcgtcaagggcgactacagggcgctgtacaagtacttctccacggtggcgaagcaggcgctggacaccgccgagggcctgggcctgtcgcgcgaggaggcctgccacaacctcctcttcgccaccaccttcaacagctacggcggcctcaaggtgctgttcccgggcctgctggccaacgtggccagcggcggcgagaagctccacgagcggctggtggccgagatccgcggcgccgtggccgacgccggcggcaaggtcaccctcgcggcggtggagaggatggagctggccaagtcggtggtgtgggagtcgctgcgcctggacccgcccgtcaagttccagtacgggcacgccaagaaggacctgctggtggagagccacgacgcggtgttccaggtgaggaagggcgagatgctgttcggctaccagccgtgcgccaccaaggacccccgcgtgttcggcgacaccgcccggggacttcgtgcccgaccgcttcctcggcgaggagggcagcaagctgctgcagtacgtgtactggtccaacggccgtgagaccgagaaccccagcgtcgacaacaagcagtgccccgggaagaacttcgtggtgctggtcggcaggctcctcctcgtcgagctcttcctccgctacgacacattcaccgccgaggtcggcaaggagctgctcggcaccagcgtcatcttcaccggtgtcacgaaagctacctccggtccgggcagcgagtaaaccgccccggccggcgcgcgtcgttggatatatgatgagtggacgtgacagagtgtcccattatttcttaatttcgtcattttcctccttccttctaataagacttctctctc

SEQ ID NO: 1520 - protein, 558 aa, Zea mays subsp. mays
  peptide (1)..(558): Ceres Seq. ID no. 13498878
QRLLQSFFVSLQTDEFEQLHPERDPLPGKKQLVASLLYGELRPWFHHRPQGRAGQLRPAAGGRRARPPRLLLLPGAGQVLRVPRGALRLHRGAHERAAGPLHGARPAGGGGPGRQELPRALRHGQGGEEGPVHGHLHAVHLPHRRLPRLLVPGPLRAHPHQGEAAALLPPALPQGRRDPHLPLQLLLAPRHRGGGAGQGRQGRVQQAQRRHLLRLHRRGLLRRAPLGDRARQGRAEQGGQVAHLAAPPAGHARPPHGPGGAAAPHVPPPAFPRQGRLQGAVQVLLHGGEAGAGHRRGPGPVARGGLPQPPLRHHLQQLRRPQGAVPGPAGQRGQRRREAPRAAGGRDPRRRGRRRRQGHPRGGGEDGAGQVGGVGVAAPGPARQVPVRARQEGPAGGEPRRGVPGEEGRDAVRLPAVRHQGPPRVRRHRPGTSCPTASSARRAASCCSTCTGPTAVRPRTPASTTSSAPGRTSWCWSAGSSSSSSSSATTHSPPRSARSCSAPASSSPVSRKLPPVRAASKPPRPARVVGYMMSGRDRVSHYFLISSFSSFLLIRLLS

SEQ ID NO: 1521 - protein, 418 aa, Zea mays subsp. mays
  peptide (1)..(418): Ceres Seq. ID no. 13498879
MASSDHGSTTAPKDVPGSYGLPLVGAVRDRLDFYYFQGQDKYFESRVERYGSTVVRMNVPPGPFMARDPRVVAVLDAKSFPVLFDMDKVEKKDLFTGTYMPSTSLTGGYRVCSYLDPSEPTHTKVKQLLFSLLLSRKDDVIPTFRSNFSSLLATVEAELAKGGKAEFNKLNDVTSFDFIGEAYFGVRPSATELGKGGPSKAAKWLIWQLHPLVTLGLPMVLEEPLLHTFHLPPFLVKGDYRALYKYFSTVAKQALDTAEGLGLSREEACHNLLFATTFNSYGGLKVLFPGLLANVASGGEKLHERLVAEIRGAVADAGGKVTLAAVERMELAKSVVWESLRLDPPVKFQYGHAKKDLLVESHDAVFQVRKGEMLFGYQPCATKDPRVFGDTARGLRARPLPRRGGQQAAAVRVLVQRP

SEQ ID NO: 1522 - protein, 362 aa, Zea mays subsp. mays
  peptide (1)..(362): Ceres Seq. ID no. 13498880
MNVPPGPFMARDPRVVAVLDAKSFPVLFDMDKVEKKDLFTGTYMPSTSLTGGYRVCSYLDPSEPTHTKVKQLLFSLLLSRKDDVIPTFRSNFSSLLATVEAELAKGGKAEFNKLNDVTSFDFIGEAYFGVRPSATELGKGGPSKAAKWLIWQLHPLVTLGLPMVLEEPLLHTFHLPPFLVKGDYRALYKYFSTVAKQALDTAEGLGLSREEACHNLLFATTFNSYGGLKVLFPGLLANVASGGEKLHERLVAEIRGAVADAGGKVTLAAVERMELAKSVVWESLRLDPPVKFQYGHAKKDLLVESHDAVFQVRKGEMLFGYQPCATKDPRVFGDTARGLRARPLPRRGGQQAAAVRVLVQRP

SEQ ID NO: 1523 - DNA, 1596 bp, Zea mays subsp. mays
  misc_feature (1)..(1596): Ceres Seq. ID no. 13498873
  misc_feature (1)..(1596): Ortholog of  Ceres SEQ ID NO 13577044 as cited in SEQ ID NO 58682
  misc_feature (1)..(1596): Ortholog of  Ceres SEQ ID NO 12620877 as cited in SEQ ID NO 66686
aatttttcgcgaagtttgtgttgtgattgcgccgttacgttacgtgaagaagacggatcttctacaagctgacggaagggcggatcgtgaaattgcgagttgcgacgccgtcattacaaatacgttatctgttcatccgtcaagccgtcagatctcccggcctgaggattcgattattctttcgctctcgcccaagtcatcgtctggtcgtcgcccgcagaggcgcagacgcccaaaaccggaaggggcgccatggccgcgtcggatctggagagcaaggccaaggaggccttcgtcgacgacgacttcgagctggccaccgagctctacagccaggccatcgacgccgggcccgccaccgccgacctctatgccgaccgcgcccaggcgcacatcaagctcggcaactacactgaggctgtggcggatgctaacaaagcaattgagcttgatcctatgatgcataaagcttactaccggaaaggtgctgcatgcattaagcttgaagaataccaaactgcaaaggctgctcttgagttgggttcttcttatgcatcaggcgattcaaggtttgctcgtctattgaaggaatgtgatgagcgcatcgctgaggaatctagccaggcaccagtaaagaatgttgaggctactgtggctgctactattgaggacaaggaggatttcacaaatatggagaatacaccaccagtgatagaacccccaagcaaaccaaaatacaggcatgactactacaacagtgccacagaagtggtactgacaatatttgctaacggtgttcctgctgatagtgtagtcattgattttggtgaacagatgttgagtgtatccattgaagttcctggtgaagaaccataccattttcagccccgtctgttttctaagattatccctgagaaatgcaaatatcaagtcttatccaccaaggtcgaaatacgccttgcaaaagctgagcaggtgacatggacaaccctggattatagtggaagaccaaagactgttccccagaagataagcacgccagctgaaacagccccaagaccttcatacccatcttcaaaggcgaaaaaagactgggataaactggaagctgaagtcaaaaaggaggagaaggaagaaaaacttgatggtgatgctgcattgaacaaattcttccgtgacatctacaaggatgctgatgaagatatgcggagggccatgatgaagtcattcgtggaatcaaatggcactgttctctcaaccaattggaaagatgttggagcaaagaaggtagaagggagcccccctgatggtatggagctcaagaagtgggaatactaaagtttggactgcccatcttttgtaaatccaggtcttggaaactatgacctaattccgtccacccatagtgccatgagcttgcttggttaagtctctgcttttgtaagctttctgtatgacagtctagcgtgtgtctgagtgctacttgccgtagcttttgatggacataggtatgctattatgtggtatcgaccgggaaccatctgtggtatcaaagacagcaaactataatgtatggaatgcctattctttttggcc

SEQ ID NO: 1524 - protein, 361 aa, Zea mays subsp. mays
  peptide (1)..(361): Ceres Seq. ID no. 13498874
MAASDLESKAKEAFVDDDFELATELYSQAIDAGPATADLYADRAQAHIKLGNYTEAVADANKAIELDPMMHKAYYRKGAACIKLEEYQTAKAALELGSSYASGDSRFARLLKECDERIAEESSQAPVKNVEATVAATIEDKEDFTNMENTPPVIEPPSKPKYRHDYYNSATEVVLTIFANGVPADSVVIDFGEQMLSVSIEVPGEEPYHFQPRLFSKIIPEKCKYQVLSTKVEIRLAKAEQVTWTTLDYSGRPKTVPQKISTPAETAPRPSYPSSKAKKDWDKLEAEVKKEEKEEKLDGDAALNKFFRDIYKDADEDMRRAMMKSFVESNGTVLSTNWKDVGAKKVEGSPPDGMELKKWEY

SEQ ID NO: 1525 - protein, 293 aa, Zea mays subsp. mays
  peptide (1)..(293): Ceres Seq. ID no. 13498875
MMHKAYYRKGAACIKLEEYQTAKAALELGSSYASGDSRFARLLKECDERIAEESSQAPVKNVEATVAATIEDKEDFTNMENTPPVIEPPSKPKYRHDYYNSATEVVLTIFANGVPADSVVIDFGEQMLSVSIEVPGEEPYHFQPRLFSKIIPEKCKYQVLSTKVEIRLAKAEQVTWTTLDYSGRPKTVPQKISTPAETAPRPSYPSSKAKKDWDKLEAEVKKEEKEEKLDGDAALNKFFRDIYKDADEDMRRAMMKSFVESNGTVLSTNWKDVGAKKVEGSPPDGMELKKWEY

SEQ ID NO: 1526 - protein, 292 aa, Zea mays subsp. mays
  peptide (1)..(292): Ceres Seq. ID no. 13498876
MHKAYYRKGAACIKLEEYQTAKAALELGSSYASGDSRFARLLKECDERIAEESSQAPVKNVEATVAATIEDKEDFTNMENTPPVIEPPSKPKYRHDYYNSATEVVLTIFANGVPADSVVIDFGEQMLSVSIEVPGEEPYHFQPRLFSKIIPEKCKYQVLSTKVEIRLAKAEQVTWTTLDYSGRPKTVPQKISTPAETAPRPSYPSSKAKKDWDKLEAEVKKEEKEEKLDGDAALNKFFRDIYKDADEDMRRAMMKSFVESNGTVLSTNWKDVGAKKVEGSPPDGMELKKWEY

SEQ ID NO: 1527 - DNA, 1814 bp, Zea mays subsp. mays
  misc_feature (1)..(1814): Ceres Seq. ID no. 12373981
  misc_feature (1)..(1814): Ortholog of  Ceres SEQ ID NO 15176532 as cited in SEQ ID NO 58184
  misc_feature (1)..(1814): Ortholog of  Ceres SEQ ID NO 14303627 as cited in SEQ ID NO 62070
  misc_feature (1)..(1814): Ortholog of  Ceres SEQ ID NO 13597546 as cited in SEQ ID NO 65017
  misc_feature (1)..(1814): Ortholog of  Ceres SEQ ID NO 14308015 as cited in SEQ ID NO 65798
  misc_feature (1)..(1814): Ortholog of  Ceres SEQ ID NO 14307912 as cited in SEQ ID NO 66380
  misc_feature (1)..(1814): Ortholog of  Ceres SEQ ID NO 15176077 as cited in SEQ ID NO 66728
  misc_feature (1)..(1814): Ortholog of  Ceres SEQ ID NO 14307908 as cited in SEQ ID NO 67189
  misc_feature (1)..(1814): Ortholog of  Ceres SEQ ID NO 14308045 as cited in SEQ ID NO 67444
  misc_feature (1)..(1814): Ortholog of  Ceres SEQ ID NO 13654353 as cited in SEQ ID NO 68318
cccgtgatgttttaaatttcggatcctgtgttgcagctttgaagtgcatgaacgagacatgcagagccgcgtgacgtgagttctccccataccgcccgatctcggagatgtgcgcgtaccacatgaggctcaccggcggcgcggcctttgtgctccttatggttctcctcttgctgctgtatgcggtgcacaggtggaggaaccctcgatgcagcggccgcctgccgccgggctccatgggcctgccgctcgtcggagagacggctgcagttcttctcccctgaagcttccttggacgtcccgcgtttcgtccgacacagactgcaaaggtacggcccgatcttcaagacgagcctggtgggccacccggtcgtcgtctccgcggacgaggagctgaactacatggtgttccagcaggaggggcagctgttccagagctggtacccggactccttcgtggagatcctaggcagggacaacgtcggggagcagcagggcgccatgttcaagtacctcaagaacatggtgctccgctacttcggcccggagagcctcagggagtccatgctccgcgacgtcgagcacgccgtcagcagctcgctctgtacctggtcaaccttgccgtcggtcgagctgaaagaggccgtctccacgatggtgttcgatctttcagcgaacaagcttctcagcttggagccgtcgaggtccaagattctgaggaggagcttcttcgacttcgttcgagggctcatctcgttccctctgtatttgccaggaacagcatactactcatgcatgaagggccggcagagcgcaatggaggtgctgcaggaagtgctagcggagaggaagagactggtacaggtgcccggagcaggaggaggcgccatggaaacgatacgtcgccatggcggcgacttcttggacctcgtcatccaggaagtcacgaaggagaagccgctcgtgacggacagaatggcgctcgacctgatgttcgtgctcctgttcgccagcttccacacgacgtcgctagcgctcactctggctgtcaagctgcttgcagaccaccctcgcgtcctggaagagctcacggtggagcatgaagcgattctgaatgaacgtaacgcgcgccatggatctgatggaatcacatggatggagtacaagtctatgacgttcacatcccaggtcatcaacgagactgtccgattagccaatattgcgcctggcatcttcagaaaggcactgaaagatatacagttcagagggttcacaattccagcaggatggggagtgatggtctgtcctccagcagtgcacttgaacccagtcatttacccagatcccctcatctttaaccctacaaggttcaaggataaaccggagataaaccgtgggtcaagacacttcatggcattcggaggaggcctccgatcctgtgttggagcagacttcagcaagttgcaaatgtctattttcctccatttccttgtcactagatacaggtggagaagtcttgggggtggcaaggtagtccgaaatccggggctagaattccctgatggctaccacattcaaatacggcactggaattaattctgctaatactacagagtcaatctcgttgtgcattcaagccaagaaacggacggagggaaagaattactgttaggctctatttggatcttttgaattgaatttcattctaataattataattcaaacacagattaattagaataatataattttatgtgagatatatttttatagtactgttggtcaccatataaatttattataagcttatatcc

SEQ ID NO: 1528 - protein, 471 aa, Zea mays subsp. mays
  peptide (1)..(471): Ceres Seq. ID no. 12373982
MRCTGGGTLDAAAACRRAPWACRSSERRLQFFSPEASLDVPRFVRHRLQRYGPIFKTSLVGHPVVVSADEELNYMVFQQEGQLFQSWYPDSFVEILGRDNVGEQQGAMFKYLKNMVLRYFGPESLRESMLRDVEHAVSSSLCTWSTLPSVELKEAVSTMVFDLSANKLLSLEPSRSKILRRSFFDFVRGLISFPLYLPGTAYYSCMKGRQSAMEVLQEVLAERKRLVQVPGAGGGAMETIRRHGGDFLDLVIQEVTKEKPLVTDRMALDLMFVLLFASFHTTSLALTLAVKLLADHPRVLEELTVEHEAILNERNARHGSDGITWMEYKSMTFTSQVINETVRLANIAPGIFRKALKDIQFRGFTIPAGWGVMVCPPAVHLNPVIYPDPLIFNPTRFKDKPEINRGSRHFMAFGGGLRSCVGADFSKLQMSIFLHFLVTRYRWRSLGGGKVVRNPGLEFPDGYHIQIRHWN

SEQ ID NO: 1529 - protein, 397 aa, Zea mays subsp. mays
  peptide (1)..(397): Ceres Seq. ID no. 12373983
MVFQQEGQLFQSWYPDSFVEILGRDNVGEQQGAMFKYLKNMVLRYFGPESLRESMLRDVEHAVSSSLCTWSTLPSVELKEAVSTMVFDLSANKLLSLEPSRSKILRRSFFDFVRGLISFPLYLPGTAYYSCMKGRQSAMEVLQEVLAERKRLVQVPGAGGGAMETIRRHGGDFLDLVIQEVTKEKPLVTDRMALDLMFVLLFASFHTTSLALTLAVKLLADHPRVLEELTVEHEAILNERNARHGSDGITWMEYKSMTFTSQVINETVRLANIAPGIFRKALKDIQFRGFTIPAGWGVMVCPPAVHLNPVIYPDPLIFNPTRFKDKPEINRGSRHFMAFGGGLRSCVGADFSKLQMSIFLHFLVTRYRWRSLGGGKVVRNPGLEFPDGYHIQIRHWN

SEQ ID NO: 1530 - protein, 364 aa, Zea mays subsp. mays
  peptide (1)..(364): Ceres Seq. ID no. 12373984
MFKYLKNMVLRYFGPESLRESMLRDVEHAVSSSLCTWSTLPSVELKEAVSTMVFDLSANKLLSLEPSRSKILRRSFFDFVRGLISFPLYLPGTAYYSCMKGRQSAMEVLQEVLAERKRLVQVPGAGGGAMETIRRHGGDFLDLVIQEVTKEKPLVTDRMALDLMFVLLFASFHTTSLALTLAVKLLADHPRVLEELTVEHEAILNERNARHGSDGITWMEYKSMTFTSQVINETVRLANIAPGIFRKALKDIQFRGFTIPAGWGVMVCPPAVHLNPVIYPDPLIFNPTRFKDKPEINRGSRHFMAFGGGLRSCVGADFSKLQMSIFLHFLVTRYRWRSLGGGKVVRNPGLEFPDGYHIQIRHWN

SEQ ID NO: 1531 - DNA, 1475 bp, Zea mays subsp. mays
  misc_feature (1)..(1475): Ceres Seq. ID no. 12348910
  misc_feature (1)..(1475): Ortholog of  Ceres SEQ ID NO 15178596 as cited in SEQ ID NO 53922
  misc_feature (1)..(1475): Ortholog of  Ceres SEQ ID NO 12780542 as cited in SEQ ID NO 65674
gcgaattgcaattgcagaacggaattccattccagaaccatccttcgctcgcccccgccgccgcgctgccgcggccatatacggcgaaagccctattcgtgcccgcggccgtggatagataggtcagtgacgattgagaaacccgtagtcggagcagaggaggggtagaagatggtgttcggtcaggtggtgatcggcccgccgggctccggcaagaccacctactgcaacggcatgtcgcagttcctctccctcctcggcaggaaggttgcggttgtcaatttggaccctgcaaatgacgcattgccatatgagtgtgccataaacatcgaggacctcataaaactcagtgatgtcatgtctgagcattcgcttggccctaatggagggcttgtgtattgcatggattacttggagaagaatattgattggcttgaagaaaaactgaagccttttattgaagatcactatctgttatttgatttttctggtcaagtggaattgttcttccttcactcaaatgcaagaagtgttattaataaactcatcaaaaagatggacttgaggcttactgctgttcaccttattgatgcccatttatgctgtgatcctggaaagtatgtcattgctttgcttctttcactatcaacgatgctacacttggaattgccacatatcaatgtcttgtcaaagattgacctcattgagaactatggaaatttagcattcaaccttgacttctacactgatgtccaagatctttcttatttgcaatatcatcttgagcaggatccccgctcagccaagtacaggaaactgactaaggagctctgtgatgtgattgatgattttggtttagtcaatttttcaactttggacatccaggacaaggaaagtgttggcaatcttgtgaagctgattgacaagagcaacggatatatattttcttctattgacagtagtgctgttgagttcagcaaaattgcagcggcgcctcttgattgggactactacagaacagcggaagtgcaggagaagtacatgaaagatgatgagttcgcgcaactgacaagcaggatgcaatgaggctggcggtgccgtcccgcacccccactttggtagcacaacgggtgaacggtgaaccacgacagtgtggcacgtcgaacttcggttgccagaacgatgtgaaacctgtctaaattcatgtagctcagttgtaggtgtttactgaagctaattgctatagttgcctgatcttctgggagtaccctttgggcagtaaaaaaatgcacttgtcacctgtgaccaaccggtcaggtcctgttttgtttgttcgcttcaacttcgaactgcatcagctacaatctttagagacaaaatattgtagtgtttggactactgcagttgtaatctttaaagacaacattgtagaagcagtagaaatcagtatggattaaagccaaacgaataagctt

SEQ ID NO: 1532 - protein, 304 aa, Zea mays subsp. mays
  peptide (1)..(304): Ceres Seq. ID no. 12348911
MVFGQVVIGPPGSGKTTYCNGMSQFLSLLGRKVAVVNLDPANDALPYECAINIEDLIKLSDVMSEHSLGPNGGLVYCMDYLEKNIDWLEEKLKPFIEDHYLLFDFSGQVELFFLHSNARSVINKLIKKMDLRLTAVHLIDAHLCCDPGKYVIALLLSLSTMLHLELPHINVLSKIDLIENYGNLAFNLDFYTDVQDLSYLQYHLEQDPRSAKYRKLTKELCDVIDDFGLVNFSTLDIQDKESVGNLVKLIDKSNGYIFSSIDSSAVEFSKIAAAPLDWDYYRTAEVQEKYMKDDEFAQLTSRMQ

SEQ ID NO: 1533 - protein, 283 aa, Zea mays subsp. mays
  peptide (1)..(283): Ceres Seq. ID no. 12348912
MSQFLSLLGRKVAVVNLDPANDALPYECAINIEDLIKLSDVMSEHSLGPNGGLVYCMDYLEKNIDWLEEKLKPFIEDHYLLFDFSGQVELFFLHSNARSVINKLIKKMDLRLTAVHLIDAHLCCDPGKYVIALLLSLSTMLHLELPHINVLSKIDLIENYGNLAFNLDFYTDVQDLSYLQYHLEQDPRSAKYRKLTKELCDVIDDFGLVNFSTLDIQDKESVGNLVKLIDKSNGYIFSSIDSSAVEFSKIAAAPLDWDYYRTAEVQEKYMKDDEFAQLTSRMQ

SEQ ID NO: 1534 - protein, 242 aa, Zea mays subsp. mays
  peptide (1)..(242): Ceres Seq. ID no. 12348913
MSEHSLGPNGGLVYCMDYLEKNIDWLEEKLKPFIEDHYLLFDFSGQVELFFLHSNARSVINKLIKKMDLRLTAVHLIDAHLCCDPGKYVIALLLSLSTMLHLELPHINVLSKIDLIENYGNLAFNLDFYTDVQDLSYLQYHLEQDPRSAKYRKLTKELCDVIDDFGLVNFSTLDIQDKESVGNLVKLIDKSNGYIFSSIDSSAVEFSKIAAAPLDWDYYRTAEVQEKYMKDDEFAQLTSRMQ

SEQ ID NO: 1535 - DNA, 1469 bp, Zea mays subsp. mays
  misc_feature (1)..(1469): Ceres Seq. ID no. 12411125
  misc_feature (1)..(1469): Ortholog of  Ceres SEQ ID NO 15176130 as cited in SEQ ID NO 1136
  misc_feature (1)..(1469): Ortholog of  Ceres SEQ ID NO 15171728 as cited in SEQ ID NO 57131
  misc_feature (1)..(1469): Ortholog of  Ceres SEQ ID NO 14308198 as cited in SEQ ID NO 59072
  misc_feature (1)..(1469): Ortholog of  Ceres SEQ ID NO 13654213 as cited in SEQ ID NO 60614
  misc_feature (1)..(1469): Ortholog of  Ceres SEQ ID NO 12617527 as cited in SEQ ID NO 64697
gcacgagaccattacctagaacatcctaatcgaaaaaaaaagagcgggcagtactggtggcccgtggccctggtggggcaccactaggctgctacgtgttcttccccaaatcggcctcacagccctcactgttgcaaagtagggactagggagtacctgctctctcgctctcgcccatcccattgccttcatcatcaaatcgccaccgaaaattccccccaaaaaacaataagcacttgttcatcatcatcagagtaaacacagcagaaccctagcgcgccgttcctccgacgactcacatcccacccactcacccaccccatggcggccaagctctccaccagcgccgacgccccggcctcggtgcggctctccgcagcagcgcaggcggctgcgatccagccctcctctccgcgcttcttcttctcctcgctggccgggaccaacccggcctccccgcatcgccgcatcgccattgccgtcgatctctccgacgagtccgccttcgccgtcaagtgggccgtgcagaactacctccgccccggggacgccgtcgtgctgctccacgtgcgccccacctccgttctctacggcgccgactggggttccatcccggtctccgtcgctgacgaggccgacgctgccgaggacgccgccgccgccgccgagggcggcccctccgaggaggagctgcagaagaagcgggaggaggaatacgacgccttcacctctaccaaggcgcaggacctcgcgcagccgcttgtcgatgcccagatccccttcaagatccatgtcgtcaaggaccacgacatgaaggagcgcctctgcctcgaggctgagcgccttggcctgtccgctatgatcatggggagccgcggttttggggcctctcggaaaggcggcaaggggaggcttgggagtgttagtgattactgtgtacaccactgtgtatgccccgttgtggttgttcgctaccctgatgatgctgcagatgccagtggagatgcatcaggggcgacagatgagttgcacactgtaccagaggacgaacctgtttatcacgatgcgcctgaggtgcagaaagaaaactgaggcaatggccgcaagcagctgaagaacgaaggaaaacatggggcctgtagtgactagtgaggcgattctgtgtatctgaaagatgggactggctgtttatcttcgcttctgtatatcaactgcgtgtcatgatcagtggctgcttcgcgtttgagtttcatatcggagtcctagatcatcgaagtctttgttggtttgcttgtgagatgtttatgttgtgaacaccatgtagagtactcttctcgtaggtagaagctgccttgaagatgcttatgcagttatgctggggtctgggctctcttgtcttgttttgcggagccggtgatgagctttattttctcaaatggtagttatctacacggtattatgtgctctgt

SEQ ID NO: 1536 - protein, 256 aa, Zea mays subsp. mays
  peptide (1)..(256): Ceres Seq. ID no. 12411126
MAAKLSTSADAPASVRLSAAAQAAAIQPSSPRFFFSSLAGTNPASPHRRIAIAVDLSDESAFAVKWAVQNYLRPGDAVVLLHVRPTSVLYGADWGSIPVSVADEADAAEDAAAAAEGGPSEEELQKKREEEYDAFTSTKAQDLAQPLVDAQIPFKIHVVKDHDMKERLCLEAERLGLSAMIMGSRGFGASRKGGKGRLGSVSDYCVHHCVCPVVVVRYPDDAADASGDASGATDELHTVPEDEPVYHDAPEVQKEN

SEQ ID NO: 1537 - DNA, 1211 bp, Zea mays subsp. mays
  misc_feature (1)..(1211): Ceres Seq. ID no. 12411121
  misc_feature (1)..(1211): Ortholog of  Ceres SEQ ID NO 13594655 as cited in SEQ ID NO 51843
  misc_feature (1)..(1211): Ortholog of  Ceres SEQ ID NO 13637562 as cited in SEQ ID NO 53674
  misc_feature (1)..(1211): Ortholog of  Ceres SEQ ID NO 13595851 as cited in SEQ ID NO 56559
  misc_feature (1)..(1211): Ortholog of  Ceres SEQ ID NO 15173454 as cited in SEQ ID NO 57898
  misc_feature (1)..(1211): Ortholog of  Ceres SEQ ID NO 13598755 as cited in SEQ ID NO 69032
acacatttcaatcactcgcttcccatgaattcgctcgctttccctagctgcccgtcagcattgacgcccgcctccaccaccgcccccgcgtcctctccctttccctcgccgcgtataaagattcgctgcccgcgacaagaagatgcagctcattaccacctccgcctccgcgatcgaagctcctcacaaaccgttatcgtcgccatggcagccgccgcgcctgcaagctccgtgaaggaagtgctgccatctcccctgacctccgcctccgagccccctcccctcttcgatggcaccaccaggctgtacgttgcctatcattgcccgtacgcgcagcgcgcttggattgccaggaactacaagggtttgcaggacaagattaagatagtcgccatcgatcttgctgacaggccaacatggtacaaggagaaggtttatccagaaaacaaggtgccttctctggagcacaacaaccaggtgaaaggtgagagtttggatctggtcaagtacattgacagcaactttgaaggcccatcgttgctcccagaggatccttcaaaaaagcagttcgctgaggagctgcttgcatatactgatgcatttaacaaagcattatacttttgtatagtctccaaggaagatgtgtctgaggaagctgtcgctgctttggataaaatagaagacgccctcgggaaattcaacgagggtccattctcccttggtcagttcagtctggtggacattgcgtatgtaccattcatcgagaggtttcagatattctattccaacataaagaactatgatattacaaagggcagacccaaccttcagaagttcattgaggaagtggacaagattgatgcatacacacagactaaacaggacccacagtttttacttgagcagacaaagaagcggcttgggattgcttaaagcttgcggccgaggatgactctcgacagaaataccagcatagtagatcgacacttgtttagtcatttgtgtgcttgaataatgaatactacatatatggttttcaataagacatggtcctctatactgggttgtacttctgaaaacaaactagttgtcctgatattatagctttcgtggtgtgtttacgtcactgtatatgaaagggtggggagagagaatgatatgccatgtattctgtcaaatgtttttttataatgtcaagagctctgactttt

SEQ ID NO: 1538 - protein, 310 aa, Zea mays subsp. mays
  peptide (1)..(310): Ceres Seq. ID no. 12411122
THFNHSLPMNSLAFPSCPSALTPASTTAPASSPFPSPRIKIRCPRQEDAAHYHLRLRDRSSSQTVIVAMAAAAPASSVKEVLPSPLTSASEPPPLFDGTTRLYVAYHCPYAQRAWIARNYKGLQDKIKIVAIDLADRPTWYKEKVYPENKVPSLEHNNQVKGESLDLVKYIDSNFEGPSLLPEDPSKKQFAEELLAYTDAFNKALYFCIVSKEDVSEEAVAALDKIEDALGKFNEGPFSLGQFSLVDIAYVPFIERFQIFYSNIKNYDITKGRPNLQKFIEEVDKIDAYTQTKQDPQFLLEQTKKRLGIA

SEQ ID NO: 1539 - protein, 302 aa, Zea mays subsp. mays
  peptide (1)..(302): Ceres Seq. ID no. 12411123
MNSLAFPSCPSALTPASTTAPASSPFPSPRIKIRCPRQEDAAHYHLRLRDRSSSQTVIVAMAAAAPASSVKEVLPSPLTSASEPPPLFDGTTRLYVAYHCPYAQRAWIARNYKGLQDKIKIVAIDLADRPTWYKEKVYPENKVPSLEHNNQVKGESLDLVKYIDSNFEGPSLLPEDPSKKQFAEELLAYTDAFNKALYFCIVSKEDVSEEAVAALDKIEDALGKFNEGPFSLGQFSLVDIAYVPFIERFQIFYSNIKNYDITKGRPNLQKFIEEVDKIDAYTQTKQDPQFLLEQTKKRLGIA

SEQ ID NO: 1540 - protein, 242 aa, Zea mays subsp. mays
  peptide (1)..(242): Ceres Seq. ID no. 12411124
MAAAAPASSVKEVLPSPLTSASEPPPLFDGTTRLYVAYHCPYAQRAWIARNYKGLQDKIKIVAIDLADRPTWYKEKVYPENKVPSLEHNNQVKGESLDLVKYIDSNFEGPSLLPEDPSKKQFAEELLAYTDAFNKALYFCIVSKEDVSEEAVAALDKIEDALGKFNEGPFSLGQFSLVDIAYVPFIERFQIFYSNIKNYDITKGRPNLQKFIEEVDKIDAYTQTKQDPQFLLEQTKKRLGIA

SEQ ID NO: 1541 - DNA, 1877 bp, Zea mays subsp. mays
  misc_feature (1)..(1877): Ceres Seq. ID no. 12411117
  misc_feature (1)..(1877): Ortholog of  Ceres SEQ ID NO 13638331 as cited in SEQ ID NO 58047
  misc_feature (1)..(1877): Ortholog of  Ceres SEQ ID NO 15170135 as cited in SEQ ID NO 67647
aaaatacaactcagtctcagtcccccaccacatccgctccccgccttccgcttccctaccccccgcatcacctaccaacgccgacaccatgggggccttcgcgaaggaggagcaccagttcctcgccgagctcggcctcgcgcagcgcaacccgggcgcgttcgcatgcggtgcgtggggcggctcaggtcccaccgtcacctccacgagcccgaccaacaatcaggtcatcgcagaggtcgtggaggcgtccgtgcacgactacgaggagggcatgcgcgcctgcttcgacgccgctaagacatggatggcgattcctgctccaaagcgaggagagatcgttaggcaaatcggtgatgcactgagagcaaagctccatcaccttggcaggcttgtgtcacttgagatggggaaaattcttcctgaagggatcggtgaggttcaggaaatcattgacatgtgtgattatgctgtgggactaagtcgccaactaaatggatccattataccatctgaacgaccaaaccatatgatgatggaggtgtggaatccccttggagttgtgggtgttataacggcatttaatttcccttgtgctgtgcttggttggaatgcttgcattgctttggtctgtggaaattgtgtcgtctggaaaggtgctccaacaactccactgatcactattgcaatgacaaaaatagtggctagtgtattggagaagaacaacttaccaggcgcaatttttacatctttttgtgggggcactgaaattggtcaagcaattgcccttgacattaggatacctttggtttcattcactggaagtacaagggctggtctaatggttcagcaacaagttagtgcaagatttggtaaatgccttcttgaacttagcggaaacaatgccatcattgttatggatgatgcagatatccagctagctgtgcgatctgtcttgttcgctgctgttggtacagcaggacaacgctgcactacatgtcgtaggctgattcttcatgagaacatatatcaaaccttccttgatcagcttgttgaggtatacaaacaagtccgaattggggatccgttggagaaaggcaccttactgggaccactgcacactcctgcttcaaaagagaactttttgaaaggcattcagactatcaaatctcagggagggaaaatcctttttggaggatctgccattgaatcagaaggaaactttgtgcaaccaacaattgtggaaattacaccttctgcaccagttgtgaaagaagaactctttggtcctgtcctttatgctatgaaatttcagaccttgaaggaagcaattgaaatcaataactctgttcctcaaggattgagcagttctatatttacaaagaggccagatattatttttaagtggctcgggccccatggtagtgattgtggcatagtgaatgtgaacatacctactaatggtgctgaaattggtggagcatttggtggagaaaaagcaactggtggtggacgagaagcagggagtgattcctggaagcagtacatgaggagggcgacttgtacaatcaactatgggagcgagctacctctagcccagggaatcaattttggttaatcctgcagaaatgttgcccgtggatctcggtgttttctgcagacgtggatgccgtacggaaagaactgatgcaaccgcatttgagatctcagcagacttgagcagcatttattggcgtcagttgtgaaacttaaactgcaggagcatcttgtacataaataaaataagatgtttgttgctcgtgggccgtggcacattttggtaccggtgtccagtctactaataaaatctaatgcaaaacggtcataactacattctc

SEQ ID NO: 1542 - protein, 538 aa, Zea mays subsp. mays
  peptide (1)..(538): Ceres Seq. ID no. 12411118
KYNSVSVPHHIRSPPSASLPPASPTNADTMGAFAKEEHQFLAELGLAQRNPGAFACGAWGGSGPTVTSTSPTNNQVIAEVVEASVHDYEEGMRACFDAAKTWMAIPAPKRGEIVRQIGDALRAKLHHLGRLVSLEMGKILPEGIGEVQEIIDMCDYAVGLSRQLNGSIIPSERPNHMMMEVWNPLGVVGVITAFNFPCAVLGWNACIALVCGNCVVWKGAPTTPLITIAMTKIVASVLEKNNLPGAIFTSFCGGTEIGQAIALDIRIPLVSFTGSTRAGLMVQQQVSARFGKCLLELSGNNAIIVMDDADIQLAVRSVLFAAVGTAGQRCTTCRRLILHENIYQTFLDQLVEVYKQVRIGDPLEKGTLLGPLHTPASKENFLKGIQTIKSQGGKILFGGSAIESEGNFVQPTIVEITPSAPVVKEELFGPVLYAMKFQTLKEAIEINNSVPQGLSSSIFTKRPDIIFKWLGPHGSDCGIVNVNIPTNGAEIGGAFGGEKATGGGREAGSDSWKQYMRRATCTINYGSELPLAQGINFG

SEQ ID NO: 1543 - protein, 509 aa, Zea mays subsp. mays
  peptide (1)..(509): Ceres Seq. ID no. 12411119
MGAFAKEEHQFLAELGLAQRNPGAFACGAWGGSGPTVTSTSPTNNQVIAEVVEASVHDYEEGMRACFDAAKTWMAIPAPKRGEIVRQIGDALRAKLHHLGRLVSLEMGKILPEGIGEVQEIIDMCDYAVGLSRQLNGSIIPSERPNHMMMEVWNPLGVVGVITAFNFPCAVLGWNACIALVCGNCVVWKGAPTTPLITIAMTKIVASVLEKNNLPGAIFTSFCGGTEIGQAIALDIRIPLVSFTGSTRAGLMVQQQVSARFGKCLLELSGNNAIIVMDDADIQLAVRSVLFAAVGTAGQRCTTCRRLILHENIYQTFLDQLVEVYKQVRIGDPLEKGTLLGPLHTPASKENFLKGIQTIKSQGGKILFGGSAIESEGNFVQPTIVEITPSAPVVKEELFGPVLYAMKFQTLKEAIEINNSVPQGLSSSIFTKRPDIIFKWLGPHGSDCGIVNVNIPTNGAEIGGAFGGEKATGGGREAGSDSWKQYMRRATCTINYGSELPLAQGINFG

SEQ ID NO: 1544 - protein, 447 aa, Zea mays subsp. mays
  peptide (1)..(447): Ceres Seq. ID no. 12411120
MRACFDAAKTWMAIPAPKRGEIVRQIGDALRAKLHHLGRLVSLEMGKILPEGIGEVQEIIDMCDYAVGLSRQLNGSIIPSERPNHMMMEVWNPLGVVGVITAFNFPCAVLGWNACIALVCGNCVVWKGAPTTPLITIAMTKIVASVLEKNNLPGAIFTSFCGGTEIGQAIALDIRIPLVSFTGSTRAGLMVQQQVSARFGKCLLELSGNNAIIVMDDADIQLAVRSVLFAAVGTAGQRCTTCRRLILHENIYQTFLDQLVEVYKQVRIGDPLEKGTLLGPLHTPASKENFLKGIQTIKSQGGKILFGGSAIESEGNFVQPTIVEITPSAPVVKEELFGPVLYAMKFQTLKEAIEINNSVPQGLSSSIFTKRPDIIFKWLGPHGSDCGIVNVNIPTNGAEIGGAFGGEKATGGGREAGSDSWKQYMRRATCTINYGSELPLAQGINFG

SEQ ID NO: 1545 - DNA, 1660 bp, Zea mays subsp. mays
  misc_feature (1)..(1660): Ceres Seq. ID no. 12407366
  misc_feature (1)..(1660): Ortholog of  Ceres SEQ ID NO 13594345 as cited in SEQ ID NO 58043
  misc_feature (1)..(1660): Ortholog of  Ceres SEQ ID NO 12614112 as cited in SEQ ID NO 60891
  misc_feature (1)..(1660): Ortholog of  Ceres SEQ ID NO 14302832 as cited in SEQ ID NO 64926
  misc_feature (1)..(1660): Ortholog of  Ceres SEQ ID NO 13662880 as cited in SEQ ID NO 65422
  misc_feature (1)..(1660): Ortholog of  Ceres SEQ ID NO 13656166 as cited in SEQ ID NO 66015
  misc_feature (1)..(1660): Ortholog of  Ceres SEQ ID NO 13596180 as cited in SEQ ID NO 67941
  misc_feature (1)..(1660): Ortholog of  Ceres SEQ ID NO 13596089 as cited in SEQ ID NO 68373
gcacgagaccattacctagaacatcctaatcgaaaagcagaaccatggccggcgaggaacaccagcagcacagcagccactacggccaccacttcctggtggtggcctacggcatgcagggccacgtcaacccagcgcgcgctctggctcaccgcctcgccaagctcagcgacgtcgtaggcggctgccccatcctcgccacgctctccctgcacgtcgccgcccaccgccgcatgttcccggcacagctggacccggacgccgccggcgaggaggatgaggaggaggccagcgacggcgtcatctcctacgtgccccactcggacagcttcgacgacggctccttgcccagaacccccgaggactgggcccgcagacgccgcgcgagccgcgagagcctctccgccatgctcgcccgcttcgccggcggcgggcggcccgtcacctgcgtggtgtgcacgctgctggtgcccgcggcggtggacgccgcgacgcgccacggcgtccccttcgccgtgtactggatccagccggccaccgtcctcgccgccgcgtaccactacttccacggctacggcgagaccgtcgccgccgccgacccggcgcacgaggtgagcctgcctgggctacgccgccctctccgggtccgggacttcccgtcctacctggtggacacgacgggcagcccgctggccaggtccgtcgtcgggatgttccgagagctgttcgagagcgtggaccggtggcggcctaaagtcctcgtgaacacgttcgacgagctggaggcgggcgtgctctcggagatgaagcgacacctcgacgtgttcgccgtcggtcccatggtcgccggcgccggtggtggctcgggctcctctggcgcgtcaaacgacgaaggacggatccatctgtacaggcacgacgacgccgacaggaagaggtacatggagtggctcggagcgcagccggagagctcggtggtgtacgtgtcgttcgggagcatagcgacgcacaccttgcagcagatggaggaggttgtccaagggctgctgcaggctggacggccgtacttgctggccgcgcgcagctggcacgggctcgaggacgacggtgcgcgccgcgtcctggacaacgccgcccagagcagcggcggccgtgggacggtcgtggactggtgcgaccagccggaggtcctggcgcacccggccgtcgggtgcttcgtctcgcactgcggctggaactcgacgttggaggccgtggcggccggcgtgccgctcgtcggcgtgcccagcctgtttgaccagccaacgaacacgtacttggtggtggaggagtggggggtcggcgtcagaggggagcgtgacggtgagggcgtgttagctgcgacggagctggcgagatgcgttgagctggtcatgggtcaaggtacaaaagcaacggcgataagggagagagtaaaggctttgagagagatggcgcagcaggcggcacgagcaggtgggccggcggagagaaaccttgaggactttgttaactctgtcggtgatagcttccgtcctgtcggaatttcagttgcggaaaaaactgatgaatctcgtacatgttcatcagaatgacttccgtacagatattatttttatctacattctacaaggagtacctg

SEQ ID NO: 1546 - protein, 522 aa, Zea mays subsp. mays
  peptide (1)..(522): Ceres Seq. ID no. 12407367
MAGEEHQQHSSHYGHHFLVVAYGMQGHVNPARALAHRLAKLSDVVGGCPILATLSLHVAAHRRMFPAQLDPDAAGEEDEEEASDGVISYVPHSDSFDDGSLPRTPEDWARRRRASRESLSAMLARFAGGGRPVTCVVCTLLVPAAVDAATRHGVPFAVYWIQPATVLAAAYHYFHGYGETVAAADPAHEVSLPGLRRPLRVRDFPSYLVDTTGSPLARSVVGMFRELFESVDRWRPKVLVNTFDELEAGVLSEMKRHLDVFAVGPMVAGAGGGSGSSGASNDEGRIHLYRHDDADRKRYMEWLGAQPESSVVYVSFGSIATHTLQQMEEVVQGLLQAGRPYLLAARSWHGLEDDGARRVLDNAAQSSGGRGTVVDWCDQPEVLAHPAVGCFVSHCGWNSTLEAVAAGVPLVGVPSLFDQPTNTYLVVEEWGVGVRGERDGEGVLAATELARCVELVMGQGTKATAIRERVKALREMAQQAARAGGPAERNLEDFVNSVGDSFRPVGISVAEKTDESRTCSSE

SEQ ID NO: 1547 - protein, 499 aa, Zea mays subsp. mays
  peptide (1)..(499): Ceres Seq. ID no. 12407368
MQGHVNPARALAHRLAKLSDVVGGCPILATLSLHVAAHRRMFPAQLDPDAAGEEDEEEASDGVISYVPHSDSFDDGSLPRTPEDWARRRRASRESLSAMLARFAGGGRPVTCVVCTLLVPAAVDAATRHGVPFAVYWIQPATVLAAAYHYFHGYGETVAAADPAHEVSLPGLRRPLRVRDFPSYLVDTTGSPLARSVVGMFRELFESVDRWRPKVLVNTFDELEAGVLSEMKRHLDVFAVGPMVAGAGGGSGSSGASNDEGRIHLYRHDDADRKRYMEWLGAQPESSVVYVSFGSIATHTLQQMEEVVQGLLQAGRPYLLAARSWHGLEDDGARRVLDNAAQSSGGRGTVVDWCDQPEVLAHPAVGCFVSHCGWNSTLEAVAAGVPLVGVPSLFDQPTNTYLVVEEWGVGVRGERDGEGVLAATELARCVELVMGQGTKATAIRERVKALREMAQQAARAGGPAERNLEDFVNSVGDSFRPVGISVAEKTDESRTCSSE

SEQ ID NO: 1548 - protein, 459 aa, Zea mays subsp. mays
  peptide (1)..(459): Ceres Seq. ID no. 12407369
MFPAQLDPDAAGEEDEEEASDGVISYVPHSDSFDDGSLPRTPEDWARRRRASRESLSAMLARFAGGGRPVTCVVCTLLVPAAVDAATRHGVPFAVYWIQPATVLAAAYHYFHGYGETVAAADPAHEVSLPGLRRPLRVRDFPSYLVDTTGSPLARSVVGMFRELFESVDRWRPKVLVNTFDELEAGVLSEMKRHLDVFAVGPMVAGAGGGSGSSGASNDEGRIHLYRHDDADRKRYMEWLGAQPESSVVYVSFGSIATHTLQQMEEVVQGLLQAGRPYLLAARSWHGLEDDGARRVLDNAAQSSGGRGTVVDWCDQPEVLAHPAVGCFVSHCGWNSTLEAVAAGVPLVGVPSLFDQPTNTYLVVEEWGVGVRGERDGEGVLAATELARCVELVMGQGTKATAIRERVKALREMAQQAARAGGPAERNLEDFVNSVGDSFRPVGISVAEKTDESRTCSSE

SEQ ID NO: 1549 - DNA, 1144 bp, Zea mays subsp. mays
  misc_feature (1)..(1144): Ceres Seq. ID no. 12412127
  misc_feature (1)..(1144): Ortholog of  Ceres SEQ ID NO 14316326 as cited in SEQ ID NO 55584
ctcggaaggatggcggcggcggtttccagggccatctgcgtccagaaaccgggctccaaatgcagcagggacagggaagcgacctccttcgcccgccgaacggtcgcggcgccgaggcccccgcgcgccaaagccgccggcgtcatccgctccgactccggcgcgggacggggccagcagtgctcgccgctgagggccgtcgttgacgccgcgtcgatacagacgaccaaaaagagcaaatggcgcctcagtctcccgcgcgcaagctacaacggttcagggtccggtgctgcggcggctgagccgtctaccgtgggagacaccttggaacgggaggagggcggcggcacagaggcaggcgcttcggctgatgagtcatccaaccggaagcagccgccccctgttgaccccaagattgagaaggacctcaagaaggtagttcaaaagactgcggcaacctttgcaccaagggcgtccacgaaaacaaagaaccctgctgtccctggaagtaccctgtacaccgtctttgaagtccagggctatgtttccatgctgttgggcggagcactttccttcaatctcatattcccatcgaatgagccagacatctggaggttaatgggaatgtggtccatttggatgttcactataccttcgcttcgggctcgtgactgctccaataaagagaaagaagctctcaactacttatttctcctgattcctctgatcaacgttatgattccattcttcgtgaagtcctttgctgttgtttggtcagcagatacagttgctttcttcgtgatgtatgcatggaagcttggatggctgcaaaggttgaaatgaagatttttggtgtgctctcttggtgatgtgtgtatgaaagcttggatatttggtttgaaaaggtggagtcggtagcttttttgctgagagaaacatttgtcctcaaaattttcacatcttttggagggagctgcatgattagtttattccaagatttagttcatatagccttttatatcttgtgtatatgcagggagtatgaaaaaacagcctttcacatttaagtgataaatatatgtacctgaagtctgaacatttttgttgactacgaactgaacagctctaaatggttcttgatttc

SEQ ID NO: 1550 - protein, 280 aa, Zea mays subsp. mays
  peptide (1)..(280): Ceres Seq. ID no. 12412128
LGRMAAAVSRAICVQKPGSKCSRDREATSFARRTVAAPRPPRAKAAGVIRSDSGAGRGQQCSPLRAVVDAASIQTTKKSKWRLSLPRASYNGSGSGAAAAEPSTVGDTLEREEGGGTEAGASADESSNRKQPPPVDPKIEKDLKKVVQKTAATFAPRASTKTKNPAVPGSTLYTVFEVQGYVSMLLGGALSFNLIFPSNEPDIWRLMGMWSIWMFTIPSLRARDCSNKEKEALNYLFLLIPLINVMIPFFVKSFAVVWSADTVAFFVMYAWKLGWLQRLK

SEQ ID NO: 1551 - protein, 277 aa, Zea mays subsp. mays
  peptide (1)..(277): Ceres Seq. ID no. 12412129
MAAAVSRAICVQKPGSKCSRDREATSFARRTVAAPRPPRAKAAGVIRSDSGAGRGQQCSPLRAVVDAASIQTTKKSKWRLSLPRASYNGSGSGAAAAEPSTVGDTLEREEGGGTEAGASADESSNRKQPPPVDPKIEKDLKKVVQKTAATFAPRASTKTKNPAVPGSTLYTVFEVQGYVSMLLGGALSFNLIFPSNEPDIWRLMGMWSIWMFTIPSLRARDCSNKEKEALNYLFLLIPLINVMIPFFVKSFAVVWSADTVAFFVMYAWKLGWLQRLK

SEQ ID NO: 1552 - DNA, 1389 bp, Zea mays subsp. mays
  misc_feature (1)..(1389): Ceres Seq. ID no. 12411109
  misc_feature (1)..(1389): Ortholog of  Ceres SEQ ID NO 13638750 as cited in SEQ ID NO 52185
actcgtccacacgcgaaggcacccagcagcagccgctcccgaactgaggaaccctaccacgcgggcgacggcggtgcgcgaccggtgacgggacagcggcagcgccccctcctccatctgctggtcccaccgcctcctgacgttatccgatactgccaatccccctcttcgccgttgacggagcttaccgaggaaagaagggcagggccatggcgggagccttcgctttccgcctcgtgcctcgcctcgccgcagagccggcggcgagggggaagggtggcggaggaggagccaaccgcgacgccggcagcagggcgctggtgtcaaagaaaccaaacaagcagcagcatttgtggatcaggaaggagacagctgggtcagggaagaaggctctccgtcttattgatgctgtttcgaagttaccaaatgaaagagaagctatttatggtgcattggacaagtggagtgctttcgaacctgaatttcctattatagcagcagcaaaagctttggggatgttgaaaaggcgacgacaatggttaagaataatccaggtaaccaagtggttgatgagcaaaggacaggtgctgacatggacaacatatgatacacttctgctcgcacttcttatggataaacgggtagacgaagctgagtcagtttggaacactgtaatacagactcatacccgctcagtgcccaagaggttgttctctcggatgatcttgatctacgacattcaccagcgcccagataaagttttggagatattcgcggatatggaggagttaggtgtgcgtccggacgaggatacagcgagacggatcggaaaggcattcgtggcttctggccaagaagaaaaggagaagcatgtcctcgagaaatacttgaagaagtggaagtacatccatttcaacggcgagcgcgttcgcgtgcggagggacggaccattggcgtagtgcccgttttctgaaaaatgctcgaacctatcagagtatcgtgccggtaggcggtagggcaggggagatgctgttactgccgctgtgacagtcaggcacatggatatcggcactagtccctatcctatgtatgtggaatggaacggaaactggagattggttccatggctctagcctgtggaggagacgagcggatggggggtggctggctactaccggcgagatagtgatttaataggcactacataggcgtccagtgattgcgatggctttaacttgcgtatgtgtctgcggaatggtcccgtgctatttcggtgacttgtgcttgtggaattgtgaacacccactggaaagtgtatatcatgagagggacgatacctgacgtctgggcccatggcttgctgatttcacgcaacgaaccattttctgc

SEQ ID NO: 1553 - protein, 249 aa, Zea mays subsp. mays
  peptide (1)..(249): Ceres Seq. ID no. 12411110
MAGAFAFRLVPRLAAEPAARGKGGGGGANRDAGSRALVSKKPNKQQHLWIRKETAGSGKKALRLIDAVSKLPNEREAIYGALDKWSAFEPEFPIIAAAKALGMLKRRRQWLRIIQVTKWLMSKGQVLTWTTYDTLLLALLMDKRVDEAESVWNTVIQTHTRSVPKRLFSRMILIYDIHQRPDKVLEIFADMEELGVRPDEDTARRIGKAFVASGQEEKEKHVLEKYLKKWKYIHFNGERVRVRRDGPLA

SEQ ID NO: 1554 - protein, 164 aa, Zea mays subsp. mays
  peptide (1)..(164): Ceres Seq. ID no. 12411111
TRPHAKAPSSSRSRTEEPYHAGDGGARPVTGQRQRPLLHLLVPPPPDVIRYCQSPSSPLTELTEERRAGPWREPSLSASCLASPQSRRRGGRVAEEEPTATPAAGRWCQRNQTSSSICGSGRRQLGQGRRLSVLLMLFRSYQMKEKLFMVHWTSGVLSNLNFLL

SEQ ID NO: 1555 - protein, 147 aa, Zea mays subsp. mays
  peptide (1)..(147): Ceres Seq. ID no. 12411112
MLKRRRQWLRIIQVTKWLMSKGQVLTWTTYDTLLLALLMDKRVDEAESVWNTVIQTHTRSVPKRLFSRMILIYDIHQRPDKVLEIFADMEELGVRPDEDTARRIGKAFVASGQEEKEKHVLEKYLKKWKYIHFNGERVRVRRDGPLA

SEQ ID NO: 1556 - DNA, 895 bp, Zea mays subsp. mays
  misc_feature (1)..(895): Ceres Seq. ID no. 12351296
  misc_feature (1)..(895): Ortholog of  Ceres SEQ ID NO 12589584 as cited in SEQ ID NO 0
  misc_feature (1)..(895): Ortholog of  Ceres SEQ ID NO 12635657 as cited in SEQ ID NO 0
  misc_feature (1)..(895): Ortholog of  Ceres SEQ ID NO 12635879 as cited in SEQ ID NO 0
  misc_feature (1)..(895): Ortholog of  Ceres SEQ ID NO 13599649 as cited in SEQ ID NO 0
  misc_feature (1)..(895): Ortholog of  Ceres SEQ ID NO 15177492 as cited in SEQ ID NO 0
aagtcaagctgagcacaagtgatcgaacaactacagtacatacactctatcgatctctgtgaattaatttagttattaactcgatcatggcgcgcccccaaaacaaccagaaccccagggtgttcctggtcctcaacatcggcggcgtgacggttggccgcgtcgtcatcgagctgttcgccgacaaggtgcccaagacggcggagaacttccggctgctgtgcaccggagagcgcagcgtggggaagtggtccggcaagcgcctgcactacaagggcgcggcgttccaccgcgtggtgcccgggttcatgtgccagggcggcgacatcacggcgggcaacggcacgggcggcgagtctgcgatcggtgacgcccggtacttcgccgacgaggcgttcggagccgtccggcacgatggcgccggcgtggtgtccatggccaacgccgggcccaacaccaacggatctcagttcttcatcaccttcgccgacgcgccgtggctggacggccgccacgtcgcgttcggccgcgtcgtggatggcatggacgctctgcgtgccatcgaaaaggccgggtccatcagtggcaggactatgaggcatgtcgtcatcgccgactgcggcgagctcaagcactaagccgccatgtcctaattattcaggatcatacttactctctaccaaatctgacactatctagtaggtatacgtatacttatatattattatgattgttgtttgttgctgctgctgttacaagatgcgtttgagactaggtagatgatgagcatatatgcgtgattattttcgggtcttgatataaattctcaagtgtgagacaggttaattctgtgtaattgtaataccatggttaatgaagttgctcgctgttattg

SEQ ID NO: 1557 - protein, 183 aa, Zea mays subsp. mays
  peptide (1)..(183): Ceres Seq. ID no. 12351297
MARPQNNQNPRVFLVLNIGGVTVGRVVIELFADKVPKTAENFRLLCTGERSVGKWSGKRLHYKGAAFHRVVPGFMCQGGDITAGNGTGGESAIGDARYFADEAFGAVRHDGAGVVSMANAGPNTNGSQFFITFADAPWLDGRHVAFGRVVDGMDALRAIEKAGSISGRTMRHVVIADCGELKH

SEQ ID NO: 1558 - protein, 109 aa, Zea mays subsp. mays
  peptide (1)..(109): Ceres Seq. ID no. 12351298
MCQGGDITAGNGTGGESAIGDARYFADEAFGAVRHDGAGVVSMANAGPNTNGSQFFITFADAPWLDGRHVAFGRVVDGMDALRAIEKAGSISGRTMRHVVIADCGELKH

SEQ ID NO: 1559 - DNA, 1818 bp, Zea mays subsp. mays
  misc_feature (1)..(1818): Ceres Seq. ID no. 12355481
  misc_feature (1)..(1818): Ortholog of  Ceres SEQ ID NO 12460981 as cited in SEQ ID NO 65146
acagtcccactcctctctctctcgcgctctctctctttcatcgccaccaccgccgtgaaatccgcacgcgtgcttcctgtcgatttttgagctgtgactgtgagcgccatggccgtggaggctgtgtccggaaatggcaccgaggcagtggccgcggcgccggcgaaggaggtgagcaccaagcaggcgtctttccgggaggagagcaacttcctggacgatctcaaggagagcgagcgtaaggcgcttgccgagctccgcgacaaggtcgaggcggccatcgtggagggcaagctgttcgacgacggtaagccggaggtgaaggagaaggagaaggagaaggaggaggccaagaagaaggcagtggagaagaaagatgagcagcccgaagccgaggagaagggagaggaggatgacaagaaggaggccgacgccgaggaggagaagaaggaaggcgtggaggaaggggagaagaaggaaggccaggaggaaggggagaaggaggaggccgaggaggagagcggagacgacaccaagcaggaggccaaggaagaggaagccgacgacaaggcggcggcgaaggagccggagacggcggccgttgtcgtcgacaaggacatcgcgctgtggggcgtgcctttgctccctagcaagggcgacgaggccaccgacgtggtgctcctcaagttcctccgcgcgcgcgacttcaaggccggcgccgcgttcgagatgctccgccgcacgctccgctggcgcagggactggaccggcttcagctccggcgccgagtccgacgccgacctccccgaggagctcgcgggcgcgtgctacctcgacggcgcagaccacgagggccacccggtgtgctacaacgcgctgggcgtgttcgcggacgacgccgtgtacaagaaggcgctgggcaccgaggaaggcaaggccaggttcctccggtggcgggtgcgcgccatggagcgccacgtcgccgagctggacctgaggcccggcggcgtcgcgtcgctgctgcaggtgatcgacctcaggaactcgccggggccggccaagaaggacttccgagtcgccgtcaagcaggtgctcgacctgttccaggacaactaccccgagctcgtcgcgagaaacatcttggtcaacgtgccgttctggtactacgcgttcagcaccctgttctacccgttcctgacgcagaggacgaagagcaagttcgtcgttgctcgcccgtcaaaggtcaccgagaccctcctcaagtacattccgatcgaggccatcccggtgaagtacggcggcctgaagcgcgacggcgacaccgagttctcggcggacgacggcgaggtcgcggaggtcaccgtcaagggaagctccacggagaccatcgagatcgaagctactgaggctgatgccacgctgacatgggacctgactgtgctggggtgggaggtgaactacaaggaggagttcgtgccggcggacgagggctcctacactatcatcgtcaggaaaggcaagaagatggcgtccggcgaggaggcggtccgcaactcgttccgcgccggcgagccgggcaaggtcgtgctcaccgtccagaacacctcgcacaggaagaagaaggtgctgttcaggcacaaggccaagagcgcctgcgccaagaagtgctgagaggctaagaaatttgggagtgaaattggttgtggatttcaatattcgttacattctttgtgtgtgtgtaaggagagagagagagaacattgttcgctgattatttgaggtggttgttgcagcaaaaatgcaaagagttttcgattg

SEQ ID NO: 1560 - protein, 520 aa, Zea mays subsp. mays
  peptide (1)..(520): Ceres Seq. ID no. 12355482
MAVEAVSGNGTEAVAAAPAKEVSTKQASFREESNFLDDLKESERKALAELRDKVEAAIVEGKLFDDGKPEVKEKEKEKEEAKKKAVEKKDEQPEAEEKGEEDDKKEADAEEEKKEGVEEGEKKEGQEEGEKEEAEEESGDDTKQEAKEEEADDKAAAKEPETAAVVVDKDIALWGVPLLPSKGDEATDVVLLKFLRARDFKAGAAFEMLRRTLRWRRDWTGFSSGAESDADLPEELAGACYLDGADHEGHPVCYNALGVFADDAVYKKALGTEEGKARFLRWRVRAMERHVAELDLRPGGVASLLQVIDLRNSPGPAKKDFRVAVKQVLDLFQDNYPELVARNILVNVPFWYYAFSTLFYPFLTQRTKSKFVVARPSKVTETLLKYIPIEAIPVKYGGLKRDGDTEFSADDGEVAEVTVKGSSTETIEIEATEADATLTWDLTVLGWEVNYKEEFVPADEGSYTIIVRKGKKMASGEEAVRNSFRAGEPGKVVLTVQNTSHRKKKVLFRHKAKSACAKKC

SEQ ID NO: 1561 - protein, 313 aa, Zea mays subsp. mays
  peptide (1)..(313): Ceres Seq. ID no. 12355483
MLRRTLRWRRDWTGFSSGAESDADLPEELAGACYLDGADHEGHPVCYNALGVFADDAVYKKALGTEEGKARFLRWRVRAMERHVAELDLRPGGVASLLQVIDLRNSPGPAKKDFRVAVKQVLDLFQDNYPELVARNILVNVPFWYYAFSTLFYPFLTQRTKSKFVVARPSKVTETLLKYIPIEAIPVKYGGLKRDGDTEFSADDGEVAEVTVKGSSTETIEIEATEADATLTWDLTVLGWEVNYKEEFVPADEGSYTIIVRKGKKMASGEEAVRNSFRAGEPGKVVLTVQNTSHRKKKVLFRHKAKSACAKKC

SEQ ID NO: 1562 - DNA, 1177 bp, Zea mays subsp. mays
  misc_feature (1)..(1177): Ceres Seq. ID no. 12405858
  misc_feature (1)..(1177): Ortholog of  Ceres SEQ ID NO 14303612 as cited in SEQ ID NO 63208
gtctcaggtagcagtcgcgtgatgaatccgggggcgtgcagataaaaccctccctcgattaaccctaattccttttctcttcggggatactcctttcaccgagtctcttctggttctcggcgtgtgctcgtgtgcagatttgactccatgtcggcggcgctcgcggtgacggacgaggtggccctgccgatccgggcggtgggggatctggcggccgccgccgaggtctcgcgggaggaggtcgccgtcatcacccagtgcgcggcgctcggtgggaagttgccttttgaagatgcatcagttggtgcggttcttgcagtcattaaaaacgtggaaagcttgagggagcaattggttgctgaaatcaggcgggtgctgaaagctggtggaagagtattggtgcagagccctgcaccctcatccagtcagaagccgaacactgatattgagcgcaagttactgatgggtggatttgctgaagtgcaatcttctgctgcaagctcgcaggatagcgtgcaatctgttacagttaaggcaaagaaggctagctggagcatgggctcttcttttccccttaagaaaacaacaaaagcccttcccaagattcaaattgacgacgactctgatctgattgatgaagacagtctcttgactgaggaggacctgaagaaaccacaacttccagttgttggggactgtgaggtgggggcagcaaanaaagcatgcaagaactgtacttgtggcagggctgaggccgaggagaaggttgggaagctggagctcactgcggagcagatcaataaccctcagtcagcttgtggcagttgtgggttgggtgatgccttccgctgtggaacctgtccctacagaggtcttccaccattcaagcctggcgagaaggtttccttgtctggcaacttccttgctgctgacatatgatggcatcgccaacatcggcaaaacaaggagacgggggttacctacgttgttagtcgactgaactgcattccaaatagcttctgttagccaatgcgaatgtgcgtgtgagtgacttgtctttcggatgatatatatataagctggccaatcgcgcctctacacaaacacaaagtgtgcatcagtgcatgtgttttcagattgattttgtgagcctggatgtgaagaatgaatatcgctt

SEQ ID NO: 1563 - protein, 263 aa, Zea mays subsp. mays
  peptide (1)..(263): Ceres Seq. ID no. 12405859
  misc_feature (190)..(190): Xaa is any aa, unknown or other
MSAALAVTDEVALPIRAVGDLAAAAEVSREEVAVITQCAALGGKLPFEDASVGAVLAVIKNVESLREQLVAEIRRVLKAGGRVLVQSPAPSSSQKPNTDIERKLLMGGFAEVQSSAASSQDSVQSVTVKAKKASWSMGSSFPLKKTTKALPKIQIDDDSDLIDEDSLLTEEDLKKPQLPVVGDCEVGAAXKACKNCTCGRAEAEEKVGKLELTAEQINNPQSACGSCGLGDAFRCGTCPYRGLPPFKPGEKVSLSGNFLAADI

SEQ ID NO: 1564 - protein, 158 aa, Zea mays subsp. mays
  peptide (1)..(158): Ceres Seq. ID no. 12405860
  misc_feature (85)..(85): Xaa is any aa, unknown or other
MGGFAEVQSSAASSQDSVQSVTVKAKKASWSMGSSFPLKKTTKALPKIQIDDDSDLIDEDSLLTEEDLKKPQLPVVGDCEVGAAXKACKNCTCGRAEAEEKVGKLELTAEQINNPQSACGSCGLGDAFRCGTCPYRGLPPFKPGEKVSLSGNFLAADI

SEQ ID NO: 1565 - DNA, 955 bp, Zea mays subsp. mays
  misc_feature (1)..(955): Ceres Seq. ID no. 12413575
  misc_feature (1)..(955): Ortholog of  Ceres SEQ ID NO 13596426 as cited in SEQ ID NO 62055
gtaccctcacactctgctttatatactgccgaaggtaatcccgttcgcagttcacctacgcggaaaatcactagtgattcgctgaacaaaaaaaaattacaagaaggaatcgagagcaaatgctatcttcaaccacactccgaccgccggcgccggcacacctcaccatctgctcctcgcccgcagcgtggcggcgtgcgccggcggtgcgcgcggtgcggaactacgactccatcccgaagcgggagcccttcagctccagccgcagcatcctccacgagttcctcaggcaggacaagcccctcatccagcgcaccaaggaccagatcacagattattgcacggccatcgaaggcgatgagtgctgcagctgttgggacgcttactttgaactgaataaacttgagcaagagctgcccaaagacgaaatcgcaaggatggtgaaggactcggagggtgacgtgaggtacctgatagagagcatccaccatcgctcggatctgcggaagaaggtggcagagaagtctcgcaattcagtaccgtcaagctcccagggtagtagagccgcgaagccaaggccgttccccgtgcctgatgggataccgaaaacgcaagaagagctcgctgaagaagaagaggcgttgatgccggagtctccgtacacgaggctgctgagaaggatgggaaggtaccctgattggtacaccccacgccctgatcatgagaccgactgaatcgagttgcccaccatcctagtgtcccttgtgggagtttttggagcatggtaatctgaggctccttttatggcctgtgttatgtggtaagattagctttgtatctattgcagtatgcagattagggtgttcttactcttttccaattgtactaatgaaaaccggtgtgtgctttatgctgtaaatatgtgataaatagctgaacgttttattcgaggttc

SEQ ID NO: 1566 - protein, 204 aa, Zea mays subsp. mays
  peptide (1)..(204): Ceres Seq. ID no. 12413576
MLSSTTLRPPAPAHLTICSSPAAWRRAPAVRAVRNYDSIPKREPFSSSRSILHEFLRQDKPLIQRTKDQITDYCTAIEGDECCSCWDAYFELNKLEQELPKDEIARMVKDSEGDVRYLIESIHHRSDLRKKVAEKSRNSVPSSSQGSRAAKPRPFPVPDGIPKTQEELAEEEEALMPESPYTRLLRRMGRYPDWYTPRPDHETD

SEQ ID NO: 1567 - protein, 131 aa, Zea mays subsp. mays
  peptide (1)..(131): Ceres Seq. ID no. 12413577
VPSHSALYTAEGNPVRSSPTRKITSDSLNKKKLQEGIESKCYLQPHSDRRRRHTSPSAPRPQRGGVRRRCARCGTTTPSRSGSPSAPAAASSTSSSGRTSPSSSAPRTRSQIIARPSKAMSAAAVGTLTLN

SEQ ID NO: 1568 - DNA, 1756 bp, Zea mays subsp. mays
  misc_feature (1)..(1756): Ceres Seq. ID no. 13495584
  misc_feature (1)..(1756): Ortholog of  Ceres SEQ ID NO 13663839 as cited in SEQ ID NO 60834
  misc_feature (1)..(1756): Ortholog of  Ceres SEQ ID NO 14313284 as cited in SEQ ID NO 67146
  misc_feature (1)..(1756): Ortholog of  Ceres SEQ ID NO 14308925 as cited in SEQ ID NO 0
tctcgatccggaaacctctcaaaccctagccgcctcctgcaagtttcagagctcaggaatctgcgccatggcgagtgagacggagaccttcgcatttcaggctgagatcaaccagctgctctcactcatcatcaacaccttctactccaacaaggagatcttcctccgcgagcttatctccaactcttccgatgcgctggacaagatcaggttcgagagtctcactgacaagagcaagctcgatgcgcagcctgagcttttcatccaccttgtcccagacaaggccacgaacacgctctccatcatcgacagcggcatcggcatgaccaagtccgaccttgtcaacaacctcggtaccatcgccaggtccgggaccaaggagttcatggaagcccttgctgccggcgctgatgtgtccatgattggccagttcggcgtcggtttctactctgcctacctcgtcgccgatagagttgtcgtgaccaccaagcacaacgatgacgagcagtacgtgtgggagtcccaagcgggcgggtcgttcactgttactcgtgacacgtcaggggagcagcttggcaggggcactaagatcacactgttcctcaaggacgatcagctggagtaccttgaggagcgtcgcctcaaggatctggtcaagaagcactctgagttcatcagctaccccatctccctgtggactgaaaagacaacagagaaggaaatttctgacgacgaagacgaggaagagaagaaagatgctgaggaaggaaaggttgaggatgttgatgagaaggaagagaaagaaaagaagaaaaagaagatcaaggaggtttctcatgagtggtcattggtcaacaagcagaagcccatatggatgaggaagccagaagaaatcacaaaagaagaatatgctgccttctataagagcttgacaaatgactgggaggagcatctggctgtgaagcacttctctgtggagggtcaactggagttcaaggctgttctctttgttcctaagagggccccctttgatctctttgacaccaagaagaagcaaaacaacatcaagctctatgtgcgcagggtgttcatcatggacaactgcgaagagctgatccctgagtggctgagcttcgttaagggtattgttgactctgaggaccttcccctcaatatctctcgtgagactcttcagcagaacaagatcctgaaggtgatcaggaagaaccttgtgaagaagtgtgttgagctcttctttgagattgctgagaacaaggaggactacaacaagttttacgaggctttctccaagaacctcaagcttggcatccatgaggactcgcagaacaggaccaagatcgccgagcttctgagataccactccaccaagagtggtgatgagctgaccagcctcaaggactacgtgaccaggatgaaggagggacagaatgacatctactatatcactggtgagagcaagaaggcagtggagaactcccccttccttgagaagctgaagaagaggggctatgaggttctgcacatggttgatgccattgacgagtatgctgttggtcagctgctgctcttgatcgtctgtctagatcacagtagtgtgattgtgcagcaagcgaaacttaaattggttgctccgtgtacattaagcctattactgtcccaaagaactcgatgttatctatcggatactggaagtctgtctatcgactgcaacgcttaagcagatatggcctgtttt

SEQ ID NO: 1569 - protein, 578 aa, Zea mays subsp. mays
  peptide (1)..(578): Ceres Seq. ID no. 13495585
LDPETSQTLAASCKFQSSGICAMASETETFAFQAEINQLLSLIINTFYSNKEIFLRELISNSSDALDKIRFESLTDKSKLDAQPELFIHLVPDKATNTLSIIDSGIGMTKSDLVNNLGTIARSGTKEFMEALAAGADVSMIGQFGVGFYSAYLVADRVVVTTKHNDDEQYVWESQAGGSFTVTRDTSGEQLGRGTKITLFLKDDQLEYLEERRLKDLVKKHSEFISYPISLWTEKTTEKEISDDEDEEEKKDAEEGKVEDVDEKEEKEKKKKKIKEVSHEWSLVNKQKPIWMRKPEEITKEEYAAFYKSLTNDWEEHLAVKHFSVEGQLEFKAVLFVPKRAPFDLFDTKKKQNNIKLYVRRVFIMDNCEELIPEWLSFVKGIVDSEDLPLNISRETLQQNKILKVIRKNLVKKCVELFFEIAENKEDYNKFYEAFSKNLKLGIHEDSQNRTKIAELLRYHSTKSGDELTSLKDYVTRMKEGQNDIYYITGESKKAVENSPFLEKLKKRGYEVLHMVDAIDEYAVGQLLLLIVCLDHSSVIVQQAKLKLVAPCTLSLLLSQRTRCYLSDTGSLSIDCNA

SEQ ID NO: 1570 - protein, 556 aa, Zea mays subsp. mays
  peptide (1)..(556): Ceres Seq. ID no. 13495586
MASETETFAFQAEINQLLSLIINTFYSNKEIFLRELISNSSDALDKIRFESLTDKSKLDAQPELFIHLVPDKATNTLSIIDSGIGMTKSDLVNNLGTIARSGTKEFMEALAAGADVSMIGQFGVGFYSAYLVADRVVVTTKHNDDEQYVWESQAGGSFTVTRDTSGEQLGRGTKITLFLKDDQLEYLEERRLKDLVKKHSEFISYPISLWTEKTTEKEISDDEDEEEKKDAEEGKVEDVDEKEEKEKKKKKIKEVSHEWSLVNKQKPIWMRKPEEITKEEYAAFYKSLTNDWEEHLAVKHFSVEGQLEFKAVLFVPKRAPFDLFDTKKKQNNIKLYVRRVFIMDNCEELIPEWLSFVKGIVDSEDLPLNISRETLQQNKILKVIRKNLVKKCVELFFEIAENKEDYNKFYEAFSKNLKLGIHEDSQNRTKIAELLRYHSTKSGDELTSLKDYVTRMKEGQNDIYYITGESKKAVENSPFLEKLKKRGYEVLHMVDAIDEYAVGQLLLLIVCLDHSSVIVQQAKLKLVAPCTLSLLLSQRTRCYLSDTGSLSIDCNA

SEQ ID NO: 1571 - protein, 471 aa, Zea mays subsp. mays
  peptide (1)..(471): Ceres Seq. ID no. 13495587
MTKSDLVNNLGTIARSGTKEFMEALAAGADVSMIGQFGVGFYSAYLVADRVVVTTKHNDDEQYVWESQAGGSFTVTRDTSGEQLGRGTKITLFLKDDQLEYLEERRLKDLVKKHSEFISYPISLWTEKTTEKEISDDEDEEEKKDAEEGKVEDVDEKEEKEKKKKKIKEVSHEWSLVNKQKPIWMRKPEEITKEEYAAFYKSLTNDWEEHLAVKHFSVEGQLEFKAVLFVPKRAPFDLFDTKKKQNNIKLYVRRVFIMDNCEELIPEWLSFVKGIVDSEDLPLNISRETLQQNKILKVIRKNLVKKCVELFFEIAENKEDYNKFYEAFSKNLKLGIHEDSQNRTKIAELLRYHSTKSGDELTSLKDYVTRMKEGQNDIYYITGESKKAVENSPFLEKLKKRGYEVLHMVDAIDEYAVGQLLLLIVCLDHSSVIVQQAKLKLVAPCTLSLLLSQRTRCYLSDTGSLSIDCNA

SEQ ID NO: 1572 - DNA, 2010 bp, Zea mays subsp. mays
  misc_feature (1)..(2010): Ceres Seq. ID no. 12406806
  misc_feature (1)..(2010): Ortholog of  Ceres SEQ ID NO 13646499 as cited in SEQ ID NO 20565
atccaccacaccactcgagcgcgcgcgcggcccaccgctccgccgctgcccgcccgccgccatgcgagggatcctctcctcttcctccgctctcctccggcgagccggcgcccagctctcgcgcacggactgcagtagcccctcagcgtccgcgacctctcctctccgccgctcccctcttcaggtatgatgaccgcgtatctcgctgccgctccctcgatcgcgggctcgtggcttgttgccgtgtgctagggactgtaacttccttttgcaatagaggattttcagtcggactggtaagtcctctttgctagttaatgttgtcaaactgcccttgacctttgttgggttagattggctgaaacagctgatatctgcaacggtttgaccatgagcgtacaagttctgctttgctggctcctgctcatgtgcacaagctactaaaacatagaagagtgagattcggagaaatatgcattatgggctgtaatgctgtacaatagtgctattcccacgtcagccttttcccactaggggagaactgtggcttttggtttcaattggtgtatgtgctgctttactgtttcgttctcactggctttaataccttcataagtgaagtatcgagttcacaatgcctacttgctcatatttcaagagatctgcgcaaattgctgataatctttcttccctgtgatgtcatttgctagaatgggaaaagagacacattttgttcgctttggttcaaaggtcgttcggtatcaaccacagttgatatgcagttagactatgagagtgatccccctcttgacgatacaaaagctattgagaaggagtcatcacttaatgttgctgtttctcaactcgcaattgacttcgatagagactctaatttatgtttggagcgattttcccgtgcaaggaaagcatctgtagtctctactggttctcttaagcttgacctcgctctcggcgttggaggattaccgaagggtagaatggtggagatatatgggaaagaagcatctgggaagacaacactcgcgcttcatgttattaaggaagctcaaaagaatggaggttattgtgcttatattgatgcagaaaatgccttcaacccttcatttgctgaatctattggcgtagacagtgaaaggctcttgatagcccaacctgattctgctgaaaattctctaagcattgtaaacactcttgttggtggttctgttgctgttgttgttgtggacagtgtggcagcacttattcccaaatgtgaaattgaaggtgaaatatacacaaattgtggagacatccaatcccatttgatgactcgggcccttagaaaaattcagtacactttatgtcgatctgaaacacttattatttttgtgaatcaggttagaacaaagaggacatcaagtaatcctgggatctacaaggaggtgccttgcggtggtaatgcactaggattctatgctgcagtcagaatgaggacttcaaggagagaactgcgctatagtgaagatgaggctaccggcgtaggtatatcagtgcagatcatcaagaacaaattggctccagcgaacctgaagaaggaagccggcatcgacatcacattcggtaaggggatctgccacgagtcggagatcctggagacggcttcctccgtcggagtgatcctgaaagacgggtgtgggtattggatcaacaacgagttcctggcaggcaaggtggaagcggagaagttcctgcgtgaaaacgctgcagtggcagatgagatctgcaataccgtgaggaacgagttcttgcaaaggtgacatagggcgaccgattagagaggctaatgcattgttagtcggaaatgttgtaccgtcatgtattcatagaagaagatttatgtaggatgttgctgtgcctgtcgtgtaactttgactcgcaacagttcattgagtttaccagggccattccctcccagatcatatcgttaggttcttctatgttgctggttgc

SEQ ID NO: 1573 - protein, 346 aa, Zea mays subsp. mays
  peptide (1)..(346): Ceres Seq. ID no. 12406807
MQLDYESDPPLDDTKAIEKESSLNVAVSQLAIDFDRDSNLCLERFSRARKASVVSTGSLKLDLALGVGGLPKGRMVEIYGKEASGKTTLALHVIKEAQKNGGYCAYIDAENAFNPSFAESIGVDSERLLIAQPDSAENSLSIVNTLVGGSVAVVVVDSVAALIPKCEIEGEIYTNCGDIQSHLMTRALRKIQYTLCRSETLIIFVNQVRTKRTSSNPGIYKEVPCGGNALGFYAAVRMRTSRRELRYSEDEATGVGISVQIIKNKLAPANLKKEAGIDITFGKGICHESEILETASSVGVILKDGCGYWINNEFLAGKVEAEKFLRENAAVADEICNTVRNEFLQR

SEQ ID NO: 1574 - protein, 272 aa, Zea mays subsp. mays
  peptide (1)..(272): Ceres Seq. ID no. 12406808
MVEIYGKEASGKTTLALHVIKEAQKNGGYCAYIDAENAFNPSFAESIGVDSERLLIAQPDSAENSLSIVNTLVGGSVAVVVVDSVAALIPKCEIEGEIYTNCGDIQSHLMTRALRKIQYTLCRSETLIIFVNQVRTKRTSSNPGIYKEVPCGGNALGFYAAVRMRTSRRELRYSEDEATGVGISVQIIKNKLAPANLKKEAGIDITFGKGICHESEILETASSVGVILKDGCGYWINNEFLAGKVEAEKFLRENAAVADEICNTVRNEFLQR

SEQ ID NO: 1575 - DNA, 1280 bp, Zea mays subsp. mays
  misc_feature (1)..(1280): Ceres Seq. ID no. 12340706
  misc_feature (1)..(1280): Ortholog of  Ceres SEQ ID NO 13596358 as cited in SEQ ID NO 68333
ctctcgagagggccacacacaaaaaccccaatgcgagcgcccctggcttgtcggcgtcgcctccttcagccaaaaccctagcttgcatacgcgcccgaacaaagcttcgtctgcgaggggcgtcctcctgccgccagaagctttcaggagcatcagcgatggtgtggttccaatgcgaggactgtggcgagaacctcaagaagcccaaacttgccggccacttccgctcctgctccgcgtacaagctgtcatgcatcgattgcggcgagttattcagccaggacaccgtgcaggggcacacgcagtgcatctccgaggccgagaagtacggtcctaagggacagaccaaaccatccaatggtgcacagggtaaggcagataagccaaagccaaatgcagatgtcgatatcaatgttgggctgtcgacacggcctccttggttctgtagcctatgcaagaccactaccacaagcaagcaaactctcttactacatgctgatgggaagaagcatagggcaaaggcgaaagccttccatgtgtctcagaaacaaaaagatggtgcagaacaaactccagatgtgaaggaagctggagttgtacccacaaaagaatctgctcaagtaaatggtggcgtgagtggtgatcatgaaagaaatgaagataaagatgctgggaaaaggaaacgaatggatgacatgaccatagagccaggtaacacaaaaagacagttgacacagtctggagatgagaagtcagaaaacaaagcgaagagtaaggccgatgaactagcaagtggtactgactgcaaaagtgttcaaaagcaaaagatcaaatggaagaagattattactaaaacattgaaggcgaacgcagatggagttatgaagctaaagaagctacaaaagatagtctccaaggagcttcaggaatgtggtgtctccaaagacaaggaggagctccgtgctaccttgatggataaaatagcttcaagttccagattttctgttgatggcaagaatgttagactggtggccaagaatgaagaagaatcttagaaagaggttgtcagtcattttttggcattgttgctggtttcattctttggtgtcaactttcagatggcttatagccaagtgttggttaaattgagtccatgaaccatcaattatatccatgacctgtagacggtatgggaatttagcatctgaattttctcgacaaccgttcaaaagtgaaatgtttactctttatgctgtcaagcaatggcaatgatggttggt

SEQ ID NO: 1576 - protein, 350 aa, Zea mays subsp. mays
  peptide (1)..(350): Ceres Seq. ID no. 12340707
LERATHKNPNASAPGLSASPPSAKTLACIRARTKLRLRGASSCRQKLSGASAMVWFQCEDCGENLKKPKLAGHFRSCSAYKLSCIDCGELFSQDTVQGHTQCISEAEKYGPKGQTKPSNGAQGKADKPKPNADVDINVGLSTRPPWFCSLCKTTTTSKQTLLLHADGKKHRAKAKAFHVSQKQKDGAEQTPDVKEAGVVPTKESAQVNGGVSGDHERNEDKDAGKRKRMDDMTIEPGNTKRQLTQSGDEKSENKAKSKADELASGTDCKSVQKQKIKWKKIITKTLKANADGVMKLKKLQKIVSKELQECGVSKDKEELRATLMDKIASSSRFSVDGKNVRLVAKNEEES

SEQ ID NO: 1577 - protein, 298 aa, Zea mays subsp. mays
  peptide (1)..(298): Ceres Seq. ID no. 12340708
MVWFQCEDCGENLKKPKLAGHFRSCSAYKLSCIDCGELFSQDTVQGHTQCISEAEKYGPKGQTKPSNGAQGKADKPKPNADVDINVGLSTRPPWFCSLCKTTTTSKQTLLLHADGKKHRAKAKAFHVSQKQKDGAEQTPDVKEAGVVPTKESAQVNGGVSGDHERNEDKDAGKRKRMDDMTIEPGNTKRQLTQSGDEKSENKAKSKADELASGTDCKSVQKQKIKWKKIITKTLKANADGVMKLKKLQKIVSKELQECGVSKDKEELRATLMDKIASSSRFSVDGKNVRLVAKNEEES

SEQ ID NO: 1578 - DNA, 1586 bp, Zea mays subsp. mays
  misc_feature (1)..(1586): Ceres Seq. ID no. 12363031
  misc_feature (1)..(1586): Ortholog of  Ceres SEQ ID NO 13495070 as cited in SEQ ID NO 53216
  misc_feature (1)..(1586): Ortholog of  Ceres SEQ ID NO 15176717 as cited in SEQ ID NO 0
  misc_feature (1)..(1586): Ortholog of  Ceres SEQ ID NO 15179618 as cited in SEQ ID NO 0
atccttgagcgcagacaaatcacccccttcctcctgttcatttcctcctgctcccccctcctccctcccccccccctcctcgccgctcgccgttgaagaggtaggcccacgggccggcgagaatggaggcggcgacgatggcgtggacggcggcggtggtcggggcggggctggtgtactggttcgtctcggtgatgggcgcggcggaggtgaagggcaagcgggcggtggatctcaagatgggatccatcacgcgggacaaggtgcaggacaagtacacgcagtactggtccttcttccgccgccccaaggagacggccaccacggcggcgtcggcggacaaggtgccggccttcgtcgacaccttctacaacctcgtgaccgacatctacgagtgggggtggggccagtccttccacttctccccgtccctccccggccgctcccaccgcgacgccacgcgcgtccacgaggagcgcgtcgccgacctcctcggcgccaggccgggccaccgcctcctggacgtcggctgcggcgtcggcgggcccatgcgcgccatcgccgcgcactcgggatccaacgtcgtcggcatcaccatcaacgagtaccaggtgaaccgcgcccgcgcgcacaaccgcaaggccggcctcgactccccgcgctgcgaggtcgtctgcggcaacttcctctccatgccgttcccggacgcctccttcgacggcgcctactccatcgaggccacctgccacgcgcccaggctgcaggacgtgtacggcgaggtctaccgcgtgctcaagccggggggactctacgtctcctacgagtgggtcaccaccccgctgtaccgcgccgaggacccggaccacgtcgagtgcatccacggcatcgagcgcggcgacgcgctaccggggctccgccgccaggacgagatcgcgtccatcgctaaggaggtcgggttcgaggtgctcaaggagcaggacctggcgctgccccccgcgctgccctggtggacgcgcctcaagatgggccgcatcgcctactggcgcaactccctcgtcgtccgcgtgctcaccatgctccgggtcgcgcccaagggcgtctccgaggtgcacgagatgctgtacgagaccgcgcagcacctcacccgcggcggcgagaccggcatcttcacgcccatgcacatggtgctcctccgcaagcccgccgccgccgcctccaccgaggaggccaactagtgtaagactacacaccgccaccaatcagttactactcgcccaccgcaagggggagaaaatggggagggaggaaaaagatgcaagcagcagcagcaccagaggtaagaagagcaggctaatcggcgacttgaagaagttacaaattgatctattagagaagaagatactactaggaacgattcttctctccgtttactcttttccctgttcgtagctttgagttttaatttttgttttttggtggacggattgttccggggaggtcgaggttgggatctaaatttattttcaatcggtggagatccatctatctatcagcagcagcagcaggagcaaccatgttttctctcc

SEQ ID NO: 1579 - protein, 370 aa, Zea mays subsp. mays
  peptide (1)..(370): Ceres Seq. ID no. 12363032
MEAATMAWTAAVVGAGLVYWFVSVMGAAEVKGKRAVDLKMGSITRDKVQDKYTQYWSFFRRPKETATTAASADKVPAFVDTFYNLVTDIYEWGWGQSFHFSPSLPGRSHRDATRVHEERVADLLGARPGHRLLDVGCGVGGPMRAIAAHSGSNVVGITINEYQVNRARAHNRKAGLDSPRCEVVCGNFLSMPFPDASFDGAYSIEATCHAPRLQDVYGEVYRVLKPGGLYVSYEWVTTPLYRAEDPDHVECIHGIERGDALPGLRRQDEIASIAKEVGFEVLKEQDLALPPALPWWTRLKMGRIAYWRNSLVVRVLTMLRVAPKGVSEVHEMLYETAQHLTRGGETGIFTPMHMVLLRKPAAAASTEEAN

SEQ ID NO: 1580 - protein, 365 aa, Zea mays subsp. mays
  peptide (1)..(365): Ceres Seq. ID no. 12363033
MAWTAAVVGAGLVYWFVSVMGAAEVKGKRAVDLKMGSITRDKVQDKYTQYWSFFRRPKETATTAASADKVPAFVDTFYNLVTDIYEWGWGQSFHFSPSLPGRSHRDATRVHEERVADLLGARPGHRLLDVGCGVGGPMRAIAAHSGSNVVGITINEYQVNRARAHNRKAGLDSPRCEVVCGNFLSMPFPDASFDGAYSIEATCHAPRLQDVYGEVYRVLKPGGLYVSYEWVTTPLYRAEDPDHVECIHGIERGDALPGLRRQDEIASIAKEVGFEVLKEQDLALPPALPWWTRLKMGRIAYWRNSLVVRVLTMLRVAPKGVSEVHEMLYETAQHLTRGGETGIFTPMHMVLLRKPAAAASTEEAN

SEQ ID NO: 1581 - protein, 346 aa, Zea mays subsp. mays
  peptide (1)..(346): Ceres Seq. ID no. 12363034
MGAAEVKGKRAVDLKMGSITRDKVQDKYTQYWSFFRRPKETATTAASADKVPAFVDTFYNLVTDIYEWGWGQSFHFSPSLPGRSHRDATRVHEERVADLLGARPGHRLLDVGCGVGGPMRAIAAHSGSNVVGITINEYQVNRARAHNRKAGLDSPRCEVVCGNFLSMPFPDASFDGAYSIEATCHAPRLQDVYGEVYRVLKPGGLYVSYEWVTTPLYRAEDPDHVECIHGIERGDALPGLRRQDEIASIAKEVGFEVLKEQDLALPPALPWWTRLKMGRIAYWRNSLVVRVLTMLRVAPKGVSEVHEMLYETAQHLTRGGETGIFTPMHMVLLRKPAAAASTEEAN

SEQ ID NO: 1582 - DNA, 1721 bp, Zea mays subsp. mays
  misc_feature (1)..(1721): Ceres Seq. ID no. 12412138
  misc_feature (1)..(1721): Ortholog of  Ceres SEQ ID NO 15177320 as cited in SEQ ID NO 52645
  misc_feature (1)..(1721): Ortholog of  Ceres SEQ ID NO 14313840 as cited in SEQ ID NO 59568
  misc_feature (1)..(1721): Ortholog of  Ceres SEQ ID NO 15169466 as cited in SEQ ID NO 66135
  misc_feature (1)..(1721): Ortholog of  Ceres SEQ ID NO 14303091 as cited in SEQ ID NO 66369
acattctcttgtctcttgcacatcccccgcttccttcttggtcgtttctccccttctgatccgtgctagccagcttgcgttgtggctgcttgtcgccagatctacctatccaccgtaccacagtcgtccacagcgcgcgcttacgatggcggtcgccgccgctcgccttcttcttcgcgtcgtcgtcctcgcgctcctcgcagccgcgcanaggtccgtcgggaagagcgccgtgctgtctctgcgggagttggatggacgacgacggagtgccgcgacgacggatacccggagcagccgctactacgtcgacgcaatgcttgctgaaacgctaggggagcacaagaaagctggggcagcaacaagcgtgctagagctcaagcgccactccctcactgccattcctgaagaccccgtcgcccgcgaccggtaccttcgccgtctcctcgcanccgacgagtcgcgcgccaactcattccagccccgccgtaacaaggacagggcatcagcgtccacgcagtccgcctcggcagaggtcccgctgacctcgggcatccggctccagacgctcaactacgtcaccaccatctctctcggcggcagctccggctcgcccgccgcgaacctcaccgtcatcgtggacacggggagcgacctcacctgggtgcagtgcaagccgtgcagcgcgtgctacgcgcagcgcgacccgctcttcgacccagcgggctccgccacctacgctgcggtccggngcaacgcctncgcgtgcgcggactccctcagggccgccaccggcacgccgggatcctgtggttcgacgggggcaggcaacgagaagtgctactacgcgctagcctacggcgacgggtcgttcagccgcggcgtgctggccacggacacggtcgcgctcggcggcgccagcctgggcgggttcgtgttcgggtgcgggctcagcaaccgcggcctgttcggcggcacggcggggctcatggggctcggccgcaccgagctctcgctggtgtcccagaccgcgtcccggttacggcggcgtgttctcctactgccatgccggcggccacctncggcgacgcctcaggctcgctctccctcggcggcggggacgacgcggcgtcatcctaccgcaacacgacgcccgtggcgtacacccgcatgatcgccgacccggcgcagccgcccttctacttcctcaacgtcaccggcgcggccgtcggcggcaccgccctcgcggcgcaggggctgggcgcccgcaacgtgctcatcgactccggcacggtgatcacgcgcctggcgccgtccgtgtanccgctgtgcgcgccgagttcacgcgccagttcggcgccgcgggctacccggccgccccggggttctcgatcctggacacgtgctacgacctgacggggcacgacgaggtgaaggtgccgctntgacgctgcggctggagggcggggcggacgtgaccgtggacgcggctgggatgctgttcgtcgtgaggaaggacggctcgcaggtgtgcctggccatggcgagtctgtcgtacgaggacgagacgcctatcattggcaactaccagcagaagaacaagagggtggtgtatgacacgctggggtccaggctaggcttcgctgacgaggactgcaactatgtatagagacttgacagggaggaggatgtggaatatcggatttctagttatatgttgc

SEQ ID NO: 1583 - protein, 390 aa, Zea mays subsp. mays
  peptide (1)..(390): Ceres Seq. ID no. 12412139
  misc_feature (70)..(70): Xaa is any aa, unknown or other
  misc_feature (151)..(151): Xaa is any aa, unknown or other
  misc_feature (251)..(251): Xaa is any aa, unknown or other
  misc_feature (254)..(254): Xaa is any aa, unknown or other
  misc_feature (361)..(361): Xaa is any aa, unknown or other
HSLVSCTSPASFLVVSPLLIRASQLALWLLVARSTYPPYHSRPQRALTMAVAAARLLLRVVVLALLAAAXRSVGKSAVLSLRELDGRRRSAATTDTRSSRYYVDAMLAETLGEHKKAGAATSVLELKRHSLTAIPEDPVARDRYLRRLLAXDESRANSFQPRRNKDRASASTQSASAEVPLTSGIRLQTLNYVTTISLGGSSGSPAANLTVIVDTGSDLTWVQCKPCSACYAQRDPLFDPAGSATYAAVRXNAXACADSLRAATGTPGSCGSTGAGNEKCYYALAYGDGSFSRGVLATDTVALGGASLGGFVFGCGLSNRGLFGGTAGLMGLGRTELSLVSQTASRLRRRVLLLPCRRPPXATPQARSPSAAGTTRRHPTATRRPWRTPA

SEQ ID NO: 1584 - protein, 342 aa, Zea mays subsp. mays
  peptide (1)..(342): Ceres Seq. ID no. 12412140
  misc_feature (22)..(22): Xaa is any aa, unknown or other
  misc_feature (103)..(103): Xaa is any aa, unknown or other
  misc_feature (203)..(203): Xaa is any aa, unknown or other
  misc_feature (206)..(206): Xaa is any aa, unknown or other
  misc_feature (313)..(313): Xaa is any aa, unknown or other
MAVAAARLLLRVVVLALLAAAXRSVGKSAVLSLRELDGRRRSAATTDTRSSRYYVDAMLAETLGEHKKAGAATSVLELKRHSLTAIPEDPVARDRYLRRLLAXDESRANSFQPRRNKDRASASTQSASAEVPLTSGIRLQTLNYVTTISLGGSSGSPAANLTVIVDTGSDLTWVQCKPCSACYAQRDPLFDPAGSATYAAVRXNAXACADSLRAATGTPGSCGSTGAGNEKCYYALAYGDGSFSRGVLATDTVALGGASLGGFVFGCGLSNRGLFGGTAGLMGLGRTELSLVSQTASRLRRRVLLLPCRRPPXATPQARSPSAAGTTRRHPTATRRPWRTPA

SEQ ID NO: 1585 - protein, 285 aa, Zea mays subsp. mays
  peptide (1)..(285): Ceres Seq. ID no. 12412141
  misc_feature (46)..(46): Xaa is any aa, unknown or other
  misc_feature (146)..(146): Xaa is any aa, unknown or other
  misc_feature (149)..(149): Xaa is any aa, unknown or other
  misc_feature (256)..(256): Xaa is any aa, unknown or other
MLAETLGEHKKAGAATSVLELKRHSLTAIPEDPVARDRYLRRLLAXDESRANSFQPRRNKDRASASTQSASAEVPLTSGIRLQTLNYVTTISLGGSSGSPAANLTVIVDTGSDLTWVQCKPCSACYAQRDPLFDPAGSATYAAVRXNAXACADSLRAATGTPGSCGSTGAGNEKCYYALAYGDGSFSRGVLATDTVALGGASLGGFVFGCGLSNRGLFGGTAGLMGLGRTELSLVSQTASRLRRRVLLLPCRRPPXATPQARSPSAAGTTRRHPTATRRPWRTPA

SEQ ID NO: 1586 - DNA, 1284 bp, Zea mays subsp. mays
  misc_feature (1)..(1284): Ceres Seq. ID no. 12364595
  misc_feature (1)..(1284): Ortholog of  Ceres SEQ ID NO 15174737 as cited in SEQ ID NO 52912
  misc_feature (1)..(1284): Ortholog of  Ceres SEQ ID NO 13624551 as cited in SEQ ID NO 0
aaacctcattccatgctctcttcattggttcatacttcatagctagtttgcctcccaaaaacacctgccctcgtgcgtggcaggagcacgggcacgatgatcagcacagcgcacagccggcagcagcaccatgccttcgagaagagccctggcaacagccacatgaagagcatcgacaggaagctgcagcaggccatgagccaggcggccagcaagtacatgcagaggatctaccctctaggcatgcagaggagcagctccagcctcacattgtcgtcgctctcgctgtcgcagaactccaacgactcctccatcagcagctccaactccagctgggagcctaaggtgccgctgctctacggcggcaccttcagcccctggggcgacgtcatggtgtctcgggagatgaggcgggaggacgatgacaaggtcagtgaccatgacgtcgaaggaggcgaggaggacttggactgcagtgagccggggagcctgcgtaggtgcagctggatcaccaagaacagtgacgaggcgtacgtccagttccacgacgagtgctggggcgtccctgtgtacagcgacaaccggctgttcgagcttctgtcgctgtcagggatgctgatcgaccacaactggacggagatactgaagcgtcgggacatgtacagggaggcgttcgccgacttcgaccccagcgcggtggcgcggatggaggaggaggacgtggcggagatcagcggcgacagggagctgaggatcgccgagtgcagggtccggtgcatcgtggagaacgccaggtgcatccagagggtggccagggagttcggctccttcagcggctacatgtggggccacgtgaaccaccggccggtggtgggcaagtaccgccaccacaagtacatcccgttccggacgcccaagtcggaggcggtgagcaaggacctcgtccgccggggcttccgcctcgtcggccccgtcatcgtctactctttcatgcaggccgccggcatggccatcgaccacctcgtcgactgcttccgcttccacgactgcgtccgcctcgccgagcgctcctggggcatcaccaacgtcgccgcgtagccagccggcccctcaatatctgtgcatgcattcctctccaactttttcacaccttcttcttggtgttgttattttttttttgtttggagatcgaaattgtgtgtgtaattacgtagagtatgtagtactctactaagttatgatgtaatacttctattaactctttgccaatgaaaagtagtactg

SEQ ID NO: 1587 - protein, 333 aa, Zea mays subsp. mays
  peptide (1)..(333): Ceres Seq. ID no. 12364596
MISTAHSRQQHHAFEKSPGNSHMKSIDRKLQQAMSQAASKYMQRIYPLGMQRSSSSLTLSSLSLSQNSNDSSISSSNSSWEPKVPLLYGGTFSPWGDVMVSREMRREDDDKVSDHDVEGGEEDLDCSEPGSLRRCSWITKNSDEAYVQFHDECWGVPVYSDNRLFELLSLSGMLIDHNWTEILKRRDMYREAFADFDPSAVARMEEEDVAEISGDRELRIAECRVRCIVENARCIQRVAREFGSFSGYMWGHVNHRPVVGKYRHHKYIPFRTPKSEAVSKDLVRRGFRLVGPVIVYSFMQAAGMAIDHLVDCFRFHDCVRLAERSWGITNVAA

SEQ ID NO: 1588 - protein, 311 aa, Zea mays subsp. mays
  peptide (1)..(311): Ceres Seq. ID no. 12364597
MKSIDRKLQQAMSQAASKYMQRIYPLGMQRSSSSLTLSSLSLSQNSNDSSISSSNSSWEPKVPLLYGGTFSPWGDVMVSREMRREDDDKVSDHDVEGGEEDLDCSEPGSLRRCSWITKNSDEAYVQFHDECWGVPVYSDNRLFELLSLSGMLIDHNWTEILKRRDMYREAFADFDPSAVARMEEEDVAEISGDRELRIAECRVRCIVENARCIQRVAREFGSFSGYMWGHVNHRPVVGKYRHHKYIPFRTPKSEAVSKDLVRRGFRLVGPVIVYSFMQAAGMAIDHLVDCFRFHDCVRLAERSWGITNVAA

SEQ ID NO: 1589 - protein, 300 aa, Zea mays subsp. mays
  peptide (1)..(300): Ceres Seq. ID no. 12364598
MSQAASKYMQRIYPLGMQRSSSSLTLSSLSLSQNSNDSSISSSNSSWEPKVPLLYGGTFSPWGDVMVSREMRREDDDKVSDHDVEGGEEDLDCSEPGSLRRCSWITKNSDEAYVQFHDECWGVPVYSDNRLFELLSLSGMLIDHNWTEILKRRDMYREAFADFDPSAVARMEEEDVAEISGDRELRIAECRVRCIVENARCIQRVAREFGSFSGYMWGHVNHRPVVGKYRHHKYIPFRTPKSEAVSKDLVRRGFRLVGPVIVYSFMQAAGMAIDHLVDCFRFHDCVRLAERSWGITNVAA

SEQ ID NO: 1590 - DNA, 954 bp, Zea mays subsp. mays
  misc_feature (1)..(954): Ceres Seq. ID no. 12412215
  misc_feature (1)..(954): Ortholog of  Ceres SEQ ID NO 13661548 as cited in SEQ ID NO 61474
agcgaggggcaacagttttctcgaagaagggaaggcagcctcttcctcgtcgccggcgacgtcaccctcagcggctatcagggatgccggtcagggtggtagataccgccacgccttcctcccagccctccccagggcaagaagcaaatactggacacccatctcctcctagctgttcactcttaagtgctggaagatcttttgctgggactcaaaatgtttcaagcctgcagaaggatgaagcatggaaagtgaatgtacgcatccatggttgtgatcttgaacagggttatttatgtggaacgatggaagcgcttaatgttccattagcagatacacctgttgtgactttctgggagggggagatagtggatgctaaaaattacacttttttcactggaaagtgggaggcatcaccagatgatgatataagacattggtccaagttcccatcatttacgcctcttctgggtcagattgagacagatggtggcaagtctctggactttagcaactatccttatatatttatgagatggaaagagcaatattttgtcaatgttggagtcgactgtgggttaaccatcgctggtttctactacgtctgcttttcttgcagcgatggctccattaatggattttattatgatccaaatagcagtccatttcagaagctcgagctgaagtgtaccaatgagaagaaatccgggttcaccttttcatcctacgagctgcagtgacaggacagatgccctcgacagacaactttctgttagcatatagtgtgtgtactgaactcgtactccctaatgaaaggaatgagtggtcgtttacgtaacagtttgttttctagcaagactaagcaaactgtcactttgtaatctgcagaagcatcttgtcctttctaaaatctaccttttgtattacgttcctattccacaattgttatctgct

SEQ ID NO: 1591 - protein, 245 aa, Zea mays subsp. mays
  peptide (1)..(245): Ceres Seq. ID no. 12412216
RGATVFSKKGRQPLPRRRRRHPQRLSGMPVRVVDTATPSSQPSPGQEANTGHPSPPSCSLLSAGRSFAGTQNVSSLQKDEAWKVNVRIHGCDLEQGYLCGTMEALNVPLADTPVVTFWEGEIVDAKNYTFFTGKWEASPDDDIRHWSKFPSFTPLLGQIETDGGKSLDFSNYPYIFMRWKEQYFVNVGVDCGLTIAGFYYVCFSCSDGSINGFYYDPNSSPFQKLELKCTNEKKSGFTFSSYELQ

SEQ ID NO: 1592 - protein, 218 aa, Zea mays subsp. mays
  peptide (1)..(218): Ceres Seq. ID no. 12412217
MPVRVVDTATPSSQPSPGQEANTGHPSPPSCSLLSAGRSFAGTQNVSSLQKDEAWKVNVRIHGCDLEQGYLCGTMEALNVPLADTPVVTFWEGEIVDAKNYTFFTGKWEASPDDDIRHWSKFPSFTPLLGQIETDGGKSLDFSNYPYIFMRWKEQYFVNVGVDCGLTIAGFYYVCFSCSDGSINGFYYDPNSSPFQKLELKCTNEKKSGFTFSSYELQ

SEQ ID NO: 1593 - protein, 144 aa, Zea mays subsp. mays
  peptide (1)..(144): Ceres Seq. ID no. 12412218
MEALNVPLADTPVVTFWEGEIVDAKNYTFFTGKWEASPDDDIRHWSKFPSFTPLLGQIETDGGKSLDFSNYPYIFMRWKEQYFVNVGVDCGLTIAGFYYVCFSCSDGSINGFYYDPNSSPFQKLELKCTNEKKSGFTFSSYELQ

SEQ ID NO: 1594 - DNA, 1766 bp, Zea mays subsp. mays
  misc_feature (1)..(1766): Ceres Seq. ID no. 12386848
  misc_feature (1)..(1766): Ortholog of  Ceres SEQ ID NO 13663060 as cited in SEQ ID NO 60964
  misc_feature (1)..(1766): Ortholog of  Ceres SEQ ID NO 13655298 as cited in SEQ ID NO 68914
gcagtcgcagcagggccgagccgaccggtcaaaagcactgctgccccaccccaacccaccaccatccccgttccccaacccccaaagccgagagccatcccgcccgcagccgcaaccaggcaagcaagcgggagccgccaactcgtgcctctcggcagcggcgtctgaactctgaaccgaccgaccgaccgaccgttccgttccgttcaccccaccatggaggcgccgccgggaccggggcccatggagctggacgccccacctcccgccgccgccgccgcggcgattcctcccgccggcagcgacaagcacaaggacggggaagggggagacgctgtgacgggccatatcatctccaccaccatcggcgggaagaacggcgagcccaagcggaccatcagttacatggcagaacgtgtcgtgggcacaggctcatttgggatcgtcttccaggctaagtgtctggaaacaggagagaccttcgccatcaagaaggtgctgcaagatcggcgttacaagaaccgggagctgcaacttatgcgtgccatggagcaccccaacgtcatctgcctgaagcactgcttcttctcgacaacgagcagggacgaattgtttttaaaccttgtcatggaattcgtccctgagactctataccgagtcctgaagcactacagcaatgcgaaccagaggatgcctcttatctacgtcaagctctacatgtatcagctttttagaggcctagcttatattcataatgtaccaggagtctgccatagggatgtgaagccacaaaacgttttggttgatcctctcacccaccaggtcaagctctgtgactttggtagtgcaaaagttctgattcctggtgaaccgaacatatcttacatatgctctcgttactatcgtgcccctgagctcatatttggtgcgacggagtatacaagttcaatagacatatggtcagctggttgtgttctagctgagttgcttcttggacagccactatttccaggagagagcgctgttgatcagttggtagagatcatcaaggttcttggtactccaacccgtgaggagatacggtgcatgaatcccaactatactgagttcaggtttcctcagataaaggctcatccatggcacaagattttccacaagagaatgcctcctgaagccatagaccttgcttctcgtctccttcagtattcaccaagtcttcgctgctctgctcttgacgcatgtgctcatcccttcttcgatgagcttcggacaccgaacgcacgcctaccaaacggccgcccgttccctccgctctttaacttcaagcacgaactagcaaatgcctctccggacctcgtcagcaggcttgtgccggagcacattagacggcagatcggtgtcaacttcgggagcagctaggagggcaggcgctgtgatggtcgaagttttcggtcttggtttccccttctggagagtgggaggggctcaagcagtacctgagaaaagtagtgaaaccgtgtaaattatctgaccgtgaaggagtactaccgccagtaactggcgcatgttcgtccagtagttatggtaagaatgtaggaggtggagactggttaatgtgtagggtcgttttttttgttttgttttgatattactaccattttgttgtaatgttcgtcggtacttccagcagtagtgtagctggccacgttttgttcgtccgccatgatgtaaatgatcatcgcccaactgtaatgcatgttctctcg

SEQ ID NO: 1595 - protein, 400 aa, Zea mays subsp. mays
  peptide (1)..(400): Ceres Seq. ID no. 12386849
MEAPPGPGPMELDAPPPAAAAAAIPPAGSDKHKDGEGGDAVTGHIISTTIGGKNGEPKRTISYMAERVVGTGSFGIVFQAKCLETGETFAIKKVLQDRRYKNRELQLMRAMEHPNVICLKHCFFSTTSRDELFLNLVMEFVPETLYRVLKHYSNANQRMPLIYVKLYMYQLFRGLAYIHNVPGVCHRDVKPQNVLVDPLTHQVKLCDFGSAKVLIPGEPNISYICSRYYRAPELIFGATEYTSSIDIWSAGCVLAELLLGQPLFPGESAVDQLVEIIKVLGTPTREEIRCMNPNYTEFRFPQIKAHPWHKIFHKRMPPEAIDLASRLLQYSPSLRCSALDACAHPFFDELRTPNARLPNGRPFPPLFNFKHELANASPDLVSRLVPEHIRRQIGVNFGSS

SEQ ID NO: 1596 - protein, 391 aa, Zea mays subsp. mays
  peptide (1)..(391): Ceres Seq. ID no. 12386850
MELDAPPPAAAAAAIPPAGSDKHKDGEGGDAVTGHIISTTIGGKNGEPKRTISYMAERVVGTGSFGIVFQAKCLETGETFAIKKVLQDRRYKNRELQLMRAMEHPNVICLKHCFFSTTSRDELFLNLVMEFVPETLYRVLKHYSNANQRMPLIYVKLYMYQLFRGLAYIHNVPGVCHRDVKPQNVLVDPLTHQVKLCDFGSAKVLIPGEPNISYICSRYYRAPELIFGATEYTSSIDIWSAGCVLAELLLGQPLFPGESAVDQLVEIIKVLGTPTREEIRCMNPNYTEFRFPQIKAHPWHKIFHKRMPPEAIDLASRLLQYSPSLRCSALDACAHPFFDELRTPNARLPNGRPFPPLFNFKHELANASPDLVSRLVPEHIRRQIGVNFGSS

SEQ ID NO: 1597 - protein, 337 aa, Zea mays subsp. mays
  peptide (1)..(337): Ceres Seq. ID no. 12386851
MAERVVGTGSFGIVFQAKCLETGETFAIKKVLQDRRYKNRELQLMRAMEHPNVICLKHCFFSTTSRDELFLNLVMEFVPETLYRVLKHYSNANQRMPLIYVKLYMYQLFRGLAYIHNVPGVCHRDVKPQNVLVDPLTHQVKLCDFGSAKVLIPGEPNISYICSRYYRAPELIFGATEYTSSIDIWSAGCVLAELLLGQPLFPGESAVDQLVEIIKVLGTPTREEIRCMNPNYTEFRFPQIKAHPWHKIFHKRMPPEAIDLASRLLQYSPSLRCSALDACAHPFFDELRTPNARLPNGRPFPPLFNFKHELANASPDLVSRLVPEHIRRQIGVNFGSS

SEQ ID NO: 1598 - DNA, 1710 bp, Zea mays subsp. mays
  misc_feature (1)..(1710): Ceres Seq. ID no. 12342530
  misc_feature (1)..(1710): Ortholog of  Ceres SEQ ID NO 13592961 as cited in SEQ ID NO 20522
  misc_feature (1)..(1710): Ortholog of  Ceres SEQ ID NO 12583469 as cited in SEQ ID NO 51031
  misc_feature (1)..(1710): Ortholog of  Ceres SEQ ID NO 13596527 as cited in SEQ ID NO 62582
  misc_feature (1)..(1710): Ortholog of  Ceres SEQ ID NO 13597389 as cited in SEQ ID NO 63426
  misc_feature (1)..(1710): Ortholog of  Ceres SEQ ID NO 13595998 as cited in SEQ ID NO 68161
cttcctcgtccgttccggcgtcctctctcccccagacccccaccccatgccaacgcccaccccgccgtctccgtccccgtctccctcttctggaacttgccctctgctccggatcggcgcgggccgtcgttttgccatggcatttccatcttgggcgactctgttcttcgccgggatgatggtggtgttggcagcggtggaagcggaagcggaagctggaggagggagcgtctgcttcgaccggatgttcggtttcggggactcgctcacggataccggcaacttcctgctctccgtgcctgacgacttcccggaccccgcgcggaacctcccctacggccagaccttcttcgggcgtccctccggccgctattccgacggccgcaacctgctcgacttcttcgcagaggcatttgggttgccatatgtgccaccttacctaggcagtggggacttccagaatggcgcaaactttgcagtcggcggcgcaactgctctcaatggctcgttcttccgtgagcgcggtgtggagcctacatggacgcctcactcccttgatgagcagatgcaatggttcaagaagcttctcccattcattgcaccatctgagacagagctaaatgaaataatgtccaagtcacttttgtttgtgggagagattggcggaaatgattacaaccatttaatcgttagggagaaatctgttgatgagctacatgaaattgttcctaatgttgttggcgccataagctcgggcatcacggaccttataaatcttggagcaaagaagttagttgttccagggaacttcccaatagggtgtgtcccattatatcttgcaatctttcagagccaaaaggagggttactatgaggaacaaacaggctgcattaagtggctcaatgaatttgctgagtaccataataggatgcttcaggaggagttggagaaactcaggaatcttcaccctgatgtaaccatcatttatgctgattattacggtgctgcattgaacatattccgtgccccactcaagtttggcttcacagtcccactgaatgcgtgctgcggaagtgacgctccgtacaactgttccccttcaatactgtgcgggcgtcctggatctacagtgtgccctgacccatcaaaatacatctcatgggatggtctacacttcaccgaggcgagttacaaagttgtcatccaaggagtactaggggggtacgccaaacctcctctttcagaagcctgcaagggtgcggagttcaaagtttctcaacttcaccaatgtacagataatccaacaaacaccgtatcatacgatgccttgagctcttttatttgatctgatgagctcaagtacttttagatttgtgctggtaaaaaaagtgcagtttagagttacagtgggcagtgtagatgctgcaggaccgggtatcttggacacttctcagagcggagaagagatccatcgatctagagtcatgtagttctacaatcaacttggctgctgggaggaggtaaaaaaaggtggggattttgtagtgtggaaatttgcaatcaccgaagggatacaggtggtcatactgctatataggaacctagatctatgattctgcttctgagggcaatgtatgcagatatgggctcagttgccttttaacagatacatgcatatatacagtgtaaatttgttgattcacattaacc

SEQ ID NO: 1599 - protein, 447 aa, Zea mays subsp. mays
  peptide (1)..(447): Ceres Seq. ID no. 12342531
FLVRSGVLSPPDPHPMPTPTPPSPSPSPSSGTCPLLRIGAGRRFAMAFPSWATLFFAGMMVVLAAVEAEAEAGGGSVCFDRMFGFGDSLTDTGNFLLSVPDDFPDPARNLPYGQTFFGRPSGRYSDGRNLLDFFAEAFGLPYVPPYLGSGDFQNGANFAVGGATALNGSFFRERGVEPTWTPHSLDEQMQWFKKLLPFIAPSETELNEIMSKSLLFVGEIGGNDYNHLIVREKSVDELHEIVPNVVGAISSGITDLINLGAKKLVVPGNFPIGCVPLYLAIFQSQKEGYYEEQTGCIKWLNEFAEYHNRMLQEELEKLRNLHPDVTIIYADYYGAALNIFRAPLKFGFTVPLNACCGSDAPYNCSPSILCGRPGSTVCPDPSKYISWDGLHFTEASYKVVIQGVLGGYAKPPLSEACKGAEFKVSQLHQCTDNPTNTVSYDALSSFI

SEQ ID NO: 1600 - protein, 432 aa, Zea mays subsp. mays
  peptide (1)..(432): Ceres Seq. ID no. 12342532
MPTPTPPSPSPSPSSGTCPLLRIGAGRRFAMAFPSWATLFFAGMMVVLAAVEAEAEAGGGSVCFDRMFGFGDSLTDTGNFLLSVPDDFPDPARNLPYGQTFFGRPSGRYSDGRNLLDFFAEAFGLPYVPPYLGSGDFQNGANFAVGGATALNGSFFRERGVEPTWTPHSLDEQMQWFKKLLPFIAPSETELNEIMSKSLLFVGEIGGNDYNHLIVREKSVDELHEIVPNVVGAISSGITDLINLGAKKLVVPGNFPIGCVPLYLAIFQSQKEGYYEEQTGCIKWLNEFAEYHNRMLQEELEKLRNLHPDVTIIYADYYGAALNIFRAPLKFGFTVPLNACCGSDAPYNCSPSILCGRPGSTVCPDPSKYISWDGLHFTEASYKVVIQGVLGGYAKPPLSEACKGAEFKVSQLHQCTDNPTNTVSYDALSSFI

SEQ ID NO: 1601 - protein, 402 aa, Zea mays subsp. mays
  peptide (1)..(402): Ceres Seq. ID no. 12342533
MAFPSWATLFFAGMMVVLAAVEAEAEAGGGSVCFDRMFGFGDSLTDTGNFLLSVPDDFPDPARNLPYGQTFFGRPSGRYSDGRNLLDFFAEAFGLPYVPPYLGSGDFQNGANFAVGGATALNGSFFRERGVEPTWTPHSLDEQMQWFKKLLPFIAPSETELNEIMSKSLLFVGEIGGNDYNHLIVREKSVDELHEIVPNVVGAISSGITDLINLGAKKLVVPGNFPIGCVPLYLAIFQSQKEGYYEEQTGCIKWLNEFAEYHNRMLQEELEKLRNLHPDVTIIYADYYGAALNIFRAPLKFGFTVPLNACCGSDAPYNCSPSILCGRPGSTVCPDPSKYISWDGLHFTEASYKVVIQGVLGGYAKPPLSEACKGAEFKVSQLHQCTDNPTNTVSYDALSSFI

SEQ ID NO: 1602 - DNA, 1398 bp, Zea mays subsp. mays
  misc_feature (1)..(1398): Ceres Seq. ID no. 12347860
  misc_feature (1)..(1398): Ortholog of  Ceres SEQ ID NO 15168355 as cited in SEQ ID NO 57246
  misc_feature (1)..(1398): Ortholog of  Ceres SEQ ID NO 13597094 as cited in SEQ ID NO 63626
gttttttctctgacttttctgatttggtcctggcttctcctccttccccctcggatcggcggcagttcccgtgccctcacagtcacaggggacgcggctcgcctttccttccccgccaatccatccgctcttctcagcggcgagaagaagagatggggagcaacgccgccggcaagcctcctcctcctgctgctgctgctgtgtcgtgggagttccacgcgacggggcctcgcaacttgaccagccccggctggagggacctcatccgctccagctggagagatccaagctacagaaggatcgcagtgtcgtgcttcgtgcaggccgcgtatctgctggagctggacaggcaggagggcagagccggtgaagccgcgctcgctcccaactggtggaagcccttcaagtacaagctggtgcgcccgctcatcgactccagagacgggtccatctacggggcgcttctagaatgggaccagctcgccgccctcgctgacctgatagtggccaagcctcagggcgctcccaaggtggtcctcgcgctcaggggcaccgtgctgaggcagctgaccgtggtgagggacctggaagacgaccttcggttgtttgccctggagagcctgagggggtccgtcaggttcacaggcgcgctggaggtgctcaagtcggcgatccacaggcacggcagcgccaacgtgtgcgttgccggccactccctgggcgccggctttgcgctgcaggtcggcagggccttggccaaggatggaaccttcgtggagtgccatctgttcaacccgccgtcggtgtcacttggcacgggcctcaggaaaatccaggaaaaggccagcagtgtcctcaagcggtatatcagtagaagccgcggcggcggcggcagcggcagcagctcctcgtcgaatgtttccccaggaccaggagaggagctacaagccgccgctcgagatggagttggagaagaagagatgagcagggaggtcaaaagatgggtgccaaacctgtacgtgaacagctgcgactacatctgctgcttctacgctgaccgtagcggcgtcgctaccgtcaccgaggagaagcgttccggagtgcattccaagctgtacgtgatcgccaaaggaccgagcaagttcctggaggctcacgggctgcagcagtggtggtccgatgattctgagctccacttggccgtgcacgacagcaaactcatgtataggcaccttaagtccctctatgttgaacagtagtagagaaggcattggtacttgtttctcagaatgcctagtttttcttctctagtccagacaagaaaacatgtaaaccgtcagctgattaagagctccaactcttgcaactcctctaagcatatttcttctcttctcgcgc

SEQ ID NO: 1603 - protein, 418 aa, Zea mays subsp. mays
  peptide (1)..(418): Ceres Seq. ID no. 12347861
FFSDFSDLVLASPPSPSDRRQFPCPHSHRGRGSPFLPRQSIRSSQRREEEMGSNAAGKPPPPAAAAVSWEFHATGPRNLTSPGWRDLIRSSWRDPSYRRIAVSCFVQAAYLLELDRQEGRAGEAALAPNWWKPFKYKLVRPLIDSRDGSIYGALLEWDQLAALADLIVAKPQGAPKVVLALRGTVLRQLTVVRDLEDDLRLFALESLRGSVRFTGALEVLKSAIHRHGSANVCVAGHSLGAGFALQVGRALAKDGTFVECHLFNPPSVSLGTGLRKIQEKASSVLKRYISRSRGGGGSGSSSSSNVSPGPGEELQAAARDGVGEEEMSREVKRWVPNLYVNSCDYICCFYADRSGVATVTEEKRSGVHSKLYVIAKGPSKFLEAHGLQQWWSDDSELHLAVHDSKLMYRHLKSLYVEQ

SEQ ID NO: 1604 - protein, 368 aa, Zea mays subsp. mays
  peptide (1)..(368): Ceres Seq. ID no. 12347862
MGSNAAGKPPPPAAAAVSWEFHATGPRNLTSPGWRDLIRSSWRDPSYRRIAVSCFVQAAYLLELDRQEGRAGEAALAPNWWKPFKYKLVRPLIDSRDGSIYGALLEWDQLAALADLIVAKPQGAPKVVLALRGTVLRQLTVVRDLEDDLRLFALESLRGSVRFTGALEVLKSAIHRHGSANVCVAGHSLGAGFALQVGRALAKDGTFVECHLFNPPSVSLGTGLRKIQEKASSVLKRYISRSRGGGGSGSSSSSNVSPGPGEELQAAARDGVGEEEMSREVKRWVPNLYVNSCDYICCFYADRSGVATVTEEKRSGVHSKLYVIAKGPSKFLEAHGLQQWWSDDSELHLAVHDSKLMYRHLKSLYVEQ

SEQ ID NO: 1605 - DNA, 1050 bp, Zea mays subsp. mays
  misc_feature (1)..(1050): Ceres Seq. ID no. 12411097
  misc_feature (1)..(1050): Ortholog of  Ceres SEQ ID NO 15178931 as cited in SEQ ID NO 1125
  misc_feature (1)..(1050): Ortholog of  Ceres SEQ ID NO 13596648 as cited in SEQ ID NO 63080
ccgtggttcaactcctaccactaccacagcaccaacgacggaccaggcagcagagaaaaagcagaccagacgagacctctcgcgttccgtcctcctcccccctgcccctgctgccgttccccttcttcctcagttctcccgcccgctgctgccctccgtccgcgtccagatcccgccaccaaccgatccggcgccctccagcatggcgggggcgggggcgaaggcggcgggagccctggctctggcgctcgtgctcgcgctcgcgggggccaactccgagggcgacgcgctctcggcgctgcgccggagcctcagggaccccggcggcgttctgcagagctgggaccccacgctcgtcaacccctgcacctggttccacgtcacctgcgaccgcgacaaccgcgtcacccgcctagatcttggtaatttgaacttatctggtcatctggtgcctgagcttgggaaactggagcatcttcagtatctggaactttataagaataacattcaaggaacagtcccttctgagcttggcaacttgaagaatctaataagcttcgacttgtacaagaacaacatttcggggacaatacctcctgcccttggaaagttgaagtcccttgtattcttgcgtctcaatggcaatcatttgactgggcccatcccaagggaactcgctggaatatctagtctcaaagttgttgatgtttcaagtaatgatttgtgcgggacgattcccacgtctggaccatttgaacatattcctctgagcaactttgagaagaacccgcgcttggaaggtccagagctacaaggcctggccatatacgacaccaactgctagaggcaccacgaagataagaactgctagaaagtaacgagcgaacaaggttacgagaaattgggcgatatagatttactaggtctggatctgtaatcctccctgcatagctcttattcgtaactcgctgcctgcacgaaagttggtgtgtgtttttagcagaatgctttctgtccgtgaaagtaaacttgaactgcttattacgactg

SEQ ID NO: 1606 - protein, 280 aa, Zea mays subsp. mays
  peptide (1)..(280): Ceres Seq. ID no. 12411098
RGSTPTTTTAPTTDQAAEKKQTRRDLSRSVLLPPAPAAVPLLPQFSRPLLPSVRVQIPPPTDPAPSSMAGAGAKAAGALALALVLALAGANSEGDALSALRRSLRDPGGVLQSWDPTLVNPCTWFHVTCDRDNRVTRLDLGNLNLSGHLVPELGKLEHLQYLELYKNNIQGTVPSELGNLKNLISFDLYKNNISGTIPPALGKLKSLVFLRLNGNHLTGPIPRELAGISSLKVVDVSSNDLCGTIPTSGPFEHIPLSNFEKNPRLEGPELQGLAIYDTNC

SEQ ID NO: 1607 - protein, 213 aa, Zea mays subsp. mays
  peptide (1)..(213): Ceres Seq. ID no. 12411099
MAGAGAKAAGALALALVLALAGANSEGDALSALRRSLRDPGGVLQSWDPTLVNPCTWFHVTCDRDNRVTRLDLGNLNLSGHLVPELGKLEHLQYLELYKNNIQGTVPSELGNLKNLISFDLYKNNISGTIPPALGKLKSLVFLRLNGNHLTGPIPRELAGISSLKVVDVSSNDLCGTIPTSGPFEHIPLSNFEKNPRLEGPELQGLAIYDTNC

SEQ ID NO: 1608 - protein, 141 aa, Zea mays subsp. mays
  peptide (1)..(141): Ceres Seq. ID no. 12411100
PWFNSYHYHSTNDGPGSREKADQTRPLAFRPPPPCPCCRSPSSSVLPPAAALRPRPDPATNRSGALQHGGGGGEGGGSPGSGARARARGGQLRGRRALGAAPEPQGPRRRSAELGPHARQPLHLVPRHLRPRQPRHPPRSW

SEQ ID NO: 1609 - DNA, 878 bp, Zea mays subsp. mays
  misc_feature (1)..(878): Ceres Seq. ID no. 12349908
  misc_feature (1)..(878): Ortholog of  Ceres SEQ ID NO 13660340 as cited in SEQ ID NO 67659
acaacaccagaatccgcgaatcacagacgcgcctatctcagcttgctgcactgccctgccatcatatcaatatcatatcgtacgtgagcccggccgagagcgagggagaggcatggctgctccgaagctcgcgacgttggcgctggccgtgctcctggcggcgaccgtggtggctcccccggccgcggtgcgcgcggcgatgtcgtgctccaccgtgtacagcacgctgatgccgtgcctgccgttcgtccagatgggcggggccatgccgccccagccgtgctgcggcggcatccgcagcctgctgcagcaggccaacaacacccccgaccgccgcaccatctgcggctgcctcaagaacgtcgccaacggcgccaacgggagcggcacctacatcagccgcgccgccgcgctgcccagcaagtgcggcgtcgccctgccgtacaagatcagcaccaacgttaactgcaacacgattaattaagtgaggcgtcctgtgcgcgtcccgggcgaggaatgcatgcatggcgctggcggagagtaataaaataatgctactggtattttaagctatatcgaggtgtgcctgtctctagtcatttatggtgtttaggaatcgtctacacagttcgtaacggtgtatcgtggtcggatgcatgttgccgcgagcagagtacgtaggcatgaaccgacgtgtgcgcttctgtctgtgtactctctctatgttgtaatgtgtgggtgctttgatccagatgtattcgctcgtgagtcgtggaagtagatcgtttcagtatcattaccgtgtgttctttcttaattttacatgcgattctgaaaatgaacatacacgaagctggactggtccagtatacgttgcc

SEQ ID NO: 1610 - protein, 160 aa, Zea mays subsp. mays
  peptide (1)..(160): Ceres Seq. ID no. 12349909
QHQNPRITDAPISACCTALPSYQYHIVREPGRERGRGMAAPKLATLALAVLLAATVVAPPAAVRAAMSCSTVYSTLMPCLPFVQMGGAMPPQPCCGGIRSLLQQANNTPDRRTICGCLKNVANGANGSGTYISRAAALPSKCGVALPYKISTNVNCNTIN

SEQ ID NO: 1611 - protein, 123 aa, Zea mays subsp. mays
  peptide (1)..(123): Ceres Seq. ID no. 12349910
MAAPKLATLALAVLLAATVVAPPAAVRAAMSCSTVYSTLMPCLPFVQMGGAMPPQPCCGGIRSLLQQANNTPDRRTICGCLKNVANGANGSGTYISRAAALPSKCGVALPYKISTNVNCNTIN

SEQ ID NO: 1612 - protein, 94 aa, Zea mays subsp. mays
  peptide (1)..(94): Ceres Seq. ID no. 12349911
MSCSTVYSTLMPCLPFVQMGGAMPPQPCCGGIRSLLQQANNTPDRRTICGCLKNVANGANGSGTYISRAAALPSKCGVALPYKISTNVNCNTIN

SEQ ID NO: 1613 - DNA, 1656 bp, Zea mays subsp. mays
  misc_feature (1)..(1656): Ceres Seq. ID no. 12345858
  misc_feature (1)..(1656): Ortholog of  Ceres SEQ ID NO 15176835 as cited in SEQ ID NO 1046
  misc_feature (1)..(1656): Ortholog of  Ceres SEQ ID NO 14315403 as cited in SEQ ID NO 59259
atttcctacttcttccagactaaaaccccaggcctcgcgagtcgccgccgaccgccgcaaccacgcgctacgcccccgatggctcacctccagctcctcttctcatactcgcggcggaacccgcagcgccaccgcctgctctcactcttccacttctcctccgacgccaagtccagctccgcctcgccgccgcctcctcccatcaagcccgtctcctacgctccgaagccgcagcagcaggccccgcccgaggagtctgccgccccgacaaccccggacgttgcccctagggaccaatccccactgccacgacggcctcagcagccgatgccgccgcgggagtggacgcggcaggatatgcggtacgtgaaggacgcggcgcccgcgatctcgcccgtctcgtacccgtccagggtcgcgccgctgccggaggaccgtccggtcggcggcgaggtggaggaggtgcaggacggggggctgcagggggagtcggagcggatccagatgaacgcggtgcgtcccaccaggagcgtctttgggatgcacgaggaggataggctgccgtacccgacggtcatacccgtcgtcaagcggccgcagaaggtcgccattgatttaatcgacgccatccgcctagttaagactagtgcaaacgagaagaagcggaattttgttgaaactgttgaagctcatgtgatattaggtgttgatcctcgtcgtggtgaccagatggttcgtggcgccttaacattgcctcatggcactggcaagactgttagggtagcagtatttgctgaaggtcctggagcagacgaagctagagctgccggagcagatgttgttggtggtgatgagttgattgaggagatccgcacaggaggaggcaaactaagctttgacaagtgcatagcaaccccaatgttcatgccccgattgtcaaaggttgctaggatattgggtccacgtggtttgatgcctaatcctaagctaggatctgtgacgaatgatgtttctggtgcggtcaaagcggcaaaatcaggacgtgttgatttcaaaatagataaaactgctatagtgcatgttggccttgggaaggtaaactttactgaggagagtttacgtgaaaatattggtgcttttgtgcatgcacttttacttgctaagccagtgggcttaaagaaaacttcaaaatatgtcggatatgtgaagaagttcacactgagtagcacaatgggacccggacttcctgttaccataccatcactatctgtggccgccgatcactataacaaggttcaagtcagctaagtcaatacagtagaacatcgaatgtagctttctttctccaatagccgcggcctgcagatggcggcttgtttggcagtggagcttaaccattcagcaaggttgagatttgggtggcttgctgttttgttattggggataataccttttgtggacaaggatcattcaacaaacatcataacctataactttattttatccttgtcactgcaattttgagattgcgttgctggtctacctatgttatccagagtcttgtcatttgttgcacgaaatgtaatattgaaatacggtagttttagggcattacttatgataataagaaatgaagtattaaccatgattcgattc

SEQ ID NO: 1614 - protein, 435 aa, Zea mays subsp. mays
  peptide (1)..(435): Ceres Seq. ID no. 12345859
ISYFFQTKTPGLASRRRPPQPRATPPMAHLQLLFSYSRRNPQRHRLLSLFHFSSDAKSSSASPPPPPIKPVSYAPKPQQQAPPEESAAPTTPDVAPRDQSPLPRRPQQPMPPREWTRQDMRYVKDAAPAISPVSYPSRVAPLPEDRPVGGEVEEVQDGGLQGESERIQMNAVRPTRSVFGMHEEDRLPYPTVIPVVKRPQKVAIDLIDAIRLVKTSANEKKRNFVETVEAHVILGVDPRRGDQMVRGALTLPHGTGKTVRVAVFAEGPGADEARAAGADVVGGDELIEEIRTGGGKLSFDKCIATPMFMPRLSKVARILGPRGLMPNPKLGSVTNDVSGAVKAAKSGRVDFKIDKTAIVHVGLGKVNFTEESLRENIGAFVHALLLAKPVGLKKTSKYVGYVKKFTLSSTMGPGLPVTIPSLSVAADHYNKVQVS

SEQ ID NO: 1615 - protein, 409 aa, Zea mays subsp. mays
  peptide (1)..(409): Ceres Seq. ID no. 12345860
MAHLQLLFSYSRRNPQRHRLLSLFHFSSDAKSSSASPPPPPIKPVSYAPKPQQQAPPEESAAPTTPDVAPRDQSPLPRRPQQPMPPREWTRQDMRYVKDAAPAISPVSYPSRVAPLPEDRPVGGEVEEVQDGGLQGESERIQMNAVRPTRSVFGMHEEDRLPYPTVIPVVKRPQKVAIDLIDAIRLVKTSANEKKRNFVETVEAHVILGVDPRRGDQMVRGALTLPHGTGKTVRVAVFAEGPGADEARAAGADVVGGDELIEEIRTGGGKLSFDKCIATPMFMPRLSKVARILGPRGLMPNPKLGSVTNDVSGAVKAAKSGRVDFKIDKTAIVHVGLGKVNFTEESLRENIGAFVHALLLAKPVGLKKTSKYVGYVKKFTLSSTMGPGLPVTIPSLSVAADHYNKVQVS

SEQ ID NO: 1616 - protein, 326 aa, Zea mays subsp. mays
  peptide (1)..(326): Ceres Seq. ID no. 12345861
MPPREWTRQDMRYVKDAAPAISPVSYPSRVAPLPEDRPVGGEVEEVQDGGLQGESERIQMNAVRPTRSVFGMHEEDRLPYPTVIPVVKRPQKVAIDLIDAIRLVKTSANEKKRNFVETVEAHVILGVDPRRGDQMVRGALTLPHGTGKTVRVAVFAEGPGADEARAAGADVVGGDELIEEIRTGGGKLSFDKCIATPMFMPRLSKVARILGPRGLMPNPKLGSVTNDVSGAVKAAKSGRVDFKIDKTAIVHVGLGKVNFTEESLRENIGAFVHALLLAKPVGLKKTSKYVGYVKKFTLSSTMGPGLPVTIPSLSVAADHYNKVQVS

SEQ ID NO: 1617 - DNA, 2064 bp, Zea mays subsp. mays
  misc_feature (1)..(2064): Ceres Seq. ID no. 12411078
  misc_feature (1)..(2064): Ortholog of  Ceres SEQ ID NO 14308477 as cited in SEQ ID NO 60338
aagcttttcccattctcgttgatacgagcgagagtcgagacaggtcaaaaggagattgagtaaggaaaagaaaaaaaaaatcgctgctcccgaggcacggcggcggcgagcgtgcgacacctccggcggctccacagatccggcgaccgatctccggccgcctgcggatgctccggggccggcgcggtaaggcccaggggtccacgctcgtagccagatctcggggcgctgctgggaagtggggttcgttccgtccctgcctccctggtggtggggatggggtggtccgcggggctgtggtggctcgtggccgcgctgtgggtggtggcggcggcggcggcggcggcggagggtgaggtcgtggtcgggtcagcgccgaggcggcacgcgtacgcgtcgatgatgtacatgggcactccacgggactacgagttctacgtggccacgcgcgtcatgatgcagtccctgcgccggctcagcgccgacgccgaccgcgtcgtgatcgcctccctcgacgtcccaccgctctgggtccaggcgctatgatggtgtaaaggtggtctctgtggagaatttgaaaaatccatacgagagacaagagaatttcaacatgcgattcaagttgaccttaaacaagctgtatgcatggagcttggtttcgtatgagcgagttgttatgcttgactccgacaacattttcctccaaaatactgattagttatttcagtgtggtcagttctgtgctgtcttcatcaatccctgtatcttccatacaggtctctttgtgcttcagccctcaatgaacgtttttaagaatatgctacatgagctatcggttggacgtgaaaacccagatggtgcagaccaaggctttcttgctagttatttcccggacttacttgatcagccaatgttccatccaccagctaatggtacaaaacttcagggtacttaccgcctccctctaggctaccagatggatgcgtcttactattatctgaagcttcgctggagtattccatgtggaccgaacagtgtgattacatttccaagtgctccatggtttaagccatggtactggtggtcttggccagttttacctttggggctctcttggcatgaacaacgtcgtgaaaacctagggtattcatctgagataccagtagtattaattcaggctgtactgtacattggagtcatagcagtgacccgactggcgaagcctaccttgaacaagatgtgctacaacagaagaatggagaaaaacactatgttcttgctctctgttctcagagtcgtggctgcttggtccatacttgctgcctacaccatacccttcttcatcatcccaaggaccgtgcatccactgcttggctggcctctctacttgctcggttcttttgctctttcttccattgttatcaacattttcctcttccacccgatcaccgtcctcacaacatggtttggattcataggcgcactcctggtgatggccttcccttggtatctaaatggttttgtcagggccttggcagtgtttgcgtatgctttctgctgcgcgcccttgatctgggcatctttgggtcaagacaatgagctccttgcaggtcctgattgagagggatgcattcaggctcggagaacctagccagaatgcggagttcacaaagctatactgaggtgggcatggcagatacatgtgatttatcactttcgttgctcagtttgaacagttaatctgcattcacattgtcaaattctgatggccaattcaaatgtacaactaaacctgcagcctgggagcaagagtggttgtacacaatggaactatctggaaacctctagaatccatgaatgttgttatcttagacatgtaggtgacatatacagtggaaaaggggggagggctgtagaattggtgctgaactgaagaggaactgactggggtcagttgttagttattttgatttattgttcctctgaaaagccaaggcatttttggctttgtttgtaattgatatgatatgttccttcacaaatgaagaaaagggttgaaagtgc

SEQ ID NO: 1618 - protein, 273 aa, Zea mays subsp. mays
  peptide (1)..(273): Ceres Seq. ID no. 12411079
MNVFKNMLHELSVGRENPDGADQGFLASYFPDLLDQPMFHPPANGTKLQGTYRLPLGYQMDASYYYLKLRWSIPCGPNSVITFPSAPWFKPWYWWSWPVLPLGLSWHEQRRENLGYSSEIPVVLIQAVLYIGVIAVTRLAKPTLNKMCYNRRMEKNTMFLLSVLRVVAAWSILAAYTIPFFIIPRTVHPLLGWPLYLLGSFALSSIVINIFLFHPITVLTTWFGFIGALLVMAFPWYLNGFVRALAVFAYAFCCAPLIWASLGQDNELLAGPD

SEQ ID NO: 1619 - protein, 267 aa, Zea mays subsp. mays
  peptide (1)..(267): Ceres Seq. ID no. 12411080
MLHELSVGRENPDGADQGFLASYFPDLLDQPMFHPPANGTKLQGTYRLPLGYQMDASYYYLKLRWSIPCGPNSVITFPSAPWFKPWYWWSWPVLPLGLSWHEQRRENLGYSSEIPVVLIQAVLYIGVIAVTRLAKPTLNKMCYNRRMEKNTMFLLSVLRVVAAWSILAAYTIPFFIIPRTVHPLLGWPLYLLGSFALSSIVINIFLFHPITVLTTWFGFIGALLVMAFPWYLNGFVRALAVFAYAFCCAPLIWASLGQDNELLAGPD

SEQ ID NO: 1620 - protein, 236 aa, Zea mays subsp. mays
  peptide (1)..(236): Ceres Seq. ID no. 12411081
MFHPPANGTKLQGTYRLPLGYQMDASYYYLKLRWSIPCGPNSVITFPSAPWFKPWYWWSWPVLPLGLSWHEQRRENLGYSSEIPVVLIQAVLYIGVIAVTRLAKPTLNKMCYNRRMEKNTMFLLSVLRVVAAWSILAAYTIPFFIIPRTVHPLLGWPLYLLGSFALSSIVINIFLFHPITVLTTWFGFIGALLVMAFPWYLNGFVRALAVFAYAFCCAPLIWASLGQDNELLAGPD

SEQ ID NO: 1621 - DNA, 649 bp, Zea mays subsp. mays
  misc_feature (1)..(649): Ceres Seq. ID no. 12363035
  misc_feature (1)..(649): Ortholog of  Ceres SEQ ID NO 14305591 as cited in SEQ ID NO 0
gcacgagaccattacctagaacatcctaatcgaaaaatccctgaaaacctcacaaaaccctcgtttgctccccaccaccccgccgcgccgccgcctgtaccagctgcgtcaagatgagtcggcaccctgaggtgaagtgggctcagaggatcgacaaggtttacatcactgtacagttacctgacgcaaaggatgctaaggtcaatttggatccagatggtgtcttcacattctctggcagcgctggtacaaacttgtatgaattgaaactagatctgaatgacaaagtaaacgttgaggctagcaaaataagtgtgtaccagcggtcgggcggcgcccccggtggcgatgccgacggcggcgtcgacgacgaccacgacgagctgtagatggtggtggggagcggtgacgtggagtgccgggaaccaagccaaattttgtaatggtgtttaggggggagggtggtggacaaaaaaactaatcttggtgctgctctgccaatagacgggctgaccatagaacttttttttcccttctacttccttgtgattgnnctttttatagaggattcgcattgcagtgtaatgtaaaaaaaanatgacccacttctgaaacttgntactacaagntaataatgaaatggtgcatc

SEQ ID NO: 1622 - protein, 91 aa, Zea mays subsp. mays
  peptide (1)..(91): Ceres Seq. ID no. 12363036
MSRHPEVKWAQRIDKVYITVQLPDAKDAKVNLDPDGVFTFSGSAGTNLYELKLDLNDKVNVEASKISVYQRSGGAPGGDADGGVDDDHDEL

SEQ ID NO: 1623 - DNA, 1209 bp, Zea mays subsp. mays
  misc_feature (1)..(1209): Ceres Seq. ID no. 12355859
  misc_feature (1)..(1209): Ortholog of  Ceres SEQ ID NO 14301765 as cited in SEQ ID NO 61955
  misc_feature (1)..(1209): Ortholog of  Ceres SEQ ID NO 12618205 as cited in SEQ ID NO 65153
  misc_feature (1)..(1209): Ortholog of  Ceres SEQ ID NO 12620986 as cited in SEQ ID NO 66720
agaattccatttatttcatcctctctttttttttttccattccacgcccctcccaacactcccagacccatttccctttccttcccctccggctccgcctcctcgaccactccgacaacccccagcgcctcctctccggcgagctccacctctccaccggcggcggcgagaagcgggggggctaactaagtctgtaggctgcggcggaggtgatcccggagccggagccgagtctagggcgatggggcagcagtcgctgatctacgcgttcgtggcgcgtggcaccgtggtgctggccgagtacaccgagttcaccggcaacttcaccaccatcgccgcccagtgcctgcagaagctccccgccagcaacaacaagttcacctacaactgcgacggccacaccttcaactacctcgtcgaggacggattcacgtattgtgtagttgctgttgaatcagttgggcgacaaatccccatagctttcctggacagagttaaggaagacttcaccaaaaagtatggaggcgggaaagcagctactgctgcagcgaacagcttgaacagggagtttggatcaaagcttaaagagcacatgcagtactgtgtggaccaccctgaggaggttagcaagcttgccaaggtgaaggcccaagtctccgaagtcaaaggagttatgatggaaaacattgagaaggttcttgaccgtggcgagaagattgaactgcttgtcgacaaaactgaaaatctgcgttctcaggcacaagatttcaggcagcagggcaccaaggtgcggcggaagatgtggctccaaaacatgaaaatcaagctgatcgtcctgggcatcatcatcgtgctcatcctcatcatcatcctgtcggtgtgccatggcttcaagtgcggcagcaagtgaggagggggacttacagatggccgtgccctgccctgccctgccctggcacctgcgagaaggaggagactacatgtggagttttttttttttttgcttctttagtcgtcgtgttaagtcgtcctgcgccgataattcttggtggtcaccagataagagtcattcctgatgtcggtgttgattgctgttgggttggtcgggaaatgactgggtgaaccggggggcgaagtgggaggggggttgtgtcgtgtaattttggatgccactattgtgcatgtatagccccgtgtgctgtgctaccc

SEQ ID NO: 1624 - protein, 302 aa, Zea mays subsp. mays
  peptide (1)..(302): Ceres Seq. ID no. 12355860
EFHLFHPLFFFFHSTPLPTLPDPFPFPSPPAPPPRPLRQPPAPPLRRAPPLHRRRREAGGLTKSVGCGGGDPGAGAESRAMGQQSLIYAFVARGTVVLAEYTEFTGNFTTIAAQCLQKLPASNNKFTYNCDGHTFNYLVEDGFTYCVVAVESVGRQIPIAFLDRVKEDFTKKYGGGKAATAAANSLNREFGSKLKEHMQYCVDHPEEVSKLAKVKAQVSEVKGVMMENIEKVLDRGEKIELLVDKTENLRSQAQDFRQQGTKVRRKMWLQNMKIKLIVLGIIIVLILIIILSVCHGFKCGSK

SEQ ID NO: 1625 - protein, 222 aa, Zea mays subsp. mays
  peptide (1)..(222): Ceres Seq. ID no. 12355861
MGQQSLIYAFVARGTVVLAEYTEFTGNFTTIAAQCLQKLPASNNKFTYNCDGHTFNYLVEDGFTYCVVAVESVGRQIPIAFLDRVKEDFTKKYGGGKAATAAANSLNREFGSKLKEHMQYCVDHPEEVSKLAKVKAQVSEVKGVMMENIEKVLDRGEKIELLVDKTENLRSQAQDFRQQGTKVRRKMWLQNMKIKLIVLGIIIVLILIIILSVCHGFKCGSK

SEQ ID NO: 1626 - DNA, 1117 bp, Zea mays subsp. mays
  misc_feature (1)..(1117): Ceres Seq. ID no. 12348922
  misc_feature (1)..(1117): Ortholog of  Ceres SEQ ID NO 15172948 as cited in SEQ ID NO 51777
  misc_feature (1)..(1117): Ortholog of  Ceres SEQ ID NO 12784416 as cited in SEQ ID NO 61324
aaaaaaggccagccaacagaggccggtggaaaggagagaatcgagcagagccaccaggttgctcctcatttccactttccactgcgcctccgctgcccatcgccgtccccgaccgcagcgcaggactgaggatgagtgaagaggataaggctgctgcttctgctgagcagcctaagagggcccctaagctcaatgaaaggatcctctcctctctgtccaggaggtccgtagctgctcatccatggcatgatctcgagatcggtcctggtgctcctgctgtattcaatgttgttgttgagatcacaaagggaagcaaagtcaaatacgagcttgacaagaaaactggactgattaaggttgatcgagtcctttactcatcagttgtataccctcacaattatggtttcattccaaggactctttgtgaagacaatgacccaatggatgtgttggtcctgatgcaggagcctgttgttcctggttcgttcctgagagctagagcaattggccttatgcccatgattgaccagggtgaaaaggatgacaagataatagcagtatgtgctgacgatcctgaataccgtcactacaacgacatcagcgagctgtctcctcaccgcctgcaagagatcaagcgcttctttgaagattacaagaaaaacgagaacaaagaagtcgcagttgatgcattcttgcccgcgacaacagctcaagaagccattcagtactccatggacctgtatgcccagtatattttgcaaagcttgaggcagtagattgcaagcaacaatttatctatcatgcgtcttggatcggggcgtgattttaataagccgaatcgcttgctatattgcgaaccttggaattgagaacagcgtcactagctgtgattcgctcctttctcgttaaattatcatatgaataggccaagtccatacgtttaccgtgtggcgctctgtcagtcttcgtctacccaagtagctagctgcatggagggatgtctagcgttgctatgagatggcactcgtgggtctgcgggctgactacatgggtccgttcctgtgttttccgtaaaataaaattataattctatataattgaatcatttaatttatgc

SEQ ID NO: 1627 - protein, 257 aa, Zea mays subsp. mays
  peptide (1)..(257): Ceres Seq. ID no. 12348923
KRPANRGRWKGENRAEPPGCSSFPLSTAPPLPIAVPDRSAGLRMSEEDKAAASAEQPKRAPKLNERILSSLSRRSVAAHPWHDLEIGPGAPAVFNVVVEITKGSKVKYELDKKTGLIKVDRVLYSSVVYPHNYGFIPRTLCEDNDPMDVLVLMQEPVVPGSFLRARAIGLMPMIDQGEKDDKIIAVCADDPEYRHYNDISELSPHRLQEIKRFFEDYKKNENKEVAVDAFLPATTAQEAIQYSMDLYAQYILQSLRQ

SEQ ID NO: 1628 - protein, 214 aa, Zea mays subsp. mays
  peptide (1)..(214): Ceres Seq. ID no. 12348924
MSEEDKAAASAEQPKRAPKLNERILSSLSRRSVAAHPWHDLEIGPGAPAVFNVVVEITKGSKVKYELDKKTGLIKVDRVLYSSVVYPHNYGFIPRTLCEDNDPMDVLVLMQEPVVPGSFLRARAIGLMPMIDQGEKDDKIIAVCADDPEYRHYNDISELSPHRLQEIKRFFEDYKKNENKEVAVDAFLPATTAQEAIQYSMDLYAQYILQSLRQ

SEQ ID NO: 1629 - DNA, 1493 bp, Zea mays subsp. mays
  misc_feature (1)..(1493): Ceres Seq. ID no. 12355953
  misc_feature (1)..(1493): Ortholog of  Ceres SEQ ID NO 13504028 as cited in SEQ ID NO 56107
tcgcgatgggtggcggcagggaacacagcccacggtttttgctggctccccgcctcgtccccgtcacccccctcctccgctccgcctcctgtttatagtcgcctgctgtcgcggcccctttttccttccaccacccaccggccaccaccctccgcggttgcctagttgccttgactgcctgcctcgtcttaccaccaagctaagctagcgcgttccttcgttcgttcgttcgttccttcctccctcgcttcctgttgctcggtccatggaggtggcggcggccgcggcggcgggcgcgggggttgtggagctgcagctggacctcctcgaggcggcggcgccgacggagcgagaggccaagaggcgccgggtgcacccggttccagcgggcccaccggccggggcagcagcggcggcagcagcgccggggcgccgcagccgcaggcgccgcgccgtgcagcgtctcttccaggcctgccgccacgtcttccggggccccggcaccgtgcccagtcccggcgaggtccagctgctccgccacatgctcgacaggatgcggccggaggacgtgggcctgagcccggacctgagcttcttcagagctcgagacgccacacgtggcggtggcaccccgaccataacgcacacgacgatatacaaatgcccgaatttctcgatggtcatcctcttcctgccgcgaaacgcggtgatcccgctccacaaccaccctgggatgacggtgttcagcaagctgctcctggggtcgatgcacgtcaagtcgtacgactggctcaacactgctgaccccgacccttcttccgccacgagcaccaccagctcttcgtcctccgatggcccatgcctgaggctggcgaaactggtggttgacgacgtcttcacggcgccctgcgacacctccgtgctgtacccgacggcgggagggaacatgcaccggttcaccgccatggcgccctgcgcgatcctcgacgtcctcggccccccctactccatagaggaggacagggactgcacgtactacgcggaattaccgtacgcaaaccactcgctggtggctgcgggcgacgacgtggagcggggccagggccaaggccatctggcgtggcttgaggagatcgacatgccgagagagctcaagatgtgcagcgtccactatggcggaccgccgatctccgacgagtgacgtcgccggccgtcgtctccctcactggttgtactatgtctaactgatcgcggcacggcagagccgtgccgccgtctaacgttgtgtatagcaggcagcagcaagccataggctgtagttacacaaagtcccgatcgagtacaatgcttctcgcttgcctgcatcgttgttctctagatgccctttctttcttgttatttttgtttctactactacaagtagacgatgttttgtcctgacgatggatgatacagataagtcatatatatccacatatttcatttttgtcgtt

SEQ ID NO: 1630 - protein, 311 aa, Zea mays subsp. mays
  peptide (1)..(311): Ceres Seq. ID no. 12355954
MEVAAAAAAGAGVVELQLDLLEAAAPTEREAKRRRVHPVPAGPPAGAAAAAAAPGRRSRRRRAVQRLFQACRHVFRGPGTVPSPGEVQLLRHMLDRMRPEDVGLSPDLSFFRARDATRGGGTPTITHTTIYKCPNFSMVILFLPRNAVIPLHNHPGMTVFSKLLLGSMHVKSYDWLNTADPDPSSATSTTSSSSSDGPCLRLAKLVVDDVFTAPCDTSVLYPTAGGNMHRFTAMAPCAILDVLGPPYSIEEDRDCTYYAELPYANHSLVAAGDDVERGQGQGHLAWLEEIDMPRELKMCSVHYGGPPISDE

SEQ ID NO: 1631 - protein, 219 aa, Zea mays subsp. mays
  peptide (1)..(219): Ceres Seq. ID no. 12355955
MLDRMRPEDVGLSPDLSFFRARDATRGGGTPTITHTTIYKCPNFSMVILFLPRNAVIPLHNHPGMTVFSKLLLGSMHVKSYDWLNTADPDPSSATSTTSSSSSDGPCLRLAKLVVDDVFTAPCDTSVLYPTAGGNMHRFTAMAPCAILDVLGPPYSIEEDRDCTYYAELPYANHSLVAAGDDVERGQGQGHLAWLEEIDMPRELKMCSVHYGGPPISDE

SEQ ID NO: 1632 - protein, 215 aa, Zea mays subsp. mays
  peptide (1)..(215): Ceres Seq. ID no. 12355956
MRPEDVGLSPDLSFFRARDATRGGGTPTITHTTIYKCPNFSMVILFLPRNAVIPLHNHPGMTVFSKLLLGSMHVKSYDWLNTADPDPSSATSTTSSSSSDGPCLRLAKLVVDDVFTAPCDTSVLYPTAGGNMHRFTAMAPCAILDVLGPPYSIEEDRDCTYYAELPYANHSLVAAGDDVERGQGQGHLAWLEEIDMPRELKMCSVHYGGPPISDE

SEQ ID NO: 1633 - DNA, 1370 bp, Zea mays subsp. mays
  misc_feature (1)..(1370): Ceres Seq. ID no. 12359684
  misc_feature (1)..(1370): Ortholog of  Ceres SEQ ID NO 15171228 as cited in SEQ ID NO 56948
  misc_feature (1)..(1370): Ortholog of  Ceres SEQ ID NO 13654728 as cited in SEQ ID NO 62302
  misc_feature (1)..(1370): Ortholog of  Ceres SEQ ID NO 13597134 as cited in SEQ ID NO 64501
  misc_feature (1)..(1370): Ortholog of  Ceres SEQ ID NO 15174333 as cited in SEQ ID NO 0
  misc_feature (1)..(1370): Ortholog of  Ceres SEQ ID NO 15179047 as cited in SEQ ID NO 0
gagcgagcccccgcacgtcgccacttcaccgcccccacccaaaatcgtctcgatggaaccgctgcggcgcgtgctgcgcctccgactcggacggcctctcgctataaaccccgcccactgaatacggccgttccatttttgactctattccccgcttcccgattcaagtcagcggtttttagggttcgagatctcggcatcgtgtcgcggaagccatggcgacaagcatgcttagtaccgtgaaggtgagcaatgtatcactgaaagcagcacaacgtgatataaaggaattcttttccttttctggtgacattgtgcatgttgaaatgcagagtttcgatgagctttctcaagttgcctacattacttttaaagacaaacaaggagcagagacggcaatgcttctcacgggggccaccatagttgatatggctgtaatcgtcacaccagcaaatgattatgagctaccatcttctgttttagctgctcttgagcccaaagacacaaaaccttctgcccttcaaaaggccgaggacattgttgggaccatgctggcaaagggatttatcctcggtagggatgcactggacaaagcgaaagctttggatgagaagcatcagctgacgtcgactgccacagctagagtatcttccttcgacaagagaatcggtctaagtgagaagatcagtgttggcacttcagttgtaaacgataaagtgaaggaaatggatcagaaataccaagtctctgagaagacaaagtcagcactggcagctgctgaacatagtgtctcgactgctggatctgctatcatgaagaacaggtatgtgctaaccggagctgcatgggtaactggtgctttcagcaaggtcaccagtgcagccaacgaggccggtgcaaaggctaaggaaaaaatagcagtcgagcaggagcacaagaatgctgagggtggacctgcacaagcgaacatctcagagacccatgaagcgcacaggggtttggacggcggattctcaaggctacatgactctgaaacccctgaagatatccccatctctactgcgagtgtcccagctgttacggatgaggagcccagcaaggcttctccaccagctggtgttcctgaaaagccagaagctgcgcacgaattggtactataattgatgcggttttgcttcatacatgcatgtaaatagacatgaaatgggatagccctggaactcattctgtggtcttgtggttggcatcttcagattgaaaacctctttgaaggttgaaagttattgggatctaaaggagtttgcaatttgtacctggtctttttgatcaattagtaatcagtattacccggcagtggggaaatgaacttc

SEQ ID NO: 1634 - protein, 314 aa, Zea mays subsp. mays
  peptide (1)..(314): Ceres Seq. ID no. 12359685
MATSMLSTVKVSNVSLKAAQRDIKEFFSFSGDIVHVEMQSFDELSQVAYITFKDKQGAETAMLLTGATIVDMAVIVTPANDYELPSSVLAALEPKDTKPSALQKAEDIVGTMLAKGFILGRDALDKAKALDEKHQLTSTATARVSSFDKRIGLSEKISVGTSVVNDKVKEMDQKYQVSEKTKSALAAAEHSVSTAGSAIMKNRYVLTGAAWVTGAFSKVTSAANEAGAKAKEKIAVEQEHKNAEGGPAQANISETHEAHRGLDGGFSRLHDSETPEDIPISTASVPAVTDEEPSKASPPAGVPEKPEAAHELVL

SEQ ID NO: 1635 - protein, 310 aa, Zea mays subsp. mays
  peptide (1)..(310): Ceres Seq. ID no. 12359686
MLSTVKVSNVSLKAAQRDIKEFFSFSGDIVHVEMQSFDELSQVAYITFKDKQGAETAMLLTGATIVDMAVIVTPANDYELPSSVLAALEPKDTKPSALQKAEDIVGTMLAKGFILGRDALDKAKALDEKHQLTSTATARVSSFDKRIGLSEKISVGTSVVNDKVKEMDQKYQVSEKTKSALAAAEHSVSTAGSAIMKNRYVLTGAAWVTGAFSKVTSAANEAGAKAKEKIAVEQEHKNAEGGPAQANISETHEAHRGLDGGFSRLHDSETPEDIPISTASVPAVTDEEPSKASPPAGVPEKPEAAHELVL

SEQ ID NO: 1636 - protein, 277 aa, Zea mays subsp. mays
  peptide (1)..(277): Ceres Seq. ID no. 12359687
MQSFDELSQVAYITFKDKQGAETAMLLTGATIVDMAVIVTPANDYELPSSVLAALEPKDTKPSALQKAEDIVGTMLAKGFILGRDALDKAKALDEKHQLTSTATARVSSFDKRIGLSEKISVGTSVVNDKVKEMDQKYQVSEKTKSALAAAEHSVSTAGSAIMKNRYVLTGAAWVTGAFSKVTSAANEAGAKAKEKIAVEQEHKNAEGGPAQANISETHEAHRGLDGGFSRLHDSETPEDIPISTASVPAVTDEEPSKASPPAGVPEKPEAAHELVL

SEQ ID NO: 1637 - DNA, 1607 bp, Zea mays subsp. mays
  misc_feature (1)..(1607): Ceres Seq. ID no. 12351896
  misc_feature (1)..(1607): Ortholog of  Ceres SEQ ID NO 14303366 as cited in SEQ ID NO 54418
  misc_feature (1)..(1607): Ortholog of  Ceres SEQ ID NO 13503610 as cited in SEQ ID NO 62416
  misc_feature (1)..(1607): Ortholog of  Ceres SEQ ID NO 13657610 as cited in SEQ ID NO 66165
  misc_feature (1)..(1607): Ortholog of  Ceres SEQ ID NO 13598312 as cited in SEQ ID NO 68448
  misc_feature (1)..(1607): Ortholog of  Ceres SEQ ID NO 13596100 as cited in SEQ ID NO 68573
atcatctcttcgacactctcacatgcatcggaagattccgctgacactaaaaagatcgaaatggcgccgggatcgtcgtcgtctcgtaaggccaaggccctcaaggcatcgtaccggctcgtcgccgacaacttcctcgccgtcctcgccatggtttctgtcgtcgccgtgctcttcgctgcatggccgatcagcatcgaggaccttgcctgccggctgcacgcggtgcggccactccacgtcctcacggcggcgatcctgacggcggccctcgcgaagctgaggcgcatgagccggccgagcgacgtgtatctcgtggagtacggctgcttctggcccaagccgtgcttccgggcgccgttcgcgacgtgcctggagcacgtgcggctcttgccgtacctggtcaacgaggacgacatcagctggggctggcggctcctccagcggtccgggatcggcgaggagacctgcgtgccgtacgcctaccactacctgcccccggaccgcagctttagggcctccctggacgagaccgagctggtcatcttctccgccgtcgacgatgtgttcgcccggacgacggccgtgacgcccgcggacatcggcgtggtgatcgtgaactgcagcatcttcacgcccacgccggtgttcacggacatgatcgtgaacaggtacaagctgcgcgccgacgtgcggagcgtgaacctgtccgggatggggtgcagcgcggcgctcatctcgatcggtctcgccaggaacatgctgcaggtggcgccgccgggcacgcacgcgctgatcgtgtccacggagatcctctcgtcgcagtactacgtcggcatggaccgctccatgctcctgcccaactgcctcttccgcatgggcgccgccgccatgatcatgtccaacaccgcggcccgaggcgcgcggttccggctcgcccgcgtcgtgcgcacggtggcctccgcgcgggacgccgcctaccggtgcgtgttccaggtggaggacgaggagagcaacacggggatccggctctccaaggacctcgtgcccactgccgcccagaccctgaaaagcaacatcgtcgccttcgggcccctggtcctgcctgcctcggagaagctcctcgtcgctctgtccatcctgaggcggaggctagtacagagcagccgggggagggtgtaccgcccggacttccgcaccgcgttcgagcacttctgcatccacgccggcgggcgcggggtcatcgacgaggtgcagcgcggcctcggcctctccgacgaggacgtggaggcgtcgcggatgacgctgcaccggttcgggaacacgtccagcagttcggtggtgtacgagctggcgtacatcgaggccaagggcagcatgaggaagggagaccgcgtgtggatgatctccttcggcgccggcttcgactgcagcagcgtggcgtgggagtgcatcgagcccgccgccgacgctgctgggccgtgggccgactgtatccaccgctacccagtgcagctccctaaattgatggaggcccttgattgaatccgtacatgtagacgtgaagtggcataatcaatcaatgttgtactgtatctttaatgtcc

SEQ ID NO: 1638 - protein, 514 aa, Zea mays subsp. mays
  peptide (1)..(514): Ceres Seq. ID no. 12351897
IISSTLSHASEDSADTKKIEMAPGSSSSRKAKALKASYRLVADNFLAVLAMVSVVAVLFAAWPISIEDLACRLHAVRPLHVLTAAILTAALAKLRRMSRPSDVYLVEYGCFWPKPCFRAPFATCLEHVRLLPYLVNEDDISWGWRLLQRSGIGEETCVPYAYHYLPPDRSFRASLDETELVIFSAVDDVFARTTAVTPADIGVVIVNCSIFTPTPVFTDMIVNRYKLRADVRSVNLSGMGCSAALISIGLARNMLQVAPPGTHALIVSTEILSSQYYVGMDRSMLLPNCLFRMGAAAMIMSNTAARGARFRLARVVRTVASARDAAYRCVFQVEDEESNTGIRLSKDLVPTAAQTLKSNIVAFGPLVLPASEKLLVALSILRRRLVQSSRGRVYRPDFRTAFEHFCIHAGGRGVIDEVQRGLGLSDEDVEASRMTLHRFGNTSSSSVVYELAYIEAKGSMRKGDRVWMISFGAGFDCSSVAWECIEPAADAAGPWADCIHRYPVQLPKLMEALD

SEQ ID NO: 1639 - protein, 494 aa, Zea mays subsp. mays
  peptide (1)..(494): Ceres Seq. ID no. 12351898
MAPGSSSSRKAKALKASYRLVADNFLAVLAMVSVVAVLFAAWPISIEDLACRLHAVRPLHVLTAAILTAALAKLRRMSRPSDVYLVEYGCFWPKPCFRAPFATCLEHVRLLPYLVNEDDISWGWRLLQRSGIGEETCVPYAYHYLPPDRSFRASLDETELVIFSAVDDVFARTTAVTPADIGVVIVNCSIFTPTPVFTDMIVNRYKLRADVRSVNLSGMGCSAALISIGLARNMLQVAPPGTHALIVSTEILSSQYYVGMDRSMLLPNCLFRMGAAAMIMSNTAARGARFRLARVVRTVASARDAAYRCVFQVEDEESNTGIRLSKDLVPTAAQTLKSNIVAFGPLVLPASEKLLVALSILRRRLVQSSRGRVYRPDFRTAFEHFCIHAGGRGVIDEVQRGLGLSDEDVEASRMTLHRFGNTSSSSVVYELAYIEAKGSMRKGDRVWMISFGAGFDCSSVAWECIEPAADAAGPWADCIHRYPVQLPKLMEALD

SEQ ID NO: 1640 - protein, 464 aa, Zea mays subsp. mays
  peptide (1)..(464): Ceres Seq. ID no. 12351899
MVSVVAVLFAAWPISIEDLACRLHAVRPLHVLTAAILTAALAKLRRMSRPSDVYLVEYGCFWPKPCFRAPFATCLEHVRLLPYLVNEDDISWGWRLLQRSGIGEETCVPYAYHYLPPDRSFRASLDETELVIFSAVDDVFARTTAVTPADIGVVIVNCSIFTPTPVFTDMIVNRYKLRADVRSVNLSGMGCSAALISIGLARNMLQVAPPGTHALIVSTEILSSQYYVGMDRSMLLPNCLFRMGAAAMIMSNTAARGARFRLARVVRTVASARDAAYRCVFQVEDEESNTGIRLSKDLVPTAAQTLKSNIVAFGPLVLPASEKLLVALSILRRRLVQSSRGRVYRPDFRTAFEHFCIHAGGRGVIDEVQRGLGLSDEDVEASRMTLHRFGNTSSSSVVYELAYIEAKGSMRKGDRVWMISFGAGFDCSSVAWECIEPAADAAGPWADCIHRYPVQLPKLMEALD

SEQ ID NO: 1641 - DNA, 1024 bp, Zea mays subsp. mays
  misc_feature (1)..(1024): Ceres Seq. ID no. 12341440
  misc_feature (1)..(1024): Ortholog of  Ceres SEQ ID NO 14313662 as cited in SEQ ID NO 54162
  misc_feature (1)..(1024): Ortholog of  Ceres SEQ ID NO 14302123 as cited in SEQ ID NO 0
  misc_feature (1)..(1024): Ortholog of  Ceres SEQ ID NO 15179452 as cited in SEQ ID NO 0
ataaattcctccgctccccttcgccgcttcctgtcgcgccgccgctcccctcccaacccactagctcaaaaccctagagctctcgcctgctcgcctccgccgccggagcgagctccccatcttcatccgtcaaccatggcgacccagatcagcaagaagaagaagttcgtcagcgacggtgttttctacgccgagctcaatgagatgctgacgcgggagctggcggaggacggctactctggcgtggaggtgcgcgtcacgccgatgcgcacggagatcatcatccgcgccacgcgcacgcagaacgtgctcggcgagaagggccgtaggatcagggagctcacctccgtcgtccagaagaggttcaacttccctgagaatggcgttgagctttatgccgagaaggtcgtcaaccgtgggctctgtgccatcgcgcaggccgagtccctccgttacaagctcctcggtggccttgccgtccgcagggcttgctacggtgttcttcgttatgttatggagagtggtgccaagggttgtgaggtgatcgtgagtggaaagctcagggcccaaagagccaagtccatgaagttcaaggatggctacatgatctcatctggtcaaccagtgaacgagtacattgactcggctgtgagacacgttcttctcagacagggtgttcttggcatcaaggtgaagatcatgcttgactgggacccgaagggcaaggttggcccgatcactcctcttccggacctggtgaccatccacaccccgaaggacgaggacgagccgcgccctccggtcttggcacctcctgaggtgtaaggtcccaactgtgtccttgaaatggcagtttgatcgggtcctagataggtttctatcttacgataaggacaatgctaaggcagttggttaccttaatctttatggacagatgctatgtgttgcttctgtggcacttttgtttaagctaagttttgcggagacaagatacttatatatgttcccgatgaaattatggttc

SEQ ID NO: 1642 - protein, 274 aa, Zea mays subsp. mays
  peptide (1)..(274): Ceres Seq. ID no. 12341441
INSSAPLRRFLSRRRSPPNPLAQNPRALACSPPPPERAPHLHPSTMATQISKKKKFVSDGVFYAELNEMLTRELAEDGYSGVEVRVTPMRTEIIIRATRTQNVLGEKGRRIRELTSVVQKRFNFPENGVELYAEKVVNRGLCAIAQAESLRYKLLGGLAVRRACYGVLRYVMESGAKGCEVIVSGKLRAQRAKSMKFKDGYMISSGQPVNEYIDSAVRHVLLRQGVLGIKVKIMLDWDPKGKVGPITPLPDLVTIHTPKDEDEPRPPVLAPPEV

SEQ ID NO: 1643 - protein, 229 aa, Zea mays subsp. mays
  peptide (1)..(229): Ceres Seq. ID no. 12341442
MATQISKKKKFVSDGVFYAELNEMLTRELAEDGYSGVEVRVTPMRTEIIIRATRTQNVLGEKGRRIRELTSVVQKRFNFPENGVELYAEKVVNRGLCAIAQAESLRYKLLGGLAVRRACYGVLRYVMESGAKGCEVIVSGKLRAQRAKSMKFKDGYMISSGQPVNEYIDSAVRHVLLRQGVLGIKVKIMLDWDPKGKVGPITPLPDLVTIHTPKDEDEPRPPVLAPPEV

SEQ ID NO: 1644 - protein, 206 aa, Zea mays subsp. mays
  peptide (1)..(206): Ceres Seq. ID no. 12341443
MLTRELAEDGYSGVEVRVTPMRTEIIIRATRTQNVLGEKGRRIRELTSVVQKRFNFPENGVELYAEKVVNRGLCAIAQAESLRYKLLGGLAVRRACYGVLRYVMESGAKGCEVIVSGKLRAQRAKSMKFKDGYMISSGQPVNEYIDSAVRHVLLRQGVLGIKVKIMLDWDPKGKVGPITPLPDLVTIHTPKDEDEPRPPVLAPPEV

SEQ ID NO: 1645 - DNA, 1515 bp, Zea mays subsp. mays
  misc_feature (1)..(1515): Ceres Seq. ID no. 12405850
  misc_feature (1)..(1515): Ortholog of  Ceres SEQ ID NO 13598282 as cited in SEQ ID NO 68138
agtcagtcgcagttcacaactgcgactaaaaaccatctttggggcccttcgccgcgatttgcttcgcttctcggactaggttaagttgccttttcgattctcagaaaaagactggctctgcactcggataattttaaaatggatagtgcacagcagcccactggggaattgaacaattcgttcgatactcttatggtttctggaggtgaccagagtcgacagcctcaggatgctggcaatgaaacgagcttcacgaattggaaagacctccccatggagctgctcctgcgtatcatttcactagttggagatgacaggatagtcattgtggcctccggtgtatgcacaggatggcgtgacaccttggggtggggggttgcaaatctttcactatcatggtgccaggaccgcatgaatgacttggtgatatcactggctcacaaattcacgaagctgcaagttctatctctacgccagatcaggcctcagctagaagacagcggcgtggaggccgtggcaaaccactgccacgacctgcgcgagctggatctcagcagaagcttcaggctgagcgaccggtccttgtacgccctggcgcacgggtgccctcagcttaccaggctcaacatcagcgggtgctccagtttcagcgacgtggcgctcgtgttcctctccagccagtgcgggaacctgagatgcctgaacctgtgcgggtgtgtgagggcggcctctgacagagcgctacaggccatcgcctgttactgtggccagctgcagtcgttgaacctgggctggtgtgatggcatcactgacaagggggtgaccagcctggcttcgggatgccctgaactcagggccgtcgacctgtgcggctgtgttcttataacagatgagagcgtggttgcgctggcgaacggctgccttcacctgcgctccctgggtctctactactgccagaacatcacggaccgcgccatgtactccctggccgccaacagccgcgtgaggagtcggggccggggctgggacgcgacagcgaagagcggcggcggtggcaaggaccgggagcgggacggactggcgagcctgaacatcagccagtgcacggcgctgaccccgcccgcggtgcaggcggtgtgcgactcgttcccggcgctgcacacgtgcccggagcggcactcgctcaacatcagcgggtgcctcagcctaacctccgtgcactgcgcctgtgcgctgcaccctcaccggggccgggcgagtcatcctctccaaccacgcctactgaacgcaatgcgtgaataggcggcgatgctcagatgtgtggataggccgttcaaccgtgagcgacggtgtccgctgtttatgtgaggtgcttgttttgtgtttaggcgtcaaggcgtgtacttggggtctctactctctagggaaccgtgtagaagcaaccgagttgagttcatcgtctgtaaaaacatggactgtatctgactatctgttgtcatgtcttttgagatcttt

SEQ ID NO: 1646 - protein, 387 aa, Zea mays subsp. mays
  peptide (1)..(387): Ceres Seq. ID no. 12405851
MDSAQQPTGELNNSFDTLMVSGGDQSRQPQDAGNETSFTNWKDLPMELLLRIISLVGDDRIVIVASGVCTGWRDTLGWGVANLSLSWCQDRMNDLVISLAHKFTKLQVLSLRQIRPQLEDSGVEAVANHCHDLRELDLSRSFRLSDRSLYALAHGCPQLTRLNISGCSSFSDVALVFLSSQCGNLRCLNLCGCVRAASDRALQAIACYCGQLQSLNLGWCDGITDKGVTSLASGCPELRAVDLCGCVLITDESVVALANGCLHLRSLGLYYCQNITDRAMYSLAANSRVRSRGRGWDATAKSGGGGKDRERDGLASLNISQCTALTPPAVQAVCDSFPALHTCPERHSLNISGCLSLTSVHCACALHPHRGRASHPLQPRLLNAMRE

SEQ ID NO: 1647 - protein, 369 aa, Zea mays subsp. mays
  peptide (1)..(369): Ceres Seq. ID no. 12405852
MVSGGDQSRQPQDAGNETSFTNWKDLPMELLLRIISLVGDDRIVIVASGVCTGWRDTLGWGVANLSLSWCQDRMNDLVISLAHKFTKLQVLSLRQIRPQLEDSGVEAVANHCHDLRELDLSRSFRLSDRSLYALAHGCPQLTRLNISGCSSFSDVALVFLSSQCGNLRCLNLCGCVRAASDRALQAIACYCGQLQSLNLGWCDGITDKGVTSLASGCPELRAVDLCGCVLITDESVVALANGCLHLRSLGLYYCQNITDRAMYSLAANSRVRSRGRGWDATAKSGGGGKDRERDGLASLNISQCTALTPPAVQAVCDSFPALHTCPERHSLNISGCLSLTSVHCACALHPHRGRASHPLQPRLLNAMRE

SEQ ID NO: 1648 - protein, 342 aa, Zea mays subsp. mays
  peptide (1)..(342): Ceres Seq. ID no. 12405853
MELLLRIISLVGDDRIVIVASGVCTGWRDTLGWGVANLSLSWCQDRMNDLVISLAHKFTKLQVLSLRQIRPQLEDSGVEAVANHCHDLRELDLSRSFRLSDRSLYALAHGCPQLTRLNISGCSSFSDVALVFLSSQCGNLRCLNLCGCVRAASDRALQAIACYCGQLQSLNLGWCDGITDKGVTSLASGCPELRAVDLCGCVLITDESVVALANGCLHLRSLGLYYCQNITDRAMYSLAANSRVRSRGRGWDATAKSGGGGKDRERDGLASLNISQCTALTPPAVQAVCDSFPALHTCPERHSLNISGCLSLTSVHCACALHPHRGRASHPLQPRLLNAMRE

SEQ ID NO: 1649 - DNA, 1548 bp, Zea mays subsp. mays
  misc_feature (1)..(1548): Ceres Seq. ID no. 12341545
  misc_feature (1)..(1548): Ortholog of  Ceres SEQ ID NO 15170447 as cited in SEQ ID NO 52849
  misc_feature (1)..(1548): Ortholog of  Ceres SEQ ID NO 13589042 as cited in SEQ ID NO 60626
  misc_feature (1)..(1548): Ortholog of  Ceres SEQ ID NO 14302887 as cited in SEQ ID NO 66146
gtgtctcttccccccaccactccgccaccggcgccgaagcagagcagccatggccggctccgagcagcgcgtcgtcgccgtcatcatggtcggcggccccaccaaagggacgcggttccggccgctgtcgctgaacgtgcccaagccgctcttccctatcgccggccagcccatggtgcaccaccccatctccgcctgcagccggatcccccacctggcacagatatacctcatcgggttctatgaggagcgggagttcgcgctctatgtctcgtctatctcccacgagctcaggatccctgtcaggtacctacgagaggataagcctcacgggtcagctggagggctctacagctttagagattacatcatggaagacagtccgtcacacatagttctgctgaattgcgacgtctgttctagcttccctcttccagacatgctagaggcccataaaaagtatggaggaatgggtactttactagtcaacaaggtatcagcagagtcagcaaaccagttcggcgagttggtagctgatcctgaaacaaatgaactgctgcactatacggaaaagccggagacttttgtgagtgatctcataaattgcggagtatatatatttactcccgatatccttagcgccattgaggatgtcttaaaacagaaaaaagacagagcaaatttgcggcgtgtatctagcattgaagctcttcattcagcaactaaggcgcttccaccagactttgttaggttagatcaagacattttatcccctcgagcgggaaagaaggagctgtacacataccagacacttgatttctgggaacagatcaaaaccccagggatgtctttgagatgctctgggttatatctctctcagtttcgccatacctctcctcatcttttagcctcaggagatggcaaaagaactgccactattgttggcgatgtctatatctatccatctgccaaggtgcatcctacttcaaagattggcccaaatgtctctatatcagcaaatgcacgcgttggagctggtgccaggcttatcaattgcataattctggatgatgttgaaattatggaaaatgctgttgttatacattcaattgtagggtggaaatcatccattggaaaatggtcacgtgtacagggcgaaggtgatcacaatgccaaacttggcattactattcttggtgaagccgttgatgttgaagatgaagtagttgtagttaacagcatcgtgctcccaaataaaactctcaatgtcagtgtccaagaggagatcatcctataataaccatcgtttttttttgtctaattccatataacgtctgagtaccaatcacatagtttaagtttattcgttctcaccatgtaatgtaaccttccattagattgagattattagtttgcatttatacctgtcttgcagcatgacactgcacaatcttgacttgctatgctactttggttagcgattgtggtgatgtaaaaaatgtacaaacaggtgacaccattttttgtgagaatgactcaagacattac

SEQ ID NO: 1650 - protein, 431 aa, Zea mays subsp. mays
  peptide (1)..(431): Ceres Seq. ID no. 12341546
CLFPPPLRHRRRSRAAMAGSEQRVVAVIMVGGPTKGTRFRPLSLNVPKPLFPIAGQPMVHHPISACSRIPHLAQIYLIGFYEEREFALYVSSISHELRIPVRYLREDKPHGSAGGLYSFRDYIMEDSPSHIVLLNCDVCSSFPLPDMLEAHKKYGGMGTLLVNKVSAESANQFGELVADPETNELLHYTEKPETFVSDLINCGVYIFTPDILSAIEDVLKQKKDRANLRRVSSIEALHSATKALPPDFVRLDQDILSPRAGKKELYTYQTLDFWEQIKTPGMSLRCSGLYLSQFRHTSPHLLASGDGKRTATIVGDVYIYPSAKVHPTSKIGPNVSISANARVGAGARLINCIILDDVEIMENAVVIHSIVGWKSSIGKWSRVQGEGDHNAKLGITILGEAVDVEDEVVVVNSIVLPNKTLNVSVQEEIIL

SEQ ID NO: 1651 - protein, 415 aa, Zea mays subsp. mays
  peptide (1)..(415): Ceres Seq. ID no. 12341547
MAGSEQRVVAVIMVGGPTKGTRFRPLSLNVPKPLFPIAGQPMVHHPISACSRIPHLAQIYLIGFYEEREFALYVSSISHELRIPVRYLREDKPHGSAGGLYSFRDYIMEDSPSHIVLLNCDVCSSFPLPDMLEAHKKYGGMGTLLVNKVSAESANQFGELVADPETNELLHYTEKPETFVSDLINCGVYIFTPDILSAIEDVLKQKKDRANLRRVSSIEALHSATKALPPDFVRLDQDILSPRAGKKELYTYQTLDFWEQIKTPGMSLRCSGLYLSQFRHTSPHLLASGDGKRTATIVGDVYIYPSAKVHPTSKIGPNVSISANARVGAGARLINCIILDDVEIMENAVVIHSIVGWKSSIGKWSRVQGEGDHNAKLGITILGEAVDVEDEVVVVNSIVLPNKTLNVSVQEEIIL

SEQ ID NO: 1652 - protein, 403 aa, Zea mays subsp. mays
  peptide (1)..(403): Ceres Seq. ID no. 12341548
MVGGPTKGTRFRPLSLNVPKPLFPIAGQPMVHHPISACSRIPHLAQIYLIGFYEEREFALYVSSISHELRIPVRYLREDKPHGSAGGLYSFRDYIMEDSPSHIVLLNCDVCSSFPLPDMLEAHKKYGGMGTLLVNKVSAESANQFGELVADPETNELLHYTEKPETFVSDLINCGVYIFTPDILSAIEDVLKQKKDRANLRRVSSIEALHSATKALPPDFVRLDQDILSPRAGKKELYTYQTLDFWEQIKTPGMSLRCSGLYLSQFRHTSPHLLASGDGKRTATIVGDVYIYPSAKVHPTSKIGPNVSISANARVGAGARLINCIILDDVEIMENAVVIHSIVGWKSSIGKWSRVQGEGDHNAKLGITILGEAVDVEDEVVVVNSIVLPNKTLNVSVQEEIIL

SEQ ID NO: 1653 - DNA, 1522 bp, Zea mays subsp. mays
  misc_feature (1)..(1522): Ceres Seq. ID no. 12411062
  misc_feature (1)..(1522): Ortholog of  Ceres SEQ ID NO 14311938 as cited in SEQ ID NO 51615
  misc_feature (1)..(1522): Ortholog of  Ceres SEQ ID NO 14302059 as cited in SEQ ID NO 68322
ttccgctcgtcccgccaatcgccattattaacagctccgcggtccctccctccctcggtcggtcggcgtcggtccctccctccccacccagttagtcctcagcctatcccgtgcccgcgcagagcaccgcctctgctcgacccaccaccctctgtgcagagttaattaaccttgaggtttccgattgcccttcccttccgctcctctcgcccattcgcggcgagattcagcggcaaggatgcgcctgcacgcggaggtgcgggatgagatggaggaggggagcgaggagggggctgtgacggcttcggcggggctgtcgccaccgccactcatcggtgcggcggcgccggttccccggctagtggtggggttcgcccctcacgaagaagaaggtgaagagcttcctgcagcccaagctgctcctgctggccaggaagaatggaatcagttttgtatctattgatgagtctcttcccctctcagaacaaggcccttttgatgttattttacacaagattactaggaaggagtggcagaaggttctggaggactatcacgaagaacatccagaagttactgtccttgacccaccaaatgctatcgagcatctgaacaatcgacaatcaatgcttgaagaagtagctgatttgaacctgtcaaatttctatggagaagtttgtatcccacgccagctggtcattacgaaagatccatcctctataccaacttctgtagctatggctggactaactttgcccttggttgccaagccattggttgttgatgggacgtctaaaggtcatgaactatatcttgcatatgacgaggcatccttgtcaatgcttgatccgcctctggttctacaggaattcataaaccatggcgggatcctctttaaggtgtatatcattggtgaaacaatacaggttgtccgcaggttctctcttcctgatgttaacacatatgacttactaaacaacgttggcatctatcgattgccaagagtttcatgtgctgcagctagtgcggatgatgcagatcttgaccctcttattgcagagcttcctccaaggccacttctagagaaactgggcagggagcttcgtggccggcttggtttgagattgttcaatatagatatgattagagaacttggaaccaaagatcggtactacataattgatatcaactacttcccaggttacggcaaaatgccaggatatgagcgcatgttcacagacttcttactaagtctcgcacaaagcaagtacaaaaggtatgcttccccaccgcgccaatgtacatttgctggagacataagcataagcgggaggcttgaggaagttggcaagtctcagtgtgtgtgttcaaaatcggtggcacatgctggactggagtaggaaataaccaaggaaacgcttggatgcgctgtactcatgttgtaaaatgtttaactgaatgaacaccttcctcgtgatggctccctccatcgtaatttggcaaccatgagaattaattctgc

SEQ ID NO: 1654 - protein, 257 aa, Zea mays subsp. mays
  peptide (1)..(257): Ceres Seq. ID no. 12411063
MLEEVADLNLSNFYGEVCIPRQLVITKDPSSIPTSVAMAGLTLPLVAKPLVVDGTSKGHELYLAYDEASLSMLDPPLVLQEFINHGGILFKVYIIGETIQVVRRFSLPDVNTYDLLNNVGIYRLPRVSCAAASADDADLDPLIAELPPRPLLEKLGRELRGRLGLRLFNIDMIRELGTKDRYYIIDINYFPGYGKMPGYERMFTDFLLSLAQSKYKRYASPPRQCTFAGDISISGRLEEVGKSQCVCSKSVAHAGLE

SEQ ID NO: 1655 - protein, 220 aa, Zea mays subsp. mays
  peptide (1)..(220): Ceres Seq. ID no. 12411064
MAGLTLPLVAKPLVVDGTSKGHELYLAYDEASLSMLDPPLVLQEFINHGGILFKVYIIGETIQVVRRFSLPDVNTYDLLNNVGIYRLPRVSCAAASADDADLDPLIAELPPRPLLEKLGRELRGRLGLRLFNIDMIRELGTKDRYYIIDINYFPGYGKMPGYERMFTDFLLSLAQSKYKRYASPPRQCTFAGDISISGRLEEVGKSQCVCSKSVAHAGLE

SEQ ID NO: 1656 - protein, 186 aa, Zea mays subsp. mays
  peptide (1)..(186): Ceres Seq. ID no. 12411065
MLDPPLVLQEFINHGGILFKVYIIGETIQVVRRFSLPDVNTYDLLNNVGIYRLPRVSCAAASADDADLDPLIAELPPRPLLEKLGRELRGRLGLRLFNIDMIRELGTKDRYYIIDINYFPGYGKMPGYERMFTDFLLSLAQSKYKRYASPPRQCTFAGDISISGRLEEVGKSQCVCSKSVAHAGLE

SEQ ID NO: 1657 - DNA, 1549 bp, Zea mays subsp. mays
  misc_feature (1)..(1549): Ceres Seq. ID no. 12351900
  misc_feature (1)..(1549): Ortholog of  Ceres SEQ ID NO 15177320 as cited in SEQ ID NO 52645
  misc_feature (1)..(1549): Ortholog of  Ceres SEQ ID NO 15171359 as cited in SEQ ID NO 57279
  misc_feature (1)..(1549): Ortholog of  Ceres SEQ ID NO 14313840 as cited in SEQ ID NO 59568
  misc_feature (1)..(1549): Ortholog of  Ceres SEQ ID NO 15168502 as cited in SEQ ID NO 60095
  misc_feature (1)..(1549): Ortholog of  Ceres SEQ ID NO 14314084 as cited in SEQ ID NO 63256
  misc_feature (1)..(1549): Ortholog of  Ceres SEQ ID NO 14303091 as cited in SEQ ID NO 66369
actcgacaccgcacggcctcaagcagaggaagctttccgcccgggaacgccatggggtcgcttcctctccttgctgcctgctgctccctcctgctcacggtcgcagctcctgcccgggacagcactaccagcgtctgcgcttcgcaaatcggcgatttcccgcaccggaacagttcgggcctccacctgacgctgcaccacccgcagagcccctgctcgccggcgccgctcccgtccgacctccccttctccacagtcctcacccacgacgatgcgcgcgtcgcccacctcgcgtcgcgactcgccgccagtgatccgccgtcccgccgtccgacatcactccgcaagcagaagaaggccgccggtggtgcttccggcggccaccacctcgacgacgactccctggcctccgtgcctctctcgcccggaacgtcagtgggcgtggggaactacgttacccagctcggcctcggcacgccgtccacctcctacgcaatggtagtcgacacgggctcctcgctcacctggctgcagtgctcgccttgcgtcgtgtcgtgccaccgccaggtggggccgctcttcgaccccagggcctccagcacctacgcctccgtgcgctgctcggcgtcgcagtgcgacgagctccaggccgccacgctcaacccgtccgcctgctccgcctcaaacgtctgcatctaccaggccagctacggcgacagctccttctccgtcggctccctcagcacggacaccgtctccttcggctccacccgctacccgagcttctactacggctgcggccaggacaatgaggggctcttcggccgctcggcggggctcatcggcctcgcgcgcaacaagctctcgctgctctaccagctcgcgcccagcctcggctactccttctcctattgcctcccgacggctgcgtcaacggggtatctctccatcgggccctacaacacggggcactactactcgtacacgcccatggcctcgagctctctcgacgcctcgctctacttcatcaccctgtccgggatgtcggtcggcgggagcccactcgcggtctcgccgtcggagtacagcagcctgcccacgatcatagactcgggcacggtgatcacgcgcctgccgacggctgtgcacacggcgctcagcaaggcggtggcccaggccatggcaggggcgcagcgcgcaccggccttctccatcctggacacgtgcttcgagggccaggcgtcgcagctgcgcgtgcccaccgtggccatggcgttcgcgggcggcgcctccatgaagctgacgacgcggaacgtgctcatagacgtcgacgactccacgacgtgcctggcgtttgcgcccaccgacagcacggccatcatcggcaacacgcagcagcagacgttcagcgtcatctacgacgtcgcgcaatccaggatcggcttctcggcaggcggatgcagctgaatagctgatgggtgaaaagtgaaaactgattattgagctctatggagtgggcagctcaagcttggtaatagaaaatgcgtac

SEQ ID NO: 1658 - protein, 488 aa, Zea mays subsp. mays
  peptide (1)..(488): Ceres Seq. ID no. 12351901
TRHRTASSRGSFPPGNAMGSLPLLAACCSLLLTVAAPARDSTTSVCASQIGDFPHRNSSGLHLTLHHPQSPCSPAPLPSDLPFSTVLTHDDARVAHLASRLAASDPPSRRPTSLRKQKKAAGGASGGHHLDDDSLASVPLSPGTSVGVGNYVTQLGLGTPSTSYAMVVDTGSSLTWLQCSPCVVSCHRQVGPLFDPRASSTYASVRCSASQCDELQAATLNPSACSASNVCIYQASYGDSSFSVGSLSTDTVSFGSTRYPSFYYGCGQDNEGLFGRSAGLIGLARNKLSLLYQLAPSLGYSFSYCLPTAASTGYLSIGPYNTGHYYSYTPMASSSLDASLYFITLSGMSVGGSPLAVSPSEYSSLPTIIDSGTVITRLPTAVHTALSKAVAQAMAGAQRAPAFSILDTCFEGQASQLRVPTVAMAFAGGASMKLTTRNVLIDVDDSTTCLAFAPTDSTAIIGNTQQQTFSVIYDVAQSRIGFSAGGCS

SEQ ID NO: 1659 - protein, 471 aa, Zea mays subsp. mays
  peptide (1)..(471): Ceres Seq. ID no. 12351902
MGSLPLLAACCSLLLTVAAPARDSTTSVCASQIGDFPHRNSSGLHLTLHHPQSPCSPAPLPSDLPFSTVLTHDDARVAHLASRLAASDPPSRRPTSLRKQKKAAGGASGGHHLDDDSLASVPLSPGTSVGVGNYVTQLGLGTPSTSYAMVVDTGSSLTWLQCSPCVVSCHRQVGPLFDPRASSTYASVRCSASQCDELQAATLNPSACSASNVCIYQASYGDSSFSVGSLSTDTVSFGSTRYPSFYYGCGQDNEGLFGRSAGLIGLARNKLSLLYQLAPSLGYSFSYCLPTAASTGYLSIGPYNTGHYYSYTPMASSSLDASLYFITLSGMSVGGSPLAVSPSEYSSLPTIIDSGTVITRLPTAVHTALSKAVAQAMAGAQRAPAFSILDTCFEGQASQLRVPTVAMAFAGGASMKLTTRNVLIDVDDSTTCLAFAPTDSTAIIGNTQQQTFSVIYDVAQSRIGFSAGGCS

SEQ ID NO: 1660 - protein, 323 aa, Zea mays subsp. mays
  peptide (1)..(323): Ceres Seq. ID no. 12351903
MVVDTGSSLTWLQCSPCVVSCHRQVGPLFDPRASSTYASVRCSASQCDELQAATLNPSACSASNVCIYQASYGDSSFSVGSLSTDTVSFGSTRYPSFYYGCGQDNEGLFGRSAGLIGLARNKLSLLYQLAPSLGYSFSYCLPTAASTGYLSIGPYNTGHYYSYTPMASSSLDASLYFITLSGMSVGGSPLAVSPSEYSSLPTIIDSGTVITRLPTAVHTALSKAVAQAMAGAQRAPAFSILDTCFEGQASQLRVPTVAMAFAGGASMKLTTRNVLIDVDDSTTCLAFAPTDSTAIIGNTQQQTFSVIYDVAQSRIGFSAGGCS

SEQ ID NO: 1661 - DNA, 764 bp, Zea mays subsp. mays
  misc_feature (1)..(764): Ceres Seq. ID no. 12406283
  misc_feature (1)..(764): Ortholog of  Ceres SEQ ID NO 13656408 as cited in SEQ ID NO 65810
  misc_feature (1)..(764): Ortholog of  Ceres SEQ ID NO 14305939 as cited in SEQ ID NO 0
gtcgagtctaaccctagcgcgcgccgccacacctgccgttgctaccgccccgtacctcgcttgctttcccgtcgccgaaatgacgaagcgcaccaagaaggctggaattgttggcaaatatggaaccaggtatggcgctagcttgcgtaagcaaatcaagaagatggaggtatctcagcactccaagtacttctgcgagttttgtgggaagtttgctgtgaagaggaaagcagttggaatttggggatgcaaggactgtgggaaggtcaaggctggcggtgcttacaccatgaacactgctagtgcctcaaccagatcccgaaccccaacccgaaccatccaagccaggccctaaaccccaacctgaaccatccaagctagaacctcagccaggatctaaacctacaccggagccaaaaccctaaccagaaccatcgaagcggagccaccgtcgtctcttccaccaccatttggcacgggcgtcgtggaagggaactgagaggagcatagtggaaccgatcatcatcgtggatgccatctatagcttttggctatgactgataagtaatactgtttgtgtaagagtgagctctcttttttatatagggtgtgtgtattgtgtgtagtactatatttggacgatgtgtgtgtacccacctttttccgtgtgtttccatcagcatgcatccatgatccatgtatatgtcttgctaagtttgtattatcaatgaataaaaaaacatgcctttgtatgtcttgttttg

SEQ ID NO: 1662 - protein, 117 aa, Zea mays subsp. mays
  peptide (1)..(117): Ceres Seq. ID no. 12406284
SSLTLARAATPAVATAPYLACFPVAEMTKRTKKAGIVGKYGTRYGASLRKQIKKMEVSQHSKYFCEFCGKFAVKRKAVGIWGCKDCGKVKAGGAYTMNTASASTRSRTPTRTIQARP

SEQ ID NO: 1663 - protein, 91 aa, Zea mays subsp. mays
  peptide (1)..(91): Ceres Seq. ID no. 12406285
MTKRTKKAGIVGKYGTRYGASLRKQIKKMEVSQHSKYFCEFCGKFAVKRKAVGIWGCKDCGKVKAGGAYTMNTASASTRSRTPTRTIQARP

SEQ ID NO: 1664 - protein, 63 aa, Zea mays subsp. mays
  peptide (1)..(63): Ceres Seq. ID no. 12406286
MEVSQHSKYFCEFCGKFAVKRKAVGIWGCKDCGKVKAGGAYTMNTASASTRSRTPTRTIQARP

SEQ ID NO: 1665 - DNA, 1361 bp, Zea mays subsp. mays
  misc_feature (1)..(1361): Ceres Seq. ID no. 12407362
  misc_feature (1)..(1361): Ortholog of  Ceres SEQ ID NO 14306970 as cited in SEQ ID NO 53904
  misc_feature (1)..(1361): Ortholog of  Ceres SEQ ID NO 13597320 as cited in SEQ ID NO 63901
acaatccacagatacggtcataccgactgctgttgcccccgatttcccgtccgcccgcagtttctgaaggcacaccaaaacgatgagacctgtagacagtactctagtctctagtccacgaaatcctcgtacttgtgttggctggccctcgactagcgtgttgtagcacactagcgccacagtaatcgagagtgctctcccaggtcgaggtggtgtaggtgtttggcggagcagccggagcgttagaatctgaggaggagaagatggtggtgctggtggtggccacgacgtcggacccggcgtccattgggcccgccgccgccttcctcgccatgcccggatggtcccccggcccgcccatcgccgaggcgatggagagttttactaatgggaatgttcgattactgaagcatgagcgtagcattgtcgcagaggatgatcttgaccagcgatggcaggaagccactggagagtctgtttctgaggtcatattcctcagcaaacacactgcagtctccaaacgtccagcactcacagtgcatccaattggtgtgccacatctgaaggaggatgaaaccccaccccaaggaggaactcctggatgggcagcaattccaagtcctcgaattggaccttggctccggttgatgcaaaagatagctgtagaacaaggccttgttccagagtttgaggttacgcttgaggctactcaccatggaccagttaccagcacacccaccatgtttgttgagataggaagtacagaagaccactggggtcgacaagatgctgcacaggcaattgctctagttctatggaaaggtcttggtctggaggatggaaatgctgttggaacttggcagaggaattgtgaaaaggttctattaggtataggaggtggtcactatgttcctcgtcacatggatattgtcatcaaagatggtgtatgggtcggtcatttactctctggctactccttgccaatggacatgccgtcgcaagtaaatgtaaagagttctgaagaggttgctggaatgtggaagcactccatcaaagtttcttatgaagcaacaaaggcagcatttcctggtggtgaagttatcgcgcatcttgatcacaagagcttcaagggctggcagaagaatgctgttacatgcttcttgcaggagcagaacatcaggataggaaagcctagcgatttcctgtgacgtgctgcgacagcagtgctggacaggacaggtggaagaggctgtgaatgcttgagctgatttccctggtcacgcccacgcgcgcgctgaataaatatgagacgtatagtaagactcgatccttaatgcggttcaagagcttgaatttgccgc

SEQ ID NO: 1666 - protein, 314 aa, Zea mays subsp. mays
  peptide (1)..(314): Ceres Seq. ID no. 12407363
MVVLVVATTSDPASIGPAAAFLAMPGWSPGPPIAEAMESFTNGNVRLLKHERSIVAEDDLDQRWQEATGESVSEVIFLSKHTAVSKRPALTVHPIGVPHLKEDETPPQGGTPGWAAIPSPRIGPWLRLMQKIAVEQGLVPEFEVTLEATHHGPVTSTPTMFVEIGSTEDHWGRQDAAQAIALVLWKGLGLEDGNAVGTWQRNCEKVLLGIGGGHYVPRHMDIVIKDGVWVGHLLSGYSLPMDMPSQVNVKSSEEVAGMWKHSIKVSYEATKAAFPGGEVIAHLDHKSFKGWQKNAVTCFLQEQNIRIGKPSDFL

SEQ ID NO: 1667 - protein, 291 aa, Zea mays subsp. mays
  peptide (1)..(291): Ceres Seq. ID no. 12407364
MPGWSPGPPIAEAMESFTNGNVRLLKHERSIVAEDDLDQRWQEATGESVSEVIFLSKHTAVSKRPALTVHPIGVPHLKEDETPPQGGTPGWAAIPSPRIGPWLRLMQKIAVEQGLVPEFEVTLEATHHGPVTSTPTMFVEIGSTEDHWGRQDAAQAIALVLWKGLGLEDGNAVGTWQRNCEKVLLGIGGGHYVPRHMDIVIKDGVWVGHLLSGYSLPMDMPSQVNVKSSEEVAGMWKHSIKVSYEATKAAFPGGEVIAHLDHKSFKGWQKNAVTCFLQEQNIRIGKPSDFL

SEQ ID NO: 1668 - protein, 278 aa, Zea mays subsp. mays
  peptide (1)..(278): Ceres Seq. ID no. 12407365
MESFTNGNVRLLKHERSIVAEDDLDQRWQEATGESVSEVIFLSKHTAVSKRPALTVHPIGVPHLKEDETPPQGGTPGWAAIPSPRIGPWLRLMQKIAVEQGLVPEFEVTLEATHHGPVTSTPTMFVEIGSTEDHWGRQDAAQAIALVLWKGLGLEDGNAVGTWQRNCEKVLLGIGGGHYVPRHMDIVIKDGVWVGHLLSGYSLPMDMPSQVNVKSSEEVAGMWKHSIKVSYEATKAAFPGGEVIAHLDHKSFKGWQKNAVTCFLQEQNIRIGKPSDFL

SEQ ID NO: 1669 - DNA, 1454 bp, Zea mays subsp. mays
  misc_feature (1)..(1454): Ceres Seq. ID no. 12358320
  misc_feature (1)..(1454): Ortholog of  Ceres SEQ ID NO 14308787 as cited in SEQ ID NO 55614
  misc_feature (1)..(1454): Ortholog of  Ceres SEQ ID NO 13656547 as cited in SEQ ID NO 65935
atcgtcatatctccaggcggcgtcgtcaggcccttccgccgtcgtcacgcaaccgagctcggcacgcggcaacagccgcctccacacagcgcctgcaacctcctcctgcccacccatggccgccgctcgtcccggcaatctcagcgaattggagcagaaatggcataacggcggcgggcctgcgtgtgtgcttggcgtcggcacagccaacccagccaactgcgttcggcaagatgagtacactgactggtacttccgtatcaccaagagcgatcatcttacgcacaccaaagcaatcatgaggaaaacgtgtgagaagatgatggtaaaaaaacgctacttgcaagtcaatgaggagctcttcagtgtgcaccccgagttcttggaccctgcagctccaagtctgcaaggcaagctagctgtcgtggccggtgccatgccagggcttgtggctgctgccgcagagaaagccattgccgactggggccgcccggccggagacatcacccacctcgtcttcgccaccagttccagtgcccagctgcctcacattgacctccgcatcgctgcccttctcgggttaagcaccactgtgcagcgcacggtgatcggctttcacgcctgcagcggcagctccgccgcgctccgcgttgccaagtacatcgccgagaacaaccgcagcgcgcgagtcctcgtcgcttgcgcggacatgtggagcgtcatggatagttacgtagttcctaacgtagaccaccgctacggaattattggccacgcctttatcggtgacggtgccggcgcagttgtcgtcggaagccgaccacaggaacccgttgagcgcccaatcttcgagatggtatcagcgtcgcaggccacggtgcccggctcggagcgggcggttgccgtcgagctcaccaattgtggcctggagtatcgcctcgagtttggagatgtggcggcggaggtcggtggcaacatcgagcggtgcctgcttgacgcgctgtcgccgttgggcattggtagtgttggctggaataacctcttctgggtggtgcacccgggtggccccaggatcatggacaccttcacggcggctctcaagctacagcccgagaagctgtctgccagtcggcgtgtgcttagggagtacggcaacatcaccggcccgactctgatctttgtcctcgacgaggctatacgccgtcgccagctcgaccacgaggaggggagctgcgagtgggggctcatggtgggattgggcccggggttcaccattgatgtaatggcattgcgtgcgtgcagtggtaaatccacaccaacaccaagaatcaagagtagtctgtaagggagagccagaactcagaagcggccctttggttgtctgtttgtcagtgcgtttgtacgtgtcttcatcccaataaaataaataaataactgtggtttggctttgtggc

SEQ ID NO: 1670 - protein, 447 aa, Zea mays subsp. mays
  peptide (1)..(447): Ceres Seq. ID no. 12358321
SSYLQAASSGPSAVVTQPSSARGNSRLHTAPATSSCPPMAAARPGNLSELEQKWHNGGGPACVLGVGTANPANCVRQDEYTDWYFRITKSDHLTHTKAIMRKTCEKMMVKKRYLQVNEELFSVHPEFLDPAAPSLQGKLAVVAGAMPGLVAAAAEKAIADWGRPAGDITHLVFATSSSAQLPHIDLRIAALLGLSTTVQRTVIGFHACSGSSAALRVAKYIAENNRSARVLVACADMWSVMDSYVVPNVDHRYGIIGHAFIGDGAGAVVVGSRPQEPVERPIFEMVSASQATVPGSERAVAVELTNCGLEYRLEFGDVAAEVGGNIERCLLDALSPLGIGSVGWNNLFWVVHPGGPRIMDTFTAALKLQPEKLSASRRVLREYGNITGPTLIFVLDEAIRRRQLDHEEGSCEWGLMVGLGPGFTIDVMALRACSGKSTPTPRIKSSL

SEQ ID NO: 1671 - protein, 409 aa, Zea mays subsp. mays
  peptide (1)..(409): Ceres Seq. ID no. 12358322
MAAARPGNLSELEQKWHNGGGPACVLGVGTANPANCVRQDEYTDWYFRITKSDHLTHTKAIMRKTCEKMMVKKRYLQVNEELFSVHPEFLDPAAPSLQGKLAVVAGAMPGLVAAAAEKAIADWGRPAGDITHLVFATSSSAQLPHIDLRIAALLGLSTTVQRTVIGFHACSGSSAALRVAKYIAENNRSARVLVACADMWSVMDSYVVPNVDHRYGIIGHAFIGDGAGAVVVGSRPQEPVERPIFEMVSASQATVPGSERAVAVELTNCGLEYRLEFGDVAAEVGGNIERCLLDALSPLGIGSVGWNNLFWVVHPGGPRIMDTFTAALKLQPEKLSASRRVLREYGNITGPTLIFVLDEAIRRRQLDHEEGSCEWGLMVGLGPGFTIDVMALRACSGKSTPTPRIKSSL

SEQ ID NO: 1672 - protein, 348 aa, Zea mays subsp. mays
  peptide (1)..(348): Ceres Seq. ID no. 12358323
MRKTCEKMMVKKRYLQVNEELFSVHPEFLDPAAPSLQGKLAVVAGAMPGLVAAAAEKAIADWGRPAGDITHLVFATSSSAQLPHIDLRIAALLGLSTTVQRTVIGFHACSGSSAALRVAKYIAENNRSARVLVACADMWSVMDSYVVPNVDHRYGIIGHAFIGDGAGAVVVGSRPQEPVERPIFEMVSASQATVPGSERAVAVELTNCGLEYRLEFGDVAAEVGGNIERCLLDALSPLGIGSVGWNNLFWVVHPGGPRIMDTFTAALKLQPEKLSASRRVLREYGNITGPTLIFVLDEAIRRRQLDHEEGSCEWGLMVGLGPGFTIDVMALRACSGKSTPTPRIKSSL

SEQ ID NO: 1673 - DNA, 1722 bp, Zea mays subsp. mays
  misc_feature (1)..(1722): Ceres Seq. ID no. 12341549
  misc_feature (1)..(1722): Ortholog of  Ceres SEQ ID NO 13594209 as cited in SEQ ID NO 59089
  misc_feature (1)..(1722): Ortholog of  Ceres SEQ ID NO 15169599 as cited in SEQ ID NO 66096
  misc_feature (1)..(1722): Ortholog of  Ceres SEQ ID NO 12614124 as cited in SEQ ID NO 68392
  misc_feature (1)..(1722): Ortholog of  Ceres SEQ ID NO 14308011 as cited in SEQ ID NO 69234
atcgcctccacgaacaaaccacacaccccacctaccccggccggaccggcaggcagcacaacatggacctcgccctcctggagaaggccctgctgggcctgttcgccgcggctgtggtggccatcgccgtggccaagctgagcggcaagcggtaccgcctcccaccggggcccccgggcgcccccgtggttggaaactggctgcaggtgggcgacgacctgaaccaccgcaacctgatggccatggcgaagcggttcggcgacatcttcctgctgcgcatgggcgtgcgcaacctggtggtggtgtcgaccccggagctggccaaggaggtgctccacacgcagggcgtggagttcggctcccgcacccgcaacgtggtgttcgacatcttcacgggcaaggggcaggacatggtgttcacggtgtacggcgaccactggcgcaagatgcggcgcatcatgaccgtccccttcttcaccaacaaggtggtggcccagaaccgcgccgggtgggaggaggaggcccggctggtggtggaggacgtgaggaaggaccccgaggccgcggccggcggcgtcgtgctccgccgccgcctccagctgatgatgtacaacgacatgttccgcatcatgttcgaccgccggttcgacagcgagcacgaccccgctcttcaacaagctcaaggcgctcaacgcggagcgcagccgcctgtcgcagagcttcgagtacaactacggcgacttcatccccgtgctccgccccttcctccgcggctacctcaaccgctgccacgacctcaagacgcgccgcatgaagttcttcgaggacaacttcgtacaggagcgcaagaaggtgatggctcagactggtgagatccggtgcgccatggatcacatcctcgaggccgagaggaagggcgagatcaaccacgacaacgtcctctacatcgtcgagaacatcaacgtcgcagcgatcgagacgacactgtggtcgatcgagtggggcatcgccgagctggtgaaccacccggccatccagcacaagctccgggaggagctcgcctccgtgctgggcgccggcgtgcctgtgacggagccggacctcgagcgcctcccctaccttcaggccatcgtcaaggagacgctccgcctgcgcatggccatcccgctgctggtcccccacatgaacctcaacgacggcaagctcgccggctacgacatccccgccgagtccaagatcctcgtcaatgcctggttcctcgccaacgaccccaagaggtgggtgcggcccgacgagttccggcccgagcgcttcctggaggaggagaagtccgtggaggcccacggcaacgacttccgcttcgtgccctttggggtcggccgccggagctgccctgggatcatcctcgcgctgcctatcatcggcatcaccctgggccggctggtgcagaacttccagctgctgccgccgccggggctggacaagatcgacaccacggagaagcccggccagttcagcaaccagatcgccaagcatgccaccatcgtctgcaagcccctcgaggcctagaaatcaatgcctgtttcctgcacgcgcccccgcagatgaagcactatgtattttgtcttttttttgtgtgttgtgtttttttactaagaggagatgtatttcttgtttgtaaaatgcacttagtcaaatgagtcgagattatgttgatcatcg

SEQ ID NO: 1674 - protein, 289 aa, Zea mays subsp. mays
  peptide (1)..(289): Ceres Seq. ID no. 12341550
RLHEQTTHPTYPGRTGRQHNMDLALLEKALLGLFAAAVVAIAVAKLSGKRYRLPPGPPGAPVVGNWLQVGDDLNHRNLMAMAKRFGDIFLLRMGVRNLVVVSTPELAKEVLHTQGVEFGSRTRNVVFDIFTGKGQDMVFTVYGDHWRKMRRIMTVPFFTNKVVAQNRAGWEEEARLVVEDVRKDPEAAAGGVVLRRRLQLMMYNDMFRIMFDRRFDSEHDPALQQAQGAQRGAQPPVAELRVQLRRLHPRAPPLPPRLPQPLPRPQDAPHEVLRGQLRTGAQEGDGSDW

SEQ ID NO: 1675 - protein, 270 aa, Zea mays subsp. mays
  peptide (1)..(270): Ceres Seq. ID no. 12341551
SPPRTNHTPHLPRPDRQAAQHGPRPPGEGPAGPVRRGCGGHRRGQAERQAVPPPTGAPGRPRGWKLAAGGRRPEPPQPDGHGEAVRRHLPAAHGRAQPGGGVDPGAGQGGAPHAGRGVRLPHPQRGVRHLHGQGAGHGVHGVRRPLAQDAAHHDRPLLHQQGGGPEPRRVGGGGPAGGGGREEGPRGRGRRRRAPPPPPADDVQRHVPHHVRPPVRQRARPRSSTSSRRSTRSAAACRRASSTTTATSSPCSAPSSAATSTAATTSRRAA

SEQ ID NO: 1676 - protein, 269 aa, Zea mays subsp. mays
  peptide (1)..(269): Ceres Seq. ID no. 12341552
MDLALLEKALLGLFAAAVVAIAVAKLSGKRYRLPPGPPGAPVVGNWLQVGDDLNHRNLMAMAKRFGDIFLLRMGVRNLVVVSTPELAKEVLHTQGVEFGSRTRNVVFDIFTGKGQDMVFTVYGDHWRKMRRIMTVPFFTNKVVAQNRAGWEEEARLVVEDVRKDPEAAAGGVVLRRRLQLMMYNDMFRIMFDRRFDSEHDPALQQAQGAQRGAQPPVAELRVQLRRLHPRAPPLPPRLPQPLPRPQDAPHEVLRGQLRTGAQEGDGSDW

SEQ ID NO: 1677 - DNA, 1682 bp, Zea mays subsp. mays
  misc_feature (1)..(1682): Ceres Seq. ID no. 13577771
  misc_feature (1)..(1682): Ortholog of  Ceres SEQ ID NO 13599602 as cited in SEQ ID NO 0
gcacgagaccattacctagaacatcctaatcgaaaacccagcgccccccgcgcacacacgcacacactgtcttagtgtctttctctgcctttctttccctagcgccgcgccggcgccgccattcgatcagtcttcgtcggccgcttcgccggcgacagcatactccagtcggttggttttggcacttcggaccggcggccatggcttccgacggcatcggccccagagatgtatgtgttgttggggttgcacgcaccccaatgggcggtttccttggtgccttgtctcccttgcctgctacgaaacttggctctatagtaattcaagctgctctggaaagagcaaacgtggatccagccctcgtgcaggaggtctactttggaaacgtattgagtgctaatttggggcaagctcctgcaaggcaagctgctctgggtgccgggataccaaactctgttgtttgcaccactgttaacaaagtctgtgcatctggcatgaaagctactatgtttgcagcacagtcaattcaattgggtatcaatgatattgttgtggctggtggcatggaaagcatgtccaatgccccaaagtacattgctgaagctaggaaggggtctcgttttggtcatgacacacttgttgatgccatgcttaaggatgggctttgggatgtatacaatgattgtgccatgggaatgtgtgccgagctttgtgctgacaatcatgccctcacaagagaagaccaggatgcatttgctatccaaagcaacgagcgtggaattgctgctcgtgacagtggtgcttttgcatgggagattattccggttcaagttcctgttggtagaggaaaacccccaacattaattgaaagagatgaaagcctggataagtttgacccagtaaaactaaagaaacttcgcccaagtttcaaggagaatggtggtacagttacagctggaaatgcttctagtataagtgatggagctgctgcattagttttggtgagtgggcagaaggctcaagagcttggccttcaagtccttgcaaggatcaaaggttatgctgatgcagctcaagctccggagctttttacaaccactccaggcacttgcaataccaaaggctatcgcaaatgctggattagagtcatcccgtgttgatttctatgagattaatgaagccttttcggctgttgcgcttgcaaatcaaaagcttcttggaattccttcagaaaagattaatgttcatggaggagctgtatctttaggacatcctctcgggtgcagtggtgctcgcattttggttacccttattggtgttctcagggcgaagagtggcaagatcggagttgctggtgtctgcaacggtggaggcggagcatcagctcttgttctggagctcgcataagaaatctagaccttgtagttagcaaaagctccctgaggtgatcttgtagtcttattttccgttgtagtagtcccatagaacatttcttaatttaatttggcaataaagcgaagtcgtgcttctgttggttgcatagtagagtatcatgtaataagagcaatggggatgtttcatagacacagcttagatatttttgaggatgctacagaaatattttatatatttgtcatgtgtctcgtacatttatctaggtcacatcacctatcctgccgccc

SEQ ID NO: 1678 - protein, 319 aa, Zea mays subsp. mays
  peptide (1)..(319): Ceres Seq. ID no. 13577772
MASDGIGPRDVCVVGVARTPMGGFLGALSPLPATKLGSIVIQAALERANVDPALVQEVYFGNVLSANLGQAPARQAALGAGIPNSVVCTTVNKVCASGMKATMFAAQSIQLGINDIVVAGGMESMSNAPKYIAEARKGSRFGHDTLVDAMLKDGLWDVYNDCAMGMCAELCADNHALTREDQDAFAIQSNERGIAARDSGAFAWEIIPVQVPVGRGKPPTLIERDESLDKFDPVKLKKLRPSFKENGGTVTAGNASSISDGAAALVLVSGQKAQELGLQVLARIKGYADAAQAPELFTTTPGTCNTKGYRKCWIRVIPC

SEQ ID NO: 1679 - protein, 299 aa, Zea mays subsp. mays
  peptide (1)..(299): Ceres Seq. ID no. 13577773
MGGFLGALSPLPATKLGSIVIQAALERANVDPALVQEVYFGNVLSANLGQAPARQAALGAGIPNSVVCTTVNKVCASGMKATMFAAQSIQLGINDIVVAGGMESMSNAPKYIAEARKGSRFGHDTLVDAMLKDGLWDVYNDCAMGMCAELCADNHALTREDQDAFAIQSNERGIAARDSGAFAWEIIPVQVPVGRGKPPTLIERDESLDKFDPVKLKKLRPSFKENGGTVTAGNASSISDGAAALVLVSGQKAQELGLQVLARIKGYADAAQAPELFTTTPGTCNTKGYRKCWIRVIPC

SEQ ID NO: 1680 - protein, 221 aa, Zea mays subsp. mays
  peptide (1)..(221): Ceres Seq. ID no. 13577774
MKATMFAAQSIQLGINDIVVAGGMESMSNAPKYIAEARKGSRFGHDTLVDAMLKDGLWDVYNDCAMGMCAELCADNHALTREDQDAFAIQSNERGIAARDSGAFAWEIIPVQVPVGRGKPPTLIERDESLDKFDPVKLKKLRPSFKENGGTVTAGNASSISDGAAALVLVSGQKAQELGLQVLARIKGYADAAQAPELFTTTPGTCNTKGYRKCWIRVIPC

SEQ ID NO: 1681 - DNA, 845 bp, Zea mays subsp. mays
  misc_feature (1)..(845): Ceres Seq. ID no. 12345824
  misc_feature (1)..(845): Ortholog of  Ceres SEQ ID NO 15180374 as cited in SEQ ID NO 0
agagcggaatggaggaaatgcccctacctgttcacagtgactggcctcccgactcgactctcctccccctatctctatctgcttcctgctgagctcaaaccccttccgcctccccatccaccattccatccgccgccgccgccgccgcctgtgcaagatgaatgtggagaagctcaagaagatggctggcgctgtacgcaccggagggaagggcagcatgcgcaggaagaagaaggcagttcacaagaccacgaccaccgatgacaagcggcttcagagcaccttgaaaaggatcggggggaacaccattcctggtatcgaggaggtcaacatcttcaaggacgatgttgttatccagtttcagaaccctaaagtgcaagcatccattcctgcaaatacatgggtggttagtggagtaccccagacaaaaagtctgcaagaccttctgccatcaattatcaaccaactgggccctgataacctggacaaccttaagaagctggctgcagattttccagaggcaggtacctggtgctgaagcagctgcacaggatgatgacgacgtccctgagcttgtccaaggagagacatttgaggaggctgcagagaaggagcctcaactggagcaggatgagaacaaagaatcgtgattttgttgtgaagggtcgtcggtttaattgttggcatcagccttgcgagagaccctacctgctcatctggcgtgcctctttacatgtgctccagctttgtgtcaagtgtgctttgggttcgaaaagcattactgcattatgttttctgaagacagtgtaggcatatattttcctcgagccatagtgagtttccgc

SEQ ID NO: 1682 - protein, 126 aa, Zea mays subsp. mays
  peptide (1)..(126): Ceres Seq. ID no. 12345825
MNVEKLKKMAGAVRTGGKGSMRRKKKAVHKTTTTDDKRLQSTLKRIGGNTIPGIEEVNIFKDDVVIQFQNPKVQASIPANTWVVSGVPQTKSLQDLLPSIINQLGPDNLDNLKKLAADFPEAGTWC

SEQ ID NO: 1683 - protein, 118 aa, Zea mays subsp. mays
  peptide (1)..(118): Ceres Seq. ID no. 12345826
MAGAVRTGGKGSMRRKKKAVHKTTTTDDKRLQSTLKRIGGNTIPGIEEVNIFKDDVVIQFQNPKVQASIPANTWVVSGVPQTKSLQDLLPSIINQLGPDNLDNLKKLAADFPEAGTWC

SEQ ID NO: 1684 - protein, 106 aa, Zea mays subsp. mays
  peptide (1)..(106): Ceres Seq. ID no. 12345827
MRRKKKAVHKTTTTDDKRLQSTLKRIGGNTIPGIEEVNIFKDDVVIQFQNPKVQASIPANTWVVSGVPQTKSLQDLLPSIINQLGPDNLDNLKKLAADFPEAGTWC

SEQ ID NO: 1685 - DNA, 1258 bp, Zea mays subsp. mays
  misc_feature (1)..(1258): Ceres Seq. ID no. 12349912
  misc_feature (1)..(1258): Ortholog of  Ceres SEQ ID NO 13655656 as cited in SEQ ID NO 63731
gacaaccttctcatccccaaccccgtcagcccgtgcggccgtgccctctgcctcctctgccactcctcgcccaaagcgccagaggcgcagcccgagccacaggttgcctcctctccctctcctcgtggcctcgtccttctcgttcaagacgaaaccgtacgcgagcgagctggtgagggaggaagagcagggaggtgggatcaggccggctccatggacgccacgctcctcctcctccccgccaactgcacggccgccgccagcgggcggatgcggcctcgactgcctgcaggcccacatgtggcttcccctggtccctccgcgcggccaaggacctccatccgggcctcagccgtgtccgcagccctcgccgttcgtggcctcccgcaacacgcttccgtggccgggcaaagcactggaagttatagggttggtgatgttatgaccaaaagggaagagctccatgttgtgaaaccaacaacttcagttgatgacgcccttgagatgctggtgaagcataggatctctggctttcctgttattgatgatgactggaatttggttggcgttgtgtcagattatgatttattggcactggatacaatatcaggagctggaccggctgaagcagacatatttcctgaggtggatagcacttcgaagacatttcatgagatacagaagcttttgagcaaaaccaacgggaaggttattgctgatgttatgaccccagcgcctctcgtggtgcgtgaaacaactaaccttgaagatgctgcaaggttactccttgtgactaagtaccgcaggcttccagtggtcgatagctcaggcaaactggttgggatcattacaagagggaacgtcgtccaagccgccctcgaaatcaagaaaaaggttgaagggacactctgagatgactacctccaggtatcctttttgctgccacatgtggggcttaggacttggacacatctctagttggcaactgatcaatcaaagcgactgtcagagtgagcgatgaaagtcgctatgtttatgaagatttgcccggagaagcacaggtgtatgtgtagtgtttgttatatatgctgatgcagtccttgctggccaaaacacaggttaccgattgttctggtttcctgggcttctttggacaccaaattcttaacctaggtcttgtttgggtgcacacgtatctagttcaacttacttgtattgaggttcattgaagtggaaaatcaactagttttcgcacttc

SEQ ID NO: 1686 - protein, 303 aa, Zea mays subsp. mays
  peptide (1)..(303): Ceres Seq. ID no. 12349913
DNLLIPNPVSPCGRALCLLCHSSPKAPEAQPEPQVASSPSPRGLVLLVQDETVRERAGEGGRAGRWDQAGSMDATLLLLPANCTAAASGRMRPRLPAGPHVASPGPSARPRTSIRASAVSAALAVRGLPQHASVAGQSTGSYRVGDVMTKREELHVVKPTTSVDDALEMLVKHRISGFPVIDDDWNLVGVVSDYDLLALDTISGAGPAEADIFPEVDSTSKTFHEIQKLLSKTNGKVIADVMTPAPLVVRETTNLEDAARLLLVTKYRRLPVVDSSGKLVGIITRGNVVQAALEIKKKVEGTL

SEQ ID NO: 1687 - protein, 232 aa, Zea mays subsp. mays
  peptide (1)..(232): Ceres Seq. ID no. 12349914
MDATLLLLPANCTAAASGRMRPRLPAGPHVASPGPSARPRTSIRASAVSAALAVRGLPQHASVAGQSTGSYRVGDVMTKREELHVVKPTTSVDDALEMLVKHRISGFPVIDDDWNLVGVVSDYDLLALDTISGAGPAEADIFPEVDSTSKTFHEIQKLLSKTNGKVIADVMTPAPLVVRETTNLEDAARLLLVTKYRRLPVVDSSGKLVGIITRGNVVQAALEIKKKVEGTL

SEQ ID NO: 1688 - protein, 213 aa, Zea mays subsp. mays
  peptide (1)..(213): Ceres Seq. ID no. 12349915
MRPRLPAGPHVASPGPSARPRTSIRASAVSAALAVRGLPQHASVAGQSTGSYRVGDVMTKREELHVVKPTTSVDDALEMLVKHRISGFPVIDDDWNLVGVVSDYDLLALDTISGAGPAEADIFPEVDSTSKTFHEIQKLLSKTNGKVIADVMTPAPLVVRETTNLEDAARLLLVTKYRRLPVVDSSGKLVGIITRGNVVQAALEIKKKVEGTL

SEQ ID NO: 1689 - DNA, 1746 bp, Zea mays subsp. mays
  misc_feature (1)..(1746): Ceres Seq. ID no. 12365228
  misc_feature (1)..(1746): Ortholog of  Ceres SEQ ID NO 14308430 as cited in SEQ ID NO 55350
  misc_feature (1)..(1746): Ortholog of  Ceres SEQ ID NO 15177799 as cited in SEQ ID NO 59221
  misc_feature (1)..(1746): Ortholog of  Ceres SEQ ID NO 13662846 as cited in SEQ ID NO 65519
atcatctcatttgctgcgttgttttgtttgccgcgcccacaaataggcgccagttcatccgcttccattcctagttctcaccacccagaagtccacctccttgttgccttcctccaatcccaaatctcacctccttccagttccagctatcgcttctcgtgttggctcgcctcttcctccattcagtggctccttagatcggctcagggacacaccagctgatcgtgtcggcgccgaatctagtggcaatttctcgctattgttgccccggagcagtggtttggatccaagaaagcggccgaccttcttggttgtatatcctcccgcaatggcggcgctcctggagctgttcctgggctcctcgtccgcaccggtggactgggaggcagaggcctacccggcgtacggggacttcgccgtgctacccttactcgtcgcctttttccccgccgtccggttcctcctcgaccgactcgtcttcgaggttttagcacggaaacttatatttggaaaagaacatgataagctttctgaaacagatgacagtagaaagaaaatcaataaatttaaggaatcagcatggaagtttgtttattttctttctggagaactgctttcactatctgtaacatacaatgagccatggtttaagaacaccagatacttttggataggccctggtgaccagatctggcctgatcaaatgataaaactgaagctcaaagctgtctacatgtatgctgctggattttacacatattcaattttcgctcttctgttctgggaaacaaggcgttcggactttggagtatcaatgtcccaccatatagcaactgttgttctgattgttctttcctacattttcagatttgctcgtgttggctctgttgttttagcccttcatgatgcaagtgatatattcctagagattgggaagatggccaagtacagtagctgcgagtggctagcagttgtggcatttcttcttttcgtggcatcgtggatacttctccggcttgttatattccctttctggatcctaagaagcacaagctatgaagtactgctgaccctggacaaggagaaacatcagttttatggccccatatactattatgttttcaactgtcttctgttctcactcctagttcttcacatatattggtgggtactgatatggcggatgctagttaagcagattcaatcgaaagggcatgttggtgatgatgttcgatccgattctgaaggcgaagaggaacatgaagattaactttttaggttgaatgcttaactgaagaactatgttgtgtgatacctacagcaaggcacaccttctgaaaccacctttttccttctaaagaagatttgcagatattagattttattagatcatatcattctttcagcatcaaagatgacaactatcatttgcgagttgccactgaagccgtctgtgctcttggatgtttgcatgaaaacagaagtgaattgtatttttttcccagtcaaccgtcgtttgtaaaagatacagaataatcgcttgttcatccattcttgtaactagacagttgatttgatttcaaatcatgtaatttgctacatcagcttagttgattacttggtgtatcatccattatgatgtaaatgggagtcttgggaagttcacaacaagaatgtgacactatgtactgttatttctcctattattttaataagagcacagagaagtagcccaagtgcaaggat

SEQ ID NO: 1690 - protein, 313 aa, Zea mays subsp. mays
  peptide (1)..(313): Ceres Seq. ID no. 12365229
MAALLELFLGSSSAPVDWEAEAYPAYGDFAVLPLLVAFFPAVRFLLDRLVFEVLARKLIFGKEHDKLSETDDSRKKINKFKESAWKFVYFLSGELLSLSVTYNEPWFKNTRYFWIGPGDQIWPDQMIKLKLKAVYMYAAGFYTYSIFALLFWETRRSDFGVSMSHHIATVVLIVLSYIFRFARVGSVVLALHDASDIFLEIGKMAKYSSCEWLAVVAFLLFVASWILLRLVIFPFWILRSTSYEVLLTLDKEKHQFYGPIYYYVFNCLLFSLLVLHIYWWVLIWRMLVKQIQSKGHVGDDVRSDSEGEEEHED

SEQ ID NO: 1691 - protein, 188 aa, Zea mays subsp. mays
  peptide (1)..(188): Ceres Seq. ID no. 12365230
MIKLKLKAVYMYAAGFYTYSIFALLFWETRRSDFGVSMSHHIATVVLIVLSYIFRFARVGSVVLALHDASDIFLEIGKMAKYSSCEWLAVVAFLLFVASWILLRLVIFPFWILRSTSYEVLLTLDKEKHQFYGPIYYYVFNCLLFSLLVLHIYWWVLIWRMLVKQIQSKGHVGDDVRSDSEGEEEHED

SEQ ID NO: 1692 - protein, 178 aa, Zea mays subsp. mays
  peptide (1)..(178): Ceres Seq. ID no. 12365231
MYAAGFYTYSIFALLFWETRRSDFGVSMSHHIATVVLIVLSYIFRFARVGSVVLALHDASDIFLEIGKMAKYSSCEWLAVVAFLLFVASWILLRLVIFPFWILRSTSYEVLLTLDKEKHQFYGPIYYYVFNCLLFSLLVLHIYWWVLIWRMLVKQIQSKGHVGDDVRSDSEGEEEHED

SEQ ID NO: 1693 - DNA, 1196 bp, Zea mays subsp. mays
  misc_feature (1)..(1196): Ceres Seq. ID no. 13498872
  misc_feature (1)..(1196): Ortholog of  Ceres SEQ ID NO 12582036 as cited in SEQ ID NO 50981
  misc_feature (1)..(1196): Ortholog of  Ceres SEQ ID NO 14306066 as cited in SEQ ID NO 57378
  misc_feature (1)..(1196): Ortholog of  Ceres SEQ ID NO 14311969 as cited in SEQ ID NO 58929
  misc_feature (1)..(1196): Ortholog of  Ceres SEQ ID NO 15173523 as cited in SEQ ID NO 61797
  misc_feature (1)..(1196): Ortholog of  Ceres SEQ ID NO 14309357 as cited in SEQ ID NO 0
ctcccctcctccgcacaaacgcgtcgcatccgctccacaggatcctctgcgccaccgcaaccgtgtgaccgcccgtgccgccggcgatcccgatccgccgacccgtcccagccccgctcgcagccatgtcgccgtcggagccgacgcgggaggagagcgtgtacatggccaagcttgcggagcaggcggagcggtacgaggagatggtcgagttcatggagcgcgtcgcgcgstacgccgggggcgccggcggcggggacgagctctcggtggaggagcgcaacctgctgtccgtcgcctacaagaacgtcatcggcgcccgcagggcctcgtggcggatcatctcctccatcgagcagaaggaggaaggccgcgggaacgaggcgcacgccgcatccatccgcgcctaccgctccaagatcgaggccgagcttgcccgcatctgcgacggcatcctcgcgctcctcgactcccacctcgtcccatccgccggcggcccgagtccaaggtcttctacctcaagatgaagggtgactaccacaggtaccttgctgagttcaagtcaggtgcagagaggaaggatgctgcggagagcaccatgaatgcctacaaagctgctcaggatattgctcttgctgatctggccccaacccaccccatcaggctcgggcttgctctcaacttctcagtgttctactacgagatcctcaactcccctgaccgtgcttgcaaccttgcaaagcaggcctttgatgaggcaatctccgaactagacagcctgggagaggagtcctacaaggacagcactctgatcatgcagctcctgcgtgacaacttgaccctatggacttccgacaccaacgaggacgccggagatgagatcaaggaagcagctgctgcccccaaagaatccgcccccgagggccagtaagacggatccgatctcccgacctgatgcgtgtctgctgatgtcggggagtttaccaggactgtgccgttcttgatttctgatagcttatcttctagtacacctcgtgttgttctcttcgtcacggcgccggtgcgtgtgcgctgaagctgcctgccattgccattgccgctgtttttaattaagcacacactctagatgttatgcccgcatgctatgtttcgattctcaaagttgataaatgatggctggatgctggttttcgtgc

SEQ ID NO: 1694 - protein, 309 aa, Zea mays subsp. mays
  peptide (1)..(309): Ceres Seq. ID no. 15223053
  misc_feature (78)..(78): Xaa is any aa, unknown or other
SPPPHKRVASAPQDPLRHRNRVTARAAGDPDPPTRPSPARSHVAVGADAGGERVHGQACGAGGAVRGDGRVHGARRAXRRGRRRRGRALGGGAQPAVRRLQERHRRPQGLVADHLLHRAEGGRPRERGARRIHPRLPLQDRGRACPHLRRHPRAPRLPPRPIRRRPESKVFYLKMKGDYHRYLAEFKSGAERKDAAESTMNAYKAAQDIALADLAPTHPIRLGLALNFSVFYYEILNSPDRACNLAKQAFDEAISELDSLGEESYKDSTLIMQLLRDNLTLWTSDTNEDAGDEIKEAAAAPKESAPEGQ

SEQ ID NO: 1695 - protein, 177 aa, Zea mays subsp. mays
  peptide (1)..(177): Ceres Seq. ID no. 15223054
  misc_feature (78)..(78): Xaa is any aa, unknown or other
LPSSAQTRRIRSTGSSAPPQPCDRPCRRRSRSADPSQPRSQPCRRRSRRGRRACTWPSLRSRRSGTRRWSSSWSASRXTPGAPAAGTSSRWRSATCCPSPTRTSSAPAGPRGGSSPPSSRRRKAAGTRRTPHPSAPTAPRSRPSLPASATASSRSSTPTSSHPPAARVQGLLPQDEG

SEQ ID NO: 1696 - DNA, 1302 bp, Zea mays subsp. mays
  misc_feature (1)..(1302): Ceres Seq. ID no. 12411041
  misc_feature (1)..(1302): Ortholog of  Ceres SEQ ID NO 14309653 as cited in SEQ ID NO 0
aagagcgcggcaacaccgcgcatatacatggaatgagaagggctcagctacagccaagcgaataaatatactgtgaattaaccctaacctaaccgaagcgtccgcctcccacacacgggactccggccgcgagaacccgcgactaagccaggacgcgggacgccacagccaccggcctcagcatccgcctaggacgaataacccttctaggctgccgccgccgcccgtccttagctcatattgttgccggcgaagagcgccccagatccgcccctgctatggagtcggcggtgaacccgaaggcgtacccgctggctgatgcgcagctgacgataggtatcatcgatatcatccagcaggccgccaactacaagcagctcaagaagggagctaacgaagcgacgaagaccctgaacagggggatatcggagttcgtagtgatggcggcggacacggagccgctcgagatcctcctccacctccccttgctagctgaggataagaacgtgccatatgtatttgttccatcgaaacaagctcttggccgtgcttgtggtgtgacaaggcctgtcattgcttgctcagtgaccagcaatgagggtagccagctgaaacaacagatacagggtctcaaggtacttagggtgcgtttggttgcaatgacaggacgggatgagacgagacgattcctcaaatagggttgtttggttcagggtcaggggttgggacaggactatcccagtgttgtccccagttatccctcaaaattggagggacgagagagaacgccaggggacgtccctgtcctggctgtcccgcaaccaaacacacccttaatgtcctgtcttgtagtagttgttaatacttgatatgttgctatttttatatatgaatattatgattctgtaatatttatatgctgtttaatagtcagtcttatcatgttcttgtatgcatatctctgtggattaaacaaatttaatgaaattgcaggactcgattgagaagcttctcatctgatttaccaaagacctttcagggtgatgggcctcagcgacacatttttcagaggcttggactggtgatggtgtcttgtttactagattttacgtctttccaaactatgtttgaacactgttaggtcgaccatacttgaattgtgcttatatatttgactgtcatgtattctgaagatgcatctgcattctggtgccttggtttatgttgagattctgaccatcattgtaacggttgattactatgagtttgagaattggatcgattggatggttgcaatttccg

SEQ ID NO: 1697 - protein, 139 aa, Zea mays subsp. mays
  peptide (1)..(139): Ceres Seq. ID no. 12411042
MESAVNPKAYPLADAQLTIGIIDIIQQAANYKQLKKGANEATKTLNRGISEFVVMAADTEPLEILLHLPLLAEDKNVPYVFVPSKQALGRACGVTRPVIACSVTSNEGSQLKQQIQGLKVLRVRLVAMTGRDETRRFLK

SEQ ID NO: 1698 - protein, 85 aa, Zea mays subsp. mays
  peptide (1)..(85): Ceres Seq. ID no. 12411043
MAADTEPLEILLHLPLLAEDKNVPYVFVPSKQALGRACGVTRPVIACSVTSNEGSQLKQQIQGLKVLRVRLVAMTGRDETRRFLK

SEQ ID NO: 1699 - DNA, 789 bp, Zea mays subsp. mays
  misc_feature (1)..(789): Ceres Seq. ID no. 12355957
  misc_feature (1)..(789): Ortholog of  Ceres SEQ ID NO 13587131 as cited in SEQ ID NO 331
  misc_feature (1)..(789): Ortholog of  Ceres SEQ ID NO 13661176 as cited in SEQ ID NO 61114
acagtcgcctccttcctgcgccgccgccgccgccgccgccgccgctaccaccgcctcgcggccgcctgcggctccgcgtttccgcacggaagttggtgaaggtttcttgaggctgagaacatggtgctgaagacggaactttgccgcttcagcggccagaagatttatcctgggaaaggcattagatttatccgtgctgattctcaggtcttcctttttgccaactcgaaatgcaagcgctacttccacaaccgcctgaagcctgcaaagcttacctggacagcaatgtacaggaagcagcacaagaaggatatccatgctgaagcggtaaagaagaggcgccgcgccaccaagaagccatactccaggtcaattgtgggtgcttccttggaagtaatccagaagaagagagctgagaagccagaggtccgcgatgctgctagagaagctgctcttcgtgagatcaaggagcgcatcaagaagaccaaggatgagaagaaagcgaagaaggcggaggtgagcaagtcccagaagacgcagacaaagggtgcggtccagaagggttccaagggccccaagttgggcggcggtggtgggaagcgctgaaagaacttagtgtcgtttctcgacattgcagtcgttccttagccaaagccactttcgtagaacctgtgttgaatttgcaagacttattcaagcgttgcttgtgcgtgctaaataccatggcaagagaacggatttatatttatgcctgaaaaaaatgaccgttcatattcttaactcatcttg

SEQ ID NO: 1700 - protein, 161 aa, Zea mays subsp. mays
  peptide (1)..(161): Ceres Seq. ID no. 12355958
MVLKTELCRFSGQKIYPGKGIRFIRADSQVFLFANSKCKRYFHNRLKPAKLTWTAMYRKQHKKDIHAEAVKKRRRATKKPYSRSIVGASLEVIQKKRAEKPEVRDAAREAALREIKERIKKTKDEKKAKKAEVSKSQKTQTKGAVQKGSKGPKLGGGGGKR

SEQ ID NO: 1701 - protein, 106 aa, Zea mays subsp. mays
  peptide (1)..(106): Ceres Seq. ID no. 12355959
MYRKQHKKDIHAEAVKKRRRATKKPYSRSIVGASLEVIQKKRAEKPEVRDAAREAALREIKERIKKTKDEKKAKKAEVSKSQKTQTKGAVQKGSKGPKLGGGGGKR

SEQ ID NO: 1702 - DNA, 1301 bp, Zea mays subsp. mays
  misc_feature (1)..(1301): Ceres Seq. ID no. 12345828
  misc_feature (1)..(1301): Ortholog of  Ceres SEQ ID NO 13514389 as cited in SEQ ID NO 57294
ctccccacccgcagcgcctcctcccattcccccaacggacattgcctaggaggctaggacagaaccacccagagcgcacaaccttatccgaatcgccgttgcatggaggccgtgcgcgcgtcggcggcgtgggttgccagtcgctcctcccatgtcacggtcgaccttcaagaaattgagaaggtagtggaccaaatccaaggagatgttccaaaagttcagtgggattacgaaggaattcactactttgacaatgggccactcacagtccagtacctgttcgtcttggatgcactaaacttctgcttctggccagataaggacttgagctatgaccatttggcttctggactgaagtcagccttggagaaagacaaaaatgcccttgattcagatcgtctccagaattacactgggccccagctccgccaacttctgaactggccacgaccactgccaattgaggaggaaagagtacgccttctccacgaggttgggcaggaacttaaaagaagctttggaggtcaggctgctaatctagtgaagtctgctggaaactctgctgcgactcttattgaactgattactcgacattttcctggtttccgggaccattcactctacaaggggcaccaggttttcctgtacaagagagcccagatctttgttgctgatttgtggggcgccttcaagggacaaaactatggcgagttccacgatatcaattccatcaccatatttgctgactacattgttccagcggtcctgagggagcttggagtacttaaatatggctcgaatctatcttgcttcatcgactcgaacagtgagatagtgcctggaagcgaggaggaagtggagatacgcgcgtgctccatctatgcagtggagaagatgagggacctgatcagcaagaagtttggaaagcagcttctgagcattgacattgatctctggctctggtcctgcggcgtgcagaacatggcgctgtcacatcaccgcactctgtcgatttactactagacagtcaggcaggcaggaagctgaccctgctggtgcgctcgttcagctggccgggcgttgtcgtcgcttgttcgtcctaaccataacggtgcatgtaggtgtcgagagttttgtctccttgggaatgcacacaggtgcaagatattgtaggcccgtcccatgaggatgcatggtagtacaacacttttttttttgtgatttagagacttgaactgctgcagttttcacatgaatgttatccctaaggacaaggcgggagcgagtgtttctctatctcc

SEQ ID NO: 1703 - protein, 306 aa, Zea mays subsp. mays
  peptide (1)..(306): Ceres Seq. ID no. 12345829
MEAVRASAAWVASRSSHVTVDLQEIEKVVDQIQGDVPKVQWDYEGIHYFDNGPLTVQYLFVLDALNFCFWPDKDLSYDHLASGLKSALEKDKNALDSDRLQNYTGPQLRQLLNWPRPLPIEEERVRLLHEVGQELKRSFGGQAANLVKSAGNSAATLIELITRHFPGFRDHSLYKGHQVFLYKRAQIFVADLWGAFKGQNYGEFHDINSITIFADYIVPAVLRELGVLKYGSNLSCFIDSNSEIVPGSEEEVEIRACSIYAVEKMRDLISKKFGKQLLSIDIDLWLWSCGVQNMALSHHRTLSIYY

SEQ ID NO: 1704 - DNA, 1372 bp, Zea mays subsp. mays
  misc_feature (1)..(1372): Ceres Seq. ID no. 12373449
  misc_feature (1)..(1372): Ortholog of  Ceres SEQ ID NO 15224862 as cited in SEQ ID NO 67024
  misc_feature (1)..(1372): Ortholog of  Ceres SEQ ID NO 15178724 as cited in SEQ ID NO 67382
agacgtcctctgtccatggcctcccatcctgagcacccggcggaaccgcgagcaccgcccgccccaacgaccataggcgatctctccgacgacctcctgcgcgagatcctcctccgcctcccttcccttccttcactcgtctgcgcctccctcagctgccgcgccttcctggccgccgtccgctcctcccgcgccttccgccgccgcttccgcgcgctgcacccgcctcctctcctcggcttcttcttcgaccccgacggcaacgaaaatcccaccttcatgcccattcgccgcggctccgaccggggccacgcggccgccgtccgcggcctggacgccttcctgacccgcgtcccgcacgaggacgacgtcttccccgggtggcagataatggagtgccgcggcggctgccttctcctcctcaactggagaaccaagcagctcgccgcctacaaccccctcacgggggccttggatctcgtccccaaactgcctgacgacatctgcaaagggcaccgcggcaagttcatctccggtgattttttcctggtagtccccgacgacgaggctcccgacaggcgttcgttccgcgtggtctcctcctgccacgacaagtaccgggtgcgcgtcgccgtcttctcgtctgccaccaggaagtggcagattctcccctggtcggagcctgtgccgacacagccggcgagcggtaagtactggcttctctcggggaggcaggtgagtgggttcctgtgctggtcacaccataagaatgcctacaaggtgttgctggacactgcgaccctgcaattctccgtcatcgatctgccgtatggcttgagtgggcaaggtcacctctacaggactggggataccaaggatgggaagctctgcatcgttgccgcaatcgatttctcgctgttcgtttggttccggacaccagacgccggtggcattgacaggtgggtgctccgacatgtattgcagctggaggatgaggttcttgaggccaccgagggctcacggaatgaacttgaacagcttaaagtgtttgcaattctggacggcatcgtgtacatgacgacatttgagacgtttagagatgctaccttgccttgttggtacctatccttctgcctggaaacaaggaagctggaaaaactcttctatgtaaaagctaatggccatgctcatccctacttcatgccatggcctactgctttagtaggtaacaatttgagcccctgactaggaggaggtgcttgttcaagtgaaactggttacagtaacatgtaagtttcttgttctgtctagactcaacagtttgttcacttatcctcttatatactagtaacgggtgcgcgctttgcgtggc

SEQ ID NO: 1705 - protein, 414 aa, Zea mays subsp. mays
  peptide (1)..(414): Ceres Seq. ID no. 12373450
RRPLSMASHPEHPAEPRAPPAPTTIGDLSDDLLREILLRLPSLPSLVCASLSCRAFLAAVRSSRAFRRRFRALHPPPLLGFFFDPDGNENPTFMPIRRGSDRGHAAAVRGLDAFLTRVPHEDDVFPGWQIMECRGGCLLLLNWRTKQLAAYNPLTGALDLVPKLPDDICKGHRGKFISGDFFLVVPDDEAPDRRSFRVVSSCHDKYRVRVAVFSSATRKWQILPWSEPVPTQPASGKYWLLSGRQVSGFLCWSHHKNAYKVLLDTATLQFSVIDLPYGLSGQGHLYRTGDTKDGKLCIVAAIDFSLFVWFRTPDAGGIDRWVLRHVLQLEDEVLEATEGSRNELEQLKVFAILDGIVYMTTFETFRDATLPCWYLSFCLETRKLEKLFYVKANGHAHPYFMPWPTALVGNNLSP

SEQ ID NO: 1706 - protein, 409 aa, Zea mays subsp. mays
  peptide (1)..(409): Ceres Seq. ID no. 12373451
MASHPEHPAEPRAPPAPTTIGDLSDDLLREILLRLPSLPSLVCASLSCRAFLAAVRSSRAFRRRFRALHPPPLLGFFFDPDGNENPTFMPIRRGSDRGHAAAVRGLDAFLTRVPHEDDVFPGWQIMECRGGCLLLLNWRTKQLAAYNPLTGALDLVPKLPDDICKGHRGKFISGDFFLVVPDDEAPDRRSFRVVSSCHDKYRVRVAVFSSATRKWQILPWSEPVPTQPASGKYWLLSGRQVSGFLCWSHHKNAYKVLLDTATLQFSVIDLPYGLSGQGHLYRTGDTKDGKLCIVAAIDFSLFVWFRTPDAGGIDRWVLRHVLQLEDEVLEATEGSRNELEQLKVFAILDGIVYMTTFETFRDATLPCWYLSFCLETRKLEKLFYVKANGHAHPYFMPWPTALVGNNLSP

SEQ ID NO: 1707 - protein, 321 aa, Zea mays subsp. mays
  peptide (1)..(321): Ceres Seq. ID no. 12373452
MPIRRGSDRGHAAAVRGLDAFLTRVPHEDDVFPGWQIMECRGGCLLLLNWRTKQLAAYNPLTGALDLVPKLPDDICKGHRGKFISGDFFLVVPDDEAPDRRSFRVVSSCHDKYRVRVAVFSSATRKWQILPWSEPVPTQPASGKYWLLSGRQVSGFLCWSHHKNAYKVLLDTATLQFSVIDLPYGLSGQGHLYRTGDTKDGKLCIVAAIDFSLFVWFRTPDAGGIDRWVLRHVLQLEDEVLEATEGSRNELEQLKVFAILDGIVYMTTFETFRDATLPCWYLSFCLETRKLEKLFYVKANGHAHPYFMPWPTALVGNNLSP

SEQ ID NO: 1708 - DNA, 1406 bp, Zea mays subsp. mays
  misc_feature (1)..(1406): Ceres Seq. ID no. 12391368
  misc_feature (1)..(1406): Ortholog of  Ceres SEQ ID NO 13594176 as cited in SEQ ID NO 59144
aaagctaaaacagggcgggggcgggggcgtcgcttcgtggggacagccctcgtgatcgatccgcccgtgggatctcgcgcacgccaggattggagagctgcggcctccctccgccccaaccagccatgggttcccgcgttgattgcggcgcttagacgcggaggaggagagagacacggggaggggggaggccgaggcctaggaggcgtagcgctgtgcagggcgcgagcgcgttcgttcggcatggaacagaacgccggctcgttcctcgccgtgcgtcgcctctccggtggcgccatccaccaccatcgtcaccactcttccccggctgaggtcgtgggcgtgtccactgcgtggctcggtaaggggctttcatgcgtctgcgcgcagaggagggagagcgacgtgcgcctgtccttcgatttgagtcccattcaggaagagtgcttgaataggttgcagaaccggatagaggtgcagtatgatggttcaaatctggagcatcagaaagcactggaagccctttggcgttcttcttttcctggaactgaacttctagggttagtatcagaccagtggaaggagatgggatggcaagggaaagatccatctacagatttcaggggcggtggttttatatctttggagaatttactgtatttctctaggaactatccaaaatccttccaggagctccttcgtaagcagaatggtgatagagcattgtgggaatatccctttgctgtagctggtgtaaatattacattcatgctgattcagatgcttgaccttcaagcagctaagccaacgtcgttggttggagcggttttcctaaatctactcttagaaaatgatcgagcgttcgacattctttactgcataaccttcaaactgatggatcagaaatggcttgaaatgcacgccagttacatggatttcaatacggttattaaatcaacacggcgccagctcgagagggagctgttgctagaagatatccagagaatcgaggacatgccatcgtacaggtttctcgcctgctagcaattgaacctcctggtcgtaccgaacattgccacaagatagtgcagctccatacactcgaagaagaagctgagaggttggaaccacgtacaccgagcgaagggtgaatctaggttcatggactgtggatgtgttgttgctttgaattgcgctgtcgtgtttacctactccgagtccgacaacagcctcgacgccgagtgccttttcgtttcaacgatgtgctatatcttggggccacggaacggcagatcctagctttctttgtaaacaagaggatgtggaaagttggctgcgtatgctttgtggccatgtgcatggataatcttgctgctcgcctgaaagaaaaaaaggccgatcttaag

SEQ ID NO: 1709 - protein, 347 aa, Zea mays subsp. mays
  peptide (1)..(347): Ceres Seq. ID no. 12391369
KAKTGRGRGRRFVGTALVIDPPVGSRARQDWRAAASLRPNQPWVPALIAALRRGGGERHGEGGGRGLGGVALCRARARSFGMEQNAGSFLAVRRLSGGAIHHHRHHSSPAEVVGVSTAWLGKGLSCVCAQRRESDVRLSFDLSPIQEECLNRLQNRIEVQYDGSNLEHQKALEALWRSSFPGTELLGLVSDQWKEMGWQGKDPSTDFRGGGFISLENLLYFSRNYPKSFQELLRKQNGDRALWEYPFAVAGVNITFMLIQMLDLQAAKPTSLVGAVFLNLLLENDRAFDILYCITFKLMDQKWLEMHASYMDFNTVIKSTRRQLERELLLEDIQRIEDMPSYRFLAC

SEQ ID NO: 1710 - protein, 266 aa, Zea mays subsp. mays
  peptide (1)..(266): Ceres Seq. ID no. 12391370
MEQNAGSFLAVRRLSGGAIHHHRHHSSPAEVVGVSTAWLGKGLSCVCAQRRESDVRLSFDLSPIQEECLNRLQNRIEVQYDGSNLEHQKALEALWRSSFPGTELLGLVSDQWKEMGWQGKDPSTDFRGGGFISLENLLYFSRNYPKSFQELLRKQNGDRALWEYPFAVAGVNITFMLIQMLDLQAAKPTSLVGAVFLNLLLENDRAFDILYCITFKLMDQKWLEMHASYMDFNTVIKSTRRQLERELLLEDIQRIEDMPSYRFLAC

SEQ ID NO: 1711 - DNA, 1443 bp, Zea mays subsp. mays
  misc_feature (1)..(1443): Ceres Seq. ID no. 12342542
  misc_feature (1)..(1443): Ortholog of  Ceres SEQ ID NO 13597648 as cited in SEQ ID NO 69125
gaccgtatttgttatcggactgggaagcagcggcggtacaaagtgtgggagagaaaggagaagagacttgatgtcctcgcagtttgtccaatagatctcctcgccgcctcacccgtctcctcctccgcagcttccccgcgatcccgaccatggagggcgacggtaccaaccttgatgcggcgatagagtcgctcctgaatgtcgagaagcagatgaggctggccggagatgtcgccggcactcggaaggccgtcatcgacatcgtcgagctctgctacaaggccggcgcgtggaagacgctaaacgaccagatcgttctcctatctaagaggagaggccagcttaagcaggctattactgctatggttcagaaagcaatggagtacattaatttgacaccaggcattgacacaagcatcgagctaataaaaacactgagcagtgtctctgctggcaaaatctatgttgagatagagagagcaagattgatcaaaaggcttgcaaaaattaaagaggagcagggacagatttacgaggctgctgatttgatgcaagaagttgctgttgaaacatttggctctatggcaaagacggagaaaattgctttcattcttgagcaggtccggctatgcctggatcggcaagattttgtcagagcacaaattttatccaggaaaatcagtactagagtatttcacgcaaatccatcaaaggaaaaaaagaaaccaaaggaaggtgacagtattgttcaggatgctcctgcagatattccttcccttctagaattgaagcgcgtctactacgaactgatgattcgttattactctcacaacaatgattacttggaaatctgccgttgttacaaggctatttatgatattccagcaataaaagaggatccaacaaagtggataccgattcttaggaagatctgttggtacttggtgctagcacctcatgatcctatgcaatcaagccttctcaatgctacactagaggataaaaacctttcagaaatcccaaatttcaggttattactgaagcagctggtcaccatggaggtgatacagtggacaagtctgtgggaattcttcaaggaggaatatgagaaggagaaggatcttgggggagctttgggtgccaaagcttcagaagatttgaggctgaggattatcgaacatgtattggttactttgtgtttggtctagttattttgctctatgcttgtccattgaatctgatctcttgctctcttcagaatatcttggttgtatccaagtactatgcaagggttaccctcaagaggcttgccgatcttctttgcctgactttgcaggtttgtttgttttttcacctttgcatgatattgtatttcctttgtgatgccaaccgtggcatcttgtgtttaaacccactacatgacaatcacctgaattgttaggc

SEQ ID NO: 1712 - protein, 352 aa, Zea mays subsp. mays
  peptide (1)..(352): Ceres Seq. ID no. 12342543
MEGDGTNLDAAIESLLNVEKQMRLAGDVAGTRKAVIDIVELCYKAGAWKTLNDQIVLLSKRRGQLKQAITAMVQKAMEYINLTPGIDTSIELIKTLSSVSAGKIYVEIERARLIKRLAKIKEEQGQIYEAADLMQEVAVETFGSMAKTEKIAFILEQVRLCLDRQDFVRAQILSRKISTRVFHANPSKEKKKPKEGDSIVQDAPADIPSLLELKRVYYELMIRYYSHNNDYLEICRCYKAIYDIPAIKEDPTKWIPILRKICWYLVLAPHDPMQSSLLNATLEDKNLSEIPNFRLLLKQLVTMEVIQWTSLWEFFKEEYEKEKDLGGALGAKASEDLRLRIIEHVLVTLCLV

SEQ ID NO: 1713 - protein, 331 aa, Zea mays subsp. mays
  peptide (1)..(331): Ceres Seq. ID no. 12342544
MRLAGDVAGTRKAVIDIVELCYKAGAWKTLNDQIVLLSKRRGQLKQAITAMVQKAMEYINLTPGIDTSIELIKTLSSVSAGKIYVEIERARLIKRLAKIKEEQGQIYEAADLMQEVAVETFGSMAKTEKIAFILEQVRLCLDRQDFVRAQILSRKISTRVFHANPSKEKKKPKEGDSIVQDAPADIPSLLELKRVYYELMIRYYSHNNDYLEICRCYKAIYDIPAIKEDPTKWIPILRKICWYLVLAPHDPMQSSLLNATLEDKNLSEIPNFRLLLKQLVTMEVIQWTSLWEFFKEEYEKEKDLGGALGAKASEDLRLRIIEHVLVTLCLV

SEQ ID NO: 1714 - protein, 281 aa, Zea mays subsp. mays
  peptide (1)..(281): Ceres Seq. ID no. 12342545
MVQKAMEYINLTPGIDTSIELIKTLSSVSAGKIYVEIERARLIKRLAKIKEEQGQIYEAADLMQEVAVETFGSMAKTEKIAFILEQVRLCLDRQDFVRAQILSRKISTRVFHANPSKEKKKPKEGDSIVQDAPADIPSLLELKRVYYELMIRYYSHNNDYLEICRCYKAIYDIPAIKEDPTKWIPILRKICWYLVLAPHDPMQSSLLNATLEDKNLSEIPNFRLLLKQLVTMEVIQWTSLWEFFKEEYEKEKDLGGALGAKASEDLRLRIIEHVLVTLCLV

SEQ ID NO: 1715 - DNA, 1495 bp, Zea mays subsp. mays
  misc_feature (1)..(1495): Ceres Seq. ID no. 12355866
  misc_feature (1)..(1495): Ortholog of  Ceres SEQ ID NO 14303955 as cited in SEQ ID NO 54594
atgtgggcacgtttcctcttcttcgttctctcccggtctcccccatcccaatcgtgcgtgttcgtcactcctcagctccgaccttcacggggcccacggggcccgacgctcggcggctttactcagtgcaccatggccttctcttcgtcactgccgccgttcttcccaccttctggaaccttccgagcccatcccgctaggaggctgcgggccgatgcacccgggagattcgtggcgtcctgcttgccccctcccgacgtcgtggtgacgcgcgagcagggaaagaacgccaggctcatctccgcgctggaaaagcataatgtacaccctctggaacttcctcttattaagcatgttgaaggccctgatacagataggctttcagatgtcctacgtaatgacaagttcgactggattattgtaacctctcctgaggcagctgcagtgttccttcagggatggaaggttgctggaagtcctaaggtgcgagtagctgttgttggagaaggaactgcaagggtttttcatgaagtatcagaatctgatgatcaatctctagagcttgcattttcaccttccaaagctttgggtagagtcttggcttcagagcttccaagaagcaacgggaactcatgtaaagtattgtaccctgcatctgcaaaggctggccatgaaattgaggatgtgctatcagaacgaggatttgacgtgacccgactgaatacatatacaactgttcctgtagaagatgtcgacccactgacattaaaccttgctatatcagctccagttgttgcggtagcttctccttctgcactgagggcatggctaaatcttatctcaaaatctgataactggaacaactccgtcgcctgcatcggtgagaccactgcatctgcagcgaagaaacagggcctgaagagcatatattacccaacgacccctggacttgaggggtgggtcgagagcattctcgaggcgctgagagtccacaggacagcatcaaaagaggccccaaaacgttgaaaacgggcggatggcggagcttcttgcttggcgttggtagccgtccgcagtgtcgaagaaattctttgcttctttgacgacaattgccccccgttgagggaggtggtggtgtcaagccatggctttccagtggcccagtttgtaatggattcttgggccgaaaggcccatctctacatgtcttggctcgcaaggcgattgcatcagtccatccatccatttcatggagggttttagcagtgccgtctctgtttcgctaatcggtgatggcagccagccttgttgtactttgtgggtttgttgacgcagccggtcggattcttcttattgccggattggttgcgtaacgctaggtggttctgaatatcggcgacggcgaggctgtggaatctccgccctccaccgaagattccctgtcgtcgtttctgaatttaattaacaacatggcatgatgaccaatcaaagctcgc

SEQ ID NO: 1716 - protein, 341 aa, Zea mays subsp. mays
  peptide (1)..(341): Ceres Seq. ID no. 12355867
MWARFLFFVLSRSPPSQSCVFVTPQLRPSRGPRGPTLGGFTQCTMAFSSSLPPFFPPSGTFRAHPARRLRADAPGRFVASCLPPPDVVVTREQGKNARLISALEKHNVHPLELPLIKHVEGPDTDRLSDVLRNDKFDWIIVTSPEAAAVFLQGWKVAGSPKVRVAVVGEGTARVFHEVSESDDQSLELAFSPSKALGRVLASELPRSNGNSCKVLYPASAKAGHEIEDVLSERGFDVTRLNTYTTVPVEDVDPLTLNLAISAPVVAVASPSALRAWLNLISKSDNWNNSVACIGETTASAAKKQGLKSIYYPTTPGLEGWVESILEALRVHRTASKEAPKR

SEQ ID NO: 1717 - protein, 297 aa, Zea mays subsp. mays
  peptide (1)..(297): Ceres Seq. ID no. 12355868
MAFSSSLPPFFPPSGTFRAHPARRLRADAPGRFVASCLPPPDVVVTREQGKNARLISALEKHNVHPLELPLIKHVEGPDTDRLSDVLRNDKFDWIIVTSPEAAAVFLQGWKVAGSPKVRVAVVGEGTARVFHEVSESDDQSLELAFSPSKALGRVLASELPRSNGNSCKVLYPASAKAGHEIEDVLSERGFDVTRLNTYTTVPVEDVDPLTLNLAISAPVVAVASPSALRAWLNLISKSDNWNNSVACIGETTASAAKKQGLKSIYYPTTPGLEGWVESILEALRVHRTASKEAPKR

SEQ ID NO: 1718 - DNA, 1323 bp, Zea mays subsp. mays
  misc_feature (1)..(1323): Ceres Seq. ID no. 12369036
  misc_feature (1)..(1323): Ortholog of  Ceres SEQ ID NO 13594758 as cited in SEQ ID NO 51898
  misc_feature (1)..(1323): Ortholog of  Ceres SEQ ID NO 13661175 as cited in SEQ ID NO 61110
  misc_feature (1)..(1323): Ortholog of  Ceres SEQ ID NO 13598708 as cited in SEQ ID NO 68118
  misc_feature (1)..(1323): Ortholog of  Ceres SEQ ID NO 13596265 as cited in SEQ ID NO 68369
  misc_feature (1)..(1323): Ortholog of  Ceres SEQ ID NO 15179585 as cited in SEQ ID NO 0
attcattgggggcatttgctacaccaccacacccacaccccatcccagcacacaacaagcagcctggtttacggtagctgctagcaaaacaatggagaaccctgctccgagcatcgtagtggccatcgccgcacccgtggcggctgagttcgtgaaactcaccttccgtgccctgtatatgcgccgggctggtcctggcagcagggagatgactgtgccgggaaggccatccgaccagctgggcaggagagtcgtcactgacagccccgtgtacgacggccgtggcgccgacgcccgcctcgtggctcgcatacagggagtcacggtcctggtcggtaacgcagacgccttgttcaccatggtgttcgaaaccgacaggctaaagggctccacgctcgtcatcaacggaatggtcacggatgggtcagacgaatgggcgatctacggcggaaccggggtgttcgccatggccaccggtgtcatgaagagaagaaaccttgccggcggtagcaacgacgggaactctgacgagcttgccctggaagttttctgcccggtgtttggcgcatcacagcaaccaattagcaagcagcaggagtccatctcctccgtcaccaagatcggactatggggcggacagggagggtcggcacaggacatcacggcagagcagccaccacggcgtctgcacagcatcaccgtccgcgctggcgttgccgtcgactccatcgagttcacctacaccgacgacgctgggcagaggcgcactgctgggcggtggggtggacttggcggcaatgttcgaacgatcgaccttggcgacgcagaggatgtcagggaagtctcgggaacatacggcgcatttgaaggtgccattacgctgacctcgctcaggctcgtcaccagcagcagaacctggggcccctggggggtcgagaacgggacgcgtttctccatcacggcgcccaacggcagcagcatcgcgggattctatgcgcgggcgggaaccaggctcgtcgacgctatcggtgtttacatacgtccagtggtgccaggcaggcctcggtgaacaagcgagccgagctcgctcgtattacgagctgtaggattatggttcggcttgacttgatgtaggctacctgctacatcatgctcgattcactatcctttaattcggtcatcgtcgtcgtcttgtctcgtgtcaaataaagctctcttgtgcctatatacggctctcatggttgtgccgtgtctctatatgttagtgtttatgtatatgtggagatcaaataatggccttgcaataatgatcaaagactcgct

SEQ ID NO: 1719 - protein, 355 aa, Zea mays subsp. mays
  peptide (1)..(355): Ceres Seq. ID no. 12369037
FIGGICYTTTPTPHPSTQQAAWFTVAASKTMENPAPSIVVAIAAPVAAEFVKLTFRALYMRRAGPGSREMTVPGRPSDQLGRRVVTDSPVYDGRGADARLVARIQGVTVLVGNADALFTMVFETDRLKGSTLVINGMVTDGSDEWAIYGGTGVFAMATGVMKRRNLAGGSNDGNSDELALEVFCPVFGASQQPISKQQESISSVTKIGLWGGQGGSAQDITAEQPPRRLHSITVRAGVAVDSIEFTYTDDAGQRRTAGRWGGLGGNVRTIDLGDAEDVREVSGTYGAFEGAITLTSLRLVTSSRTWGPWGVENGTRFSITAPNGSSIAGFYARAGTRLVDAIGVYIRPVVPGRPR

SEQ ID NO: 1720 - protein, 325 aa, Zea mays subsp. mays
  peptide (1)..(325): Ceres Seq. ID no. 12369038
MENPAPSIVVAIAAPVAAEFVKLTFRALYMRRAGPGSREMTVPGRPSDQLGRRVVTDSPVYDGRGADARLVARIQGVTVLVGNADALFTMVFETDRLKGSTLVINGMVTDGSDEWAIYGGTGVFAMATGVMKRRNLAGGSNDGNSDELALEVFCPVFGASQQPISKQQESISSVTKIGLWGGQGGSAQDITAEQPPRRLHSITVRAGVAVDSIEFTYTDDAGQRRTAGRWGGLGGNVRTIDLGDAEDVREVSGTYGAFEGAITLTSLRLVTSSRTWGPWGVENGTRFSITAPNGSSIAGFYARAGTRLVDAIGVYIRPVVPGRPR

SEQ ID NO: 1721 - protein, 296 aa, Zea mays subsp. mays
  peptide (1)..(296): Ceres Seq. ID no. 12369039
MRRAGPGSREMTVPGRPSDQLGRRVVTDSPVYDGRGADARLVARIQGVTVLVGNADALFTMVFETDRLKGSTLVINGMVTDGSDEWAIYGGTGVFAMATGVMKRRNLAGGSNDGNSDELALEVFCPVFGASQQPISKQQESISSVTKIGLWGGQGGSAQDITAEQPPRRLHSITVRAGVAVDSIEFTYTDDAGQRRTAGRWGGLGGNVRTIDLGDAEDVREVSGTYGAFEGAITLTSLRLVTSSRTWGPWGVENGTRFSITAPNGSSIAGFYARAGTRLVDAIGVYIRPVVPGRPR

SEQ ID NO: 1722 - DNA, 1413 bp, Zea mays subsp. mays
  misc_feature (1)..(1413): Ceres Seq. ID no. 12405846
  misc_feature (1)..(1413): Ortholog of  Ceres SEQ ID NO 13659644 as cited in SEQ ID NO 67118
  misc_feature (1)..(1413): Ortholog of  Ceres SEQ ID NO 14302856 as cited in SEQ ID NO 68824
atcgaaaaatcggcgtcgccatctccggagtgccacgcctaggagctattctctctagtactgcggcgacttcactccaagcctcccccttcagcgatcagcacacatcacgtaaagcgcaaccaaatgatttccaccaccgtcgctgctcaccccgccaccgtcacagcgctgcggcgaatgtacccgcttcgccctcgccagccactctgtgctccaatcttcacggcggcgacgaggcagtgcatggctacggcgaagccctcggtcacaaacgcgctcgctaacctatccgttgagagcgcccccgcggcgcttcccaagctttcgttcccgatactggtgaatagttgcactgggaaaatggggaaggctgttgctgaagcagctgtctcggctggtcttcagttagttcctgtatcattcagtgccattgaggtccctgatcgaaagattgaaatatgtgatagagaaatttttattcatgacccatctgaaagtgaaaaaattctgcctaccattgttaaagaatacccaaatgtcatagttgtagattacactgtgcctgatgctgttaatgcaaatgctgaactctattgcaaatttggtttgccatttgtaatgggcacaactggtggaaataggcaactcttgcacaaaactgtgcatgatgcgaatatctacgctgtgatatcccctcagatggggaagcaggttgttgcttttcttgctgccatggaaattatgtcagagcaatttcctggtgcattttcaggttacaagctggaggtcatggagtctcatcaagcaacaaaattggacatttctgggactgccaaggctgttatctcttgttttcagaagttgggtgtatcgtttgacatgaatgaggtaaagcaagttagggatcctgaggagcaggtaacgttagtgggtgtcccagaagaacatctcgggggccatgccttccacatgtaccatctcacttcgcctgatgggacagtttcgtttgagttccagcacaatgtatgtggccgttcaatatacgcagaaggaactgttgatgcagctatgtttctctacacaaagattcaatcgggtgcgagcaagaaattgtatgacatgattgatgtcttgagagaagggaacatgagatgaggtccatgttggcgtcagatgagctttcatgtaccaatttgcaagctcaattccaccgtgaattaggttacttttacaatgtacccttcccaatttaccagttaactcactttcagttttgaattggctgcttcaatgatggaaggtactccgttccagagtgtatgcaattttagtttctctaggtatattgattttggcgttttgctatacacctatatgcaatctatagattgtagtaaaaaaaatgtattc

SEQ ID NO: 1723 - protein, 343 aa, Zea mays subsp. mays
  peptide (1)..(343): Ceres Seq. ID no. 12405847
MISTTVAAHPATVTALRRMYPLRPRQPLCAPIFTAATRQCMATAKPSVTNALANLSVESAPAALPKLSFPILVNSCTGKMGKAVAEAAVSAGLQLVPVSFSAIEVPDRKIEICDREIFIHDPSESEKILPTIVKEYPNVIVVDYTVPDAVNANAELYCKFGLPFVMGTTGGNRQLLHKTVHDANIYAVISPQMGKQVVAFLAAMEIMSEQFPGAFSGYKLEVMESHQATKLDISGTAKAVISCFQKLGVSFDMNEVKQVRDPEEQVTLVGVPEEHLGGHAFHMYHLTSPDGTVSFEFQHNVCGRSIYAEGTVDAAMFLYTKIQSGASKKLYDMIDVLREGNMR

SEQ ID NO: 1724 - protein, 325 aa, Zea mays subsp. mays
  peptide (1)..(325): Ceres Seq. ID no. 12405848
MYPLRPRQPLCAPIFTAATRQCMATAKPSVTNALANLSVESAPAALPKLSFPILVNSCTGKMGKAVAEAAVSAGLQLVPVSFSAIEVPDRKIEICDREIFIHDPSESEKILPTIVKEYPNVIVVDYTVPDAVNANAELYCKFGLPFVMGTTGGNRQLLHKTVHDANIYAVISPQMGKQVVAFLAAMEIMSEQFPGAFSGYKLEVMESHQATKLDISGTAKAVISCFQKLGVSFDMNEVKQVRDPEEQVTLVGVPEEHLGGHAFHMYHLTSPDGTVSFEFQHNVCGRSIYAEGTVDAAMFLYTKIQSGASKKLYDMIDVLREGNMR

SEQ ID NO: 1725 - protein, 303 aa, Zea mays subsp. mays
  peptide (1)..(303): Ceres Seq. ID no. 12405849
MATAKPSVTNALANLSVESAPAALPKLSFPILVNSCTGKMGKAVAEAAVSAGLQLVPVSFSAIEVPDRKIEICDREIFIHDPSESEKILPTIVKEYPNVIVVDYTVPDAVNANAELYCKFGLPFVMGTTGGNRQLLHKTVHDANIYAVISPQMGKQVVAFLAAMEIMSEQFPGAFSGYKLEVMESHQATKLDISGTAKAVISCFQKLGVSFDMNEVKQVRDPEEQVTLVGVPEEHLGGHAFHMYHLTSPDGTVSFEFQHNVCGRSIYAEGTVDAAMFLYTKIQSGASKKLYDMIDVLREGNMR

SEQ ID NO: 1726 - DNA, 1243 bp, Zea mays subsp. mays
  misc_feature (1)..(1243): Ceres Seq. ID no. 12348925
  misc_feature (1)..(1243): Ortholog of  Ceres SEQ ID NO 13597582 as cited in SEQ ID NO 65348
aaaccacccgaccccacatggccacatccgcgatgcccacgccgtgagcccgtgaggcgcgccgctggagccgccgcagccgttactatgacctcgccggcccccacctcctggttctccggcctctcgcgctcctcctccaccatggccggcggcgtcgcctcggcctcggcctccgcctccgcctccggccccgcctccgcgttcctccccgacgcgcccaagtccgtaatcggcgccggctccggaggaggcaagcggaatcatctctgcggggcgctgttcaagtacggccccaaatctgcgcaggtagcattcaggactggggattttaaccatcaggtgatcttcattggtggcctcacagatgggcttttagctactgattacttggaaccattgtcacttgcattggaggttgagaaatggtccttggtacagccattgctttcttcatcatacactggatatggaatttccagcttacagcaagatgcgttagaactagagcaactcatcagttacctaataaataaggaaaattctgaaggagtaatattgcttggtcatagtactggatgccaggatattgtgcattatatgcgcacaaactttgcctgttcgaaagcggtttctggggtcatcttgcaggccccagtaagtgacagggagtatagagcaactcttccggaaacagctgaaatgatagacctggcagccaaattgattagcgagggccgtggaatggatttgatgcctagaaaagcaaactcagatgctcctattactgcctacaggtaccactccctttgttcatatatgggtgatgatgacatgttcagttcagatctaagtgaagatcagctgaggcagagacttggtcatgtcaaccacacagtgccaggttattttttcaatgggggatgaatatgtgcctgaatatgttgataagagggctctagtagacaggctatgtagggcactgggaggtgcagagaaagtcgagatagaatggggaaaccatgctctgtccaacagagtgcaagaagcagttgtggccattgtagattttgtcaagagggaggggcccaaaggctgggatgacccatggagctagatacagcagttataatctcatttgtaactagtttgtgcttttcctcttctctcttttctccaattgtaacttctttcttttgcattattattggtccatttttcaatagtgatatgctatttttcc

SEQ ID NO: 1727 - protein, 308 aa, Zea mays subsp. mays
  peptide (1)..(308): Ceres Seq. ID no. 12348926
KPPDPTWPHPRCPRREPVRRAAGAAAAVTMTSPAPTSWFSGLSRSSSTMAGGVASASASASASGPASAFLPDAPKSVIGAGSGGGKRNHLCGALFKYGPKSAQVAFRTGDFNHQVIFIGGLTDGLLATDYLEPLSLALEVEKWSLVQPLLSSSYTGYGISSLQQDALELEQLISYLINKENSEGVILLGHSTGCQDIVHYMRTNFACSKAVSGVILQAPVSDREYRATLPETAEMIDLAAKLISEGRGMDLMPRKANSDAPITAYRYHSLCSYMGDDDMFSSDLSEDQLRQRLGHVNHTVPGYFFNGG

SEQ ID NO: 1728 - protein, 279 aa, Zea mays subsp. mays
  peptide (1)..(279): Ceres Seq. ID no. 12348927
MTSPAPTSWFSGLSRSSSTMAGGVASASASASASGPASAFLPDAPKSVIGAGSGGGKRNHLCGALFKYGPKSAQVAFRTGDFNHQVIFIGGLTDGLLATDYLEPLSLALEVEKWSLVQPLLSSSYTGYGISSLQQDALELEQLISYLINKENSEGVILLGHSTGCQDIVHYMRTNFACSKAVSGVILQAPVSDREYRATLPETAEMIDLAAKLISEGRGMDLMPRKANSDAPITAYRYHSLCSYMGDDDMFSSDLSEDQLRQRLGHVNHTVPGYFFNGG

SEQ ID NO: 1729 - protein, 260 aa, Zea mays subsp. mays
  peptide (1)..(260): Ceres Seq. ID no. 12348928
MAGGVASASASASASGPASAFLPDAPKSVIGAGSGGGKRNHLCGALFKYGPKSAQVAFRTGDFNHQVIFIGGLTDGLLATDYLEPLSLALEVEKWSLVQPLLSSSYTGYGISSLQQDALELEQLISYLINKENSEGVILLGHSTGCQDIVHYMRTNFACSKAVSGVILQAPVSDREYRATLPETAEMIDLAAKLISEGRGMDLMPRKANSDAPITAYRYHSLCSYMGDDDMFSSDLSEDQLRQRLGHVNHTVPGYFFNGG

SEQ ID NO: 1730 - DNA, 1431 bp, Zea mays subsp. mays
  misc_feature (1)..(1431): Ceres Seq. ID no. 13498943
  misc_feature (1)..(1431): Ortholog of  Ceres SEQ ID NO 13598387 as cited in SEQ ID NO 62757
  misc_feature (1)..(1431): Ortholog of  Ceres SEQ ID NO 13662984 as cited in SEQ ID NO 64419
cccaaatcgacctgggctggacccagccgcgccccgtctgcctcctgcttctctctccgcttccgcttcctgcgcctccaggctccacttctccgctcggcagtctgcactggaaggacagcatgtcggcctcggcgtcgtcaccggcggcggcggcgggcgatgagaagcaggaggcggcgcccgtcaggcgctgcaagggcgtcaacgacctcgacaaggtcgttctccgcgaggtccggggcagctccgcagaggtgtacttgtatggtgggcatgtgacatcatggaaagatgagcatggagatgaattactttttgttagcaataaggctattttcaagcctccaaaagctatacgtggaggaataccaatatgctttccgcagttctccaactttgggaatctggaaccacatggatttgcaaggaataggacatggagtgttgatgatgatcctccgccatttccagtgccaacctccaatagcgcttatattgacttgatcctcaaacctactgaagatgatttgaagatctggcctcatagttttgaataccgcctgagggttgcacttagtcctggtggtgatttgatgctaacttcacgtataagaaacactaatgcagacgggaagccattctctttcacttttgcataccacacatacttcaagatttctgatatcagtgaggtgcgagtagaaggattggaaactctggattacctagacaacttacaagatagagctcgttccactgaacaaggcgatgcaattgtttttgaatccgaactggacagaatatatctgggcacaccatcgaaaattgccattattgatcatgagaagaaaagaacatttgttgtgaggaaaggaggccttcctgatgctgttgtttggaatccctgggataaaaaagcaaaggctatgtcagattttggggatgatgaatataaacgaatggtatgtgtggaggcggctgctattgaaaagactgtcactctgaagcctggtgaagagtggactggaaagttggaactttctgctgtgccatctagctattacagtggtcagctagaccctgaccgtgtgattcaggattccactgtcccggaggactccatcagctagtccttattctatttttgcaggtagagcattgtatcattatgcataagagatgctggcaacaagggctgtccacatgtttcttccattctgttcaaatcttcggtgtttttttattccgaatgcatatccgaaccaaggaatgtgaaattggtttccgctttttgaggatctatgtagcataatggataagtcggtgtttcgtaccctatttagggatgcttgaagcaagaaacatcttcatgggttgtaaaataaaagaaaaattctctttattatatttgatcaattcttttgcctc

SEQ ID NO: 1731 - protein, 376 aa, Zea mays subsp. mays
  peptide (1)..(376): Ceres Seq. ID no. 13498944
QIDLGWTQPRPVCLLLLSPLPLPAPPGSTSPLGSLHWKDSMSASASSPAAAAGDEKQEAAPVRRCKGVNDLDKVVLREVRGSSAEVYLYGGHVTSWKDEHGDELLFVSNKAIFKPPKAIRGGIPICFPQFSNFGNLEPHGFARNRTWSVDDDPPPFPVPTSNSAYIDLILKPTEDDLKIWPHSFEYRLRVALSPGGDLMLTSRIRNTNADGKPFSFTFAYHTYFKISDISEVRVEGLETLDYLDNLQDRARSTEQGDAIVFESELDRIYLGTPSKIAIIDHEKKRTFVVRKGGLPDAVVWNPWDKKAKAMSDFGDDEYKRMVCVEAAAIEKTVTLKPGEEWTGKLELSAVPSSYYSGQLDPDRVIQDSTVPEDSIS

SEQ ID NO: 1732 - protein, 336 aa, Zea mays subsp. mays
  peptide (1)..(336): Ceres Seq. ID no. 13498945
MSASASSPAAAAGDEKQEAAPVRRCKGVNDLDKVVLREVRGSSAEVYLYGGHVTSWKDEHGDELLFVSNKAIFKPPKAIRGGIPICFPQFSNFGNLEPHGFARNRTWSVDDDPPPFPVPTSNSAYIDLILKPTEDDLKIWPHSFEYRLRVALSPGGDLMLTSRIRNTNADGKPFSFTFAYHTYFKISDISEVRVEGLETLDYLDNLQDRARSTEQGDAIVFESELDRIYLGTPSKIAIIDHEKKRTFVVRKGGLPDAVVWNPWDKKAKAMSDFGDDEYKRMVCVEAAAIEKTVTLKPGEEWTGKLELSAVPSSYYSGQLDPDRVIQDSTVPEDSIS

SEQ ID NO: 1733 - DNA, 1673 bp, Zea mays subsp. mays
  misc_feature (1)..(1673): Ceres Seq. ID no. 12387134
  misc_feature (1)..(1673): Ortholog of  Ceres SEQ ID NO 14311862 as cited in SEQ ID NO 51654
  misc_feature (1)..(1673): Ortholog of  Ceres SEQ ID NO 13597334 as cited in SEQ ID NO 64244
  misc_feature (1)..(1673): Ortholog of  Ceres SEQ ID NO 14303165 as cited in SEQ ID NO 65181
  misc_feature (1)..(1673): Ortholog of  Ceres SEQ ID NO 15224550 as cited in SEQ ID NO 0
attcagaagcagtgaagtgagagaggtaaaacaagctgagactctaacttcaaaggaagatacacacacaaaggacagtgagaaggaggccaagaagcttgctcgcaaggcgctagggaggaagaagacaaccacgcactattgctgttgcttgtgcttagtgtgtgctcgtggctagaagcagacaagcagctgcgggagcataagggcggcatggcttcttgcggtagcttctactttgttcccatgctcctgctgatgctcctgctcgcttctcccgccactgctgcactggtgacatcctcccagcctggcggcaatgccactgctgcaaggccgaggccggggatggagcagctcaagcgcaagaggatcagggctctgctcaccaagcttaacaagcctgctctcaagactatccagagctcggatggcgacatcatagactgtgttccctctcacctccagcccgcatttgaccacccaaagctcaggggcgaaaagattctggatccgccggagaggcccaagaaccgcaacttcacctttggcggcagcggcagaagcagggtcggcgaggtggtggtgcaggcgtggcacgccaccggcgaggcgtgtccagaggggaccgtgccgatacggcggacgacggagaaggatctgctcagggctagctccctcaggaggtacggcaggaagccagcgcgccggggtgttcgccgtgattccacaagcagcggccatgagcatgcagttgggtatgtaaactcagaacagtactatggggccaaggccagtgttaatgtgtggtcgccaaggataggtgacccatctgagttcagcctgtctcagatctgggtcctctctggctccttcggcaatgatctcaacaccatcgaagctggatggcaggtaagcccagagctatacggagacagtaacccaagattcttcacctactggacaactgacgcgtaccaagaaaccgggtgctacaaccacaattgccgcggattcgtgcagacgacgaacaagattgcaattggggcggctatcaccccggagtcggtgtacaatggcaggcagttcgacatcactctcatgctatggaaggacccaaagcaggggcactggtggctggagctgggcccgggcctcgtagtcgggtactggccgtcgcacctcttcagccacctggctcgccacgccaacatggtgcagttcggcggcgaggtcgtcaacacccggccgtcggggtcgcataccgcgacgcagatgggcagcggccacttccccagagagggcttcgaccgcgccgcctacttccggaacctgcaggtggtggactgggacaacaacctcatcccggcggccaacctgaaactcctcgccgaccatcctggatgctacgatatccagggaggcactaacagctactggggaagctacttctactacggaggacccgggaggaacgccaaatgtccctgagatcaattcggaccggatgtctctttcttgttcgatgttcttttttcgttgccctttctaggatttggtaggtcttatacgtctttaacgaaagaatgcatccacggttgagacttgggaggaatttgtaaatttggcaagtacctgttatatttaatatccctatggctcatattttattt

SEQ ID NO: 1734 - protein, 425 aa, Zea mays subsp. mays
  peptide (1)..(425): Ceres Seq. ID no. 12387135
MASCGSFYFVPMLLLMLLLASPATAALVTSSQPGGNATAARPRPGMEQLKRKRIRALLTKLNKPALKTIQSSDGDIIDCVPSHLQPAFDHPKLRGEKILDPPERPKNRNFTFGGSGRSRVGEVVVQAWHATGEACPEGTVPIRRTTEKDLLRASSLRRYGRKPARRGVRRDSTSSGHEHAVGYVNSEQYYGAKASVNVWSPRIGDPSEFSLSQIWVLSGSFGNDLNTIEAGWQVSPELYGDSNPRFFTYWTTDAYQETGCYNHNCRGFVQTTNKIAIGAAITPESVYNGRQFDITLMLWKDPKQGHWWLELGPGLVVGYWPSHLFSHLARHANMVQFGGEVVNTRPSGSHTATQMGSGHFPREGFDRAAYFRNLQVVDWDNNLIPAANLKLLADHPGCYDIQGGTNSYWGSYFYYGGPGRNAKCP

SEQ ID NO: 1735 - protein, 414 aa, Zea mays subsp. mays
  peptide (1)..(414): Ceres Seq. ID no. 12387136
MLLLMLLLASPATAALVTSSQPGGNATAARPRPGMEQLKRKRIRALLTKLNKPALKTIQSSDGDIIDCVPSHLQPAFDHPKLRGEKILDPPERPKNRNFTFGGSGRSRVGEVVVQAWHATGEACPEGTVPIRRTTEKDLLRASSLRRYGRKPARRGVRRDSTSSGHEHAVGYVNSEQYYGAKASVNVWSPRIGDPSEFSLSQIWVLSGSFGNDLNTIEAGWQVSPELYGDSNPRFFTYWTTDAYQETGCYNHNCRGFVQTTNKIAIGAAITPESVYNGRQFDITLMLWKDPKQGHWWLELGPGLVVGYWPSHLFSHLARHANMVQFGGEVVNTRPSGSHTATQMGSGHFPREGFDRAAYFRNLQVVDWDNNLIPAANLKLLADHPGCYDIQGGTNSYWGSYFYYGGPGRNAKCP

SEQ ID NO: 1736 - protein, 410 aa, Zea mays subsp. mays
  peptide (1)..(410): Ceres Seq. ID no. 12387137
MLLLASPATAALVTSSQPGGNATAARPRPGMEQLKRKRIRALLTKLNKPALKTIQSSDGDIIDCVPSHLQPAFDHPKLRGEKILDPPERPKNRNFTFGGSGRSRVGEVVVQAWHATGEACPEGTVPIRRTTEKDLLRASSLRRYGRKPARRGVRRDSTSSGHEHAVGYVNSEQYYGAKASVNVWSPRIGDPSEFSLSQIWVLSGSFGNDLNTIEAGWQVSPELYGDSNPRFFTYWTTDAYQETGCYNHNCRGFVQTTNKIAIGAAITPESVYNGRQFDITLMLWKDPKQGHWWLELGPGLVVGYWPSHLFSHLARHANMVQFGGEVVNTRPSGSHTATQMGSGHFPREGFDRAAYFRNLQVVDWDNNLIPAANLKLLADHPGCYDIQGGTNSYWGSYFYYGGPGRNAKCP

SEQ ID NO: 1737 - DNA, 997 bp, Zea mays subsp. mays
  misc_feature (1)..(997): Ceres Seq. ID no. 13498415
  misc_feature (1)..(997): Ortholog of  Ceres SEQ ID NO 15226343 as cited in SEQ ID NO 61627
aaagataaagttaggctcggcaccgggggctcatccgcaagcctgtggacgcgagtgagtgaacaccagccgtattgtcccgaccccgaccgatcctcgcctgctgcagccatggcgacctccgcggcgctctctaccgccgccaatcccacccagctctgccggtcccgcgcttcgctgggcaagccggtgaaggggcttggcctgagcatgggccgcgagcgcgcccagcggagcattgtgtgccaggcggcgagcagcatctccgccgaccgcgtccccgacatggagaagcggaagctgatgaacctcctcctcctcggcgccatctcgttgcccaccgtcggcatggtcgtcccctacggcgccttcttcgtccctgccggctccgggaacgccggcggcgggacctacgcgaaggacaagctgggcaacgacatcacggnggaggcgtggctcaacacgcacggtcccaacgaccgcacgctngcgcaggggctcaagggtgaccccacgtacctggtggtggagcaggacaanacgctggccacctacgggatcaacgccgtgtgcactcacctcggctgcgtcgtgccgtggaacggcgccganaacaagttcatntgcccatgccncggatcccagtacaacaaccagggcaaggtggtccgtggaccggngcctctgtcgctggccctggttcacgccgacgtngacgacggcaaggtcctnttngtcccgtgggtggagaccgacttcaggaccggcgaggacccgtggtggaaggcatgaggatgatccgaaaccancggtgntcagtgctcacacatgagacctacgtatgcctccgttccttgtgatgaggaaatatgcttgcgttcgttntccgtgggcgttgttcctacaaattcacttgctttctgtctctctctctatanacncnctgtataaaacaagaacagctgtttatcatctcttnttatataaccttttgaac

SEQ ID NO: 1738 - protein, 263 aa, Zea mays subsp. mays
  peptide (1)..(263): Ceres Seq. ID no. 13498416
  misc_feature (149)..(149): Xaa is any aa, unknown or other
  misc_feature (163)..(163): Xaa is any aa, unknown or other
  misc_feature (180)..(180): Xaa is any aa, unknown or other
  misc_feature (204)..(204): Xaa is any aa, unknown or other
  misc_feature (208)..(208): Xaa is any aa, unknown or other
  misc_feature (212)..(212): Xaa is any aa, unknown or other
  misc_feature (227)..(227): Xaa is any aa, unknown or other
  misc_feature (238)..(238): Xaa is any aa, unknown or other
  misc_feature (244)..(244): Xaa is any aa, unknown or other
  misc_feature (245)..(245): Xaa is any aa, unknown or other
KDKVRLGTGGSSASLWTRVSEHQPYCPDPDRSSPAAAMATSAALSTAANPTQLCRSRASLGKPVKGLGLSMGRERAQRSIVCQAASSISADRVPDMEKRKLMNLLLLGAISLPTVGMVVPYGAFFVPAGSGNAGGGTYAKDKLGNDITXEAWLNTHGPNDRTXAQGLKGDPTYLVVEQDXTLATYGINAVCTHLGCVVPWNGAXNKFXCPCXGSQYNNQGKVVRGPXPLSLALVHADXDDGKVXXVPWVETDFRTGEDPWWKA

SEQ ID NO: 1739 - protein, 226 aa, Zea mays subsp. mays
  peptide (1)..(226): Ceres Seq. ID no. 13498417
  misc_feature (112)..(112): Xaa is any aa, unknown or other
  misc_feature (126)..(126): Xaa is any aa, unknown or other
  misc_feature (143)..(143): Xaa is any aa, unknown or other
  misc_feature (167)..(167): Xaa is any aa, unknown or other
  misc_feature (171)..(171): Xaa is any aa, unknown or other
  misc_feature (175)..(175): Xaa is any aa, unknown or other
  misc_feature (190)..(190): Xaa is any aa, unknown or other
  misc_feature (201)..(201): Xaa is any aa, unknown or other
  misc_feature (207)..(207): Xaa is any aa, unknown or other
  misc_feature (208)..(208): Xaa is any aa, unknown or other
MATSAALSTAANPTQLCRSRASLGKPVKGLGLSMGRERAQRSIVCQAASSISADRVPDMEKRKLMNLLLLGAISLPTVGMVVPYGAFFVPAGSGNAGGGTYAKDKLGNDITXEAWLNTHGPNDRTXAQGLKGDPTYLVVEQDXTLATYGINAVCTHLGCVVPWNGAXNKFXCPCXGSQYNNQGKVVRGPXPLSLALVHADXDDGKVXXVPWVETDFRTGEDPWWKA

SEQ ID NO: 1740 - protein, 193 aa, Zea mays subsp. mays
  peptide (1)..(193): Ceres Seq. ID no. 13498418
  misc_feature (79)..(79): Xaa is any aa, unknown or other
  misc_feature (93)..(93): Xaa is any aa, unknown or other
  misc_feature (110)..(110): Xaa is any aa, unknown or other
  misc_feature (134)..(134): Xaa is any aa, unknown or other
  misc_feature (138)..(138): Xaa is any aa, unknown or other
  misc_feature (142)..(142): Xaa is any aa, unknown or other
  misc_feature (157)..(157): Xaa is any aa, unknown or other
  misc_feature (168)..(168): Xaa is any aa, unknown or other
  misc_feature (174)..(174): Xaa is any aa, unknown or other
  misc_feature (175)..(175): Xaa is any aa, unknown or other
MGRERAQRSIVCQAASSISADRVPDMEKRKLMNLLLLGAISLPTVGMVVPYGAFFVPAGSGNAGGGTYAKDKLGNDITXEAWLNTHGPNDRTXAQGLKGDPTYLVVEQDXTLATYGINAVCTHLGCVVPWNGAXNKFXCPCXGSQYNNQGKVVRGPXPLSLALVHADXDDGKVXXVPWVETDFRTGEDPWWKA

SEQ ID NO: 1741 - DNA, 1141 bp, Zea mays subsp. mays
  misc_feature (1)..(1141): Ceres Seq. ID no. 12349900
  misc_feature (1)..(1141): Ortholog of  Ceres SEQ ID NO 13598479 as cited in SEQ ID NO 60680
ctgatcctctccgccatttctgtgcgcatctggagctgttgttctaaacccccaaaccctccgtcctaacctctgcgccaccggcgtcaccaccgccggagccgcagccatgaacgccttcaggttcctcggggacatgacccacctcttctcggtcctcgtcctcctcctcaagatctacgccaccaagtcctgctcaggggtgtcgaggaagacgcaggagctgtacatgttggtgttcgtggcgaggtacctggacctcttcacggattatgtctcgctctacaactcggtgatgaaggtggtgttcatcaccagctcggcggccatcgtgtggtgcatgcgccgccacccgcaggtacgaaggacgtacgacaaggagcaggacaccttccgccacacggtgctcgtcgccgccgcattcctgctcgcgctgatattccacgagcggttcaccttccgtgagatatgctgggcattttcaatctatttggaggcagtggctattctcccacaattagtgttgctccagagaagcagaaatgtggataacttaactggacaatatgttttcttccttggggcctaccgtgcgttttacattctaaactggatttatcgttatttcacggagggtcatcgcagcagatggatcccttggcttgctggtttggtgcaaacagctctgtatgcagatttcttttactattatttcttaagttggaagaacaatgtgaagctcgagttgcctgcttgagcatgcttcgttttgccagaaagcgtgcaagctacgtgactcaagttttatagaatttagttgattatatgggcatggagagacttggtaatgacgtgagcagttgcagttgatgccaaacccttgatcttgtctgcgaaaattggcatttgtgtttcccatggccaagacgatacgattccaaagctaacagatgctgctgcacagaagtaggctagttcctttttgtacctcaatacttttgatatggaaaatcatatacagttcagttggtctgtttaacattcgatttcacttgctccaaacgaaaaatgcgatccaatgttcgtgcgatttctgtgtaaaactgttacacttttgactgtcctcaacaatccatttttt

SEQ ID NO: 1742 - protein, 215 aa, Zea mays subsp. mays
  peptide (1)..(215): Ceres Seq. ID no. 12349901
MNAFRFLGDMTHLFSVLVLLLKIYATKSCSGVSRKTQELYMLVFVARYLDLFTDYVSLYNSVMKVVFITSSAAIVWCMRRHPQVRRTYDKEQDTFRHTVLVAAAFLLALIFHERFTFREICWAFSIYLEAVAILPQLVLLQRSRNVDNLTGQYVFFLGAYRAFYILNWIYRYFTEGHRSRWIPWLAGLVQTALYADFFYYYFLSWKNNVKLELPA

SEQ ID NO: 1743 - protein, 206 aa, Zea mays subsp. mays
  peptide (1)..(206): Ceres Seq. ID no. 12349902
MTHLFSVLVLLLKIYATKSCSGVSRKTQELYMLVFVARYLDLFTDYVSLYNSVMKVVFITSSAAIVWCMRRHPQVRRTYDKEQDTFRHTVLVAAAFLLALIFHERFTFREICWAFSIYLEAVAILPQLVLLQRSRNVDNLTGQYVFFLGAYRAFYILNWIYRYFTEGHRSRWIPWLAGLVQTALYADFFYYYFLSWKNNVKLELPA

SEQ ID NO: 1744 - protein, 175 aa, Zea mays subsp. mays
  peptide (1)..(175): Ceres Seq. ID no. 12349903
MLVFVARYLDLFTDYVSLYNSVMKVVFITSSAAIVWCMRRHPQVRRTYDKEQDTFRHTVLVAAAFLLALIFHERFTFREICWAFSIYLEAVAILPQLVLLQRSRNVDNLTGQYVFFLGAYRAFYILNWIYRYFTEGHRSRWIPWLAGLVQTALYADFFYYYFLSWKNNVKLELPA

SEQ ID NO: 1745 - DNA, 1157 bp, Zea mays subsp. mays
  misc_feature (1)..(1157): Ceres Seq. ID no. 12373468
  misc_feature (1)..(1157): Ortholog of  Ceres SEQ ID NO 13574766 as cited in SEQ ID NO 33
aaaaatttcgagtttttttaaatacactataaccgagagcctgaaaatgggaacaaactagcaactgaagcgtaccaacaaaaaacgcccgattcgcctcgcaaaatcgccgccgccatcgcctactccaccagacgccgatagttccgccttcctttcctgctgcgcgcctgtcgccatggtgaagcggtggcttcggcctcgaggccaaccccgacgtcatgaaccagttcatgtggggactgggggtccccgaggacgtggggttctgcgacgtgtacggcctcgatgacgagttgctcgccatggtgccccagccggtgctcgcggtcctacttctctacccccaggaccggagcaaggagtcccaagcttcagctacctcgtcggtggagaccaaggagcccagcaagaacgtatatttcacaaagcaaactgttgggaatgcctgtggccacagttggtattattcatgcactggggaatgctacttccagaatcaagttaggtgaggggtcatattttgatagattttataaacgaactgctgacatggatcctatccagcgtgctgcatttcttgaggaggacgaggaaatggagaatgctcattccattgccgctactgctggtgacacagaggccaaggacggtgtaattgaacattacatttgtttctcttgtgtcgatggagagctttatgagcttgatggggggacatcacagccaataccccatgggccttccactcctgataccttgttgcaggatgctgcagaagttataaaagcaagaatcgccatgtattcgcagtcaaacaacttcaatgtcatggctctttcaggcaaagcgatatagcattatagcactttcagtcataggcacttgatatcccacatttgctttgcagctgccttagcccaacactgcagcatgttctattgttttcttgccttcgttttattatttaaacacgttaaaacaagataaataaaagcgtggctacagaaaagttcccgttggtagtatcacttactctgtagaagagctaatgtgccgtttcgttcacgaaatgtgacgtaaatgataatagtaatgattcacgttcgaataccggtggtaaaagtttaaataagtcggtatctatttctagtgtt

SEQ ID NO: 1746 - protein, 189 aa, Zea mays subsp. mays
  peptide (1)..(189): Ceres Seq. ID no. 12373469
MTSCSPWCPSRCSRSYFSTPRTGARSPKLQLPRRWRPRSPARTYISQSKLLGMPVATVGIIHALGNATSRIKLGEGSYFDRFYKRTADMDPIQRAAFLEEDEEMENAHSIAATAGDTEAKDGVIEHYICFSCVDGELYELDGGTSQPIPHGPSTPDTLLQDAAEVIKARIAMYSQSNNFNVMALSGKAI

SEQ ID NO: 1747 - protein, 137 aa, Zea mays subsp. mays
  peptide (1)..(137): Ceres Seq. ID no. 12373470
MPVATVGIIHALGNATSRIKLGEGSYFDRFYKRTADMDPIQRAAFLEEDEEMENAHSIAATAGDTEAKDGVIEHYICFSCVDGELYELDGGTSQPIPHGPSTPDTLLQDAAEVIKARIAMYSQSNNFNVMALSGKAI

SEQ ID NO: 1748 - protein, 101 aa, Zea mays subsp. mays
  peptide (1)..(101): Ceres Seq. ID no. 12373471
MDPIQRAAFLEEDEEMENAHSIAATAGDTEAKDGVIEHYICFSCVDGELYELDGGTSQPIPHGPSTPDTLLQDAAEVIKARIAMYSQSNNFNVMALSGKAI

SEQ ID NO: 1749 - DNA, 1886 bp, Zea mays subsp. mays
  misc_feature (1)..(1886): Ceres Seq. ID no. 12369040
  misc_feature (1)..(1886): Ortholog of  Ceres SEQ ID NO 15172174 as cited in SEQ ID NO 60481
  misc_feature (1)..(1886): Ortholog of  Ceres SEQ ID NO 15176081 as cited in SEQ ID NO 65838
  misc_feature (1)..(1886): Ortholog of  Ceres SEQ ID NO 14302875 as cited in SEQ ID NO 66242
  misc_feature (1)..(1886): Ortholog of  Ceres SEQ ID NO 13660287 as cited in SEQ ID NO 67316
  misc_feature (1)..(1886): Ortholog of  Ceres SEQ ID NO 14307892 as cited in SEQ ID NO 67490
gcacgagaccattacctagaacatcctaatcgaaaaaaaccgatcgagcctcgacgagcgagcagaggactcatcctaggtagctaagctgtccgacagcacagcagaccgatacgatacgacgatgatgagtagcaccggcggcgagagcaagctggagagcccgctgctgggcctgcccgcgccgggctcgtcggccggcagcgggcacagccacggcgaggcggtgagcgggcagctggagagcatcctcagcgacgcctccctgccgtggaggcagcggatgctgtcagcgtccatggttgagatgcggctgctcgtgcgcctggccgcgcccgccgtgctcgtctacatgatcaactacctcatgtccatgtccacgcagatcttctcgggacacctcggcacgctcgagctcgccgccgcgtcgctcggcaacaccggcatccaggtcttcgcctatggcctcatgctgggcatggggagcgcggtggagacgctgtgcgggcaggcgtacggcgcgcacaagtacgacatgctgggcatctacttgcagcgctccaccatcctgctgatggccacgggggtgcctctgaccgtgctctacgccttctcccgccccatcctggtcctcctcggggagtcccccgagatcgcctccgccgccgccgtcttcgtgtacggcctcatcccgcagatcttcgcgtacgccgccaacttccccatccagaagttcatgcaggcgcagagcatcatggcccccagtgcgtacatctccgccgccacgctggccgtgcacctcgccctcagctacctcgtcgtgtaccagttcgggctgggcctcctcggcgcgtcgctcatgctcagcgtcagctggtgggtcatcgtcgccgcgcagttcgcctacatcgccaccagccagcggtgccgcctcacctggacgggcttctcgtgggaggccttctcggggctccccggcttcctcaagctgtccctcgcctccgccgtcatgctctgcctcgagacctggtacttccagatactcgtgctcatcgcgggactcctcaaggaccccgagcttgccttggcctcactctctgtctgcatgtcaattacagggtgggtgttcatgatatcagttgggttcaatgcagcagccagcgtaagagtgagcaacgagcttggcgccggcaacccaaagtccgcggcgttctctgtggtggtagtgacgctgctctccttcgtcctgtcggtcataatctccgtcgtcatcctgctgtgccgggactacatcagctacatcttcaccgagggcgacgacgtgtcgcgggcggtcgcccagctcagcccgctgctggcggtcaccctcatcctcaacggcatccagcccgtcctctctggggtagctgtggggtgtggatggcaagcgttggtcgcatacgtcaatgtcggctgctactacatcgtcggcatcccccttgggtgcctcctgggattctacttcgacctaggagcagcgggtatctggagcggtatgatcgggggcaccctgatgcagaccatgatcctggtgtgggttacattcaggacgaactggaacaaggaggttgaagaagcgcagaaaagactgaacaaatgggaagacagtaaagcgcctgtccagtgagcccaagaactaaataaggcttctctgttgccaaaccaagaacgagagacgtgggaaattgatgcaattcaccctgatgcagattcggaaattgatgcaaggttgcaattcagtgtcctgaaatgtctacgaggagaggagaggagaggagatgagatggctggaattttaaatactactcttgcatcacgcaattcaattctgtgttccgttattatat

SEQ ID NO: 1750 - protein, 513 aa, Zea mays subsp. mays
  peptide (1)..(513): Ceres Seq. ID no. 12369041
MMSSTGGESKLESPLLGLPAPGSSAGSGHSHGEAVSGQLESILSDASLPWRQRMLSASMVEMRLLVRLAAPAVLVYMINYLMSMSTQIFSGHLGTLELAAASLGNTGIQVFAYGLMLGMGSAVETLCGQAYGAHKYDMLGIYLQRSTILLMATGVPLTVLYAFSRPILVLLGESPEIASAAAVFVYGLIPQIFAYAANFPIQKFMQAQSIMAPSAYISAATLAVHLALSYLVVYQFGLGLLGASLMLSVSWWVIVAAQFAYIATSQRCRLTWTGFSWEAFSGLPGFLKLSLASAVMLCLETWYFQILVLIAGLLKDPELALASLSVCMSITGWVFMISVGFNAAASVRVSNELGAGNPKSAAFSVVVVTLLSFVLSVIISVVILLCRDYISYIFTEGDDVSRAVAQLSPLLAVTLILNGIQPVLSGVAVGCGWQALVAYVNVGCYYIVGIPLGCLLGFYFDLGAAGIWSGMIGGTLMQTMILVWVTFRTNWNKEVEEAQKRLNKWEDSKAPVQ

SEQ ID NO: 1751 - protein, 512 aa, Zea mays subsp. mays
  peptide (1)..(512): Ceres Seq. ID no. 12369042
MSSTGGESKLESPLLGLPAPGSSAGSGHSHGEAVSGQLESILSDASLPWRQRMLSASMVEMRLLVRLAAPAVLVYMINYLMSMSTQIFSGHLGTLELAAASLGNTGIQVFAYGLMLGMGSAVETLCGQAYGAHKYDMLGIYLQRSTILLMATGVPLTVLYAFSRPILVLLGESPEIASAAAVFVYGLIPQIFAYAANFPIQKFMQAQSIMAPSAYISAATLAVHLALSYLVVYQFGLGLLGASLMLSVSWWVIVAAQFAYIATSQRCRLTWTGFSWEAFSGLPGFLKLSLASAVMLCLETWYFQILVLIAGLLKDPELALASLSVCMSITGWVFMISVGFNAAASVRVSNELGAGNPKSAAFSVVVVTLLSFVLSVIISVVILLCRDYISYIFTEGDDVSRAVAQLSPLLAVTLILNGIQPVLSGVAVGCGWQALVAYVNVGCYYIVGIPLGCLLGFYFDLGAAGIWSGMIGGTLMQTMILVWVTFRTNWNKEVEEAQKRLNKWEDSKAPVQ

SEQ ID NO: 1752 - protein, 460 aa, Zea mays subsp. mays
  peptide (1)..(460): Ceres Seq. ID no. 12369043
MLSASMVEMRLLVRLAAPAVLVYMINYLMSMSTQIFSGHLGTLELAAASLGNTGIQVFAYGLMLGMGSAVETLCGQAYGAHKYDMLGIYLQRSTILLMATGVPLTVLYAFSRPILVLLGESPEIASAAAVFVYGLIPQIFAYAANFPIQKFMQAQSIMAPSAYISAATLAVHLALSYLVVYQFGLGLLGASLMLSVSWWVIVAAQFAYIATSQRCRLTWTGFSWEAFSGLPGFLKLSLASAVMLCLETWYFQILVLIAGLLKDPELALASLSVCMSITGWVFMISVGFNAAASVRVSNELGAGNPKSAAFSVVVVTLLSFVLSVIISVVILLCRDYISYIFTEGDDVSRAVAQLSPLLAVTLILNGIQPVLSGVAVGCGWQALVAYVNVGCYYIVGIPLGCLLGFYFDLGAAGIWSGMIGGTLMQTMILVWVTFRTNWNKEVEEAQKRLNKWEDSKAPVQ

SEQ ID NO: 1753 - DNA, 1588 bp, Zea mays subsp. mays
  misc_feature (1)..(1588): Ceres Seq. ID no. 12411029
  misc_feature (1)..(1588): Ortholog of  Ceres SEQ ID NO 13659033 as cited in SEQ ID NO 66372
  misc_feature (1)..(1588): Ortholog of  Ceres SEQ ID NO 13655724 as cited in SEQ ID NO 68973
  misc_feature (1)..(1588): Ortholog of  Ceres SEQ ID NO 12625899 as cited in SEQ ID NO 69079
accaaaaggggtttcggcatggatggatagcacacagcgagcgagcgagagcggtgagcccggccaccagcgccggaggccgtcgtcgtcttactagccgacgctcgacttgggcatgaattgctagccgcgcgggtgagagattgctaggtagccagctaggtacggtgtggggagttgaatcggaggtctgccgctcgaggcggcggcggcagaaggccggtaggatgaagaagctccactggctggtgcggttcctgttcgggccggtgccggtctacttctcggcgctggccatcctcatcgtgctcaccaacgcgcagtacttcgggctggtgggcgtcggcgtggcgccgcgcaccgcgaagctggcctcctcggcgcccgtggtcagcgtcatgaagtactgcgacatcttccgcggcgagtgggtgccggacgcggaggcgccctactacaaccacaagacgtgccacatgatccaggagcaccagaactgcctcaagtacggccgccccgacctgggcttcctcaagtggcggtggcggccctccggatgcgagctgccgcgcttcgacccgctgcagttcctgcagttcgcccgcgggaagtcgctggccttcgtcggggactcgctggcgcggaaccacatgcagtcgctgctctgcctcctgtcccaggtggcgtatcccaaggacctgtcggcgaacccgtcggaccagaacaaggtgtaccactaccgggcgtacaacttcaccatcagcatgttctggtcgccgttcctggtgcgcgcccgggagcccgaccacgacggccccgcgcacacgggccactggagcctctacctggacgagcccgacgacaagtgggtgtcccagatgccccgcttcgactacgtgctggtgtcggcggccaactggttctcccgcccctccctcttctacgagcggcggcgcctcgtcgggtgcagcttctgcagccgccagtacggcgtgcccgacctgacgctctactactcgcagcgccgcgcgtggcgcgtggcgctgcgcgccatcaacgacctggagcgcctgcgagggcgcgtcatcgtgcgcatgctctccccgatgtcgcacttcgagaacgggacctgggaccacggcggcgactgcaggcgcacgcagccgctgcgggcgaaccagaccgccatggagggccgcgacctgcacttctacaccgcgcagatggaggagttccgcgccgcggagaaggccgccgccgagaaggggcggcgcctgatgctcatggacgccacggcggcgatgctgatgcggcccgacggccaccccagccgctacgggcactggcccaacgagaaggtgcagctctacaacgactgcatccactggtgcctcccgggacccatcgacatctggaacgacatgctcttccagatgctcctcgcctagcagcaagcagcaaagattaaaaaaaaaactcagcaattcggtcgccggtaaccgtgcacagattggccttcttttttttgccttgtttcgtttttttaaaaaaagaagaaaatggtgcaattttgacaagcaaggattcg

SEQ ID NO: 1754 - protein, 406 aa, Zea mays subsp. mays
  peptide (1)..(406): Ceres Seq. ID no. 12411030
MKKLHWLVRFLFGPVPVYFSALAILIVLTNAQYFGLVGVGVAPRTAKLASSAPVVSVMKYCDIFRGEWVPDAEAPYYNHKTCHMIQEHQNCLKYGRPDLGFLKWRWRPSGCELPRFDPLQFLQFARGKSLAFVGDSLARNHMQSLLCLLSQVAYPKDLSANPSDQNKVYHYRAYNFTISMFWSPFLVRAREPDHDGPAHTGHWSLYLDEPDDKWVSQMPRFDYVLVSAANWFSRPSLFYERRRLVGCSFCSRQYGVPDLTLYYSQRRAWRVALRAINDLERLRGRVIVRMLSPMSHFENGTWDHGGDCRRTQPLRANQTAMEGRDLHFYTAQMEEFRAAEKAAAEKGRRLMLMDATAAMLMRPDGHPSRYGHWPNEKVQLYNDCIHWCLPGPIDIWNDMLFQMLLA

SEQ ID NO: 1755 - protein, 349 aa, Zea mays subsp. mays
  peptide (1)..(349): Ceres Seq. ID no. 12411031
MKYCDIFRGEWVPDAEAPYYNHKTCHMIQEHQNCLKYGRPDLGFLKWRWRPSGCELPRFDPLQFLQFARGKSLAFVGDSLARNHMQSLLCLLSQVAYPKDLSANPSDQNKVYHYRAYNFTISMFWSPFLVRAREPDHDGPAHTGHWSLYLDEPDDKWVSQMPRFDYVLVSAANWFSRPSLFYERRRLVGCSFCSRQYGVPDLTLYYSQRRAWRVALRAINDLERLRGRVIVRMLSPMSHFENGTWDHGGDCRRTQPLRANQTAMEGRDLHFYTAQMEEFRAAEKAAAEKGRRLMLMDATAAMLMRPDGHPSRYGHWPNEKVQLYNDCIHWCLPGPIDIWNDMLFQMLLA

SEQ ID NO: 1756 - protein, 323 aa, Zea mays subsp. mays
  peptide (1)..(323): Ceres Seq. ID no. 12411032
MIQEHQNCLKYGRPDLGFLKWRWRPSGCELPRFDPLQFLQFARGKSLAFVGDSLARNHMQSLLCLLSQVAYPKDLSANPSDQNKVYHYRAYNFTISMFWSPFLVRAREPDHDGPAHTGHWSLYLDEPDDKWVSQMPRFDYVLVSAANWFSRPSLFYERRRLVGCSFCSRQYGVPDLTLYYSQRRAWRVALRAINDLERLRGRVIVRMLSPMSHFENGTWDHGGDCRRTQPLRANQTAMEGRDLHFYTAQMEEFRAAEKAAAEKGRRLMLMDATAAMLMRPDGHPSRYGHWPNEKVQLYNDCIHWCLPGPIDIWNDMLFQMLLA

SEQ ID NO: 1757 - DNA, 1576 bp, Zea mays subsp. mays
  misc_feature (1)..(1576): Ceres Seq. ID no. 12351922
  misc_feature (1)..(1576): Ortholog of  Ceres SEQ ID NO 14305042 as cited in SEQ ID NO 52957
  misc_feature (1)..(1576): Ortholog of  Ceres SEQ ID NO 12614610 as cited in SEQ ID NO 68142
agatacccgttcatccctcgctctcgctgccacttctcccgttcggcctctttttccttccaccaatggaagctctcacagcccgctcctccgtactctcgccgccggggattgccggagacacctcgccctcccttcccctgcccctccgccgagcctccgccgcgtttcttgggcctcgcaggagcccctccgccctcgccatctccacgcgctggctgcgcgctccgcctcgacgcggcggccgcctgctcgcgggggaaggggaagaagtgccccccgaccccgccgatgacgcggctggccgggcggaagattttctagtactcgagaataatgtaactctacgccaaagcaatgacatggataccattaaacatgatgatgctggcacttctggaattggtgggagtaacactggtggctctaggactggcctattcagaacacctatttcaggtggtgtgcacagtgcaactgctgttcatgatttaccaccaccagctttggctgttcgcaacctcatggaacaggcaaggtttgctcatctgtgcactgtaatgtctcggatgcatcaccgccgtgagggatacccattcggttccctagtagattttgcacctgacccatttggccacccgatcttctcattatccccactagctatccacacaagaaatttgttggcagacccaagatgcacccttgttgtacaggttcctggatggagtgggctatcaaatgcacgagtaactatctttggcgatgtcattccgttgcccactgaacaacaggaatgggctcatcagcagtatgtttcaaagcaccagcagtgggcatcccaacagtggggtaacttttactattacagaatgcacacaataagtgacatatatttcattggaggttttggtactgttgcttgggtagatgtgaacgaatatgaggctctgcaacctgacaagattgctatggatggaggggaacaaaatctgaaggaactcaacgcaatgttctcaaagcctctgaaagagcttttgtcaactgatgaaggagaggtagacgatgttgctcttatttcaatggacagcaaaggtatcgatatccgtgtccgacaaggtgcacagttcaacatccagagggtgccctttgaggtggatcacagcgtcgaaacactagatgaagccacggaagctctcaggaggataatcagcaagtctaggtggcacacaaagagctcagtcataggacgcccttgaaagctgaagctggaggctctatagaacagtttgtacagtgcggcagcagtctctactacggtatgtgccaataaggggaactccgttccagagtttcgtctactgccaagggcctcgtgtttgtgggtgggttgaataaacacgcaatttgagatgatgctgttttgaccatgaatttagattgaacgcacatcggcaaaaggatttaatgtgaagttgtcgatgggttgaaaaagatgtgaccatctctgacctgcttcattcttgaggaattgaggataaagcacatttgaacatgcgcatgccattttgttttt

SEQ ID NO: 1758 - protein, 418 aa, Zea mays subsp. mays
  peptide (1)..(418): Ceres Seq. ID no. 12351923
IPVHPSLSLPLLPFGLFFLPPMEALTARSSVLSPPGIAGDTSPSLPLPLRRASAAFLGPRRSPSALAISTRWLRAPPRRGGRLLAGEGEEVPPDPADDAAGRAEDFLVLENNVTLRQSNDMDTIKHDDAGTSGIGGSNTGGSRTGLFRTPISGGVHSATAVHDLPPPALAVRNLMEQARFAHLCTVMSRMHHRREGYPFGSLVDFAPDPFGHPIFSLSPLAIHTRNLLADPRCTLVVQVPGWSGLSNARVTIFGDVIPLPTEQQEWAHQQYVSKHQQWASQQWGNFYYYRMHTISDIYFIGGFGTVAWVDVNEYEALQPDKIAMDGGEQNLKELNAMFSKPLKELLSTDEGEVDDVALISMDSKGIDIRVRQGAQFNIQRVPFEVDHSVETLDEATEALRRIISKSRWHTKSSVIGRP

SEQ ID NO: 1759 - protein, 397 aa, Zea mays subsp. mays
  peptide (1)..(397): Ceres Seq. ID no. 12351924
MEALTARSSVLSPPGIAGDTSPSLPLPLRRASAAFLGPRRSPSALAISTRWLRAPPRRGGRLLAGEGEEVPPDPADDAAGRAEDFLVLENNVTLRQSNDMDTIKHDDAGTSGIGGSNTGGSRTGLFRTPISGGVHSATAVHDLPPPALAVRNLMEQARFAHLCTVMSRMHHRREGYPFGSLVDFAPDPFGHPIFSLSPLAIHTRNLLADPRCTLVVQVPGWSGLSNARVTIFGDVIPLPTEQQEWAHQQYVSKHQQWASQQWGNFYYYRMHTISDIYFIGGFGTVAWVDVNEYEALQPDKIAMDGGEQNLKELNAMFSKPLKELLSTDEGEVDDVALISMDSKGIDIRVRQGAQFNIQRVPFEVDHSVETLDEATEALRRIISKSRWHTKSSVIGRP

SEQ ID NO: 1760 - protein, 298 aa, Zea mays subsp. mays
  peptide (1)..(298): Ceres Seq. ID no. 12351925
MDTIKHDDAGTSGIGGSNTGGSRTGLFRTPISGGVHSATAVHDLPPPALAVRNLMEQARFAHLCTVMSRMHHRREGYPFGSLVDFAPDPFGHPIFSLSPLAIHTRNLLADPRCTLVVQVPGWSGLSNARVTIFGDVIPLPTEQQEWAHQQYVSKHQQWASQQWGNFYYYRMHTISDIYFIGGFGTVAWVDVNEYEALQPDKIAMDGGEQNLKELNAMFSKPLKELLSTDEGEVDDVALISMDSKGIDIRVRQGAQFNIQRVPFEVDHSVETLDEATEALRRIISKSRWHTKSSVIGRP

SEQ ID NO: 1761 - DNA, 1388 bp, Zea mays subsp. mays
  misc_feature (1)..(1388): Ceres Seq. ID no. 12588453
  misc_feature (1)..(1388): Ortholog of  Ceres SEQ ID NO 13654583 as cited in SEQ ID NO 68599
aacgcctcacgccatgcgactcgtcacggcctcggcgtgccgcctgcgtgcccggtgcccgtgcggccgtgacgaacgacactgacgagcaaagcaaagccaacggagccgagcgagacgacgagaccgcgattgctagctagctagttcgggcagcgagcggggtgagacggctatggcgtgctgctccgccgtcctgcaccatccgctgggcttctcactcaccccgtgctccgcctcccgagccccaccgcgcatccagcgcgtgggcgtggcaactccctcggccgcctccgcccgccctctttctcgcgccaggatctcaccgcgctgcacctactccggtggcgccagcgctgcccctggtcctggggagctacccgcggcggcgctccgacgggtccttgagatgccgggtgcgcaccaggcgcccgcctgctacgacgcgctgagcgcacgcctcgtcgagcgcgccgagttcagggcctgcttcacgagcggtttctcaatctctgccgcacggcttggattaccagatgttggtctcatctcgtacggggaaatgatcgatcaggggcgtctgatgactgaagcagtttcaatccctgtgatcggtgatgcggataatggttacggaaactgtatgaatgttaagaggacagtgaaaggatttattaatgctggttttgctggaattattcttgaagatcaggtgtcaccaaaggcatgtggacacacacaaggaaggaaggttgtctcaagggaggaagcaattatgcacataaaagctgctgttgatgccaggaatgagagtggctctgatattgttattgtggcaaggacagattctcgtcaagctgtgtctcttaatgaagcattatggagagtacgggcctttgctgatgctggagcagatgttctattcattgatgccctcgcctcaagggaagaaatgaaggcattttgcgctatcgcgcctggagttccaaaaatggccaacatgttagaaggtggtggtaaaactcctatactgagccctgttgaactggaagaaataggttataaaatcatagcctatccattatctctaattggtgtatcgatgcgtgcaatggagtttatggaggtgggctgcattggacaagctcgcatctggaaattgctgggtgtcttgaaccttttgggtgacagaaagttatctcatgtacaaaatgtttacacagcccagttgctaccaattgctgatttgtgtacttcttgggctttaccacttgcacggttcagaaacctgcactatgtaaggggatgttgatggcaattgacctcattttgtaaatgatcctcgtttatcttggattcatttttagtgttcagtttggcagttgacc

SEQ ID NO: 1762 - protein, 378 aa, Zea mays subsp. mays
  peptide (1)..(378): Ceres Seq. ID no. 12588454
MACCSAVLHHPLGFSLTPCSASRAPPRIQRVGVATPSAASARPLSRARISPRCTYSGGASAAPGPGELPAAALRRVLEMPGAHQAPACYDALSARLVERAEFRACFTSGFSISAARLGLPDVGLISYGEMIDQGRLMTEAVSIPVIGDADNGYGNCMNVKRTVKGFINAGFAGIILEDQVSPKACGHTQGRKVVSREEAIMHIKAAVDARNESGSDIVIVARTDSRQAVSLNEALWRVRAFADAGADVLFIDALASREEMKAFCAIAPGVPKMANMLEGGGKTPILSPVELEEIGYKIIAYPLSLIGVSMRAMEFMEVGCIGQARIWKLLGVLNLLGDRKLSHVQNVYTAQLLPIADLCTSWALPLARFRNLHYVRGC

SEQ ID NO: 1763 - protein, 300 aa, Zea mays subsp. mays
  peptide (1)..(300): Ceres Seq. ID no. 12588455
MPGAHQAPACYDALSARLVERAEFRACFTSGFSISAARLGLPDVGLISYGEMIDQGRLMTEAVSIPVIGDADNGYGNCMNVKRTVKGFINAGFAGIILEDQVSPKACGHTQGRKVVSREEAIMHIKAAVDARNESGSDIVIVARTDSRQAVSLNEALWRVRAFADAGADVLFIDALASREEMKAFCAIAPGVPKMANMLEGGGKTPILSPVELEEIGYKIIAYPLSLIGVSMRAMEFMEVGCIGQARIWKLLGVLNLLGDRKLSHVQNVYTAQLLPIADLCTSWALPLARFRNLHYVRGC

SEQ ID NO: 1764 - protein, 249 aa, Zea mays subsp. mays
  peptide (1)..(249): Ceres Seq. ID no. 12588456
MIDQGRLMTEAVSIPVIGDADNGYGNCMNVKRTVKGFINAGFAGIILEDQVSPKACGHTQGRKVVSREEAIMHIKAAVDARNESGSDIVIVARTDSRQAVSLNEALWRVRAFADAGADVLFIDALASREEMKAFCAIAPGVPKMANMLEGGGKTPILSPVELEEIGYKIIAYPLSLIGVSMRAMEFMEVGCIGQARIWKLLGVLNLLGDRKLSHVQNVYTAQLLPIADLCTSWALPLARFRNLHYVRGC

SEQ ID NO: 1765 - DNA, 1139 bp, Zea mays subsp. mays
  misc_feature (1)..(1139): Ceres Seq. ID no. 12341467
  misc_feature (1)..(1139): Ortholog of  Ceres SEQ ID NO 12610964 as cited in SEQ ID NO 55981
  misc_feature (1)..(1139): Ortholog of  Ceres SEQ ID NO 13655330 as cited in SEQ ID NO 63200
  misc_feature (1)..(1139): Ortholog of  Ceres SEQ ID NO 12635934 as cited in SEQ ID NO 0
atatatagaatcttttaaaatgcaagggtgtcatactcgcagtcgcacagacaagtagataatcgctcgagccatcgagggccagcctgtgctgttggaagcgtggatgcggccgggctcagccgttgatcgttgcgcggtggccgtgagtcgtgtgactcgtgaccaaccaaaccgttcagctcccccatgacgtgtgcgtgacctcactctcagccagagatccacaaccggtgaaccgccgcgaatcctcggcctcgcatccgccggtggccgccgggggcgtggagcaccaacttttcacctgctgtgagacccccactcacctccacggaagcacacacccgaagaagaagagaaggcgagaaccatggcgccacctgccgtgtccatctcgcccatctgctgcgtcccataccccgcctccggcccccgtcgcgctcgcacgcccccctcctccctcagaaggttccccagattcgcagcccggaggagtagcgggggcggcgggggcacgcgcccggagcccaaaccagatgacaacgagagcaaagccgtcctcgacgccttcttcctcgggaaggccttcgcagaggcgctcacggagcgggtcgagtcggtggtgggcgaggtgttcagcgtcgtcgggcagtggcaggccgagcagcagaagcaagtgcaggatttccaggaggaagtagttcaaagagcccaaaaggctaaggagaaagctgcaactgaagtcagtgatgataagggggcgaagtctctaagggaaccttcagcaacaattgtggcgactacaactacgtcatctcccccagctactcccacacagacagaatagttgtagacttcttggtggcagtgaagagttgttgctgcaagttgatgcagttctttgtgcagccaaaaagtctgtagttggctttcacatgatatatgtcgatggatagtatatctgctagtgaaacatccagcatttctagtgacaaacccagcatctcaattataaaaaaaaactaatttacatttttttcatatgaatggaagtactttttgcatctagtgcgttctggtatatgtgtaatatatgttatatgccattcttaagaaatgcagcttcaaaaaccttgggt

SEQ ID NO: 1766 - protein, 158 aa, Zea mays subsp. mays
  peptide (1)..(158): Ceres Seq. ID no. 12341468
MAPPAVSISPICCVPYPASGPRRARTPPSSLRRFPRFAARRSSGGGGGTRPEPKPDDNESKAVLDAFFLGKAFAEALTERVESVVGEVFSVVGQWQAEQQKQVQDFQEEVVQRAQKAKEKAATEVSDDKGAKSLREPSATIVATTTTSSPPATPTQTE

SEQ ID NO: 1767 - DNA, 1399 bp, Zea mays subsp. mays
  misc_feature (1)..(1399): Ceres Seq. ID no. 12411002
  misc_feature (1)..(1399): Ortholog of  Ceres SEQ ID NO 14303471 as cited in SEQ ID NO 59423
atcactagaacgttttccttattcgtccctctcaattgggcggatagtttcatcctccgcgggacaaggcccctcacgatcccttctcatcctcgtcctcagatccgcctccttcaccccactggtcggcgagcagcaaaatccattcaccccactggccggcgagcagcaaactccattcaccccactagcaggcgagcagcaaactggagatctcgtcctcacgagcgctttggtaattggtcgtatagtccctcatcatcggaatggtggggtcacttatctttcactcacctaatgtggatccgaaggcagagaatcctaatgagatggttacagctggtgtgctttcaagccttcagaatttcctacgcaagtgcctcatagctatcctctcatatggcccaatgccgaagcacattgcatttattatggatggcaatcgtcgatatgctaaattcagaagcatgcaagaaggagctggtcacaggatgggtttctctacccttattgcaagtctgatgtactgctatgaaatgggtgtgaagtacatcactgtctacgcattcagcatcgacaattttaaaagggacccaagtgaggtggaatccttgatgcagttaatggaggaaaaaatcaacgaactcttagagaaccaaagtgtaatcaacaagattaactgtaagatcaacttttggggtaacttggacttgttatatgagccggtgcggttggcggctgagaagctgatggcgagcacagctgggaacacagggctggtcttttctatctgcatgccatacaactcgacttctgagattgtcaatgctgtcagtcaagtctgtgcggaaaggatggaaatgtttcagagcgaacatattggcgaatgcaatggtcatgctgcaaataacggtgtgcgatcagagatttcagtggcggatttggatcgccacatgtatagtgccgaatgcccagatcctgatattgtcatccggacttcgggcgagactcgattgagcaatttcctcctttggcagacaacgtttagtcacttgcagaatccagatcctctgtggcccgagttctcttttaggcaccttgtttgggctatcttgcagtatcagagagtttaccctgctctggagcataacagaaagttggctaagaagcagttgtgattccatgttatttgcaaggaggtatcatgaagggctattaacatcaaacttttccttctcaatttcccggtaatgggaaatgcaaagaacatactagcatataacattatgaatagatcaccatgtaacttaagtgtgattgctaccataaccatgtaacttatttgagctcgtacaaatgctgtgattcctaaatatatatatatagagtgcccggggtg

SEQ ID NO: 1768 - protein, 303 aa, Zea mays subsp. mays
  peptide (1)..(303): Ceres Seq. ID no. 12411003
MVGSLIFHSPNVDPKAENPNEMVTAGVLSSLQNFLRKCLIAILSYGPMPKHIAFIMDGNRRYAKFRSMQEGAGHRMGFSTLIASLMYCYEMGVKYITVYAFSIDNFKRDPSEVESLMQLMEEKINELLENQSVINKINCKINFWGNLDLLYEPVRLAAEKLMASTAGNTGLVFSICMPYNSTSEIVNAVSQVCAERMEMFQSEHIGECNGHAANNGVRSEISVADLDRHMYSAECPDPDIVIRTSGETRLSNFLLWQTTFSHLQNPDPLWPEFSFRHLVWAILQYQRVYPALEHNRKLAKKQL

SEQ ID NO: 1769 - protein, 282 aa, Zea mays subsp. mays
  peptide (1)..(282): Ceres Seq. ID no. 12411004
MVTAGVLSSLQNFLRKCLIAILSYGPMPKHIAFIMDGNRRYAKFRSMQEGAGHRMGFSTLIASLMYCYEMGVKYITVYAFSIDNFKRDPSEVESLMQLMEEKINELLENQSVINKINCKINFWGNLDLLYEPVRLAAEKLMASTAGNTGLVFSICMPYNSTSEIVNAVSQVCAERMEMFQSEHIGECNGHAANNGVRSEISVADLDRHMYSAECPDPDIVIRTSGETRLSNFLLWQTTFSHLQNPDPLWPEFSFRHLVWAILQYQRVYPALEHNRKLAKKQL

SEQ ID NO: 1770 - protein, 256 aa, Zea mays subsp. mays
  peptide (1)..(256): Ceres Seq. ID no. 12411005
MPKHIAFIMDGNRRYAKFRSMQEGAGHRMGFSTLIASLMYCYEMGVKYITVYAFSIDNFKRDPSEVESLMQLMEEKINELLENQSVINKINCKINFWGNLDLLYEPVRLAAEKLMASTAGNTGLVFSICMPYNSTSEIVNAVSQVCAERMEMFQSEHIGECNGHAANNGVRSEISVADLDRHMYSAECPDPDIVIRTSGETRLSNFLLWQTTFSHLQNPDPLWPEFSFRHLVWAILQYQRVYPALEHNRKLAKKQL

SEQ ID NO: 1771 - DNA, 1269 bp, Zea mays subsp. mays
  misc_feature (1)..(1269): Ceres Seq. ID no. 12374235
  misc_feature (1)..(1269): Ortholog of  Ceres SEQ ID NO 12556792 as cited in SEQ ID NO 37
  misc_feature (1)..(1269): Ortholog of  Ceres SEQ ID NO 13594143 as cited in SEQ ID NO 58945
  misc_feature (1)..(1269): Ortholog of  Ceres SEQ ID NO 12590595 as cited in SEQ ID NO 0
  misc_feature (1)..(1269): Ortholog of  Ceres SEQ ID NO 15179171 as cited in SEQ ID NO 0
gacggccacagagagaaacgttgagacagggagagagagagagagagcgagctccacgcctccacgctccactacaccagccaggcagcagcccccaacgactggctcgccgctcgcgagaacccgagtctatttctgcacgcgcttccaggttttagctgcagcggcatcagggcagggagagagcgatagttctgttctactgcaggaagagcagggagcaagatggggtccggatctttcctcaaggtgctggccaataacttcgatgtccttgccgggccactcatatcacttgcttatcctctatatgcttctgttagagctatagagacaaaaaatcctgtagatgatcagcagtggctcacttactgggtgttgtactcatttatcactttgtttgagctaacttttgctccaattatcgagtggcttccattttggtcgtatgcaaagctgttctttaactgctggttggtcttgccttggttcaatggtgctgcctatgtttacgaccattttgtgcggccaatgtttgtgaaccgccaaatagtgaacatatggtatattccaagaaatgagaagctaggtaaatctgatgatgttctgtcagctgcagagagatatattgaacaaaacggaccagaagcatttgagaagctcatcagcaagtctacgaagtcttcgaagtcaaggaacacaaagcggttgaacttggaggatggagaggctgaaaatcgagctaaagccgagagagaatcgtggggcgaaaatcccttctacgacaaaaactacagatactaaaccagttcaaaatccactcagcagtttgaagatgaccttgctcacgagcctcatgcaagctttagttgcgtcggaccgaagacgacattcccatatttctgactctgaatattgtaccttgttacatccactgctactacataatgatgagttctagagcaattgtggactgtgtaaatggaggtagatgctagcgttaatcgtttatgtgctttttggatggtgtccttatcacccgttttactacatctttagcaaggagcgagccttgattttcagtttggctttcgtatttttgtaattgaatgctacttttagataactgaaatatgagggagttcgagcttctaggaagaaacttaacatgtgctattgcatcgagtgccaacaacgttatcatcgtcacaatttttgtacagggctcttctacaataacttgagtaacccgttcatttcggctggttt

SEQ ID NO: 1772 - protein, 192 aa, Zea mays subsp. mays
  peptide (1)..(192): Ceres Seq. ID no. 12374236
MGSGSFLKVLANNFDVLAGPLISLAYPLYASVRAIETKNPVDDQQWLTYWVLYSFITLFELTFAPIIEWLPFWSYAKLFFNCWLVLPWFNGAAYVYDHFVRPMFVNRQIVNIWYIPRNEKLGKSDDVLSAAERYIEQNGPEAFEKLISKSTKSSKSRNTKRLNLEDGEAENRAKAERESWGENPFYDKNYRY

SEQ ID NO: 1773 - protein, 109 aa, Zea mays subsp. mays
  peptide (1)..(109): Ceres Seq. ID no. 12374237
TATERNVETGRERERASSTPPRSTTPARQQPPTTGSPLARTRVYFCTRFQVLAAAASGQGESDSSVLLQEEQGARWGPDLSSRCWPITSMSLPGHSYHLLILYMLLLEL

SEQ ID NO: 1774 - DNA, 1231 bp, Zea mays subsp. mays
  misc_feature (1)..(1231): Ceres Seq. ID no. 12410989
  misc_feature (1)..(1231): Ortholog of  Ceres SEQ ID NO 14311683 as cited in SEQ ID NO 51263
  misc_feature (1)..(1231): Ortholog of  Ceres SEQ ID NO 15177862 as cited in SEQ ID NO 56033
  misc_feature (1)..(1231): Ortholog of  Ceres SEQ ID NO 13661430 as cited in SEQ ID NO 61258
  misc_feature (1)..(1231): Ortholog of  Ceres SEQ ID NO 13590940 as cited in SEQ ID NO 68653
  misc_feature (1)..(1231): Ortholog of  Ceres SEQ ID NO 14301982 as cited in SEQ ID NO 0
  misc_feature (1)..(1231): Ortholog of  Ceres SEQ ID NO 15179001 as cited in SEQ ID NO 0
  misc_feature (1)..(1231): Ortholog of  Ceres SEQ ID NO 15180040 as cited in SEQ ID NO 0
attggtttcgccaaaaacctcaccggctccattcgaccattccatcctttccttatcccctcccacttcgtctcccttcctggcttcctttcttcgccatggcaaccatgtccctccgctccctcgccatggccatggccgacaccgcgctcccgcccgcccacaagctcctccccacagtttccctcccgctcctctcctcgtccacccgcgccgcgccgctcctcctcttcgccaggcgccgcctgccgctcgcgcccctcgttacctcctccgacgccgttgaggccaagtcggcagacgaggaggaggagaaggccggagagcccgtcgacatggaagctggggagtttgaggaggtgctagcctcaggcggcgagggtgaggggcagtacgctgcggtggagccgccagaggaggccaaggtctacgttgggaaccttccctacgacgtcgacagcgagggactcgcgcagatcttcgaccaggccggcgtcgtcgaggtcgccgaggttatctacaacagagaaactggccagagccgtgggtttggctttgttaccatgagcactgttgaggaagctgacaaagccattgagatgttcaaccgctatgatattagcgggaggcttctgaatgtaaacagggcatcttctaggggcactcgcatggaaagacctcagagacaatttgcaccagctttcagagcttatgttggcaacttgccatggcaagttgatgactctaggctggtgcagttgttcagcgagcatggagaagttgttgatgctaaggttgtctacgacagagaaactgggcgctcacgaggattcggttttgtatcaatggtgtcaaaggaggaactcaatgatgctatttcggccctagatggacaggaattggacggccgccctcttcgagtgaatgttgcagcagagcggccacagaggggcttttgatgcggttgtatgagagagatgactgcttgtttgtaatgagcatggagacacagagacacaatggactgaatggaggagcaatggtacaaattagcggaagcggatgctgtcacaagttgctagatctttctcccttagcttcttgacatttggttcttgccacagctttttgatgcttctcttggcagctggacttaatgttttgctattcttgtcgacatcacgagttgaattgtcaaactagtctcttatgttctatgctgatatgcctt

SEQ ID NO: 1775 - protein, 318 aa, Zea mays subsp. mays
  peptide (1)..(318): Ceres Seq. ID no. 12410990
WFRQKPHRLHSTIPSFPYPLPLRLPSWLPFFAMATMSLRSLAMAMADTALPPAHKLLPTVSLPLLSSSTRAAPLLLFARRRLPLAPLVTSSDAVEAKSADEEEEKAGEPVDMEAGEFEEVLASGGEGEGQYAAVEPPEEAKVYVGNLPYDVDSEGLAQIFDQAGVVEVAEVIYNRETGQSRGFGFVTMSTVEEADKAIEMFNRYDISGRLLNVNRASSRGTRMERPQRQFAPAFRAYVGNLPWQVDDSRLVQLFSEHGEVVDAKVVYDRETGRSRGFGFVSMVSKEELNDAISALDGQELDGRPLRVNVAAERPQRGF

SEQ ID NO: 1776 - protein, 286 aa, Zea mays subsp. mays
  peptide (1)..(286): Ceres Seq. ID no. 12410991
MATMSLRSLAMAMADTALPPAHKLLPTVSLPLLSSSTRAAPLLLFARRRLPLAPLVTSSDAVEAKSADEEEEKAGEPVDMEAGEFEEVLASGGEGEGQYAAVEPPEEAKVYVGNLPYDVDSEGLAQIFDQAGVVEVAEVIYNRETGQSRGFGFVTMSTVEEADKAIEMFNRYDISGRLLNVNRASSRGTRMERPQRQFAPAFRAYVGNLPWQVDDSRLVQLFSEHGEVVDAKVVYDRETGRSRGFGFVSMVSKEELNDAISALDGQELDGRPLRVNVAAERPQRGF

SEQ ID NO: 1777 - protein, 283 aa, Zea mays subsp. mays
  peptide (1)..(283): Ceres Seq. ID no. 12410992
MSLRSLAMAMADTALPPAHKLLPTVSLPLLSSSTRAAPLLLFARRRLPLAPLVTSSDAVEAKSADEEEEKAGEPVDMEAGEFEEVLASGGEGEGQYAAVEPPEEAKVYVGNLPYDVDSEGLAQIFDQAGVVEVAEVIYNRETGQSRGFGFVTMSTVEEADKAIEMFNRYDISGRLLNVNRASSRGTRMERPQRQFAPAFRAYVGNLPWQVDDSRLVQLFSEHGEVVDAKVVYDRETGRSRGFGFVSMVSKEELNDAISALDGQELDGRPLRVNVAAERPQRGF

SEQ ID NO: 1778 - DNA, 1341 bp, Zea mays subsp. mays
  misc_feature (1)..(1341): Ceres Seq. ID no. 12405842
  misc_feature (1)..(1341): Ortholog of  Ceres SEQ ID NO 12593170 as cited in SEQ ID NO 63263
  misc_feature (1)..(1341): Ortholog of  Ceres SEQ ID NO 14301882 as cited in SEQ ID NO 64381
  misc_feature (1)..(1341): Ortholog of  Ceres SEQ ID NO 13597851 as cited in SEQ ID NO 64869
  misc_feature (1)..(1341): Ortholog of  Ceres SEQ ID NO 13662420 as cited in SEQ ID NO 68680
acccgaaattccaaacccacttcgtcaagcaacaacaccggctaaaaattaaaggaggcagcgcgtagcagttggtcgccaccgtcacgtacacacgctcacgttggaggctggactccgcccccgtgctgctcttcgccttgcctttctccgccggagaccccgccgcctcagctgccacaggaggaggaggcaaccatggcggggaggtacgaccgcaatccgttcgaggaggatgacgtcaacccctttgcgggaggaagtgtacctcctgcttctaattctcggatgtcagcacttcctcatgaaccagctggcttctacaatgatcgtggtgcaacagtggacatacctcttgattcaacgaaggacctaagtaaaaaggagaaagaactgcaggcaaaggaagctgagctaaacaaacgggaaagggagctgaaaagaaaggaggaagctgcagccagagctggtattgtcattgaagataagaattggccaccctttatgcccattattcatcatgacatttcgaacgagataccaattcacctgcaaaggatgcagtacctggcgttttcttcactattgggattgacagcttgcctcttttggaacatcattgcaactacagcagcatggattaaatcagaaggtgtcatgatctggttgctagcaatcatctacttcatctctggtgtccctggggcctatgtgctttggtatcgcccgctttacaatgcgatgaggactgaaagtgctttgaagtttgggtggtttttcttgttttaccttctccatatcttattctgtgtctggtcagctgtggctcctccatttccattcaaaggaaaatccttggctgggattttgccggctattgatatcataggcaggagtgctattgtggggatattttacttcattggatttggaatgttctgccttgaatcactgctcagcatcgttgtcattcagcaagtatacatgtacttccgtggaagtggaaaagctgcagagatgaagcgagaggcggcccgtgggtgctatgaggaatgccttttgatagagcgacctaggcgactggaagagacacggtgtgacaatgggtaactacgttatgtacatatgctgttcgtctctgagattacttatactagcttatagccttcttgccttcatgcaatgtataccacctaccaccggagcttgatctcttacctaggttcagatgtgcttataggtaactagttttttttatacatttcctacatgatttgtactcttaactcgcgagacaattgttgttgttctttggatctcgagtgattctttgcacggccc

SEQ ID NO: 1779 - protein, 303 aa, Zea mays subsp. mays
  peptide (1)..(303): Ceres Seq. ID no. 12405843
MAGRYDRNPFEEDDVNPFAGGSVPPASNSRMSALPHEPAGFYNDRGATVDIPLDSTKDLSKKEKELQAKEAELNKRERELKRKEEAAARAGIVIEDKNWPPFMPIIHHDISNEIPIHLQRMQYLAFSSLLGLTACLFWNIIATTAAWIKSEGVMIWLLAIIYFISGVPGAYVLWYRPLYNAMRTESALKFGWFFLFYLLHILFCVWSAVAPPFPFKGKSLAGILPAIDIIGRSAIVGIFYFIGFGMFCLESLLSIVVIQQVYMYFRGSGKAAEMKREAARGCYEECLLIERPRRLEETRCDNG

SEQ ID NO: 1780 - protein, 273 aa, Zea mays subsp. mays
  peptide (1)..(273): Ceres Seq. ID no. 12405844
MSALPHEPAGFYNDRGATVDIPLDSTKDLSKKEKELQAKEAELNKRERELKRKEEAAARAGIVIEDKNWPPFMPIIHHDISNEIPIHLQRMQYLAFSSLLGLTACLFWNIIATTAAWIKSEGVMIWLLAIIYFISGVPGAYVLWYRPLYNAMRTESALKFGWFFLFYLLHILFCVWSAVAPPFPFKGKSLAGILPAIDIIGRSAIVGIFYFIGFGMFCLESLLSIVVIQQVYMYFRGSGKAAEMKREAARGCYEECLLIERPRRLEETRCDNG

SEQ ID NO: 1781 - protein, 201 aa, Zea mays subsp. mays
  peptide (1)..(201): Ceres Seq. ID no. 12405845
MPIIHHDISNEIPIHLQRMQYLAFSSLLGLTACLFWNIIATTAAWIKSEGVMIWLLAIIYFISGVPGAYVLWYRPLYNAMRTESALKFGWFFLFYLLHILFCVWSAVAPPFPFKGKSLAGILPAIDIIGRSAIVGIFYFIGFGMFCLESLLSIVVIQQVYMYFRGSGKAAEMKREAARGCYEECLLIERPRRLEETRCDNG

SEQ ID NO: 1782 - DNA, 1380 bp, Zea mays subsp. mays
  misc_feature (1)..(1380): Ceres Seq. ID no. 12412233
  misc_feature (1)..(1380): Ortholog of  Ceres SEQ ID NO 13662489 as cited in SEQ ID NO 62586
  misc_feature (1)..(1380): Ortholog of  Ceres SEQ ID NO 13597061 as cited in SEQ ID NO 69012
atcaaaggcgtaaactcggcgtagacggagactgcagacgcccggaccacaggaacaccgaagtaccgaacactaccggccacacgctcgagaataggcggcggtgcaggtcctcctccatctctgtcgtgggttcaacttcactgtgaatacgctgacgctacgagaagtcatcacggaaggggtctcgaagcaaggtgcaaagactcacctgccgtctctgatgggctttgctggctgggtatccatgctgctcttcctcctggtcgccggtgctgtagcaaatgaccagatcttcaccacttcaggtgtgccatttgggcggagttcgcgtgagccaagttaccgcgtcgaattccatcctgttgattcaccattccatccagagaatggtcaagaatcggtaccaatggctagtcatgatgggaaacgttataaatgctttctaccagttgaagaaactaaaaccatgaagtcaatgcttccgcaaaatgcaactaatgttataatagaaagtgaaaggagaattaagccaaaggagccagatgagttacttgaggttctcaaggaccagtgcttctacaggcatgaaggttggtggtcgtatgaattctgttatcatgggaaaatcagacaggtccatgtagacgacgataaggttatccaagaatttgttctaggcgaattcgatgacgacgcgactgctgcataccatgaaaatatcacttctgagttagttgacgatgaccatcatgtgaaagatatatctcagaggtatcatgttcacttgtatacaaatgggactgtatgcgatctcacagatattccgcgggagacagaggttagatttgtctgctcggagcctactgtactgattagttcagtcaaggagatctcttcctgcagatatgttgtaacgattcaaagtcccatgctttgcaaaaacccgttattccaggaagaaaaacgaaccctctccatccactgcaatgagttgcctgctagagcggaatccagcgcggaggatgactcgcttccaaaagaagctcagatttccatcatccccgatcaggatgagctacatgatttcccagcctatgctacttgatttgcctccaataattatgtttgatgtagaaaaaaaaacaccattttggaggcgcaggggcaacttagcaacactatgtattaactatctcgtagatactacagcagaggctccttgtaaagcaggttgagacgatcattctgcagttcttattatataggatgattacgaaggtaacatgtttgggacagtaacatttgcttgaaatgtatatagtctacaacaagaataatgccagcattcttgaaatgtaggtgtgcgagcacttttac

SEQ ID NO: 1783 - protein, 294 aa, Zea mays subsp. mays
  peptide (1)..(294): Ceres Seq. ID no. 12412234
MGFAGWVSMLLFLLVAGAVANDQIFTTSGVPFGRSSREPSYRVEFHPVDSPFHPENGQESVPMASHDGKRYKCFLPVEETKTMKSMLPQNATNVIIESERRIKPKEPDELLEVLKDQCFYRHEGWWSYEFCYHGKIRQVHVDDDKVIQEFVLGEFDDDATAAYHENITSELVDDDHHVKDISQRYHVHLYTNGTVCDLTDIPRETEVRFVCSEPTVLISSVKEISSCRYVVTIQSPMLCKNPLFQEEKRTLSIHCNELPARAESSAEDDSLPKEAQISIIPDQDELHDFPAYAT

SEQ ID NO: 1784 - protein, 286 aa, Zea mays subsp. mays
  peptide (1)..(286): Ceres Seq. ID no. 12412235
MLLFLLVAGAVANDQIFTTSGVPFGRSSREPSYRVEFHPVDSPFHPENGQESVPMASHDGKRYKCFLPVEETKTMKSMLPQNATNVIIESERRIKPKEPDELLEVLKDQCFYRHEGWWSYEFCYHGKIRQVHVDDDKVIQEFVLGEFDDDATAAYHENITSELVDDDHHVKDISQRYHVHLYTNGTVCDLTDIPRETEVRFVCSEPTVLISSVKEISSCRYVVTIQSPMLCKNPLFQEEKRTLSIHCNELPARAESSAEDDSLPKEAQISIIPDQDELHDFPAYAT

SEQ ID NO: 1785 - protein, 232 aa, Zea mays subsp. mays
  peptide (1)..(232): Ceres Seq. ID no. 12412236
MASHDGKRYKCFLPVEETKTMKSMLPQNATNVIIESERRIKPKEPDELLEVLKDQCFYRHEGWWSYEFCYHGKIRQVHVDDDKVIQEFVLGEFDDDATAAYHENITSELVDDDHHVKDISQRYHVHLYTNGTVCDLTDIPRETEVRFVCSEPTVLISSVKEISSCRYVVTIQSPMLCKNPLFQEEKRTLSIHCNELPARAESSAEDDSLPKEAQISIIPDQDELHDFPAYAT

SEQ ID NO: 1786 - DNA, 1574 bp, Zea mays subsp. mays
  misc_feature (1)..(1574): Ceres Seq. ID no. 12348933
  misc_feature (1)..(1574): Ortholog of  Ceres SEQ ID NO 15176423 as cited in SEQ ID NO 53228
aaaatagcaaatttctccacacggacacagcagcgagagaagagagtccactgtccaccccaccagaaaaacgcattccgcagacgcgcggcgagggagtaggaggggacggcgggtgccgaggcccgcaggcacggggaagctacctgcttgcgtagccgggcgggctcgcgctgtgctgtcgctccatgtcggtcgccggcgagagcggcggggatccggcggcggcacgccgccggtgggatctctccaacaagggccccgacagcactccaatgttgaaagaggctgtggaaatgtctacagatgaagaatcggatggcgttgttatatgccatccgaatggtaacactgatggatgtgacgaagccattagtggcagtcatgatgatgatagcccagaaggccaggaaactagttccatcaaggaccctgatgtagaaggtgacacacaggaagacaagtgtgtaaatcaagattcactgaagttgattgatcaagagacgtctgctccccccaagtccccagcgaagtccgcgactgcgagttctggaccagagaagcctaaacgtgttgtcacccaaccattgtctctttctactcaacgaaggtcatctggagtaaatggtggtgtgaccaatccatcacccaataaggataaatctggtgataaaagtagcatctctccagcaagcatgacaaagaagtgtacgccgttggcacctaggaagactttgcagcctgagcaagcatttcaccctctggaagaggactcttgttctgtgacttcctcgactacaacatcatcaagagctggcagaactaagacaactgttcctgttgccccatcatttgtgtgtgctaaccgtgctgacaagaggaaggagttctacacaaaattagaggagaaacataaagctttggaagcagagaaggacgaggctgaggccaggaaaaaggaagagcaagacgttgctataaagcaactaaggaagtcattggtgattagagcgaaacccatgccaagcttctatcaagaaggccccccaccaaaggctgaacttaagaaggtgcctcctactcgtgccaaatcaccaaagtttacaagctcaaggagaaagagctgcaatgacacaccacagacacccgagggaaaaaacaccaacgcaacatctaccacccggccacatcgtcacagcatcggggcttctaaagatgccagcagagtacagtgctcgccgaagagcggcgtggcgaccaaaactagatctgtcaagcctgagctgaaggccctctgaagcgcatgcgtagcattcaagtgctgcgattgtctctgtacaaacagaatcgcctgactcttagccgtttccatttgcatgcattttttttgttttgttttgttctatacccagcatctccaccaaaaagaaggctgtagggccaatgacgttgttcgcgctgctggaccttgtctccattttcgtcttgtactcgttaagaactctgttgctgctgggaccatgtgacattcattccatgtaaattacctggggatcccggtagggagctcgact

SEQ ID NO: 1787 - protein, 369 aa, Zea mays subsp. mays
  peptide (1)..(369): Ceres Seq. ID no. 12348934
MSVAGESGGDPAAARRRWDLSNKGPDSTPMLKEAVEMSTDEESDGVVICHPNGNTDGCDEAISGSHDDDSPEGQETSSIKDPDVEGDTQEDKCVNQDSLKLIDQETSAPPKSPAKSATASSGPEKPKRVVTQPLSLSTQRRSSGVNGGVTNPSPNKDKSGDKSSISPASMTKKCTPLAPRKTLQPEQAFHPLEEDSCSVTSSTTTSSRAGRTKTTVPVAPSFVCANRADKRKEFYTKLEEKHKALEAEKDEAEARKKEEQDVAIKQLRKSLVIRAKPMPSFYQEGPPPKAELKKVPPTRAKSPKFTSSRRKSCNDTPQTPEGKNTNATSTTRPHRHSIGASKDASRVQCSPKSGVATKTRSVKPELKAL

SEQ ID NO: 1788 - protein, 340 aa, Zea mays subsp. mays
  peptide (1)..(340): Ceres Seq. ID no. 12348935
MLKEAVEMSTDEESDGVVICHPNGNTDGCDEAISGSHDDDSPEGQETSSIKDPDVEGDTQEDKCVNQDSLKLIDQETSAPPKSPAKSATASSGPEKPKRVVTQPLSLSTQRRSSGVNGGVTNPSPNKDKSGDKSSISPASMTKKCTPLAPRKTLQPEQAFHPLEEDSCSVTSSTTTSSRAGRTKTTVPVAPSFVCANRADKRKEFYTKLEEKHKALEAEKDEAEARKKEEQDVAIKQLRKSLVIRAKPMPSFYQEGPPPKAELKKVPPTRAKSPKFTSSRRKSCNDTPQTPEGKNTNATSTTRPHRHSIGASKDASRVQCSPKSGVATKTRSVKPELKAL

SEQ ID NO: 1789 - protein, 333 aa, Zea mays subsp. mays
  peptide (1)..(333): Ceres Seq. ID no. 12348936
MSTDEESDGVVICHPNGNTDGCDEAISGSHDDDSPEGQETSSIKDPDVEGDTQEDKCVNQDSLKLIDQETSAPPKSPAKSATASSGPEKPKRVVTQPLSLSTQRRSSGVNGGVTNPSPNKDKSGDKSSISPASMTKKCTPLAPRKTLQPEQAFHPLEEDSCSVTSSTTTSSRAGRTKTTVPVAPSFVCANRADKRKEFYTKLEEKHKALEAEKDEAEARKKEEQDVAIKQLRKSLVIRAKPMPSFYQEGPPPKAELKKVPPTRAKSPKFTSSRRKSCNDTPQTPEGKNTNATSTTRPHRHSIGASKDASRVQCSPKSGVATKTRSVKPELKAL

SEQ ID NO: 1790 - DNA, 1625 bp, Zea mays subsp. mays
  misc_feature (1)..(1625): Ceres Seq. ID no. 13494770
  misc_feature (1)..(1625): Ortholog of  Ceres SEQ ID NO 15176444 as cited in SEQ ID NO 53249
atccccagctccgtttccgtctccggcaccaggaccagtgccacgccaaccaccgctacctgctccacgccaaacgccagttgctttgcagctactcgtgcagccgtgctcgccgcacacgattggcgccagtctttagttcaccggcaaagcttccgcgagcgcgcgggtgtaccacgtgacggactacggcgcggacccgaccggcgccgccgacgccacggcggcgatcagcaaggccatagctgacgcgttccgcccgcccaccaacgccaccatgaccggcggcatccccgacctcggcggcgccgaggtgcacctcgacggcggcacgtacctcatcaaggggcccctcacgctgccggcatccggcggcggcaacttcaagatccacagcgggtcgctgcgcgcgtccgacgacttcccgacggaccggtacctgatcgagctgtcggcggccaagagcagccggagctacgactacgagtacgccacgctgcgggacctgatgctggactgcagctaccgcggcggcggcgtggcggtggtggactcgctccgcgtcgccgtcgacaactgctacgtggcgcacttcgcgtccgacggcgtcgcggtgcgcggcggccacgagacgctcatccgcaacacctacctcggccagcacatgacggccgggggcgacccgggggagcgcggcttcacgggcacggccatccgcctcgacggcaacgacaactccgtgtccggacgtcgtcatcttctccgcggccacggggatcatggtcaccgcgccggccaactccatctccggcgtgcactgctacaacaaggccacgggcttcggcggcaccggcatccacctcaagatcccgggcctcacgcaggcgtggatcagcaactgctacatggactacaccagcatcgtcgccgaggaccccgtgctgctccacgtctccggatccttcttcctcggcgacgccaacgtcgtcctcaaggccgtcagcggcgtcgccaggggcgtccaggtcgtcggcaacatcttcagcggcagggacaagggcgtcgacatcgtgcagctggacggcgccttcgccaccgtggaccaggtgtacgtgcagcagaactccgccacggggatgaccgtcaggtccacctccgcgcgcgcatcgctccagggcaacgggacctcctggacgctcgacttctcgccggtgctgctgttcccggaccgcatcggccacgtgcagtactcgctcgtcgccggcgacgagttcccgggccacacgctccggaacgtgtccgggaaccaggtcgtggtcgccaccgacaaggccgtctcggccacggtccacgtcttggtggaccagaacagcgactgagataagataagagacactcgagagtgcctgcgtgcacgcagtatgcgtgctgctgcctgctcgcgcggctgctgcggagcaaggcgttattccttcgtttctttcttcttctcggaaatttcagccattcatgtcgtcgggaagatgacaattgtttgatgcgacaaaatgctccagaatgtatcattcttttgctgtatgaaatgaaatgattcagaagctccatcaatntgcgtaccaaggcat

SEQ ID NO: 1791 - protein, 368 aa, Zea mays subsp. mays
  peptide (1)..(368): Ceres Seq. ID no. 13494771
MTGGIPDLGGAEVHLDGGTYLIKGPLTLPASGGGNFKIHSGSLRASDDFPTDRYLIELSAAKSSRSYDYEYATLRDLMLDCSYRGGGVAVVDSLRVAVDNCYVAHFASDGVAVRGGHETLIRNTYLGQHMTAGGDPGERGFTGTAIRLDGNDNSVSGRRHLLRGHGDHGHRAGQLHLRRALLQQGHGLRRHRHPPQDPGPHAGVDQQLLHGLHQHRRRGPRAAPRLRILLPRRRQRRPQGRQRRRQGRPGRRQHLQRQGQGRRHRAAGRRLRHRGPGVRAAELRHGDDRQVHLRARIAPGQRDLLDARLLAGAAVPGPHRPRAVLARRRRRVPGPHAPERVREPGRGRHRQGRLGHGPRLGGPEQRLR

SEQ ID NO: 1792 - protein, 291 aa, Zea mays subsp. mays
  peptide (1)..(291): Ceres Seq. ID no. 13494772
MLDCSYRGGGVAVVDSLRVAVDNCYVAHFASDGVAVRGGHETLIRNTYLGQHMTAGGDPGERGFTGTAIRLDGNDNSVSGRRHLLRGHGDHGHRAGQLHLRRALLQQGHGLRRHRHPPQDPGPHAGVDQQLLHGLHQHRRRGPRAAPRLRILLPRRRQRRPQGRQRRRQGRPGRRQHLQRQGQGRRHRAAGRRLRHRGPGVRAAELRHGDDRQVHLRARIAPGQRDLLDARLLAGAAVPGPHRPRAVLARRRRRVPGPHAPERVREPGRGRHRQGRLGHGPRLGGPEQRLR

SEQ ID NO: 1793 - protein, 239 aa, Zea mays subsp. mays
  peptide (1)..(239): Ceres Seq. ID no. 13494773
MTAGGDPGERGFTGTAIRLDGNDNSVSGRRHLLRGHGDHGHRAGQLHLRRALLQQGHGLRRHRHPPQDPGPHAGVDQQLLHGLHQHRRRGPRAAPRLRILLPRRRQRRPQGRQRRRQGRPGRRQHLQRQGQGRRHRAAGRRLRHRGPGVRAAELRHGDDRQVHLRARIAPGQRDLLDARLLAGAAVPGPHRPRAVLARRRRRVPGPHAPERVREPGRGRHRQGRLGHGPRLGGPEQRLR

SEQ ID NO: 1794 - DNA, 1329 bp, Zea mays subsp. mays
  misc_feature (1)..(1329): Ceres Seq. ID no. 12342558
  misc_feature (1)..(1329): Ortholog of  Ceres SEQ ID NO 15170659 as cited in SEQ ID NO 67270
aaaatgtgcagcccacctccaatcccgtagaagatagtgctgccctgccgaatgccgcccacctccaatcccgtagaagacaaagagagagggagagaactggacggcggcggcggcggagacgacgatgcagtggtacttggtggccgcgctcctcaccatcctcaccagctcccagggaatattgaccaccctttcccagagcaatggcaaatacaattatgattatgccacaattccttttttagctgagctcttcaagttatctgtctcaggcttcttcctctggaaggaatgccattcttcatctccaccaaggatgacaaaggaatggaggagcgtgcgactatatgttgttccttcagttatatacctcatccacaacaatgtccagtttgcgacattgacctatgttgacccatctacctatcagataatgggaaacttgaaaattgtcacgactgggattttgtttaggcttgtcctaaaaaggaagttgtccaatatacaatggatggcaattgttttattggctgttggtacaactacaagccaggttaaaggatgtggagattcaccatgtgattctcttttctcagcaccattggagggttacttgcttggaatactttctgcttgtctttcagctctagctggtgtgtacacagaatatttgatgaagaagaataatgatagtttgtactggcaaaatgtacaattatatacgtaggtttggagttatctttaacatgggctggctaatttatggcgattttaaagctggatttgagctaggtccatggtggcagcgcctttttaatggttattcgatcacaacatggatggtagtgttcaatttaggatctactggtcttctagtatcatggttgatgaaatattctgacaatatagtcaaggtgtactcaacttcaatggcaatgcttttaacgatggttttatctatatatcttttcagtgtgaaagctacaattcagctcttcttgggcattatcatttgtataatttccctgcagatgtattttatgcctgtgcacatgcttattgagttgccacaaactttgcctgtaacatcaaagtaggttcatggcattgttagctaacccattgatcagctgagggtagggcactgttgattgagtggttaattgactatctgcagcccagctctatttgagtcatatatttggagatttatggttgtaatctcaacagctatggatatagacagctaggttagtttcatgttgcaggaaaggtgaatcaactgtcaagtgagcatgtaatgccaatacaaatggattgaaagtt

SEQ ID NO: 1795 - protein, 200 aa, Zea mays subsp. mays
  peptide (1)..(200): Ceres Seq. ID no. 12342559
MQWYLVAALLTILTSSQGILTTLSQSNGKYNYDYATIPFLAELFKLSVSGFFLWKECHSSSPPRMTKEWRSVRLYVVPSVIYLIHNNVQFATLTYVDPSTYQIMGNLKIVTTGILFRLVLKRKLSNIQWMAIVLLAVGTTTSQVKGCGDSPCDSLFSAPLEGYLLGILSACLSALAGVYTEYLMKKNNDSLYWQNVQLYT

SEQ ID NO: 1796 - protein, 136 aa, Zea mays subsp. mays
  peptide (1)..(136): Ceres Seq. ID no. 12342560
MIVCTGKMYNYIRRFGVIFNMGWLIYGDFKAGFELGPWWQRLFNGYSITTWMVVFNLGSTGLLVSWLMKYSDNIVKVYSTSMAMLLTMVLSIYLFSVKATIQLFLGIIICIISLQMYFMPVHMLIELPQTLPVTSK

SEQ ID NO: 1797 - protein, 136 aa, Zea mays subsp. mays
  peptide (1)..(136): Ceres Seq. ID no. 12342561
MTKEWRSVRLYVVPSVIYLIHNNVQFATLTYVDPSTYQIMGNLKIVTTGILFRLVLKRKLSNIQWMAIVLLAVGTTTSQVKGCGDSPCDSLFSAPLEGYLLGILSACLSALAGVYTEYLMKKNNDSLYWQNVQLYT

SEQ ID NO: 1798 - DNA, 1614 bp, Zea mays subsp. mays
  misc_feature (1)..(1614): Ceres Seq. ID no. 12410981
  misc_feature (1)..(1614): Ortholog of  Ceres SEQ ID NO 13598492 as cited in SEQ ID NO 63882
  misc_feature (1)..(1614): Ortholog of  Ceres SEQ ID NO 13654367 as cited in SEQ ID NO 67993
aaactgcctcattcattcgagctgtggcgaatcggaggcaatggcgtggccgcgtgggggtcagcaaggcagccgcggcggcagcagcgtccacctcgcgcacggcggcgcttctctgttcccaggcgctgcgaggtgacacaacaggagtctggcgacagccctctggcaagaaggaacggctcgctctcgactccgatgcgtgggagacaagcgctgcgacggtggatccggcgacccacgggcgtgggagacgaagacgagcggttataaacgtccctcaatgacaaggactcgtcatctgctccactgccactgcccttatcatcattcatcagcggcctgcctgcacgagattccgagggacagggagatccatggccgcgtcagaccaaccgccgcagccagagaagcccccgctgccgtggcgcgcgaggctgcttgtgggcgccgcctccgcgctgcacgccgcctcgctccgccgcgacggcaccgtcaaccgcttcctgctctccctcttcgaccgcgccgcgccgcccaccccgacggcccccctcggcggcgtggcatccacggaccacgccgtctccgaccacctgcgcgcccnnntcttcgtcccggagatccccggcggcggcaacgagctcccggtggtcgtgtacttccacggcggcggcttcgtcttccactccgcggcgtcggcgcagtacgacgcgctgtgccgccgcctggcgtcggccatcccggccgtcatcgcctccgtcgactaccgcctcgcgcccgagcaccgcttcccggctccctacgacgacggcgaggcagccctccggtgggccctagccggcgcggcaggcgcgctgccgtatccccccgccgccgtcttcgtggccggggacagcgccggcggcaacgtcgcccaccacgtcgccgcgcgcctccccgacgccgtcgcgggcctcctcgccgtgcagcctttcttcagcggcgaggcgccgacggggtcggagatgcggctccgcgacgccccgttcgggagccccgagcggctggcgtggctgtggcgcgcgttcctgccgcccggcgccacgcgggaccacgaggccgccaacgtgcccgccgcgatcaggcgcgacgcgggcgcgggcgcggaccggtggcgggcgttcccgcccacgctggtgtgcgtcggcgggtgggacgtgcatcaggacaggcagagggcgtacgcggacgcgctccgcgccgtgtgctccgaggaggtcaccgtggcggagtacccggacgccatccacgccttctacgtgttggacgacctcgcggacagcaagaagtttctgggtgacgtcgcggagttcgtgaaccggcatgcacaacagcggaggaaacccgcactaggccatgccaaggactagtgttatccgcttgcaaggatggcaagaaatcataggactggataagcttccttttgtggaaaatggaggcagcgactgatagattaagctggcagtgtttgtcactccctctatcatattgttagttaccagctggtttagattgattgttagatcactctgccatgtattcctttcgtttctatgtattaaatctactttt

SEQ ID NO: 1799 - protein, 352 aa, Zea mays subsp. mays
  peptide (1)..(352): Ceres Seq. ID no. 12410982
  misc_feature (108)..(108): Xaa is any aa, unknown or other
  misc_feature (109)..(109): Xaa is any aa, unknown or other
MTRTRHLLHCHCPYHHSSAACLHEIPRDREIHGRVRPTAAAREAPAAVAREAACGRRLRAARRLAPPRRHRQPLPALPLRPRRAAHPDGPPRRRGIHGPRRLRPPARXXLRPGDPRRRQRAPGGRVLPRRRLRLPLRGVGAVRRAVPPPGVGHPGRHRLRRLPPRARAPLPGSLRRRRGSPPVGPSRRGRRAAVSPRRRLRGRGQRRRQRRPPRRRAPPRRRRGPPRRAAFLQRRGADGVGDAAPRRPVREPRAAGVAVARVPAARRHAGPRGRQRARRDQARRGRGRGPVAGVPAHAGVRRRVGRASGQAEGVRGRAPRRVLRGGHRGGVPGRHPRLLRVGRPRGQQEVSG

SEQ ID NO: 1800 - protein, 344 aa, Zea mays subsp. mays
  peptide (1)..(344): Ceres Seq. ID no. 12410983
  misc_feature (77)..(77): Xaa is any aa, unknown or other
  misc_feature (78)..(78): Xaa is any aa, unknown or other
MAASDQPPQPEKPPLPWRARLLVGAASALHAASLRRDGTVNRFLLSLFDRAAPPTPTAPLGGVASTDHAVSDHLRAXXFVPEIPGGGNELPVVVYFHGGGFVFHSAASAQYDALCRRLASAIPAVIASVDYRLAPEHRFPAPYDDGEAALRWALAGAAGALPYPPAAVFVAGDSAGGNVAHHVAARLPDAVAGLLAVQPFFSGEAPTGSEMRLRDAPFGSPERLAWLWRAFLPPGATRDHEAANVPAAIRRDAGAGADRWRAFPPTLVCVGGWDVHQDRQRAYADALRAVCSEEVTVAEYPDAIHAFYVLDDLADSKKFLGDVAEFVNRHAQQRRKPALGHAKD

SEQ ID NO: 1801 - DNA, 1315 bp, Zea mays subsp. mays
  misc_feature (1)..(1315): Ceres Seq. ID no. 12351926
  misc_feature (1)..(1315): Ortholog of  Ceres SEQ ID NO 13597393 as cited in SEQ ID NO 63453
aggacagaaccctgagccggaacaaaatggcggcgctcataaaccctatataccgccgactcgccgccttcgcctgccgccggatctctgcaccggcggtagagaagcccgtgctgcccctcgtgtatcaccggaacttgcagcaaagacacaattccagtttggtggatgcgagtggaggattcagcgagatgcttgcctctacacggaggtgctatgtatttggaggcaaaggtggtgtggggaaaacaagcatggcgggcgtcgcttgctgtgaagtttgccaaccatggtgaaccaacagctattgtttcgacggaaccatctccgtcactcggtgatttatttgaacaagacatgggtgttggcggcaaaactgtacgcatcactggatttgactctctttttgcagttgaggctggtcagttcaagataaagggagaacctgaagatcttggatcttttatcaacaatttacttggaaagatggggcttggaacacattctgatattatgtctatgattagagagatgctggatggaatgccccctggacttgaagaagcgcttgtactatcaaaggtgataaaatctattgacgtgcaagaggccgatatacttcggcgtttagtgctggatgctccatccactggacatacacttaagcttctgtcagcttctgattggattgaaatgttccttactttgagcattaagggcataaaagtggcttcgtccatgccatcgtttaatatgtatcttgaggacgtgcaattcatctctgccaggctagaggaactaaggcagcaggttcgcagagtgcgtgagattttgtttgatccacaatcaacagaattcatcgtcgtgacaattccaacgatgatggcagttactgagtcatcaaggtttcacgagtcattaaagaaggatggtgcacacacaagaaggctcgtcataaatcaggtgttgccaccgtctgcgtcggactgcagattctgtgctgcaaaacggagggaagaagcacgtgccttccgtgcgatactggaggaccgagaactcggcggcctgaagctgatccaggctccgctccttgatatggaggtgaaaggcgtccctgcactccgattcctcagcgattcagtgtggaagtagcgagaaacactaggtcaaataaaagattaatctctgtcggtctgttcggattctttcatttggttggagctagaatctagttcatgaatttggcctagaatctggcattcgaccacgttctatcactcttctcaagtatagatctgtgtcaaattcagagggc

SEQ ID NO: 1802 - protein, 327 aa, Zea mays subsp. mays
  peptide (1)..(327): Ceres Seq. ID no. 12351927
MRVEDSARCLPLHGGAMYLEAKVVWGKQAWRASLAVKFANHGEPTAIVSTEPSPSLGDLFEQDMGVGGKTVRITGFDSLFAVEAGQFKIKGEPEDLGSFINNLLGKMGLGTHSDIMSMIREMLDGMPPGLEEALVLSKVIKSIDVQEADILRRLVLDAPSTGHTLKLLSASDWIEMFLTLSIKGIKVASSMPSFNMYLEDVQFISARLEELRQQVRRVREILFDPQSTEFIVVTIPTMMAVTESSRFHESLKKDGAHTRRLVINQVLPPSASDCRFCAAKRREEARAFRAILEDRELGGLKLIQAPLLDMEVKGVPALRFLSDSVWK

SEQ ID NO: 1803 - protein, 311 aa, Zea mays subsp. mays
  peptide (1)..(311): Ceres Seq. ID no. 12351928
MYLEAKVVWGKQAWRASLAVKFANHGEPTAIVSTEPSPSLGDLFEQDMGVGGKTVRITGFDSLFAVEAGQFKIKGEPEDLGSFINNLLGKMGLGTHSDIMSMIREMLDGMPPGLEEALVLSKVIKSIDVQEADILRRLVLDAPSTGHTLKLLSASDWIEMFLTLSIKGIKVASSMPSFNMYLEDVQFISARLEELRQQVRRVREILFDPQSTEFIVVTIPTMMAVTESSRFHESLKKDGAHTRRLVINQVLPPSASDCRFCAAKRREEARAFRAILEDRELGGLKLIQAPLLDMEVKGVPALRFLSDSVWK

SEQ ID NO: 1804 - protein, 264 aa, Zea mays subsp. mays
  peptide (1)..(264): Ceres Seq. ID no. 12351929
MGVGGKTVRITGFDSLFAVEAGQFKIKGEPEDLGSFINNLLGKMGLGTHSDIMSMIREMLDGMPPGLEEALVLSKVIKSIDVQEADILRRLVLDAPSTGHTLKLLSASDWIEMFLTLSIKGIKVASSMPSFNMYLEDVQFISARLEELRQQVRRVREILFDPQSTEFIVVTIPTMMAVTESSRFHESLKKDGAHTRRLVINQVLPPSASDCRFCAAKRREEARAFRAILEDRELGGLKLIQAPLLDMEVKGVPALRFLSDSVWK

SEQ ID NO: 1805 - DNA, 1522 bp, Zea mays subsp. mays
  misc_feature (1)..(1522): Ceres Seq. ID no. 12358133
  misc_feature (1)..(1522): Ortholog of  Ceres SEQ ID NO 15177104 as cited in SEQ ID NO 56048
aatcccgccgtgcttcccgtcttcaccaaatccttcgccacgatggcgcgcctgctcatccccctccccttcgccgccgcctctgcctcatcgctccacctcgccgtctcccgccttcctctcgccgcggtctccgccgcgcgtcgcgagtgtctctttgggggaagggtggtaggaggagtggtgagggcgcccgcgaggctttctaagcgcgggttgtgcgccggcgcagaggctggcgactcggccgtcacggtggaggccatggaatgggtcaagaaggacaggaggcgcctgctccacgtcgtctaccgcgtcggggacctcgacaagacgatcaagttctacacggagtgccctgggcatgaaactgttgaggaagagggacattcccgaggagaggtacaccaatgcctttctggggtacgggcctgaggattcacattttgttgtggagctcacttacaattatggtgtggagagctataacatcgggactggttttggccactttggaattgctgttgaggatgttgcaaaaacagtggaacttattaaagcaaaaggaggaacagtcacaagggagccaggtcctgtcaaaggtgggaaatcagtaattgcctttattgaggatcctgatggttacaagtttgagcttagagaaagagggcctactcccgagcctttgtgccaggtaatgcttcgagtgggagatcttgatcgtgctataaatttctatgagaaggcatttggcatggaacttcttcgcaagcgagacaattctgagtacaaggcggtatttgatggtgtcaacccttcattgagcaccattcagaggcttttcttggatgaggtggagtgctggtgtatggctggtgcgaagcagctcgagagtctcggacttctggctgcatttgctaggtatacgattgcgatgatgggatatggtccagaagacaaaaatgctgtattggagttgacctacaactatggggtgaaggaatatgataagggaaatgcttatgcacagattgctattagtactgatgatgtctacaaaactgcggaagcaattagagtaaatggtggacaaattactcgtgaacctggcccattacctggcatcaccaccaagataactgcatgcacagatccagatggctggaaaacagtgtttgtcgataacatagattttctgaaggagttggaagaatgagctttgctagagatctcaacttggtacatcaagctccatacggttgcaccccgtgagttccatgcatgacctgcaaaatctttgtaaagccacagcctcaaactgaggattgtagataggtcgtccaatctacggcatcatcgcaattgatagttgatagagcattagattttccttgcagatctatatagatgcgcaaccgtttttgtattatgcattttaatgcataagttcaatggaaatgattcatgggtaagaaaatcgtcttctttcaagcggcaatataagggctggtttggtgacttg

SEQ ID NO: 1806 - protein, 283 aa, Zea mays subsp. mays
  peptide (1)..(283): Ceres Seq. ID no. 12358134
MKLLRKRDIPEERYTNAFLGYGPEDSHFVVELTYNYGVESYNIGTGFGHFGIAVEDVAKTVELIKAKGGTVTREPGPVKGGKSVIAFIEDPDGYKFELRERGPTPEPLCQVMLRVGDLDRAINFYEKAFGMELLRKRDNSEYKAVFDGVNPSLSTIQRLFLDEVECWCMAGAKQLESLGLLAAFARYTIAMMGYGPEDKNAVLELTYNYGVKEYDKGNAYAQIAISTDDVYKTAEAIRVNGGQITREPGPLPGITTKITACTDPDGWKTVFVDNIDFLKELEE

SEQ ID NO: 1807 - protein, 172 aa, Zea mays subsp. mays
  peptide (1)..(172): Ceres Seq. ID no. 12358135
MLRVGDLDRAINFYEKAFGMELLRKRDNSEYKAVFDGVNPSLSTIQRLFLDEVECWCMAGAKQLESLGLLAAFARYTIAMMGYGPEDKNAVLELTYNYGVKEYDKGNAYAQIAISTDDVYKTAEAIRVNGGQITREPGPLPGITTKITACTDPDGWKTVFVDNIDFLKELEE

SEQ ID NO: 1808 - protein, 153 aa, Zea mays subsp. mays
  peptide (1)..(153): Ceres Seq. ID no. 12358136
MELLRKRDNSEYKAVFDGVNPSLSTIQRLFLDEVECWCMAGAKQLESLGLLAAFARYTIAMMGYGPEDKNAVLELTYNYGVKEYDKGNAYAQIAISTDDVYKTAEAIRVNGGQITREPGPLPGITTKITACTDPDGWKTVFVDNIDFLKELEE

SEQ ID NO: 1809 - DNA, 688 bp, Zea mays subsp. mays
  misc_feature (1)..(688): Ceres Seq. ID no. 12342668
  misc_feature (1)..(688): Ortholog of  Ceres SEQ ID NO 12594788 as cited in SEQ ID NO 0
atgtcggtacagccgagaaccgggaccggtgattttcccctcccccttgtcttgctgcttccaattgacccgtcaattgctcaggcgatagtggctgcagtgcatttctgggatggggctgctcttccttgagcggctcgagggggagggcgtgttcaggtgccggcgctgccgcgtggacgccgcctccaaggacgccatcatctccagggacttctacggccgcagcggccgcgcctacctcttcgaccacgttgtgaacatatgcctaggccctaatgaggatcggtatcttgtaaccgggctccatactgtgaatgacatctactgtagctgctgccaacagattcttggctggagatatgagaaagcctacgagcaaagccagaaatacaaggaagggaagtacatcctcgagagagctagaatggtgaaggatgggtgacgatcatttggatgctcttacttctaacaccccagaagcgcaatcttcttgaactctggaaagattcagaactatccctcaatttgcatgcctcagaacatttgacacctaattggcatcccagttagctaggaagatcactggttgcagattctttgatttgtagaatattactgactctgaatacccttagcttgttagtaatggtaacatttggtgaaatattgatgattaggtgaattg

SEQ ID NO: 1810 - protein, 110 aa, Zea mays subsp. mays
  peptide (1)..(110): Ceres Seq. ID no. 12342669
MGLLFLERLEGEGVFRCRRCRVDAASKDAIISRDFYGRSGRAYLFDHVVNICLGPNEDRYLVTGLHTVNDIYCSCCQQILGWRYEKAYEQSQKYKEGKYILERARMVKDG

SEQ ID NO: 1811 - DNA, 1183 bp, Zea mays subsp. mays
  misc_feature (1)..(1183): Ceres Seq. ID no. 13499096
  misc_feature (1)..(1183): Ortholog of  Ceres SEQ ID NO 15176130 as cited in SEQ ID NO 1136
  misc_feature (1)..(1183): Ortholog of  Ceres SEQ ID NO 15171728 as cited in SEQ ID NO 57131
  misc_feature (1)..(1183): Ortholog of  Ceres SEQ ID NO 14308198 as cited in SEQ ID NO 59072
  misc_feature (1)..(1183): Ortholog of  Ceres SEQ ID NO 13654213 as cited in SEQ ID NO 60614
  misc_feature (1)..(1183): Ortholog of  Ceres SEQ ID NO 12617527 as cited in SEQ ID NO 64697
atcctccaacgactcacctcccacccactcacccaccccatggcgaccaacccctccaacggcgccggcgccgacgtccctgcagccccggcggcggtgcggctctcggttgcggcgcaggcggccgcgatccagccctcgtccccgcgcttcttcttctcctcgcttgccgggaccaacccggcctccccgcaccgtcgcatcgccatcgccgttgatctctccgacgagtccgccttcgcagtcaagtgggccgtgcagaactacgtccgccccggggacgccgtcgtgctgctccacgtgcgccccacctccgtcctctacggcgccgactggggttccatcccggtctccgtcgctgacgaggacgacgctgccgaggacgccgccgccgccgccgagggcgatccctcggaggaggagctgcagaagaaacgggaggaggactacgacgccttcacctccaccaaggcgcaggacctcgcgcaaccgctggtcgacgcccagatccccttcaagatccacgtcgtcaaggaccacgacatgaaggagcgcctctgcctcgaggctgagcgccttggcctctccgccatgatcatggggagccgcggtttcggggcctcccggaaaggcagcaaggggcggcttgggagtgttagtgattactgcgtacaccactgtgtatgccctgttgtggttgttcgctaccctgatgatgctgcagatgccggtggagatgcatcaggggtgacagatgagttgcacactgtaccagaggacgaacctgtttatcacgatgcacctgaggtgcagaaagaaaactgaggcaacggccacatgcagctgaagaacgaaggaaaacacgaggcttatagtgaggcaatcctgtgtatctggaagatgggaccggatgtttatctttgcttctatatatcaactgcgtatcatgatcagctgtctgcttcccgttgagtttcatatcggcgtcgtagatcatctgagttttttgttggtttgcttgtgagatgtagagtactcttcccgtgggtcgaaggtgtcttgcagatgcttgagctttatgttgtcgaacggtagttatctacacggtatcatctgctctgttaagcctgtttagtgtttactgtattggatactcgttaatagagaaccgctacttttcagt

SEQ ID NO: 1812 - protein, 274 aa, Zea mays subsp. mays
  peptide (1)..(274): Ceres Seq. ID no. 13499097
ILQRLTSHPLTHPMATNPSNGAGADVPAAPAAVRLSVAAQAAAIQPSSPRFFFSSLAGTNPASPHRRIAIAVDLSDESAFAVKWAVQNYVRPGDAVVLLHVRPTSVLYGADWGSIPVSVADEDDAAEDAAAAAEGDPSEEELQKKREEDYDAFTSTKAQDLAQPLVDAQIPFKIHVVKDHDMKERLCLEAERLGLSAMIMGSRGFGASRKGSKGRLGSVSDYCVHHCVCPVVVVRYPDDAADAGGDASGVTDELHTVPEDEPVYHDAPEVQKEN

SEQ ID NO: 1813 - protein, 261 aa, Zea mays subsp. mays
  peptide (1)..(261): Ceres Seq. ID no. 13499098
MATNPSNGAGADVPAAPAAVRLSVAAQAAAIQPSSPRFFFSSLAGTNPASPHRRIAIAVDLSDESAFAVKWAVQNYVRPGDAVVLLHVRPTSVLYGADWGSIPVSVADEDDAAEDAAAAAEGDPSEEELQKKREEDYDAFTSTKAQDLAQPLVDAQIPFKIHVVKDHDMKERLCLEAERLGLSAMIMGSRGFGASRKGSKGRLGSVSDYCVHHCVCPVVVVRYPDDAADAGGDASGVTDELHTVPEDEPVYHDAPEVQKEN

SEQ ID NO: 1814 - protein, 181 aa, Zea mays subsp. mays
  peptide (1)..(181): Ceres Seq. ID no. 13499099
SSNDSPPTHSPTPWRPTPPTAPAPTSLQPRRRCGSRLRRRRPRSSPRPRASSSPRLPGPTRPPRTVASPSPLISPTSPPSQSSGPCRTTSAPGTPSCCSTCAPPPSSTAPTGVPSRSPSLTRTTLPRTPPPPPRAIPRRRSCRRNGRRTTTPSPPPRRRTSRNRWSTPRSPSRSTSSRTTT

SEQ ID NO: 1815 - DNA, 659 bp, Zea mays subsp. mays
  misc_feature (1)..(659): Ceres Seq. ID no. 12345880
  misc_feature (1)..(659): Ortholog of  Ceres SEQ ID NO 13598367 as cited in SEQ ID NO 62113
gtcaaagaggggagaggagcagatgaaggcggggaggaagaacctgcggcgggcgtgcgacgaaggcgccgccgtcacgctcgccgagggcgagagcatcatgcaggtcctcacgctgcgtggctccaacgtcatcgaggtgattgacggcgagggcatcaagtccctggccttgttccctgccaagttccagaagagcttctggatcaagaacgcggaagggatcaagctctggaatcagggagcaagattgcgtgtgttgtctcgcaagtcctctaccacgaacaagttcgggctctggagaagtccggtaattggccagctattttcaactcaactccgaatgaagcttcagaagcgggaacacaagcgcaaattgctgccaagattgacgagttgccagattctgatgaagacgacaatcttccaccagttgaagcaaacaccaacaggaatagaccatatgaactgtattatgactcagacagtggcggttctgattcttaaactagtttagttgccattcatgttgtaatgcgcgcctgctgtgctttcttgttcattcacgttgatggtttttttttctttgaagataaagattgtctgcgctgccaaagatatatttgtgatatgaatggaatggctggacctggagctat

SEQ ID NO: 1816 - protein, 171 aa, Zea mays subsp. mays
  peptide (1)..(171): Ceres Seq. ID no. 12345881
SKRGEEQMKAGRKNLRRACDEGAAVTLAEGESIMQVLTLRGSNVIEVIDGEGIKSLALFPAKFQKSFWIKNAEGIKLWNQGARLRVLSRKSSTTNKFGLWRSPVIGQLFSTQLRMKLQKREHKRKLLPRLTSCQILMKTTIFHQLKQTPTGIDHMNCIMTQTVAVLILKLV

SEQ ID NO: 1817 - protein, 164 aa, Zea mays subsp. mays
  peptide (1)..(164): Ceres Seq. ID no. 12345882
MKAGRKNLRRACDEGAAVTLAEGESIMQVLTLRGSNVIEVIDGEGIKSLALFPAKFQKSFWIKNAEGIKLWNQGARLRVLSRKSSTTNKFGLWRSPVIGQLFSTQLRMKLQKREHKRKLLPRLTSCQILMKTTIFHQLKQTPTGIDHMNCIMTQTVAVLILKLV

SEQ ID NO: 1818 - protein, 138 aa, Zea mays subsp. mays
  peptide (1)..(138): Ceres Seq. ID no. 12345883
MQVLTLRGSNVIEVIDGEGIKSLALFPAKFQKSFWIKNAEGIKLWNQGARLRVLSRKSSTTNKFGLWRSPVIGQLFSTQLRMKLQKREHKRKLLPRLTSCQILMKTTIFHQLKQTPTGIDHMNCIMTQTVAVLILKLV

SEQ ID NO: 1819 - DNA, 1374 bp, Zea mays subsp. mays
  misc_feature (1)..(1374): Ceres Seq. ID no. 12351930
  misc_feature (1)..(1374): Ortholog of  Ceres SEQ ID NO 15225493 as cited in SEQ ID NO 65438
  misc_feature (1)..(1374): Ortholog of  Ceres SEQ ID NO 14313344 as cited in SEQ ID NO 69148
agcatctccaacaaacaccagacgtcgtatagcggcagtccagtccacctcctccgaagccgacggtcgccgccggccatcgccgcggaggatatggcgtccctccgtgtggtgtcggtgctagtgttggtggcaatggcggcgagcgcgggcggcgtcgcggcgcggcctctggtaggggtaggcggggcgtgggagaacagggcgccgctgcagacgtcgcgccccttcaacatcgcgcaccggggctccaacggggagctccccgaggagacggcggcggcctacgcggcgcgccatcgacgagggcgcggacttcatcgaggcggacatcgaggccaccaaggacggccacctcgtctgcttccacgacaccacgctcgacggtaccaccgacgtcgcccaccacccggagttcgccggccgccggcgcaccctcgaggtgcagtgggccaacgtcaccggatacttcgtcactgatttcacgctggcggagctcaagacgctgcgggcgaagcagcgatgggacttccgtgacaagtcccacaacggcgtctcgccgatcatcacgttcgacgagttcatcgacgtcgcgctgaacgccaagaggggtcgggatctacccggagatgaagaaccctgtgttcatgaacaagcacgtgcagtgggctgacgggaagaagtacgaggacaagttcatcgcgacgctgaagaagtacggctacggcggcaagtacatgtcgccggcgtggcgcgccaggccggtcttcgtccagtctttcgcgccgacgtcgctggtccgcgcggccggcctcacggactcgccgctcgtcttcctcgtcgacgacgtgaccgtgcggaccgaggacaccaaccagccgtacgacgatatcacctccggcgagcacctggactacatgaacaggtacgtggtgggcatcgggccctggaaggacacggtggtgccgccgaccaaggacaaccggctggccacgccgtcggacctcgtcgcaatggcgcacgcgaggggactgcaggtgcacccctacacgtaccgcaacgagaacaagttcctgcacttcgacttccggcaggacccctacgccgagtacgactactggatcaacgacgtcggcatcgatggcctcttcaccgacttcccggcgagcctccgccggttccaggagtggaccgccaagaacaaagactgattgtgattggcaactcggtcttggtagctagcttctttgattcagtcattcagatcgtagctctggagatgttttcagggtagagacaattctttggtgttccttgttttaaatagccatatattttcttgattggatcagtaacagttaacagttcttacct

SEQ ID NO: 1820 - protein, 193 aa, Zea mays subsp. mays
  peptide (1)..(193): Ceres Seq. ID no. 12351931
MKNPVFMNKHVQWADGKKYEDKFIATLKKYGYGGKYMSPAWRARPVFVQSFAPTSLVRAAGLTDSPLVFLVDDVTVRTEDTNQPYDDITSGEHLDYMNRYVVGIGPWKDTVVPPTKDNRLATPSDLVAMAHARGLQVHPYTYRNENKFLHFDFRQDPYAEYDYWINDVGIDGLFTDFPASLRRFQEWTAKNKD

SEQ ID NO: 1821 - protein, 187 aa, Zea mays subsp. mays
  peptide (1)..(187): Ceres Seq. ID no. 12351932
MNKHVQWADGKKYEDKFIATLKKYGYGGKYMSPAWRARPVFVQSFAPTSLVRAAGLTDSPLVFLVDDVTVRTEDTNQPYDDITSGEHLDYMNRYVVGIGPWKDTVVPPTKDNRLATPSDLVAMAHARGLQVHPYTYRNENKFLHFDFRQDPYAEYDYWINDVGIDGLFTDFPASLRRFQEWTAKNKD

SEQ ID NO: 1822 - protein, 159 aa, Zea mays subsp. mays
  peptide (1)..(159): Ceres Seq. ID no. 12351933
SISNKHQTSYSGSPVHLLRSRRSPPAIAAEDMASLRVVSVLVLVAMAASAGGVAARPLVGVGGAWENRAPLQTSRPFNIAHRGSNGELPEETAAAYAARHRRGRGLHRGGHRGHQGRPPRLLPRHHARRYHRRRPPPGVRRPPAHPRGAVGQRHRILRH

SEQ ID NO: 1823 - DNA, 1330 bp, Zea mays subsp. mays
  misc_feature (1)..(1330): Ceres Seq. ID no. 12368522
  misc_feature (1)..(1330): Ortholog of  Ceres SEQ ID NO 14316161 as cited in SEQ ID NO 52384
  misc_feature (1)..(1330): Ortholog of  Ceres SEQ ID NO 14315249 as cited in SEQ ID NO 52512
  misc_feature (1)..(1330): Ortholog of  Ceres SEQ ID NO 15174595 as cited in SEQ ID NO 53460
  misc_feature (1)..(1330): Ortholog of  Ceres SEQ ID NO 13503553 as cited in SEQ ID NO 64822
  misc_feature (1)..(1330): Ortholog of  Ceres SEQ ID NO 13660155 as cited in SEQ ID NO 67635
ctccccctccgcctcttgctctctctcgcctctggttggcagagctctcttgaagcctcgagactcgtctcgccgctgctccctcagctctgccgctgcgtgcctgcgttagctgttgcattgcagcgcagccccgcgagccttgagctgctagctcgcccttcaccacagtccccagacatggagttcgaagaccgctgccacaaggtccaggagcccaagttcgactgcctgctcttcgacctcgacgacaccctgtacccgctgagcgccgggatcgcaggccatgtcaagaagaacattgaagattacatggttgagaagctgggtattgacgagaccaagatcgagaacctgggcaatctgctgtacaagaactacggcaccacgatggctggcctcagggccatcggctacagcttcgattacgatgagtaccacgccttcgtccatggaaggctgccgtacgacaacatcaagcctgaccccattctcaagcacattctcaagaacctgcgcatccgcaaactcatattcaccaacggtgacatggtccacgccgtgagagccctcaagaggctgggcctggaggactgcttcgaggggatcatctgcttcgagaccctgaacccgccctgcccgccgcagggagaccaggagcccgagatcttcgacatcgccgaccacttcgcccgctccggcaccgccgacgagctgcccaagacccccgtgctgtgcaagcccaacgtggacgccatggaggaggcgctcaggatcgccaacgtcaacccgcacaaggcgatcttcttcgacgacagcgtacgcaacatccaggccgggaagcagattggcctccacacggtgctggtgggcaaatcgcagcgggtgaaaggcgcggaccacgcgctggagagcatccacaacatcagggaagcgctgccggagctgtgggaggaggccgagaaggcggaggacgtgctctaccccgaacgcgttgcgatggagacctcggtcaccgcgtaaaacccctgaatgcctccggtgcaccgtcagccgaactttctcgacatctccaggaccgcatcaacgatcacatgtcactcgctccccgagccagggccggtgatgatctcgcgctggaactgaatccaccagcaatgggcgggccgaggatcgatttccgacagcaggaggggtgcagcatgtaaagggggaacagatgagatcatgtttgggttggtcccccgttgtatatgtagttatgtatcagccagtcctttgtttgtaaattaccagtatttagaagtaataagaaaatgggggtttacgt

SEQ ID NO: 1824 - protein, 340 aa, Zea mays subsp. mays
  peptide (1)..(340): Ceres Seq. ID no. 12368523
LPLRLLLSLASGWQSSLEASRLVSPLLPQLCRCVPALAVALQRSPASLELLARPSPQSPDMEFEDRCHKVQEPKFDCLLFDLDDTLYPLSAGIAGHVKKNIEDYMVEKLGIDETKIENLGNLLYKNYGTTMAGLRAIGYSFDYDEYHAFVHGRLPYDNIKPDPILKHILKNLRIRKLIFTNGDMVHAVRALKRLGLEDCFEGIICFETLNPPCPPQGDQEPEIFDIADHFARSGTADELPKTPVLCKPNVDAMEEALRIANVNPHKAIFFDDSVRNIQAGKQIGLHTVLVGKSQRVKGADHALESIHNIREALPELWEEAEKAEDVLYPERVAMETSVTA

SEQ ID NO: 1825 - protein, 280 aa, Zea mays subsp. mays
  peptide (1)..(280): Ceres Seq. ID no. 12368524
MEFEDRCHKVQEPKFDCLLFDLDDTLYPLSAGIAGHVKKNIEDYMVEKLGIDETKIENLGNLLYKNYGTTMAGLRAIGYSFDYDEYHAFVHGRLPYDNIKPDPILKHILKNLRIRKLIFTNGDMVHAVRALKRLGLEDCFEGIICFETLNPPCPPQGDQEPEIFDIADHFARSGTADELPKTPVLCKPNVDAMEEALRIANVNPHKAIFFDDSVRNIQAGKQIGLHTVLVGKSQRVKGADHALESIHNIREALPELWEEAEKAEDVLYPERVAMETSVTA

SEQ ID NO: 1826 - protein, 236 aa, Zea mays subsp. mays
  peptide (1)..(236): Ceres Seq. ID no. 12368525
MVEKLGIDETKIENLGNLLYKNYGTTMAGLRAIGYSFDYDEYHAFVHGRLPYDNIKPDPILKHILKNLRIRKLIFTNGDMVHAVRALKRLGLEDCFEGIICFETLNPPCPPQGDQEPEIFDIADHFARSGTADELPKTPVLCKPNVDAMEEALRIANVNPHKAIFFDDSVRNIQAGKQIGLHTVLVGKSQRVKGADHALESIHNIREALPELWEEAEKAEDVLYPERVAMETSVTA

SEQ ID NO: 1827 - DNA, 1440 bp, Zea mays subsp. mays
  misc_feature (1)..(1440): Ceres Seq. ID no. 12391399
  misc_feature (1)..(1440): Ortholog of  Ceres SEQ ID NO 13597538 as cited in SEQ ID NO 64966
gcacgagaccattacctagaacatcntaatcgaaaagcgccgctgttcgcaacccaagcagtagccgagccaacgaaggcgtgcgagcggaggcaatcatacatggacggcagccgcaagagggtggacgcggaagacgtcaaaggggattccaccggcgggaagcgattgcgagcatcggagtcatttcaaagtggcgtaggaagcaaagtgaagctatgcaccaattttttcagtacttatggttgtccctttggtgagggctgccattttgtccattacttccctggtgactaccgggccgtttcagaaatgaccaacctgggtggcgcaacaatcgcacctcctggaggaatgatgatggatgggccacctacacccatcgtgaagactcgcttgtgcaacaagtacaacactgcagagggatgcaaatggggggacagatgccactttgcacatggtgaaagtgagcttggcaagtctatgatggacaactatatgccaccccccatcggaccaccaccaaccggttattttgcacctccacctatggcacctccacctatggcgcctccacccatggcacctccacctatggcacctctacctatggcgcctccacccatggcacctccacctatggcgcctccacccatggcacctccacctatggcgcctctacctatggcgcctccacctatggcacctccacctatggcacctccacccatggcgcctccacccatggcacctctacctatggcgcctccacccatggcacctccacctatggccaaccctggtttggccactccagctagcttcggcgcttatgccacggccaagatcagtgtcgatgcgtcccttgcaggtggcatcattgggaagggtggagctaacataaagcaaatatcttccgtcacaggggccaaggtggtcattcaggaggaccgccatgaatcagacaccagctttgaaaaacattgagttttgagggcacctttgatcagatcaggaacgctagtgctatggtcatcgagctgattgttagcatcagtggcataggaagcaacttcaagaccaagatgtgtgagaacttcgcaaaagggtcatgctcttatggcggcaaatgcccactttgcccatggtgagagtgagctgcgcaagcctgccgctgcttgagatccatgccctgtttcttacctcatagtcattagtcaatgtaactcaaaacttggcctctgatgatggatttgttggcttctttaggtctacgctaatgaattgctggcttcaggcctactactaaatttgctgacttctttagtccttcgctgttggccaactaaatctgttttctgcgtttgttcttgaatgttctcctatgatctaatcctctatttaggttcaaccagagaagtgttgatgctgatgatttgc

SEQ ID NO: 1828 - protein, 328 aa, Zea mays subsp. mays
  peptide (1)..(328): Ceres Seq. ID no. 12391400
  misc_feature (9)..(9): Xaa is any aa, unknown or other
ARDHYLEHXNRKAPLFATQAVAEPTKACERRQSYMDGSRKRVDAEDVKGDSTGGKRLRASESFQSGVGSKVKLCTNFFSTYGCPFGEGCHFVHYFPGDYRAVSEMTNLGGATIAPPGGMMMDGPPTPIVKTRLCNKYNTAEGCKWGDRCHFAHGESELGKSMMDNYMPPPIGPPPTGYFAPPPMAPPPMAPPPMAPPPMAPLPMAPPPMAPPPMAPPPMAPPPMAPLPMAPPPMAPPPMAPPPMAPPPMAPLPMAPPPMAPPPMANPGLATPASFGAYATAKISVDASLAGGIIGKGGANIKQISSVTGAKVVIQEDRHESDTSFEKH

SEQ ID NO: 1829 - protein, 294 aa, Zea mays subsp. mays
  peptide (1)..(294): Ceres Seq. ID no. 12391401
MDGSRKRVDAEDVKGDSTGGKRLRASESFQSGVGSKVKLCTNFFSTYGCPFGEGCHFVHYFPGDYRAVSEMTNLGGATIAPPGGMMMDGPPTPIVKTRLCNKYNTAEGCKWGDRCHFAHGESELGKSMMDNYMPPPIGPPPTGYFAPPPMAPPPMAPPPMAPPPMAPLPMAPPPMAPPPMAPPPMAPPPMAPLPMAPPPMAPPPMAPPPMAPPPMAPLPMAPPPMAPPPMANPGLATPASFGAYATAKISVDASLAGGIIGKGGANIKQISSVTGAKVVIQEDRHESDTSFEKH

SEQ ID NO: 1830 - protein, 224 aa, Zea mays subsp. mays
  peptide (1)..(224): Ceres Seq. ID no. 12391402
MTNLGGATIAPPGGMMMDGPPTPIVKTRLCNKYNTAEGCKWGDRCHFAHGESELGKSMMDNYMPPPIGPPPTGYFAPPPMAPPPMAPPPMAPPPMAPLPMAPPPMAPPPMAPPPMAPPPMAPLPMAPPPMAPPPMAPPPMAPPPMAPLPMAPPPMAPPPMANPGLATPASFGAYATAKISVDASLAGGIIGKGGANIKQISSVTGAKVVIQEDRHESDTSFEKH

SEQ ID NO: 1831 - DNA, 1306 bp, Zea mays subsp. mays
  misc_feature (1)..(1306): Ceres Seq. ID no. 12351938
  misc_feature (1)..(1306): Ortholog of  Ceres SEQ ID NO 14313796 as cited in SEQ ID NO 54544
caagcattcgcatagcccgcgccgcaagtattcgcggtcgcacaggctggtccagtccaacaccggcctccctgtttcgatgctggccacaagctcgcccggccgcccggggtgaggatgactgccactcccaccgggctcctccggctccacatctgccgtcgaccaaacccgccctgctaaatactcgctccatacagttctcctcgcaattaacacctccgttagcacgagctgcagggagggagttgggaggagaaacagagctaccggggcgatgggcaccgtgctcgattcgcacttcctggcgctcaccgccatcgttactgtggggtaccagctgctgttcttcatcatcacagctctcctccggttcgataaggtcaccgatttcgcaggcagtacaaattttatcataatcgccatcctaacattagctttgaagggagcatggcatttccgtcagattgtgctgacagtgcttgtcaccatttggggtcttcgtctaggattatttttattgatgaggattttgcaatggggtgaagaccgaaggtttgacaaaatgcgtgataatttggggaaattggcagttttttggattttccaggctgtgtgggtttggtctgtcagcttgcccgtcactgttgtgaatgcaagtgacagaaacccctcgattgaagccagggatataatcggctggataatatggttggtcgggatatgtgtagaagcaacagctgatcagcagaagcttgtgttaaaaaattctccaagtaacaggggaaagtggtgcgacgccggtctttggaagtactctcgccacccgaactactttggggagatattcctttggtggggagtatttgtagcatcgaccccagttatctcagatgccgaatggcttgtgattcttggacctatattcctgactcttctgcttcttttcgttagtggaatcccactcctcgagtcatctgctgataagcgctatggacgattggaggaataccgtgcatacaagaacactacaaggttgccttcctccttgagctcccgctctacaatcctgggccgggaggtgatccaatcagttgagtggtgcttgcaaactgttctgctgcccttcagtgatgaacttgtatagaatatccctgcagtatgtttacgttttttgtttttgttttggtttgacagaactagaatgagcccattgatgggtcagcctgatgtttatgttgctattgtgtgcgtggcagttattccaccttcgattccaaggggttacagtggagtttggcccctg

SEQ ID NO: 1832 - protein, 289 aa, Zea mays subsp. mays
  peptide (1)..(289): Ceres Seq. ID no. 12351939
MGTVLDSHFLALTAIVTVGYQLLFFIITALLRFDKVTDFAGSTNFIIIAILTLALKGAWHFRQIVLTVLVTIWGLRLGLFLLMRILQWGEDRRFDKMRDNLGKLAVFWIFQAVWVWSVSLPVTVVNASDRNPSIEARDIIGWIIWLVGICVEATADQQKLVLKNSPSNRGKWCDAGLWKYSRHPNYFGEIFLWWGVFVASTPVISDAEWLVILGPIFLTLLLLFVSGIPLLESSADKRYGRLEEYRAYKNTTRLPSSLSSRSTILGREVIQSVEWCLQTVLLPFSDELV

SEQ ID NO: 1833 - protein, 207 aa, Zea mays subsp. mays
  peptide (1)..(207): Ceres Seq. ID no. 12351940
MRILQWGEDRRFDKMRDNLGKLAVFWIFQAVWVWSVSLPVTVVNASDRNPSIEARDIIGWIIWLVGICVEATADQQKLVLKNSPSNRGKWCDAGLWKYSRHPNYFGEIFLWWGVFVASTPVISDAEWLVILGPIFLTLLLLFVSGIPLLESSADKRYGRLEEYRAYKNTTRLPSSLSSRSTILGREVIQSVEWCLQTVLLPFSDELV

SEQ ID NO: 1834 - protein, 193 aa, Zea mays subsp. mays
  peptide (1)..(193): Ceres Seq. ID no. 12351941
MRDNLGKLAVFWIFQAVWVWSVSLPVTVVNASDRNPSIEARDIIGWIIWLVGICVEATADQQKLVLKNSPSNRGKWCDAGLWKYSRHPNYFGEIFLWWGVFVASTPVISDAEWLVILGPIFLTLLLLFVSGIPLLESSADKRYGRLEEYRAYKNTTRLPSSLSSRSTILGREVIQSVEWCLQTVLLPFSDELV

SEQ ID NO: 1835 - DNA, 1396 bp, Zea mays subsp. mays
  misc_feature (1)..(1396): Ceres Seq. ID no. 12414291
  misc_feature (1)..(1396): Ortholog of  Ceres SEQ ID NO 14314464 as cited in SEQ ID NO 52405
  misc_feature (1)..(1396): Ortholog of  Ceres SEQ ID NO 15177592 as cited in SEQ ID NO 58436
  misc_feature (1)..(1396): Ortholog of  Ceres SEQ ID NO 13655251 as cited in SEQ ID NO 62888
  misc_feature (1)..(1396): Ortholog of  Ceres SEQ ID NO 13597194 as cited in SEQ ID NO 63661
  misc_feature (1)..(1396): Ortholog of  Ceres SEQ ID NO 14302883 as cited in SEQ ID NO 66384
  misc_feature (1)..(1396): Ortholog of  Ceres SEQ ID NO 13662855 as cited in SEQ ID NO 69059
ctccgtccccatctcgcgaagctagcgggaataacaagcaacgatacctacgacgacctacccccctttccctgctctctccttccaactcttgtttctgcaacgccagggcgcaaccatgggtcagcagcagcaagggccggcggccaggcggatggccacgctcgcctcccacctgcgccatccctccgtctctcaccctcagatggaagatgttcccctcttgaggggatccaattgccgtgcaaaaggtgcggcgccaggcttcaaagtcgcgatcttgggtgcagcaggtgggattgggcagccacttgcgctattgatgaagatgaaccctcttgtttcggtgctccatctatacgatgtcgtcaacgcacctggtgtcacagccgacatcagccacatgaacactggtgctgtggtacgtggcttcttgggccagccacagttggaaaatgccctggctggaatggatcttgtaataattcctgctggtgtccctcggaaacctgggatgacaagggatgatttgttcaacataaatgctggaatagtccgtaccctgtgtgaaggaattgcaaaatgctgccctaatgcaattgtgaatgtgatcagtaatcctgtcaactctaccgtcccaattgctgctgaagttttcaagaaagctggaacttatgaccctaagcggcttttaggtgtgaccacacttgacgtagtgagagcaaatacgtttgtgggagaggttcttggacttgaccccagagaggtaaatgttccagtcattggtgggcatgcaggaattacgatactaccactcctttcacaggtgaatccttcctgctcattcacctcggaagaggttaaatacctcacttctcgcatacagaatggtgggacagaagtagtcgaggctaaagctggagcaggatcagcaactctttcaatggcctatgcagctgccaaatttgcagatgcttgcctgagaggattgcgtggtgatgctgggataatagagtgctcttatgtggcttctcaggtcacagagttgcctttctttgcatccaaagtgcggctagggcgatgtggcattgaggagatcctaccacttggaccattaaatgagttcgagagatctggtctggagaaggcaaagaaagagctggcggagagtatccagaagggcgtctctttcatcaagtgaggccggcgacggccagcccaacatagaaatagatgtggcgtgtttctgcttcttgagaactcatcttgttatctctctgtaagactgagtgcatgacacgaataatccacgtacacggctgtactaaaaagatgatgaatctgtggtggctaaaaaaagggaaatagaaaagtctggtaataaaagttgtttctg

SEQ ID NO: 1836 - protein, 360 aa, Zea mays subsp. mays
  peptide (1)..(360): Ceres Seq. ID no. 12414292
MGQQQQGPAARRMATLASHLRHPSVSHPQMEDVPLLRGSNCRAKGAAPGFKVAILGAAGGIGQPLALLMKMNPLVSVLHLYDVVNAPGVTADISHMNTGAVVRGFLGQPQLENALAGMDLVIIPAGVPRKPGMTRDDLFNINAGIVRTLCEGIAKCCPNAIVNVISNPVNSTVPIAAEVFKKAGTYDPKRLLGVTTLDVVRANTFVGEVLGLDPREVNVPVIGGHAGITILPLLSQVNPSCSFTSEEVKYLTSRIQNGGTEVVEAKAGAGSATLSMAYAAAKFADACLRGLRGDAGIIECSYVASQVTELPFFASKVRLGRCGIEEILPLGPLNEFERSGLEKAKKELAESIQKGVSFIK

SEQ ID NO: 1837 - protein, 348 aa, Zea mays subsp. mays
  peptide (1)..(348): Ceres Seq. ID no. 12414293
MATLASHLRHPSVSHPQMEDVPLLRGSNCRAKGAAPGFKVAILGAAGGIGQPLALLMKMNPLVSVLHLYDVVNAPGVTADISHMNTGAVVRGFLGQPQLENALAGMDLVIIPAGVPRKPGMTRDDLFNINAGIVRTLCEGIAKCCPNAIVNVISNPVNSTVPIAAEVFKKAGTYDPKRLLGVTTLDVVRANTFVGEVLGLDPREVNVPVIGGHAGITILPLLSQVNPSCSFTSEEVKYLTSRIQNGGTEVVEAKAGAGSATLSMAYAAAKFADACLRGLRGDAGIIECSYVASQVTELPFFASKVRLGRCGIEEILPLGPLNEFERSGLEKAKKELAESIQKGVSFIK

SEQ ID NO: 1838 - protein, 331 aa, Zea mays subsp. mays
  peptide (1)..(331): Ceres Seq. ID no. 12414294
MEDVPLLRGSNCRAKGAAPGFKVAILGAAGGIGQPLALLMKMNPLVSVLHLYDVVNAPGVTADISHMNTGAVVRGFLGQPQLENALAGMDLVIIPAGVPRKPGMTRDDLFNINAGIVRTLCEGIAKCCPNAIVNVISNPVNSTVPIAAEVFKKAGTYDPKRLLGVTTLDVVRANTFVGEVLGLDPREVNVPVIGGHAGITILPLLSQVNPSCSFTSEEVKYLTSRIQNGGTEVVEAKAGAGSATLSMAYAAAKFADACLRGLRGDAGIIECSYVASQVTELPFFASKVRLGRCGIEEILPLGPLNEFERSGLEKAKKELAESIQKGVSFIK

SEQ ID NO: 1839 - DNA, 1453 bp, Zea mays subsp. mays
  misc_feature (1)..(1453): Ceres Seq. ID no. 12355877
  misc_feature (1)..(1453): Ortholog of  Ceres SEQ ID NO 14315626 as cited in SEQ ID NO 52943
  misc_feature (1)..(1453): Ortholog of  Ceres SEQ ID NO 13584616 as cited in SEQ ID NO 65234
  misc_feature (1)..(1453): Ortholog of  Ceres SEQ ID NO 14302742 as cited in SEQ ID NO 66899
  misc_feature (1)..(1453): Ortholog of  Ceres SEQ ID NO 14313536 as cited in SEQ ID NO 67925
ctcttttccgccctccacccctcgcgagctctccacccctccacacgaccgccgcccatggtggccgcgccaccaccgccgccgcagtttgccaagcacttcgctgctgggccgcccccgccgccccaagctggtgctgggcgccgcacgccgaccccgccctcgtctggatccggcgggaacgggtgcgaagaaaataaaaccatttgggtcggtgacctccagtactggatggatgaaaactacctacataactgcttcgggcccagcggcgaggtggttacaataaaagttatccgcaataggcaaacaggacagtcagaggggtatggatttgttgagttcttttctcatgcatcagcagagaaagctcttcagaattttactggtcatgtgatgccaaacactgaccggccatttaaattgaactgggcatcgtatagcatgggtgaaaagcgatctgaagtggcttctgatcactcgatatttgttggcgatctagctgctgatgtcactgatgaaatgctgctggagcttttctccagcaagtaccgctcggtgaaaggagctaaagttattattgatgcaaacacaggccgttccaggggctatggatttgtcaggtttggagacgacaacgacaaatctcatgccatgtctgaaatgaatggtgtatattgctctacgaggccaattcgtataggacctgcgactcccagaagatcttcaggtgattctggctcctcgactcctggtcattcagatggtgattcttctaacagaacggtatatgttggtgggcttgaccccaatgtcagtgaagatgaactgagaaaagcctttgccaaatatgatcttgcctctgtgaaaattcctctaggaaagcaatgtggctttgttcaatttgttagcagaactgatgctgaagaagcactacaaggattaaatggatcactcattggaaagcaggcagttcgcctttcatgggtccgcagcccatcgcataagcagtctaggggtgactccgtcaacaggaggaacaacatgtactatggcacaccattctacggcggatatggctatgcctccccggtgccacacccaaacatgtacgctgcagcgtatggcacgtacccgctatatggcaaccagcagctagtgagctagagagctcccctccgacgtgtcccctctgacgggaaacaaaggttttggtccggtgagcatagtagcgtcaggtgagaaggtgcctttataaggctgtcctaagaagtgggcgagatatgttgttgcatcgttatcgttatggtgcctgtaactgttgtgtgtgccgtgtgcgtccggaagaattggatggaatggaactcgtggcttgttgtagtacatcagagagtcatgttattctttcaagaaattttgacttggtaataaattaaactattgtttgtgcgtc

SEQ ID NO: 1840 - protein, 388 aa, Zea mays subsp. mays
  peptide (1)..(388): Ceres Seq. ID no. 12355878
LFSALHPSRALHPSTRPPPMVAAPPPPPQFAKHFAAGPPPPPQAGAGRRTPTPPSSGSGGNGCEENKTIWVGDLQYWMDENYLHNCFGPSGEVVTIKVIRNRQTGQSEGYGFVEFFSHASAEKALQNFTGHVMPNTDRPFKLNWASYSMGEKRSEVASDHSIFVGDLAADVTDEMLLELFSSKYRSVKGAKVIIDANTGRSRGYGFVRFGDDNDKSHAMSEMNGVYCSTRPIRIGPATPRRSSGDSGSSTPGHSDGDSSNRTVYVGGLDPNVSEDELRKAFAKYDLASVKIPLGKQCGFVQFVSRTDAEEALQGLNGSLIGKQAVRLSWVRSPSHKQSRGDSVNRRNNMYYGTPFYGGYGYASPVPHPNMYAAAYGTYPLYGNQQLVS

SEQ ID NO: 1841 - protein, 369 aa, Zea mays subsp. mays
  peptide (1)..(369): Ceres Seq. ID no. 12355879
MVAAPPPPPQFAKHFAAGPPPPPQAGAGRRTPTPPSSGSGGNGCEENKTIWVGDLQYWMDENYLHNCFGPSGEVVTIKVIRNRQTGQSEGYGFVEFFSHASAEKALQNFTGHVMPNTDRPFKLNWASYSMGEKRSEVASDHSIFVGDLAADVTDEMLLELFSSKYRSVKGAKVIIDANTGRSRGYGFVRFGDDNDKSHAMSEMNGVYCSTRPIRIGPATPRRSSGDSGSSTPGHSDGDSSNRTVYVGGLDPNVSEDELRKAFAKYDLASVKIPLGKQCGFVQFVSRTDAEEALQGLNGSLIGKQAVRLSWVRSPSHKQSRGDSVNRRNNMYYGTPFYGGYGYASPVPHPNMYAAAYGTYPLYGNQQLVS

SEQ ID NO: 1842 - protein, 311 aa, Zea mays subsp. mays
  peptide (1)..(311): Ceres Seq. ID no. 12355880
MDENYLHNCFGPSGEVVTIKVIRNRQTGQSEGYGFVEFFSHASAEKALQNFTGHVMPNTDRPFKLNWASYSMGEKRSEVASDHSIFVGDLAADVTDEMLLELFSSKYRSVKGAKVIIDANTGRSRGYGFVRFGDDNDKSHAMSEMNGVYCSTRPIRIGPATPRRSSGDSGSSTPGHSDGDSSNRTVYVGGLDPNVSEDELRKAFAKYDLASVKIPLGKQCGFVQFVSRTDAEEALQGLNGSLIGKQAVRLSWVRSPSHKQSRGDSVNRRNNMYYGTPFYGGYGYASPVPHPNMYAAAYGTYPLYGNQQLVS

SEQ ID NO: 1843 - DNA, 1959 bp, Zea mays subsp. mays
  misc_feature (1)..(1959): Ceres Seq. ID no. 12373566
  misc_feature (1)..(1959): Ortholog of  Ceres SEQ ID NO 14315862 as cited in SEQ ID NO 60207
  misc_feature (1)..(1959): Ortholog of  Ceres SEQ ID NO 13660129 as cited in SEQ ID NO 67547
aaataataatcacattgtcctcgtcgtcctatcctccttcgcctgctcgctagtcgctagccgctccccccaacaaacaaccctaatccgtgaccgtggacacgccgcaagctccatcgcgcgaatagattggggggattcaatagaggctacgcggggattggtcgcgctcgagatctcagcaccctcgcgcctgaaatctttctattgttgtcgtggttcaggtgatgagatcttggggagcgcgactcgctcggtcctgagatgctggcgggctacggcggcggtggccgcagcgtccatctctcctcccacaaggacctcctcctcggccgctgcggccggagcttcctcttcggcaacacgtggtttctcctctccacttacccggcgcgcctcctgcacaccacggaccgtcgcgctccctccgctttcgtcgccgccatcaaccgggtcccctgcgtgcggtcgcactgcacggggcagggcctgctgcagagaggcagcattgtcatggctgcctgcggctatgttcttaggcgaactgagctgggtgctgccaagcgccagcagccggataaggacccatctggcggaacacgcgcctcccgtattgcagccatggggtcactgggcagtgctgcgcggccagaggtgtctttcaggtacagggggctggagcattgtaagaagattggtgcaagcttgaaatgccgtgagccatgggggaatagtgcgttctggacaaatgccactgggccgggttggaagttgagctttacagttgagccatggactaaggactttagtacggcgtgtgcagcgccgtattctgctggagccacagaggatcaattgccgctcaatgagaagatgaatagctccactgttggaatgtccccagtttctgaaaaattgaagttgctctctggttcatgttacttgcctcaccctgctaaggaggcaactggtggtgaggatgcacatttcattagcattgatgagcatgtgataggcgtagcagatggtgttggtggttgggcagatctcggtgtcgatgctggactatatgctaaggagctaatgagaaattcaatgagcgctatcaaagatgagccagaagggaccattgatccaaccagagttttggaaaaggcttatattagtacgaaagcaagggggtcatctaccgcgtgtatcatcactcttaaagatcagggtatccatgctgtaaatcttggggatagtggtttcgtagtagtccgagatggccgcactgttctcaggtcaccctcacagcagcatgatttcaattttacttatcagcttgagagtggaggtggcagtgatcttcctagttccgcacaagtatttcactttccggttgccccgggtgatgttatcgttgctggcacggatggactatttgacaatttatacaacaatgagataagtggtgttattgttgaagctctccgggttggacttgagcctcagattgcagcacaaaaaattgccgccctggctcgacaaagagctacggacaaaaataggcagtcaccttttgcatcagctgctcaagaagctgggtaccggtattatggtgggaagcttgatgacataacagtcgtggtctcatatgtgaaaagcgctggagccccatgatctgagcctttcttttattagatgtaatgtacataaatcattgtcccgaactggcggcgtatgtatgcaccagggcatagaagcttattctcaaggtgtggaatcccctgatcctagaagcaccctgtgctgggttcagtatggttgtgctttagccctggaacatgttagcaaaccattgcaccattttacttgtttgccactgtgagaaatcattttctctaattatctgaactcctgaagccagggtgggtttgtttccccccttggagttggaggataatgaccagctgg

SEQ ID NO: 1844 - protein, 466 aa, Zea mays subsp. mays
  peptide (1)..(466): Ceres Seq. ID no. 12373567
MLAGYGGGGRSVHLSSHKDLLLGRCGRSFLFGNTWFLLSTYPARLLHTTDRRAPSAFVAAINRVPCVRSHCTGQGLLQRGSIVMAACGYVLRRTELGAAKRQQPDKDPSGGTRASRIAAMGSLGSAARPEVSFRYRGLEHCKKIGASLKCREPWGNSAFWTNATGPGWKLSFTVEPWTKDFSTACAAPYSAGATEDQLPLNEKMNSSTVGMSPVSEKLKLLSGSCYLPHPAKEATGGEDAHFISIDEHVIGVADGVGGWADLGVDAGLYAKELMRNSMSAIKDEPEGTIDPTRVLEKAYISTKARGSSTACIITLKDQGIHAVNLGDSGFVVVRDGRTVLRSPSQQHDFNFTYQLESGGGSDLPSSAQVFHFPVAPGDVIVAGTDGLFDNLYNNEISGVIVEALRVGLEPQIAAQKIAALARQRATDKNRQSPFASAAQEAGYRYYGGKLDDITVVVSYVKSAGAP

SEQ ID NO: 1845 - protein, 383 aa, Zea mays subsp. mays
  peptide (1)..(383): Ceres Seq. ID no. 12373568
MAACGYVLRRTELGAAKRQQPDKDPSGGTRASRIAAMGSLGSAARPEVSFRYRGLEHCKKIGASLKCREPWGNSAFWTNATGPGWKLSFTVEPWTKDFSTACAAPYSAGATEDQLPLNEKMNSSTVGMSPVSEKLKLLSGSCYLPHPAKEATGGEDAHFISIDEHVIGVADGVGGWADLGVDAGLYAKELMRNSMSAIKDEPEGTIDPTRVLEKAYISTKARGSSTACIITLKDQGIHAVNLGDSGFVVVRDGRTVLRSPSQQHDFNFTYQLESGGGSDLPSSAQVFHFPVAPGDVIVAGTDGLFDNLYNNEISGVIVEALRVGLEPQIAAQKIAALARQRATDKNRQSPFASAAQEAGYRYYGGKLDDITVVVSYVKSAGAP

SEQ ID NO: 1846 - protein, 347 aa, Zea mays subsp. mays
  peptide (1)..(347): Ceres Seq. ID no. 12373569
MGSLGSAARPEVSFRYRGLEHCKKIGASLKCREPWGNSAFWTNATGPGWKLSFTVEPWTKDFSTACAAPYSAGATEDQLPLNEKMNSSTVGMSPVSEKLKLLSGSCYLPHPAKEATGGEDAHFISIDEHVIGVADGVGGWADLGVDAGLYAKELMRNSMSAIKDEPEGTIDPTRVLEKAYISTKARGSSTACIITLKDQGIHAVNLGDSGFVVVRDGRTVLRSPSQQHDFNFTYQLESGGGSDLPSSAQVFHFPVAPGDVIVAGTDGLFDNLYNNEISGVIVEALRVGLEPQIAAQKIAALARQRATDKNRQSPFASAAQEAGYRYYGGKLDDITVVVSYVKSAGAP

SEQ ID NO: 1847 - DNA, 1692 bp, Zea mays subsp. mays
  misc_feature (1)..(1692): Ceres Seq. ID no. 12410974
  misc_feature (1)..(1692): Ortholog of  Ceres SEQ ID NO 15174879 as cited in SEQ ID NO 53786
  misc_feature (1)..(1692): Ortholog of  Ceres SEQ ID NO 14313336 as cited in SEQ ID NO 55501
  misc_feature (1)..(1692): Ortholog of  Ceres SEQ ID NO 15176941 as cited in SEQ ID NO 55559
  misc_feature (1)..(1692): Ortholog of  Ceres SEQ ID NO 15225368 as cited in SEQ ID NO 58345
  misc_feature (1)..(1692): Ortholog of  Ceres SEQ ID NO 13659840 as cited in SEQ ID NO 66970
  misc_feature (1)..(1692): Ortholog of  Ceres SEQ ID NO 13584744 as cited in SEQ ID NO 69137
atcaacgacagtcgacagttgcagtgcagccggtgagcttagatgacgcgcgtcccctaaaagcaggatctggcataaggctacgtgctggtttacagttacagctcaggcttaccatttctttaaccaattcgcttcttgttctttaaaagttcagagttcaagagttcagtttagagagagagagagggagagtgatttgccgacttgccagttgccgcacaaagctcctctagcacctctgtgtggccgacttgtccccggtatcaccaagtctgcaggcctccccagtcgtcgccggcgagggaacgcgccgcccgtgacgccgcgggttgttggcgccggcgttgaggccacaagcgcgccagcatcaggacctcacaggtgattcaatcctgaaggcatcaactatgttcaattttcaagaaatgtcttgctgttttacgtgtgcgacgggcatggaacgaaataatgaaaacgaaggaggaagcaaggtgaggattttttcctacagtgagatgaggaaagctacgcatgattttagtggagcaaacaagattggcgagggcggtttcggctccgttttcagggggaagcttaaagatggaacgatcgtcgcggtgaaagtcctttctgctaattcaaggcagggtgttcgagagttcgtaaccgaacttacagcaatttcagatatcgtgcatgaaaacctaattacattggttggttgctgtgccgaagggtcccagaggattcttgtgtacaattatctcgagaacaatagtctttcatatacacttctaggttcgggccggagcaacattcggttcaactggagagcccgtgtcaagattgctgtaggcgttgctcgtgggcttgcttatcttcacgatggaattcggccccctataattcatcgagatataaaggcgagcaacattctccttgacaaggacctcaccccaaagatctctgatttcgggctggcaaggctcctccccccaaacgcaactcatgtgagcactagggttgcaggaacaataggatacctggctcctgaatacgctgtgagggggcaagtgacgaagaaatcggatatctatagtttcggcgttttgctactggaaattgttgctggtagatgtaactacaacagtagattgcctcagggagaccagtttctgcttgagaagacatgggcatactacgtgcagggaaagctagagaaggtcatagacgccgaagcaggggaggacctgaacgtcgaggaggcatgccgtttcttgaaggttggcctactatgcgcccaagacgcgatgaagctgcgtccgaacatggccagcgtcgtcctgatgctgataggagagaagggaatctccgtggacaggatcaccaagccagccgtgatcggtgacccgtacctcgaccggaggccaagcaacgcagactctaccacgatgaagtccttcgccacgaccgaagctttaacgtcatcagaggcaaacacggagtggtctctgtgatggggggaaaaaacgtcatcatcgatggagatttgtttttgtggatgctgcagttgccaaacaaataccgcatcgcttctgttgattatgtttgtttgttatttttgtgtgtgtgtatatatacttgaaatggaaccacgggagtgaaacgaggattgaatatgctttaccc

SEQ ID NO: 1848 - protein, 369 aa, Zea mays subsp. mays
  peptide (1)..(369): Ceres Seq. ID no. 12410975
MFNFQEMSCCFTCATGMERNNENEGGSKVRIFSYSEMRKATHDFSGANKIGEGGFGSVFRGKLKDGTIVAVKVLSANSRQGVREFVTELTAISDIVHENLITLVGCCAEGSQRILVYNYLENNSLSYTLLGSGRSNIRFNWRARVKIAVGVARGLAYLHDGIRPPIIHRDIKASNILLDKDLTPKISDFGLARLLPPNATHVSTRVAGTIGYLAPEYAVRGQVTKKSDIYSFGVLLLEIVAGRCNYNSRLPQGDQFLLEKTWAYYVQGKLEKVIDAEAGEDLNVEEACRFLKVGLLCAQDAMKLRPNMASVVLMLIGEKGISVDRITKPAVIGDPYLDRRPSNADSTTMKSFATTEALTSSEANTEWSL

SEQ ID NO: 1849 - protein, 363 aa, Zea mays subsp. mays
  peptide (1)..(363): Ceres Seq. ID no. 12410976
MSCCFTCATGMERNNENEGGSKVRIFSYSEMRKATHDFSGANKIGEGGFGSVFRGKLKDGTIVAVKVLSANSRQGVREFVTELTAISDIVHENLITLVGCCAEGSQRILVYNYLENNSLSYTLLGSGRSNIRFNWRARVKIAVGVARGLAYLHDGIRPPIIHRDIKASNILLDKDLTPKISDFGLARLLPPNATHVSTRVAGTIGYLAPEYAVRGQVTKKSDIYSFGVLLLEIVAGRCNYNSRLPQGDQFLLEKTWAYYVQGKLEKVIDAEAGEDLNVEEACRFLKVGLLCAQDAMKLRPNMASVVLMLIGEKGISVDRITKPAVIGDPYLDRRPSNADSTTMKSFATTEALTSSEANTEWSL

SEQ ID NO: 1850 - protein, 353 aa, Zea mays subsp. mays
  peptide (1)..(353): Ceres Seq. ID no. 12410977
MERNNENEGGSKVRIFSYSEMRKATHDFSGANKIGEGGFGSVFRGKLKDGTIVAVKVLSANSRQGVREFVTELTAISDIVHENLITLVGCCAEGSQRILVYNYLENNSLSYTLLGSGRSNIRFNWRARVKIAVGVARGLAYLHDGIRPPIIHRDIKASNILLDKDLTPKISDFGLARLLPPNATHVSTRVAGTIGYLAPEYAVRGQVTKKSDIYSFGVLLLEIVAGRCNYNSRLPQGDQFLLEKTWAYYVQGKLEKVIDAEAGEDLNVEEACRFLKVGLLCAQDAMKLRPNMASVVLMLIGEKGISVDRITKPAVIGDPYLDRRPSNADSTTMKSFATTEALTSSEANTEWSL

SEQ ID NO: 1851 - DNA, 1533 bp, Zea mays subsp. mays
  misc_feature (1)..(1533): Ceres Seq. ID no. 13494573
  misc_feature (1)..(1533): Ortholog of  Ceres SEQ ID NO 14312212 as cited in SEQ ID NO 54399
  misc_feature (1)..(1533): Ortholog of  Ceres SEQ ID NO 15225341 as cited in SEQ ID NO 55222
  misc_feature (1)..(1533): Ortholog of  Ceres SEQ ID NO 13653980 as cited in SEQ ID NO 69253
aatctcagttgtccttgtcccctcgaacgcgcactgttcaaacaaaccctccactgccctccccactctccccttcaccgcgccgcactcccaagtcccaactcccaacaggcctaaatggcggcggccggaacaattcccggcgccgccgcagccattggcgcttctgtgtcccaacgccaacgtcgcgtcggcgctccttctttcgtagctgcctacgtctccgagggcacccgcctcgtctgccggaggcagctccgtccggctccggtcctcgcttcttccttcatctccctttctcatccagcgaggcggcggttcctctgcgatgctgcggccggagcctcctcaggtcccgctggagaagccaagccccagggatttgcagagagatacccagctcttgtcacaggtttcttcttcttcttgtggtattttctgaatgtaatatttaacatcctcaacaagaagatcttcgactacttcccctatccatattttgtgtcagtgagccatctttttattggagtactatactgccttattggctggagcttcggcatcccaaagcgcgcgccaatcaactcaacacttctgaagcagcttgttccagttgcggtttgccatgccattggccatgtaacaagcactgtgtcatttgctgctgtagctgtgtcatttgcccacactattaaagctctcgagccattcttcaatgcggctgcttcccagtttatccttggacaaccagttccattgacactctggctgtctcttgttccagtggtgattggtgtctcggtagcatccctcactgaactctcatttaattggactggcttcattaatgccatgatctcaaatatttctttcacctaccgaagcatctattctaagaaggctatgactgacatggatagtaccaacttgtatgcatacatatcaataattgctctctttgtctgcatcccccctgcaattattattgaaggacctcaattagtgcagcatggttttaaagatgcaattgccaaagttggattaacaaagttgatttctaatttttttgtggtgggcttattctatcacctttataaccaggttgctacaaacacattggagcgggtagcccctttaacacatgccatcggcaatgtgttgaaacgtgttttcgtcattggcttttccatcatcgcattcggcaacaagatcaccacacagactggaattggcacttccattgctgtttctggtgttgccctctactcatttataaaggctaagattgaggagaaaaagcaaataaagagtgcataaggtgttggctgatgtggatgcggttggtttgtcgctttgatggacctctattctctcggtgaacgaacaaacttgcaagatggataaaatcttgctatctcctagtacatttgattgttattcccagtctggtactgaggtgtgcggttgttgttggctaacttgtttatttgaagcaaatttgagcaatgctcagtggcatggaatttccattcc

SEQ ID NO: 1852 - protein, 399 aa, Zea mays subsp. mays
  peptide (1)..(399): Ceres Seq. ID no. 13494574
MAAAGTIPGAAAAIGASVSQRQRRVGAPSFVAAYVSEGTRLVCRRQLRPAPVLASSFISLSHPARRRFLCDAAAGASSGPAGEAKPQGFAERYPALVTGFFFFLWYFLNVIFNILNKKIFDYFPYPYFVSVSHLFIGVLYCLIGWSFGIPKRAPINSTLLKQLVPVAVCHAIGHVTSTVSFAAVAVSFAHTIKALEPFFNAAASQFILGQPVPLTLWLSLVPVVIGVSVASLTELSFNWTGFINAMISNISFTYRSIYSKKAMTDMDSTNLYAYISIIALFVCIPPAIIIEGPQLVQHGFKDAIAKVGLTKLISNFFVVGLFYHLYNQVATNTLERVAPLTHAIGNVLKRVFVIGFSIIAFGNKITTQTGIGTSIAVSGVALYSFIKAKIEEKKQIKSA

SEQ ID NO: 1853 - DNA, 1697 bp, Zea mays subsp. mays
  misc_feature (1)..(1697): Ceres Seq. ID no. 12355964
  misc_feature (1)..(1697): Ortholog of  Ceres SEQ ID NO 14307123 as cited in SEQ ID NO 54182
atactgcgcgttgcaagctcccacttcctgaggaacaggaactccatgagatccgcggcatccgccgtcccgttcatctgcacaaaaagaccgtaatccttctttttcctctcctccccatccgcggagtgtaaatcgtctctcgctagcgcgttcagtagaaaccctaaaccccgcctcctcccctcgccggggtaggggctacgggtgtcaacgcccgccatggacgcattccggaagcaactggatgtgctcatgggcgctaaccgcaacggcgacgtcgaggaggtgagccgcaactactacgaccgcgacgtctgccggctcttcctcgccggcctttgcccccacgacctcttccagctcacgaaaatggatcttggtccttgttctaagattcactcgcttcaactgcggaaagattatgaagaagcgaaagcaaagggaacagagaattttgacagagaactcgaggatatgatagaaaggctcattgtggagtgcgacaggaaaattcagagggccctgaaacgacttgcggatgacgatgccaaggctgctattgcgatatccgtctcggaggttactctgacggatgacatactgcagctgtcaaaacagatcaaggaaaaaatggtagaagttgatgcctttgattttgaagggagaactgatgataaaataaaggcccaggaagtagtggaagaactcagaactaaaagagctgatatgcaggctaccctcttgcttgatgcttttaacaaggacagagcttcattaactcagcctgctcaacctcctcaagtgacggcagcgccaccaccagctccacccgatgctcgtactcaagaaatgatcaatgaaaagcttaagaaagctgaagagcttggggaacaaggcatggttgatgaagctcagaaagctttggaagaggcagaagctctgaaaaagctggcgcgacgtccggagccaccttcagacccttctaaatatactgccgctgatgtttggattaccgatcaaaagttgcgcctctgtgatatatgtggagcatttctgagtgtatatgacaatgatcgacgtcttgctgaccattttggagggaaactgcatctaggctacatgctgattcgtgacaaacagaaagaacttcaggagcagagaaacaaaaggaggacaggcaaaactgaagatgataggcgatctagagagcagagcaaggatcgaaacggcccgccgtccagggatagagattcagaaaggagagacagggttgagtctcgagatggaagaagagattatgatagggaacgcgataggcgtcacgatagggaccgtcgccatgaccgcgaccgggatagggattatgaccgctcccgcggatatgactcaaggagaagagagcgttcacgctccagggagcgcagcaggcgccatgagagatactaaatgttactccatggctgacagattttggattgctggcgtctgttctggtttgtgttgtgctttgtgtcttatcttccgaagtttcctgttcctgctcgagaaatccgaaagccaatctgcgttctgcatcatgtcatgtcctagtgtcgtactgtttagttatatgccaagaacatctctttcatcaaatgaatatttggaaacaccaacgcacttgacgctaaatgggaatgaagtgtggagtattt

SEQ ID NO: 1854 - protein, 408 aa, Zea mays subsp. mays
  peptide (1)..(408): Ceres Seq. ID no. 12355965
MDAFRKQLDVLMGANRNGDVEEVSRNYYDRDVCRLFLAGLCPHDLFQLTKMDLGPCSKIHSLQLRKDYEEAKAKGTENFDRELEDMIERLIVECDRKIQRALKRLADDDAKAAIAISVSEVTLTDDILQLSKQIKEKMVEVDAFDFEGRTDDKIKAQEVVEELRTKRADMQATLLLDAFNKDRASLTQPAQPPQVTAAPPPAPPDARTQEMINEKLKKAEELGEQGMVDEAQKALEEAEALKKLARRPEPPSDPSKYTAADVWITDQKLRLCDICGAFLSVYDNDRRLADHFGGKLHLGYMLIRDKQKELQEQRNKRRTGKTEDDRRSREQSKDRNGPPSRDRDSERRDRVESRDGRRDYDRERDRRHDRDRRHDRDRDRDYDRSRGYDSRRRERSRSRERSRRHERY

SEQ ID NO: 1855 - protein, 397 aa, Zea mays subsp. mays
  peptide (1)..(397): Ceres Seq. ID no. 12355966
MGANRNGDVEEVSRNYYDRDVCRLFLAGLCPHDLFQLTKMDLGPCSKIHSLQLRKDYEEAKAKGTENFDRELEDMIERLIVECDRKIQRALKRLADDDAKAAIAISVSEVTLTDDILQLSKQIKEKMVEVDAFDFEGRTDDKIKAQEVVEELRTKRADMQATLLLDAFNKDRASLTQPAQPPQVTAAPPPAPPDARTQEMINEKLKKAEELGEQGMVDEAQKALEEAEALKKLARRPEPPSDPSKYTAADVWITDQKLRLCDICGAFLSVYDNDRRLADHFGGKLHLGYMLIRDKQKELQEQRNKRRTGKTEDDRRSREQSKDRNGPPSRDRDSERRDRVESRDGRRDYDRERDRRHDRDRRHDRDRDRDYDRSRGYDSRRRERSRSRERSRRHERY

SEQ ID NO: 1856 - protein, 358 aa, Zea mays subsp. mays
  peptide (1)..(358): Ceres Seq. ID no. 12355967
MDLGPCSKIHSLQLRKDYEEAKAKGTENFDRELEDMIERLIVECDRKIQRALKRLADDDAKAAIAISVSEVTLTDDILQLSKQIKEKMVEVDAFDFEGRTDDKIKAQEVVEELRTKRADMQATLLLDAFNKDRASLTQPAQPPQVTAAPPPAPPDARTQEMINEKLKKAEELGEQGMVDEAQKALEEAEALKKLARRPEPPSDPSKYTAADVWITDQKLRLCDICGAFLSVYDNDRRLADHFGGKLHLGYMLIRDKQKELQEQRNKRRTGKTEDDRRSREQSKDRNGPPSRDRDSERRDRVESRDGRRDYDRERDRRHDRDRRHDRDRDRDYDRSRGYDSRRRERSRSRERSRRHERY

SEQ ID NO: 1857 - DNA, 1482 bp, Zea mays subsp. mays
  misc_feature (1)..(1482): Ceres Seq. ID no. 12410966
  misc_feature (1)..(1482): Ortholog of  Ceres SEQ ID NO 14314363 as cited in SEQ ID NO 52272
ggaccgacatgttactttaccctaaacctttgcagtttgcactgccaccgcgaaggcacacagccgccgtatcttttacttgcgctcggcacgcaggcgacggctgcggcgctcaggttggggttctcatcgacggcgtcagcggcttcccctcccgcctctcgtcagtcgcttcgcgccctcgcctccggtcctccgcacactggccggtgaccctgcatagtattatctgattttcctggaggccacattttaaggactgaggttacaatggcagatgccagccctagaacagaaacatcaacagatgatactgacgacaataacgggcttgaaccaggcagaggtggtcttgttgcttctgactccagtgacagatccaaagacaaacatggagatcaaaagacattgcgtcgccttgctcaaaatcgtgaggctgcaaggaagagccgactaaggaagaaggcatatgttcaacagttggagaatagcaggctaaaacttacccaactagagcaagagctgcaaagagctcgtcagcagggcatttttatatctagttcagttgatcagtcacactccatgagtggaaatggggcattggcctttgatatggagtatgcgaggtggttggaagagcacaatcggcaaattagtgaactaagggctggtgtcagtgctcatgcaagtgatactgatcttcgaagtgttgttgataagatcatgtcacactatgatgagatttttaggctcaaaggcaatgcagccaaggcagatgtttttcacgtcttatctggcatgtggaagacaccggcggagaggtgttttttgtggctaggaggtttccgaccatctgaggttttaaagcttctttcgacacaacttgaacctctcaccgaacagcagctgtcagggataagcaaccttcagcaatcttcacagcaggctgaggatgctctttcacaaggaatggaggcccttcagcaatcattggccgaaaccttggctgggtctctttcgtcttctggatcaacaggaaatgtggcaaactacatgggtcaaatggccatggctatgggaaaacttggaacgcttgagaatttccttcgtcagactctacaacagatgcaaaggatcctgaccactagacagtcagctcgggcgctacttgtgataagtgattactcttcacgtctccgtgccctaagctctctctggcttgctcggcccaaggaatagcaagaacatgctatttgactgcaatacttttcacaatttggttttcaatggtcaggagatttgacaaggctgcgacagacttgattcggacatatctgcacatactatgacccaaatggaaggggatgttcatgtagcttaggctgcttagctttgtagttaagtgttgttgatgtattattaccaactgctgtaaaattctcactctgtatgcccctgatttgcagcgaaccattagaatgc

SEQ ID NO: 1858 - protein, 322 aa, Zea mays subsp. mays
  peptide (1)..(322): Ceres Seq. ID no. 12410967
MADASPRTETSTDDTDDNNGLEPGRGGLVASDSSDRSKDKHGDQKTLRRLAQNREAARKSRLRKKAYVQQLENSRLKLTQLEQELQRARQQGIFISSSVDQSHSMSGNGALAFDMEYARWLEEHNRQISELRAGVSAHASDTDLRSVVDKIMSHYDEIFRLKGNAAKADVFHVLSGMWKTPAERCFLWLGGFRPSEVLKLLSTQLEPLTEQQLSGISNLQQSSQQAEDALSQGMEALQQSLAETLAGSLSSSGSTGNVANYMGQMAMAMGKLGTLENFLRQTLQQMQRILTTRQSARALLVISDYSSRLRALSSLWLARPKE

SEQ ID NO: 1859 - protein, 218 aa, Zea mays subsp. mays
  peptide (1)..(218): Ceres Seq. ID no. 12410968
MSGNGALAFDMEYARWLEEHNRQISELRAGVSAHASDTDLRSVVDKIMSHYDEIFRLKGNAAKADVFHVLSGMWKTPAERCFLWLGGFRPSEVLKLLSTQLEPLTEQQLSGISNLQQSSQQAEDALSQGMEALQQSLAETLAGSLSSSGSTGNVANYMGQMAMAMGKLGTLENFLRQTLQQMQRILTTRQSARALLVISDYSSRLRALSSLWLARPKE

SEQ ID NO: 1860 - protein, 208 aa, Zea mays subsp. mays
  peptide (1)..(208): Ceres Seq. ID no. 12410969
MEYARWLEEHNRQISELRAGVSAHASDTDLRSVVDKIMSHYDEIFRLKGNAAKADVFHVLSGMWKTPAERCFLWLGGFRPSEVLKLLSTQLEPLTEQQLSGISNLQQSSQQAEDALSQGMEALQQSLAETLAGSLSSSGSTGNVANYMGQMAMAMGKLGTLENFLRQTLQQMQRILTTRQSARALLVISDYSSRLRALSSLWLARPKE

SEQ ID NO: 1861 - DNA, 1761 bp, Zea mays subsp. mays
  misc_feature (1)..(1761): Ceres Seq. ID no. 12345231
  misc_feature (1)..(1761): Ortholog of  Ceres SEQ ID NO 14308723 as cited in SEQ ID NO 58758
accaaatggaccgtgttcttctgagctcccacctgccatctcacgctcttgcaaacacgaggttgcagctgggtcctggtggcctcaacagtataggatttgcagtcataaaaaagggatgcttgaagttaagatgttacgcgatcggcgatgaactcggtggtccagggcgcttaagtaagcattttgtcgagaacagtaatggacctgttttccagggactcgatgcgtctgctggttcttttagaactgtcggtgctgaaatcactcaggacactggagatttctttgtcagtgacgcagagggtgatccagacaaacctaccgatgggttctcctcgatcgaccaggctataggtgctttgcgtgaagggaagtttgttattgctgtagatgatgagaacggcgacaacgaaggcgaccttgtgatggcggccactctagtggaccagaagtcagtcgcattcatgatcaggaatggctctgggattatctcggtaggcatggaggaggaggacctgactagactgatgattccgatgatgtcccctatcacagaaatcgaagatatcacggctgctgcttccacggtgacagtggatgccagggttggcatatctacgggtgtgtcggctgcagacagggcgaagaccatcctcactctagcctcctctgactccaagcccagtgatctgaggagaccaggccacatattccccctcaagtaccggaacgggggcgtgctgaagagagctggccacacggaagcgtcggtggatctggttgcgttggcaggtctccgtcctgtgtccgttctctccaccgtcatggaccccagggacggttcgatggcaggcgtaacggttctccagcagatggctatggagcatgacatacccatcgtttcgattgctgatctcatccggtataggagaaagcgggagaagctggtggagctgattgctgtgtctcgcttgccgacgaaatggggcctcttccgagcctactgctaccagtccaggctcgatggaaccgagcacatcgctgttgtgaagggcgatatcggcgacggcgaagaggtcctggtgagggtgcactcggagtgcctgacgggggacatcctcggctcagcccgctgcgactgcggcaaccagctggagctggcgatgcagctgatcgagaaggccggccgtggcgtgctcgtgtacctccgcggccacgagggccgcggcattggcctgggccagaagctccgcgcctacaacctccaggacgagggccacgacaccgtcgaggccaacgtcgagctcggcctcgccgtggacgcccgcgagtacggcatcggcgcccagatactccgtgacatcggcgtgcgcacgatgcggctgatgaccaacaaccccgccaagttcatcgggctcaagggctacgggctcgccgtggtggggagggtgccggtgatctctcccatcaccaaggagaaccagaagtacctcgagaccaagcgcaccaagatgggccacgtctacggctccgatctcccgggaagcctgccggagttcgccaacccacaagaggcccccacagaacaagacgacgacgataaccaaaactgataaaaaaactatacggtgtcgtttttttaggaaaagataccaatataaccacaaattcttgtattccactgagaacgagtattgcagagtatttatttatcaactgcaaaattattaagtataatagagatacaaacttttatcg

SEQ ID NO: 1862 - protein, 537 aa, Zea mays subsp. mays
  peptide (1)..(537): Ceres Seq. ID no. 12345232
QMDRVLLSSHLPSHALANTRLQLGPGGLNSIGFAVIKKGCLKLRCYAIGDELGGPGRLSKHFVENSNGPVFQGLDASAGSFRTVGAEITQDTGDFFVSDAEGDPDKPTDGFSSIDQAIGALREGKFVIAVDDENGDNEGDLVMAATLVDQKSVAFMIRNGSGIISVGMEEEDLTRLMIPMMSPITEIEDITAAASTVTVDARVGISTGVSAADRAKTILTLASSDSKPSDLRRPGHIFPLKYRNGGVLKRAGHTEASVDLVALAGLRPVSVLSTVMDPRDGSMAGVTVLQQMAMEHDIPIVSIADLIRYRRKREKLVELIAVSRLPTKWGLFRAYCYQSRLDGTEHIAVVKGDIGDGEEVLVRVHSECLTGDILGSARCDCGNQLELAMQLIEKAGRGVLVYLRGHEGRGIGLGQKLRAYNLQDEGHDTVEANVELGLAVDAREYGIGAQILRDIGVRTMRLMTNNPAKFIGLKGYGLAVVGRVPVISPITKENQKYLETKRTKMGHVYGSDLPGSLPEFANPQEAPTEQDDDDNQN

SEQ ID NO: 1863 - protein, 536 aa, Zea mays subsp. mays
  peptide (1)..(536): Ceres Seq. ID no. 12345233
MDRVLLSSHLPSHALANTRLQLGPGGLNSIGFAVIKKGCLKLRCYAIGDELGGPGRLSKHFVENSNGPVFQGLDASAGSFRTVGAEITQDTGDFFVSDAEGDPDKPTDGFSSIDQAIGALREGKFVIAVDDENGDNEGDLVMAATLVDQKSVAFMIRNGSGIISVGMEEEDLTRLMIPMMSPITEIEDITAAASTVTVDARVGISTGVSAADRAKTILTLASSDSKPSDLRRPGHIFPLKYRNGGVLKRAGHTEASVDLVALAGLRPVSVLSTVMDPRDGSMAGVTVLQQMAMEHDIPIVSIADLIRYRRKREKLVELIAVSRLPTKWGLFRAYCYQSRLDGTEHIAVVKGDIGDGEEVLVRVHSECLTGDILGSARCDCGNQLELAMQLIEKAGRGVLVYLRGHEGRGIGLGQKLRAYNLQDEGHDTVEANVELGLAVDAREYGIGAQILRDIGVRTMRLMTNNPAKFIGLKGYGLAVVGRVPVISPITKENQKYLETKRTKMGHVYGSDLPGSLPEFANPQEAPTEQDDDDNQN

SEQ ID NO: 1864 - protein, 395 aa, Zea mays subsp. mays
  peptide (1)..(395): Ceres Seq. ID no. 12345234
MAATLVDQKSVAFMIRNGSGIISVGMEEEDLTRLMIPMMSPITEIEDITAAASTVTVDARVGISTGVSAADRAKTILTLASSDSKPSDLRRPGHIFPLKYRNGGVLKRAGHTEASVDLVALAGLRPVSVLSTVMDPRDGSMAGVTVLQQMAMEHDIPIVSIADLIRYRRKREKLVELIAVSRLPTKWGLFRAYCYQSRLDGTEHIAVVKGDIGDGEEVLVRVHSECLTGDILGSARCDCGNQLELAMQLIEKAGRGVLVYLRGHEGRGIGLGQKLRAYNLQDEGHDTVEANVELGLAVDAREYGIGAQILRDIGVRTMRLMTNNPAKFIGLKGYGLAVVGRVPVISPITKENQKYLETKRTKMGHVYGSDLPGSLPEFANPQEAPTEQDDDDNQN

SEQ ID NO: 1865 - DNA, 1454 bp, Zea mays subsp. mays
  misc_feature (1)..(1454): Ceres Seq. ID no. 12355885
  misc_feature (1)..(1454): Ortholog of  Ceres SEQ ID NO 15177328 as cited in SEQ ID NO 52523
  misc_feature (1)..(1454): Ortholog of  Ceres SEQ ID NO 13655881 as cited in SEQ ID NO 64426
aaaaaattagaaaattctgcgttaattactccaggcttaaggttaagcacctcccaaacacgccctatgagggccctcgtccggatccacctgcccgcggccatctccaccggatccttcctccacacctcctcaaccgccgcctccaagaccctagtaccgaaccccaacctcgtcccgctccggctcgtccgccacttcccggccatggccgccaccgccgcagacgagttcgtgaagggccgcgtcttccccaacggcgtcgccgtcataacgctcgaccgacccaaggccctcaacgccatgaacctcgaaatggatgttagatacaaggcacttcttgatgaatgggaaacaaatccaagtgtcaagtgtattcttgtggaaagcagctcttctcgtgccttctcagcagggatggatattaagggggttgccgtggaaatacaaaaagacaaaaaaaacaccacttgtgcaaaaggtattcacagcagagtactctttaatttgtaagatacatgagtatgcaaaaccttatatatgcttgatggatggagtgacaatgggatttggaattgggctatcagggcatggccgctaccgcattattacagagagaacactcctagccatgcctgaaaatggtattggcctgttcccagacgttggctttgcttacattggtgcaaaagcaccaggagggggtgcagttggagtttaccttgggattactggaaaaaggatatcatcacctgctgatgctatgttcataggccttggtactcactatgtaccttctgcaaatttgggttcactcaaggagtccctgctgagtgctaacttcaccaatgatcctcatagagacgttgagtcagttctgacaggatacaagaaagaaccagagtctgaaccacaactaaaaaagcttttgccatatatcatttcttctttcagtcctgataaatcagtggctgaatctgtggaagagctaaagaaatgtagccgaagtggtgatgctgcagtggcagaatgggccattgaagctttagcaggaattgagaaaggcgctccattttctctttgtttaacacagaagcatttctctcaagttgcatcagcatatgggactagtgaacactatttatctaagctggctggtgttatgaaattggaatatcgcattgccttgaggtcgtcgattagaaacgattttgttgaaggtgtgcgtgctgttttagttgacaaggaccagaatccgaagtggaatccagccactctggaagaagtaaacatggccgaggtggaatcagttttcgagccattaggggccgaggctgagttgagtgtgtgaaatatggcctgccacactcagttttcttatttgtgctgcaataataatgtatacaaaacagaaatgcgatgcccacagaaacaataaatgctgtgtcttcatg

SEQ ID NO: 1866 - protein, 343 aa, Zea mays subsp. mays
  peptide (1)..(343): Ceres Seq. ID no. 12355886
MLDTRHFLMNGKQIQVSSVFLWKAALLVPSQQGWILRGLPWKYKKTKKTPLVQKVFTAEYSLICKIHEYAKPYICLMDGVTMGFGIGLSGHGRYRIITERTLLAMPENGIGLFPDVGFAYIGAKAPGGGAVGVYLGITGKRISSPADAMFIGLGTHYVPSANLGSLKESLLSANFTNDPHRDVESVLTGYKKEPESEPQLKKLLPYIISSFSPDKSVAESVEELKKCSRSGDAAVAEWAIEALAGIEKGAPFSLCLTQKHFSQVASAYGTSEHYLSKLAGVMKLEYRIALRSSIRNDFVEGVRAVLVDKDQNPKWNPATLEEVNMAEVESVFEPLGAEAELSV

SEQ ID NO: 1867 - protein, 335 aa, Zea mays subsp. mays
  peptide (1)..(335): Ceres Seq. ID no. 12355887
MNGKQIQVSSVFLWKAALLVPSQQGWILRGLPWKYKKTKKTPLVQKVFTAEYSLICKIHEYAKPYICLMDGVTMGFGIGLSGHGRYRIITERTLLAMPENGIGLFPDVGFAYIGAKAPGGGAVGVYLGITGKRISSPADAMFIGLGTHYVPSANLGSLKESLLSANFTNDPHRDVESVLTGYKKEPESEPQLKKLLPYIISSFSPDKSVAESVEELKKCSRSGDAAVAEWAIEALAGIEKGAPFSLCLTQKHFSQVASAYGTSEHYLSKLAGVMKLEYRIALRSSIRNDFVEGVRAVLVDKDQNPKWNPATLEEVNMAEVESVFEPLGAEAELSV

SEQ ID NO: 1868 - protein, 267 aa, Zea mays subsp. mays
  peptide (1)..(267): Ceres Seq. ID no. 12355888
MDGVTMGFGIGLSGHGRYRIITERTLLAMPENGIGLFPDVGFAYIGAKAPGGGAVGVYLGITGKRISSPADAMFIGLGTHYVPSANLGSLKESLLSANFTNDPHRDVESVLTGYKKEPESEPQLKKLLPYIISSFSPDKSVAESVEELKKCSRSGDAAVAEWAIEALAGIEKGAPFSLCLTQKHFSQVASAYGTSEHYLSKLAGVMKLEYRIALRSSIRNDFVEGVRAVLVDKDQNPKWNPATLEEVNMAEVESVFEPLGAEAELSV

SEQ ID NO: 1869 - DNA, 1410 bp, Zea mays subsp. mays
  misc_feature (1)..(1410): Ceres Seq. ID no. 12342569
  misc_feature (1)..(1410): Ortholog of  Ceres SEQ ID NO 14306617 as cited in SEQ ID NO 53026
gctcagataatagcgacacctcctttcctctccctcgaggtgtctctcccagaacgcacagcacagtcgcagaacaggaaggcagagagcagcgccgcgatgagaggaggaggagcggggcccactgcggcgttcatgtccgacgagccgcctccagccgacgcggaagaggtggaggagaactccggcgccgaggaggaggacgaggagacggtggtggagcaggacgacgacgagctggagctggggctctgcctcggctccaagcaacagcagcagcagcatccgccgccgtgccggatcctcacggcccgggacctgcagccgaggtccctgtcaccggattcctccgtgtcctcttcctcccccgcggcaggtgcaggtaccgcggcgccaagcaagagggccaaggcggatgcggcgcccaactcgccagggacggtcgcgtctggccacccacagagctttggagtggtgggatggccacccataagaactttcaggatgaacagcctatttaaccaggccaaagagaatgcatcggaggctggcgccaagaagcccatcgtcgaacctgacatcaggaagacaaggaggagagaaagaaaggccggaccgtcggttgggtgaaggtgaacatggaaggagatatcattggaaggaaggtcgatctcaatgcccatcgctcttacaagacccttgcctcagcacttgagctcatgttcatgaagccgtccattggtctttgcacttctagcagttcaaagactctaaagctattagacagctcatcggagtatcagctcacctatgaggacagggacggggactggatgcttgttggagatgttccctgggagatgtttgtaggttcagtgaagaggctcaagatcatgagaacctcagacgccaaaggtctcggtccacgattccaagggtctcacagacccacagcagcttgcacgagaggcaggacgtgaaaccaccgatgtgcgtttggtgctaacaccgctggtgaagcttgaactgtgtttgatatcacgtaacagtaacagcagcccatatcgctggcatagttgtgagattacggggctgtttggtttactgtctaaggcgccacaacatggctaacttttctgtctaagtttagttcttcaattcgaacgactaaacttagacagcttcattgtgtctagtggaaatagtagaagtatttttttttttttgcttcttccctgtggtgccctcgttgaacttttctcatgggctatacgagcatcatcgcccccagctcttctgtccacactgtttttacctgtgaggaatggtcgcccaaagtgttggtttttatccttgtgtttgctatggcagaagtatctgcactgctgtttcatatctgtgttcatatct

SEQ ID NO: 1870 - protein, 209 aa, Zea mays subsp. mays
  peptide (1)..(209): Ceres Seq. ID no. 12342570
AQIIATPPFLSLEVSLPERTAQSQNRKAESSAAMRGGGAGPTAAFMSDEPPPADAEEVEENSGAEEEDEETVVEQDDDELELGLCLGSKQQQQQHPPPCRILTARDLQPRSLSPDSSVSSSSPAAGAGTAAPSKRAKADAAPNSPGTVASGHPQSFGVVGWPPIRTFRMNSLFNQAKENASEAGAKKPIVEPDIRKTRRRERKAGPSVG

SEQ ID NO: 1871 - protein, 176 aa, Zea mays subsp. mays
  peptide (1)..(176): Ceres Seq. ID no. 12342571
MRGGGAGPTAAFMSDEPPPADAEEVEENSGAEEEDEETVVEQDDDELELGLCLGSKQQQQQHPPPCRILTARDLQPRSLSPDSSVSSSSPAAGAGTAAPSKRAKADAAPNSPGTVASGHPQSFGVVGWPPIRTFRMNSLFNQAKENASEAGAKKPIVEPDIRKTRRRERKAGPSVG

SEQ ID NO: 1872 - protein, 172 aa, Zea mays subsp. mays
  peptide (1)..(172): Ceres Seq. ID no. 12342572
SDNSDTSFPLPRGVSPRTHSTVAEQEGREQRRDERRRSGAHCGVHVRRAASSRRGRGGGELRRRGGGRGDGGGAGRRRAGAGALPRLQATAAAASAAVPDPHGPGPAAEVPVTGFLRVLFLPRGRCRYRGAKQEGQGGCGAQLARDGRVWPPTELWSGGMATHKNFQDEQPI

SEQ ID NO: 1873 - DNA, 1501 bp, Zea mays subsp. mays
  misc_feature (1)..(1501): Ceres Seq. ID no. 12373953
  misc_feature (1)..(1501): Ortholog of  Ceres SEQ ID NO 13639514 as cited in SEQ ID NO 55736
  misc_feature (1)..(1501): Ortholog of  Ceres SEQ ID NO 13595560 as cited in SEQ ID NO 56738
  misc_feature (1)..(1501): Ortholog of  Ceres SEQ ID NO 14312254 as cited in SEQ ID NO 59148
  misc_feature (1)..(1501): Ortholog of  Ceres SEQ ID NO 13662804 as cited in SEQ ID NO 65394
  misc_feature (1)..(1501): Ortholog of  Ceres SEQ ID NO 13656519 as cited in SEQ ID NO 69226
aaaagccttcgcctttttcctctcgtcttcctctctctcccccgctccaaatcccaccctctctctttctctctccacattctccctgctgtgcaccttgcagcagccttggctgtggatcggaaatggcaatcgacgatgaatcgccgctcagagtcaaccccagaggcggcgccatgggaggaggggagcgtgacggcgcggagaaccagcggtggccgccgtggctgaagccgctgctggggacgagcttcttcggccaatgcaagctgcacgcggacgcgcacaagagcgagtgcaacatgtactgcctcgactgcatgaacggcgcgctctgctcccagtgcctcgcctaccaccgcgaccaccacgccatccagatacggaggtcctcctaccacgacgtgatccgggtgtcggagatccagaaggtgctggacatcagcggcgtgcagacctacatcatcaacagcgcgcgcgtggtgttcctgaacgagcggccgcagccgaggcccggcaagggcgtcaccaacacctgcgaggtctgcgagcgcagcctcctcgacaccttccgcttctgctccctcggctgcaagatcgtcaggacctccggcgacttccgcatccggaagaagcacgccatcgtcgcaaagaagaagagggagaagaagcatgcgccgcagcagaagcagcacaggggcgcggcggactcggcggacgacgacgacgacgactcgtccaccagcaccagcggcggcagcgacaagagcagcgtggtgcagagcttcaccccgtcgaccccgccggcgacgaccgccaacagcttccgcgccgggaagcggcgcaagggcgtgccgcaccggtcgccgttcggcagcctcgtggtggagttctagacaaaaaaaaaggcgcgccgcccggtcccgatggacgcccaccaaaaaaaaaaacacagcggtacaccactgtagcatacgcacttcttctacataccatcatctataggcgctgccggatcgaccgggctacatacataagtacatagccagcccaaaaataggagcaagcaataaccagggccccacttgcacgccgcccgcgcttctggacggacgaggacgaggaggccggtgcaatgcggctcgtacggggcacggttacttccacttccatagcagttactgtgctggtaacaacggtttgggtttggtgcctcactgcctctctgaagggaaacgaggttgttatagcagttactcttgtcgtcgtcagcctcagccactactaagttttgcgagtttcacctataggtgtttgctagttttttttaccggtgcttggtatacgcgagtagaatgtacatgtacgtatactgtcagagatggggggaatggtggtaggggggtgtagctcccggtgttcatattcgtgtgttggcttgctgccctgtaataataataaaaataaaaagggataaggatgctgctcctggatggccttc

SEQ ID NO: 1874 - protein, 297 aa, Zea mays subsp. mays
  peptide (1)..(297): Ceres Seq. ID no. 12373954
KPSPFSSRLPLSPPLQIPPSLFLSPHSPCCAPCSSLGCGSEMAIDDESPLRVNPRGGAMGGGERDGAENQRWPPWLKPLLGTSFFGQCKLHADAHKSECNMYCLDCMNGALCSQCLAYHRDHHAIQIRRSSYHDVIRVSEIQKVLDISGVQTYIINSARVVFLNERPQPRPGKGVTNTCEVCERSLLDTFRFCSLGCKIVRTSGDFRIRKKHAIVAKKKREKKHAPQQKQHRGAADSADDDDDDSSTSTSGGSDKSSVVQSFTPSTPPATTANSFRAGKRRKGVPHRSPFGSLVVEF

SEQ ID NO: 1875 - protein, 260 aa, Zea mays subsp. mays
  peptide (1)..(260): Ceres Seq. ID no. 12373955
MQAARGRAQERVQHVLPRLHERRALLPVPRLPPRPPRHPDTEVLLPRRDPGVGDPEGAGHQRRADLHHQQRARGVPERAAAAEARQGRHQHLRGLRAQPPRHLPLLLPRLQDRQDLRRLPHPEEARHRRKEEEGEEACAAAEAAQGRGGLGGRRRRRLVHQHQRRQRQEQRGAELHPVDPAGDDRQQLPRREAAQGRAAPVAVRQPRGGVLDKKKGAPPGPDGRPPKKKTQRYTTVAYALLLHTIIYRRCRIDRATYIST

SEQ ID NO: 1876 - protein, 256 aa, Zea mays subsp. mays
  peptide (1)..(256): Ceres Seq. ID no. 12373956
MAIDDESPLRVNPRGGAMGGGERDGAENQRWPPWLKPLLGTSFFGQCKLHADAHKSECNMYCLDCMNGALCSQCLAYHRDHHAIQIRRSSYHDVIRVSEIQKVLDISGVQTYIINSARVVFLNERPQPRPGKGVTNTCEVCERSLLDTFRFCSLGCKIVRTSGDFRIRKKHAIVAKKKREKKHAPQQKQHRGAADSADDDDDDSSTSTSGGSDKSSVVQSFTPSTPPATTANSFRAGKRRKGVPHRSPFGSLVVEF

SEQ ID NO: 1877 - DNA, 1906 bp, Zea mays subsp. mays
  misc_feature (1)..(1906): Ceres Seq. ID no. 13498491
  misc_feature (1)..(1906): Ortholog of  Ceres SEQ ID NO 15178736 as cited in SEQ ID NO 56439
cccacactccaccacccgcgccgccgcctcctactccgccccggcccctctgatccggaccgagcgccggccatggcgctcgccttcgacgagttcgggcgccccttcatcatcctgcgggagcaggagaagaagacgcgccttagggggctcgacgcgcagaaggccaacatcgcctcggccaaggccgtcgcgcggatcctccgcacgtcgcttggacccaagggcatggacaagatgctccagtcccccgacggcgacgtcatcatcacaaatgatggagcgaccatcctggagcagatggatgttgacaaccagatagcaaagctgatggtggagctgtcccgtagtcaagactatgaaatcggggatggtaccaccggggtggtagtcatggcaggggctcttctcgagcaggccgagaagcttctggagcgtggtattcaccccattagggtggctgaaggctatgagatggcgtcaaaggtagcttttgaccacctagaacatatctccgaaaagtttgagttcagtgcagacaacattgaacccctggtccagacctgcatgacaactctatcctcaaagattgttaaccgttgcaagcgggcgttggcagagattgctgtcaaagcagtacttgcggttgcaagatttggagaggaaggatgttaacttggatctaattaaagtagaaggcaaggttggtgggaagctggaggacactgaacttgtatatggaattattgttgacaaatatatgagccatccacaaatgccaaagagaattgaggatgctaagattgccatcttgacatgcccatttgagcctccgaagccaaagacaaagcataaggttgacattgacactgttgagaaattccagacactgcgtgagcaagagcagaaatactttgatgaaatggttcagaagtgcaaggatgctggtgcaaccctggttatttgccagtggggttttgatgatgaagccaatcatttattgatgcacagaaatctgccagcagttagatgggttggtggtgttgaattggaaattgattgccattgctacaggagggcggattgttccgagattccaagagttgagtcctgaaaagcttggaaaggctggatttagtcagagagaaatcattcggaacaacaaaggaccggatgctttacattgagaagtgtgccaattctagagctgttaaaacccattttcatccgtggtggaaacaaaatgatgattgaggagaccaagcgcagtcttcatgatgctctttgcgtggcaaggaatctgatccggaataactcaattgtgtacggtggcggctcagccgagatatcttgctcaattgctgttgaaactgctgcagataggcacccgggagttgagcagtatgctatcaggtcattcgctgatgcattagatgctgttccactagcgttggccgaaaacagtggtttgtcaccaattgataccttaactgcggtaaaagctcaacaagtcaaggagagcaacccccactgcggcatagactgcaacgacgttggcaccaccgacatgaaagaacagaacgtcttcgagaccctgattggcaagcagcaacagatcttgcttgccacccaggtggtgaagatgatcctgaagatcgacgacgtcatctcaccgtccgagtactgatggaaagaaggaacgggatggctatgctggatatgcgtaggcggcattgctgatgtgttgattggtgtacctccttatccaggcttgctgcctaccactcactccctgtgtgacgttttgccgaaattggtttgtattgtgcacgataatatctggaaatagactctagacagtccttagttatctttttattataaaaaaagtcagtgccttctcgtc

SEQ ID NO: 1878 - protein, 224 aa, Zea mays subsp. mays
  peptide (1)..(224): Ceres Seq. ID no. 13498492
PTLHHPRRRLLLRPGPSDPDRAPAMALAFDEFGRPFIILREQEKKTRLRGLDAQKANIASAKAVARILRTSLGPKGMDKMLQSPDGDVIITNDGATILEQMDVDNQIAKLMVELSRSQDYEIGDGTTGVVVMAGALLEQAEKLLERGIHPIRVAEGYEMASKVAFDHLEHISEKFEFSADNIEPLVQTCMTTLSSKIVNRCKRALAEIAVKAVLAVARFGEEGC

SEQ ID NO: 1879 - protein, 200 aa, Zea mays subsp. mays
  peptide (1)..(200): Ceres Seq. ID no. 13498493
MALAFDEFGRPFIILREQEKKTRLRGLDAQKANIASAKAVARILRTSLGPKGMDKMLQSPDGDVIITNDGATILEQMDVDNQIAKLMVELSRSQDYEIGDGTTGVVVMAGALLEQAEKLLERGIHPIRVAEGYEMASKVAFDHLEHISEKFEFSADNIEPLVQTCMTTLSSKIVNRCKRALAEIAVKAVLAVARFGEEGC

SEQ ID NO: 1880 - protein, 148 aa, Zea mays subsp. mays
  peptide (1)..(148): Ceres Seq. ID no. 13498494
MDKMLQSPDGDVIITNDGATILEQMDVDNQIAKLMVELSRSQDYEIGDGTTGVVVMAGALLEQAEKLLERGIHPIRVAEGYEMASKVAFDHLEHISEKFEFSADNIEPLVQTCMTTLSSKIVNRCKRALAEIAVKAVLAVARFGEEGC

SEQ ID NO: 1881 - DNA, 1510 bp, Zea mays subsp. mays
  misc_feature (1)..(1510): Ceres Seq. ID no. 12387174
  misc_feature (1)..(1510): Ortholog of  Ceres SEQ ID NO 13662367 as cited in SEQ ID NO 67774
gcacgagaccattacctagaacatcctaatcgaaaaaagcgaaagctcaagcaaatacaagctctcagttagaccacactcaaaccagccacggacagcctcaaaatcccgagcaggagctcgctcgtagccccgagaacccgaaagctctgcagcgagatgtctcccgagctgaccggcaagatggccgccaaggccgccgccgccgctgcggcggtgaagcccgcgacgagggcgtacgtgacgttcctggcgggcgacggcgactactggaagggcgtggtgggcctggccaagggcctgcgcaaggtcggctcggcctatcccctggtggtggcccttctgcccgacgtgccggagtcccaccgccgcatcctcgtctcgcagggctgcatcctccgcgagatcgagcccgtgtacccgcctgagaaccagacgcagttcgccatggcgtactacgtcatcaactactccaagctccgcatctgggagttcgtggagtacgagaggatggtgtacctggacgcggacatccaggtgttcgagaacatcgacgagctgttcgagctcgagaaggggtacttctacgcggtgatggactgcttctgcgagaagacgtggagccacaccccgcagtacaggatcggctactgccaacagtgcccggacaaggtggcgtggccgaccaccgagctgggccctccgcccccgctctacttcaacgccggcatgttcgcgcacgagcccagcatggccaccgccaaggcactcctcgacaccctccgcgtcactccgcccacccccttcgcagagcaggacttcctgaacatgttcttcagggaccagtacaggccgatccctaacgtgtacaacctcgtgctcgccatgctctggaggcaccccgagaacgtccagctggagaaggtgaaggtcgtgcactactgcgcggcggggtccaagccgtggaggttcacgggcaaggaggccaacatggacagggaggacatcaagacgctggtgaacaagtggtgggacatctacaacgacgaggcactggacttcaagggcctgcccctctcgcccgccgacgccgacgacgaggtggaggcggtggccaagaagccgctccgcgcggcgctggcggaggccggcacggtcaagtacgtcaccgcgccctcggccgcgtgacaccgtgcttcggcttcccgccggtggccgcgctatggcttttgcgcggtcctcacaagtccgtaaagaagaatctcactataaggcctttgttttgaattttgtttatgaattagggtgtctaattttggatcagttcctttcccttgtgtgtctatttagggtgtgagcttatatatatatagtaccaattcaaggtgcaagcgttcgtcaggaattgggctttatgaatacgcccttcggtcacagctagagtatttgtcctgtaccgagggattatgtgtattttgcttggtgaattaatatataaaatacgaagccg

SEQ ID NO: 1882 - protein, 342 aa, Zea mays subsp. mays
  peptide (1)..(342): Ceres Seq. ID no. 12387175
MSPELTGKMAAKAAAAAAAVKPATRAYVTFLAGDGDYWKGVVGLAKGLRKVGSAYPLVVALLPDVPESHRRILVSQGCILREIEPVYPPENQTQFAMAYYVINYSKLRIWEFVEYERMVYLDADIQVFENIDELFELEKGYFYAVMDCFCEKTWSHTPQYRIGYCQQCPDKVAWPTTELGPPPPLYFNAGMFAHEPSMATAKALLDTLRVTPPTPFAEQDFLNMFFRDQYRPIPNVYNLVLAMLWRHPENVQLEKVKVVHYCAAGSKPWRFTGKEANMDREDIKTLVNKWWDIYNDEALDFKGLPLSPADADDEVEAVAKKPLRAALAEAGTVKYVTAPSAA

SEQ ID NO: 1883 - protein, 334 aa, Zea mays subsp. mays
  peptide (1)..(334): Ceres Seq. ID no. 12387176
MAAKAAAAAAAVKPATRAYVTFLAGDGDYWKGVVGLAKGLRKVGSAYPLVVALLPDVPESHRRILVSQGCILREIEPVYPPENQTQFAMAYYVINYSKLRIWEFVEYERMVYLDADIQVFENIDELFELEKGYFYAVMDCFCEKTWSHTPQYRIGYCQQCPDKVAWPTTELGPPPPLYFNAGMFAHEPSMATAKALLDTLRVTPPTPFAEQDFLNMFFRDQYRPIPNVYNLVLAMLWRHPENVQLEKVKVVHYCAAGSKPWRFTGKEANMDREDIKTLVNKWWDIYNDEALDFKGLPLSPADADDEVEAVAKKPLRAALAEAGTVKYVTAPSAA

SEQ ID NO: 1884 - protein, 246 aa, Zea mays subsp. mays
  peptide (1)..(246): Ceres Seq. ID no. 12387177
MAYYVINYSKLRIWEFVEYERMVYLDADIQVFENIDELFELEKGYFYAVMDCFCEKTWSHTPQYRIGYCQQCPDKVAWPTTELGPPPPLYFNAGMFAHEPSMATAKALLDTLRVTPPTPFAEQDFLNMFFRDQYRPIPNVYNLVLAMLWRHPENVQLEKVKVVHYCAAGSKPWRFTGKEANMDREDIKTLVNKWWDIYNDEALDFKGLPLSPADADDEVEAVAKKPLRAALAEAGTVKYVTAPSAA

SEQ ID NO: 1885 - DNA, 1651 bp, Zea mays subsp. mays
  misc_feature (1)..(1651): Ceres Seq. ID no. 12410958
  misc_feature (1)..(1651): Ortholog of  Ceres SEQ ID NO 14311509 as cited in SEQ ID NO 51398
  misc_feature (1)..(1651): Ortholog of  Ceres SEQ ID NO 14307702 as cited in SEQ ID NO 54703
  misc_feature (1)..(1651): Ortholog of  Ceres SEQ ID NO 15176361 as cited in SEQ ID NO 55438
aataccagcagtggccagtgggggggagactgggatctgcgaacgggagggcgttataattgtcggcgcgcggtagccagtaggcgccgttccgccgccgccgccccctcgcccgacgttactcgccgccagcacaggcgcggaccccgcgcgccactatggcaaggtcatggctgataacttgtaggggaattgctaagaaaataagatatgcaaatcctagcgctaatcgccaaataagccaactgattgcagaagcacggagggaatgcccaaactgcagttatgttattgataacagcgatgttgccatgcagtggcctggggctgcctgctggagtcaagtttgatccttctgaattggagttgcttcaacatttagaacaaaaggttggcctgggagattcaagaccacatgtgctcattgatgaatttattccaactatagacaatgatgagggaatctgctattcgcatcctgaaaatcttcctggtatgaaaacagatggtagcaatgctcatttcttccatagagtttcaaaagcgtatggttatggccagcgcaagcgtcgaaggattatcaactgcagcgatcacactgttcctgatgatcgtgtgagatggcacaagactggaagatccaaagccatatatgacaatggcgttataaaaggttggaagaagataatggtgctgcacaaaactttgcgaagtggtggtaagcgggagagagctaaatgggtaatgcatcagtatcaccttggaaaagaggaagatgaaaaggacggggagcttgtagtatctaaaatcttcttccagttggcaaataagagtatggaaatttctgaaacagaaactgcttgtgaagaacctgaagcacctgcttcagtgattggtccgaaaactccaaagacaatcacaccgcagccacgtcatcctaaaagtagtccatgtgaaactcagcagaatatttccattgtgcaggatcagctactactggacagcgaaggcgagcctaccatgcctattgttagtctggaggatgatgctatgaaccctgcatggtgtgctgtagctgaagaacggcaggttgttggagaggcatctcgggctcagtcgaactcagttgaaactcttctttgtcgtgaagacccaaattccttaaactacgaagcattgcttccctgggactatccgattctgtcccaatgcaggaatgagatgcttgatgggaacctgaatggatatgggttgcctgatcaccataatgtggatcttggaacgcctccagatcttcagcttgctgactttcagtttggttctcaggaaagccttggcagctggctggatcgcatctaggaagataactagtgtgaactgtttgctcgaacagcctgatcgatgggcttctttttgcacaggatatggtaaccggtggtggctattttgggacttacacaacacaaagattgcatgcttgcattagtattgtatttgtgttgcgctgtcaaacatcatctggaaaccaagaacctttcgcccttttctattttctttagaagaaatgaacaacctttaacagctggctactagacttgaagtttagttgtatgtttggcacggttggtgcaaccctgcattgccccgttgt

SEQ ID NO: 1886 - protein, 357 aa, Zea mays subsp. mays
  peptide (1)..(357): Ceres Seq. ID no. 12410959
MLLITAMLPCSGLGLPAGVKFDPSELELLQHLEQKVGLGDSRPHVLIDEFIPTIDNDEGICYSHPENLPGMKTDGSNAHFFHRVSKAYGYGQRKRRRIINCSDHTVPDDRVRWHKTGRSKAIYDNGVIKGWKKIMVLHKTLRSGGKRERAKWVMHQYHLGKEEDEKDGELVVSKIFFQLANKSMEISETETACEEPEAPASVIGPKTPKTITPQPRHPKSSPCETQQNISIVQDQLLLDSEGEPTMPIVSLEDDAMNPAWCAVAEERQVVGEASRAQSNSVETLLCREDPNSLNYEALLPWDYPILSQCRNEMLDGNLNGYGLPDHHNVDLGTPPDLQLADFQFGSQESLGSWLDRI

SEQ ID NO: 1887 - protein, 351 aa, Zea mays subsp. mays
  peptide (1)..(351): Ceres Seq. ID no. 12410960
MLPCSGLGLPAGVKFDPSELELLQHLEQKVGLGDSRPHVLIDEFIPTIDNDEGICYSHPENLPGMKTDGSNAHFFHRVSKAYGYGQRKRRRIINCSDHTVPDDRVRWHKTGRSKAIYDNGVIKGWKKIMVLHKTLRSGGKRERAKWVMHQYHLGKEEDEKDGELVVSKIFFQLANKSMEISETETACEEPEAPASVIGPKTPKTITPQPRHPKSSPCETQQNISIVQDQLLLDSEGEPTMPIVSLEDDAMNPAWCAVAEERQVVGEASRAQSNSVETLLCREDPNSLNYEALLPWDYPILSQCRNEMLDGNLNGYGLPDHHNVDLGTPPDLQLADFQFGSQESLGSWLDRI

SEQ ID NO: 1888 - protein, 287 aa, Zea mays subsp. mays
  peptide (1)..(287): Ceres Seq. ID no. 12410961
MKTDGSNAHFFHRVSKAYGYGQRKRRRIINCSDHTVPDDRVRWHKTGRSKAIYDNGVIKGWKKIMVLHKTLRSGGKRERAKWVMHQYHLGKEEDEKDGELVVSKIFFQLANKSMEISETETACEEPEAPASVIGPKTPKTITPQPRHPKSSPCETQQNISIVQDQLLLDSEGEPTMPIVSLEDDAMNPAWCAVAEERQVVGEASRAQSNSVETLLCREDPNSLNYEALLPWDYPILSQCRNEMLDGNLNGYGLPDHHNVDLGTPPDLQLADFQFGSQESLGSWLDRI

SEQ ID NO: 1889 - DNA, 1558 bp, Zea mays subsp. mays
  misc_feature (1)..(1558): Ceres Seq. ID no. 12351948
  misc_feature (1)..(1558): Ortholog of  Ceres SEQ ID NO 15178264 as cited in SEQ ID NO 52395
  misc_feature (1)..(1558): Ortholog of  Ceres SEQ ID NO 13598642 as cited in SEQ ID NO 64264
  misc_feature (1)..(1558): Ortholog of  Ceres SEQ ID NO 13663413 as cited in SEQ ID NO 66334
  misc_feature (1)..(1558): Ortholog of  Ceres SEQ ID NO 12779833 as cited in SEQ ID NO 66670
  misc_feature (1)..(1558): Ortholog of  Ceres SEQ ID NO 15169501 as cited in SEQ ID NO 67032
  misc_feature (1)..(1558): Ortholog of  Ceres SEQ ID NO 13590666 as cited in SEQ ID NO 68761
aagcttccgcttctctcatggccgacgccaccgccgccctctcagctcggagcaaggtgcaggctttcctggaggctgcgcgcgccggcgacctccaatccctcaagaacctcgtcgcggcgctcgacgaggacggcacgggcgccgcctccgtcgccgccgccgtgcgtgacgccaacaagcgcaccgccctccacttcgcggcgatcggatgtcgcaccgacgtctgtgaattcctcatcggcgagctcggcctccctgtcgacccaaaggacgatgatggcgaaactccgctcatccatgcgacacgccagggccatctggacactgtcaagtatcttctcgaccatggagctgatccttcgctggccaccagcctaggagccacagcgctacaccatgctgcaggcatagggaacacggaactcatgaagcttctcctctccaagggagttgacgtcgagtcagaaagtgatgctggcactccccttgtgtgggctgctggtcatggcaaccaggatgctgtcaaacttctgcttcaacacaatgctaagccaaatactgaaaacgatgatggtgtcacagcattgttatctgctgttgctgcaggttccctcccatgcttggaggtcctaattgaggctggtgcaaacccaaatgtcaaggctggtggagcaaccccattgcatattgctgcagatagtggaaatatagaagtcatcaaatgtttgcttaaagctggagctgacccaaatacctgtgatgatgatgaattgaagccagttcaggttgctgcttggagaaataaccatgaagctgttgaacttcttttaccgttaacatccccaattccaggtgtttcaaactggaacgtagatgggattatagaacacatgctccctaaagagtatgaggaaaagtctcaactgaaggaagcgacatctctgaaatcaggcctaacacaaactattgaggtgtcatctgaagcaaaaaagaggtccttggaagccaaatcaagaggtgatgatgccttcagaagaaaggactaccttgtagcggtggatgcttatacgcaggctacagagttggacccaactgatgcaacagtgctctcaaacagaagcctgtgctggctgcgggcagggcaagctgagcgtgctctggaggacgccaaagcatgccgtgcattgagaccagattgggcgaaagcctgctacagggaaggtgcggcgcatcgtctgttacagaggtttgaggaagccgcaaacgccttctatgagggggtgcaacttgagccagagaacacggagctcgtcaacgcattcagggaggccatcgaagccgggaggaagttccatggcgtcgacacgccaagctcaacacaatgagactttgctgtttggttggataggtagatgatgaggcggatggacatgaacgttgtcttagttggaatttggtgagatgatgaatgagatgatcatgaaatttgaaagagcgaatttgccagatttattttgtgttttgtgattgttttcttaaacttgttttcttgcgc

SEQ ID NO: 1890 - protein, 461 aa, Zea mays subsp. mays
  peptide (1)..(461): Ceres Seq. ID no. 12351949
ASASLMADATAALSARSKVQAFLEAARAGDLQSLKNLVAALDEDGTGAASVAAAVRDANKRTALHFAAIGCRTDVCEFLIGELGLPVDPKDDDGETPLIHATRQGHLDTVKYLLDHGADPSLATSLGATALHHAAGIGNTELMKLLLSKGVDVESESDAGTPLVWAAGHGNQDAVKLLLQHNAKPNTENDDGVTALLSAVAAGSLPCLEVLIEAGANPNVKAGGATPLHIAADSGNIEVIKCLLKAGADPNTCDDDELKPVQVAAWRNNHEAVELLLPLTSPIPGVSNWNVDGIIEHMLPKEYEEKSQLKEATSLKSGLTQTIEVSSEAKKRSLEAKSRGDDAFRRKDYLVAVDAYTQATELDPTDATVLSNRSLCWLRAGQAERALEDAKACRALRPDWAKACYREGAAHRLLQRFEEAANAFYEGVQLEPENTELVNAFREAIEAGRKFHGVDTPSSTQ

SEQ ID NO: 1891 - protein, 456 aa, Zea mays subsp. mays
  peptide (1)..(456): Ceres Seq. ID no. 12351950
MADATAALSARSKVQAFLEAARAGDLQSLKNLVAALDEDGTGAASVAAAVRDANKRTALHFAAIGCRTDVCEFLIGELGLPVDPKDDDGETPLIHATRQGHLDTVKYLLDHGADPSLATSLGATALHHAAGIGNTELMKLLLSKGVDVESESDAGTPLVWAAGHGNQDAVKLLLQHNAKPNTENDDGVTALLSAVAAGSLPCLEVLIEAGANPNVKAGGATPLHIAADSGNIEVIKCLLKAGADPNTCDDDELKPVQVAAWRNNHEAVELLLPLTSPIPGVSNWNVDGIIEHMLPKEYEEKSQLKEATSLKSGLTQTIEVSSEAKKRSLEAKSRGDDAFRRKDYLVAVDAYTQATELDPTDATVLSNRSLCWLRAGQAERALEDAKACRALRPDWAKACYREGAAHRLLQRFEEAANAFYEGVQLEPENTELVNAFREAIEAGRKFHGVDTPSSTQ

SEQ ID NO: 1892 - protein, 319 aa, Zea mays subsp. mays
  peptide (1)..(319): Ceres Seq. ID no. 12351951
MKLLLSKGVDVESESDAGTPLVWAAGHGNQDAVKLLLQHNAKPNTENDDGVTALLSAVAAGSLPCLEVLIEAGANPNVKAGGATPLHIAADSGNIEVIKCLLKAGADPNTCDDDELKPVQVAAWRNNHEAVELLLPLTSPIPGVSNWNVDGIIEHMLPKEYEEKSQLKEATSLKSGLTQTIEVSSEAKKRSLEAKSRGDDAFRRKDYLVAVDAYTQATELDPTDATVLSNRSLCWLRAGQAERALEDAKACRALRPDWAKACYREGAAHRLLQRFEEAANAFYEGVQLEPENTELVNAFREAIEAGRKFHGVDTPSSTQ

SEQ ID NO: 1893 - DNA, 1738 bp, Zea mays subsp. mays
  misc_feature (1)..(1738): Ceres Seq. ID no. 12372961
  misc_feature (1)..(1738): Ortholog of  Ceres SEQ ID NO 14315063 as cited in SEQ ID NO 52256
  misc_feature (1)..(1738): Ortholog of  Ceres SEQ ID NO 14310736 as cited in SEQ ID NO 52901
  misc_feature (1)..(1738): Ortholog of  Ceres SEQ ID NO 15172325 as cited in SEQ ID NO 54668
  misc_feature (1)..(1738): Ortholog of  Ceres SEQ ID NO 13594345 as cited in SEQ ID NO 58043
  misc_feature (1)..(1738): Ortholog of  Ceres SEQ ID NO 14314755 as cited in SEQ ID NO 59919
  misc_feature (1)..(1738): Ortholog of  Ceres SEQ ID NO 14308594 as cited in SEQ ID NO 60384
  misc_feature (1)..(1738): Ortholog of  Ceres SEQ ID NO 12614112 as cited in SEQ ID NO 60891
  misc_feature (1)..(1738): Ortholog of  Ceres SEQ ID NO 14302832 as cited in SEQ ID NO 64926
  misc_feature (1)..(1738): Ortholog of  Ceres SEQ ID NO 12779098 as cited in SEQ ID NO 67698
  misc_feature (1)..(1738): Ortholog of  Ceres SEQ ID NO 13596089 as cited in SEQ ID NO 68373
atccatcaaagtcacagagacgaccagctgaagcgaacacagagctgctcgccgtgtaacgcagcaggcagcagcacccagaggcggcaggacacacacacagcacacgcagatcttcgatcaccaccatgggttctctcggcagcgccgcgcagcagcagccgcagcaaccgcacgccgtgtgcctgccgtacccagcgcagggccacatcaccccgatgctcaacgtggcgaagctgctgcacgcccggggcttccacgtcaccttcgtcaacaccgagtacaaccaggcgcgcctcgtccggacccgcggggcggcggccgtggccggcctcccgggcttccgcttcgccaccatccccgacggcctgccgccgtcggaggacgacgacgtcacgcaggacatcccctcgctgtgcaagtccaccacggagacctgcctcggtcccttccgccgcctgctcgcggacctcagcgacccgcccgtcacctgcgtcgtctccgacgtcgtcatgggcttctccatcgacgccaccaaggagctcggccttccctacgtccagctctggactgccagcaccatcagcttcctcggctaccgccactaccacctcctcaagagccgtggcctcgctccgctcaaaagtgtggagcagctgacgaacggattccttgacacggcggtggaggacgtgccggggctgcggaacatgaggttccgggacttcccgagcttcatccgctccacggacccggacgagtacatggtgggctacgtcctccaggagacggggcgcacggcgggcgcgtcggccgtgatcctcaacaccttcgacgagctggagggcgaggcggtggcggccatgcgctcgctcggcctggcgcgcaaggtgtacacgctgggcccgctcccgctgctggcgcgcgaggacccgcccaccccgcgctccgccatcagcctcagcctgtggaaggaggaggaggagtgcctgcggtggctcgacggcagggaccccggctccgtcgtctacgtcaacttcggcagcatcaccgtgatgaccagcgaccagctggtggagttcgcgtgggggctggccaacagcggcaggccgttcctgtggatcatccggcgcgacctcgtcaggggcgacactgccgtgctgccgccggagttcctgtccgagacggccggccgcgggctcatggccacctggtgcccgcagcaggcggtgctggaccacccggccgtggccgcgttcctcacgcacagcggatggaactccacgctggaggccatgtgcggcggcgtcccggtcatcagctggcccttcttcgccgaccagcagaccaactgccgctaccagtgcaacgagtggggcgtcgggatggagatcgacagcaacgtccggcgcgacgccgtggcgagcctcatcgctgagctcatggagggggagcaggggaaggagatgaggagaagggcactggaatggagggacaaggccatcgaggtggccaagcccggaggcacgtcttaccggaatttcgatgaactggttcgcaatgtgctcctgccaaagaactaggcaacttagctctatatttgcagtttgcacggtgcttctgccagtgccgtgtgattttgttcctttgttttggagggagatggacaggtcagtgtcgttgtgtaaacaataaaaatacatgcatacgagcgtccaattgaggatgggcaagtctg

SEQ ID NO: 1894 - protein, 484 aa, Zea mays subsp. mays
  peptide (1)..(484): Ceres Seq. ID no. 12372962
MGSLGSAAQQQPQQPHAVCLPYPAQGHITPMLNVAKLLHARGFHVTFVNTEYNQARLVRTRGAAAVAGLPGFRFATIPDGLPPSEDDDVTQDIPSLCKSTTETCLGPFRRLLADLSDPPVTCVVSDVVMGFSIDATKELGLPYVQLWTASTISFLGYRHYHLLKSRGLAPLKSVEQLTNGFLDTAVEDVPGLRNMRFRDFPSFIRSTDPDEYMVGYVLQETGRTAGASAVILNTFDELEGEAVAAMRSLGLARKVYTLGPLPLLAREDPPTPRSAISLSLWKEEEECLRWLDGRDPGSVVYVNFGSITVMTSDQLVEFAWGLANSGRPFLWIIRRDLVRGDTAVLPPEFLSETAGRGLMATWCPQQAVLDHPAVAAFLTHSGWNSTLEAMCGGVPVISWPFFADQQTNCRYQCNEWGVGMEIDSNVRRDAVASLIAELMEGEQGKEMRRRALEWRDKAIEVAKPGGTSYRNFDELVRNVLLPKN

SEQ ID NO: 1895 - protein, 454 aa, Zea mays subsp. mays
  peptide (1)..(454): Ceres Seq. ID no. 12372963
MLNVAKLLHARGFHVTFVNTEYNQARLVRTRGAAAVAGLPGFRFATIPDGLPPSEDDDVTQDIPSLCKSTTETCLGPFRRLLADLSDPPVTCVVSDVVMGFSIDATKELGLPYVQLWTASTISFLGYRHYHLLKSRGLAPLKSVEQLTNGFLDTAVEDVPGLRNMRFRDFPSFIRSTDPDEYMVGYVLQETGRTAGASAVILNTFDELEGEAVAAMRSLGLARKVYTLGPLPLLAREDPPTPRSAISLSLWKEEEECLRWLDGRDPGSVVYVNFGSITVMTSDQLVEFAWGLANSGRPFLWIIRRDLVRGDTAVLPPEFLSETAGRGLMATWCPQQAVLDHPAVAAFLTHSGWNSTLEAMCGGVPVISWPFFADQQTNCRYQCNEWGVGMEIDSNVRRDAVASLIAELMEGEQGKEMRRRALEWRDKAIEVAKPGGTSYRNFDELVRNVLLPKN

SEQ ID NO: 1896 - protein, 356 aa, Zea mays subsp. mays
  peptide (1)..(356): Ceres Seq. ID no. 12372964
MGFSIDATKELGLPYVQLWTASTISFLGYRHYHLLKSRGLAPLKSVEQLTNGFLDTAVEDVPGLRNMRFRDFPSFIRSTDPDEYMVGYVLQETGRTAGASAVILNTFDELEGEAVAAMRSLGLARKVYTLGPLPLLAREDPPTPRSAISLSLWKEEEECLRWLDGRDPGSVVYVNFGSITVMTSDQLVEFAWGLANSGRPFLWIIRRDLVRGDTAVLPPEFLSETAGRGLMATWCPQQAVLDHPAVAAFLTHSGWNSTLEAMCGGVPVISWPFFADQQTNCRYQCNEWGVGMEIDSNVRRDAVASLIAELMEGEQGKEMRRRALEWRDKAIEVAKPGGTSYRNFDELVRNVLLPKN

SEQ ID NO: 1897 - DNA, 1175 bp, Zea mays subsp. mays
  misc_feature (1)..(1175): Ceres Seq. ID no. 12566396
  misc_feature (1)..(1175): Ortholog of  Ceres SEQ ID NO 13598479 as cited in SEQ ID NO 60680
gacgtcgtcccgaccttcttttcaatcccgtctcggattcgttccgtctcagctaccgcgaccacgacgccgacgcgagagggcagggaacacagccactcgccgacgagaccccggcgcgcgcgagagaaagagaagagaggaggatcttttgttcgtgaaaaatattggaggcggagggaaggtgaaggagggggatcggagatgaacgtgttccggctggcgggggacatgacccacctcctcagcgtggtagtgctgctcctcaagatccataccatcaagtcctgcgcaggcatatctctgaagacacaggagctgtatgcacttgtttttgcagcacggtacctggacctgtttgttcattttgtgtctctgtataacactgtcatgaagctggtcttcttggcaagttctttctcgatagtttggtacatgaagcggcataagattgtgcggaggacatatgacaaggatcatgacacctttcgccattacgttttagtgttgccttgtcttcttctggctctcctcattaatgagaagtttacttttagagaggtgatgtgggcattctccatttatttggaagctgtcgcgatatttccacaacttgtgttgctacagcggacaaggaatattgacaacctgactggccaatatgtcttcttcttgggtgcctaccgtgtgctttatatccttaactggatttaccgatacttcactgagccccattttgtccactggataagttggatggcaggaatagtgcaaactctgttgtatgctgacttcttcttttattacataatgagctggaagaacaatgtgaagctagagctgccagcttaaggttgctgctcctgtccccaagatatagtagggtaatatatcagataggcaggccccatacacagcatgatcattgctatcgccaactgggttatgaaaaaagcattttagttgcgtggcttgtatcgccttgtatctctctgctattgttggaagaacaggaaagtcaggctcaccatgtaactttttacaataagctgcgtaagatcagcactagaaggttgtgaattgtgatcgtccttagggaattttgtgctgatgtaaccctttcggcaagtgattctcatacaatataatctcagactataattggtaattgtttc

SEQ ID NO: 1898 - protein, 283 aa, Zea mays subsp. mays
  peptide (1)..(283): Ceres Seq. ID no. 12566397
DVVPTFFSIPSRIRSVSATATTTPTREGREHSHSPTRPRRAREKEKRGGSFVREKYWRRREGEGGGSEMNVFRLAGDMTHLLSVVVLLLKIHTIKSCAGISLKTQELYALVFAARYLDLFVHFVSLYNTVMKLVFLASSFSIVWYMKRHKIVRRTYDKDHDTFRHYVLVLPCLLLALLINEKFTFREVMWAFSIYLEAVAIFPQLVLLQRTRNIDNLTGQYVFFLGAYRVLYILNWIYRYFTEPHFVHWISWMAGIVQTLLYADFFFYYIMSWKNNVKLELPA

SEQ ID NO: 1899 - protein, 215 aa, Zea mays subsp. mays
  peptide (1)..(215): Ceres Seq. ID no. 12566398
MNVFRLAGDMTHLLSVVVLLLKIHTIKSCAGISLKTQELYALVFAARYLDLFVHFVSLYNTVMKLVFLASSFSIVWYMKRHKIVRRTYDKDHDTFRHYVLVLPCLLLALLINEKFTFREVMWAFSIYLEAVAIFPQLVLLQRTRNIDNLTGQYVFFLGAYRVLYILNWIYRYFTEPHFVHWISWMAGIVQTLLYADFFFYYIMSWKNNVKLELPA

SEQ ID NO: 1900 - protein, 206 aa, Zea mays subsp. mays
  peptide (1)..(206): Ceres Seq. ID no. 12566399
MTHLLSVVVLLLKIHTIKSCAGISLKTQELYALVFAARYLDLFVHFVSLYNTVMKLVFLASSFSIVWYMKRHKIVRRTYDKDHDTFRHYVLVLPCLLLALLINEKFTFREVMWAFSIYLEAVAIFPQLVLLQRTRNIDNLTGQYVFFLGAYRVLYILNWIYRYFTEPHFVHWISWMAGIVQTLLYADFFFYYIMSWKNNVKLELPA

SEQ ID NO: 1901 - DNA, 1375 bp, Zea mays subsp. mays
  misc_feature (1)..(1375): Ceres Seq. ID no. 12410950
  misc_feature (1)..(1375): Ortholog of  Ceres SEQ ID NO 14304654 as cited in SEQ ID NO 53301
  misc_feature (1)..(1375): Ortholog of  Ceres SEQ ID NO 15172291 as cited in SEQ ID NO 55046
  misc_feature (1)..(1375): Ortholog of  Ceres SEQ ID NO 13658153 as cited in SEQ ID NO 66326
actggcatgggcagggacaagtaattcattctgatacatataatcccaagctcctctatcatagggatatatggatataagacgtgatttccatatggccgaaggggaaggagaatggagctactccaagaattgtaggcgccaacaagtagctgtccgcgagaccaggccaatggtcgagactgccgtcaagcaggtatacgcagctctcctccccagaaccatggtcgtcgccgacctcggatgctctgcaggaccgaacacgctgctcttcatctctagcgtcctgagcagcatcgctgctgcggctggtgctgaacggtgcaagccgccgagcggcggcggagacgatgacgaccatcacgtggagcttcagttcgtcctgaacgacctccccggcaacgacttcaaccacctgtttcggtcagtcgaggaggagttcagaagggcagcaggttgtgaaaggggtcctcctcctcctccctactatgtcatggggctaccggagtcctattacaacaggctgtttcctcgtcagagtgtgcatctgttccactcctcctactgcctccactggcgctcccaggaacctgagggactagaggcgtggagaaagccttgcctgaacgaggacaacatctacatcgcaaggagtaggaccacgacaccttctgtggcgaaactgttccaggagcagttccagaaggacttctccctcttcctcaagctgcgccacgaagagctcgtgcatggagggcgaatggtgcttgtatttctcggcaggaagaacgaggacgcgtacagtggcgacctcaaccagctcttcgcactggtcgcaacagcgttgcagtctcttgttttgaagggccttgtggagaaggaaaagctagagtctttcaacctaccgatctacgggccgtcggtgggagaagtggaggatctggtcacgcagagcggtctgttcagcatggatctgatcaagcagttcgagatgaactgggaccctctcgacgactcggagggtgacgacgtcgtcgaggacagcgctcgcagcagcatgaatgtcgccaagtacatcagatccgtgctgaagtctttaattgtccgccattttggagaagccataattgatgcatggtttgccgagttcaggcgccttgtcgctgagcacctcgagaaggagaagaccaagttcactaccttcgccatgtgcttgaagaaagagtgatatagatgtatcgatctacatatacgtatgtgtattgtatttcgtacggtgtagctaatatactcatatgtgatatatcatgtgtatttcatgggacacgtacaattgagtatatgtgtgcatgcattatacatatggtacggtcgt

SEQ ID NO: 1902 - protein, 385 aa, Zea mays subsp. mays
  peptide (1)..(385): Ceres Seq. ID no. 12410951
MDIRRDFHMAEGEGEWSYSKNCRRQQVAVRETRPMVETAVKQVYAALLPRTMVVADLGCSAGPNTLLFISSVLSSIAAAAGAERCKPPSGGGDDDDHHVELQFVLNDLPGNDFNHLFRSVEEEFRRAAGCERGPPPPPYYVMGLPESYYNRLFPRQSVHLFHSSYCLHWRSQEPEGLEAWRKPCLNEDNIYIARSRTTTPSVAKLFQEQFQKDFSLFLKLRHEELVHGGRMVLVFLGRKNEDAYSGDLNQLFALVATALQSLVLKGLVEKEKLESFNLPIYGPSVGEVEDLVTQSGLFSMDLIKQFEMNWDPLDDSEGDDVVEDSARSSMNVAKYIRSVLKSLIVRHFGEAIIDAWFAEFRRLVAEHLEKEKTKFTTFAMCLKKE

SEQ ID NO: 1903 - protein, 377 aa, Zea mays subsp. mays
  peptide (1)..(377): Ceres Seq. ID no. 12410952
MAEGEGEWSYSKNCRRQQVAVRETRPMVETAVKQVYAALLPRTMVVADLGCSAGPNTLLFISSVLSSIAAAAGAERCKPPSGGGDDDDHHVELQFVLNDLPGNDFNHLFRSVEEEFRRAAGCERGPPPPPYYVMGLPESYYNRLFPRQSVHLFHSSYCLHWRSQEPEGLEAWRKPCLNEDNIYIARSRTTTPSVAKLFQEQFQKDFSLFLKLRHEELVHGGRMVLVFLGRKNEDAYSGDLNQLFALVATALQSLVLKGLVEKEKLESFNLPIYGPSVGEVEDLVTQSGLFSMDLIKQFEMNWDPLDDSEGDDVVEDSARSSMNVAKYIRSVLKSLIVRHFGEAIIDAWFAEFRRLVAEHLEKEKTKFTTFAMCLKKE

SEQ ID NO: 1904 - protein, 351 aa, Zea mays subsp. mays
  peptide (1)..(351): Ceres Seq. ID no. 12410953
MVETAVKQVYAALLPRTMVVADLGCSAGPNTLLFISSVLSSIAAAAGAERCKPPSGGGDDDDHHVELQFVLNDLPGNDFNHLFRSVEEEFRRAAGCERGPPPPPYYVMGLPESYYNRLFPRQSVHLFHSSYCLHWRSQEPEGLEAWRKPCLNEDNIYIARSRTTTPSVAKLFQEQFQKDFSLFLKLRHEELVHGGRMVLVFLGRKNEDAYSGDLNQLFALVATALQSLVLKGLVEKEKLESFNLPIYGPSVGEVEDLVTQSGLFSMDLIKQFEMNWDPLDDSEGDDVVEDSARSSMNVAKYIRSVLKSLIVRHFGEAIIDAWFAEFRRLVAEHLEKEKTKFTTFAMCLKKE

SEQ ID NO: 1905 - DNA, 904 bp, Zea mays subsp. mays
  misc_feature (1)..(904): Ceres Seq. ID no. 12405189
  misc_feature (1)..(904): Ortholog of  Ceres SEQ ID NO 13599568 as cited in SEQ ID NO 509
  misc_feature (1)..(904): Ortholog of  Ceres SEQ ID NO 15172903 as cited in SEQ ID NO 51839
  misc_feature (1)..(904): Ortholog of  Ceres SEQ ID NO 15177108 as cited in SEQ ID NO 52015
  misc_feature (1)..(904): Ortholog of  Ceres SEQ ID NO 13638595 as cited in SEQ ID NO 52050
  misc_feature (1)..(904): Ortholog of  Ceres SEQ ID NO 13594748 as cited in SEQ ID NO 52114
  misc_feature (1)..(904): Ortholog of  Ceres SEQ ID NO 15170313 as cited in SEQ ID NO 59293
  misc_feature (1)..(904): Ortholog of  Ceres SEQ ID NO 12623490 as cited in SEQ ID NO 61136
  misc_feature (1)..(904): Ortholog of  Ceres SEQ ID NO 15173596 as cited in SEQ ID NO 63267
  misc_feature (1)..(904): Ortholog of  Ceres SEQ ID NO 12583993 as cited in SEQ ID NO 68098
  misc_feature (1)..(904): Ortholog of  Ceres SEQ ID NO 13654535 as cited in SEQ ID NO 68227
  misc_feature (1)..(904): Ortholog of  Ceres SEQ ID NO 13589319 as cited in SEQ ID NO 0
atcaacaacatacacacaagcaaaacaaaaagctaagaagctccgtagctaaattcagatattacaaacacaaaaaaggagtgcagaaccaaaatggctgcctcgaccttccttctcattgcttttctagcattgatcacttctcaggccattgcctctgatcctagcccgctccaagacttctgtgttgccgataaagactctccggtgaaggtgaatggatttgtttgcaaggaccctatggctgtgaacgctgacgacttcttcaaggctgcaaaacttgaccagccaagggacaccaccaaaagcaaggtgggatccaacgttactctaatcaatgtcatgcagctgcctggactcaacacgttggggatctcgttggctcgcattgactacgcaccattaggtcagaatcctccacacacacacccacgtgccactgagatcctcactgtgcttgaggggacactctacgtcggatttgtcacctccaaccaagctgatagaagcaacaggctatttgccaaggttctcaacaagggcgatgtgtttgtattcccccaaggactaatccacttccagttcaacccagtacatgacaagccagcagtcgcgctcgctgctctaagtagccagaaccctggagctattactattgccaatgcagtctttggatcaaagccacctatctcggatgatgtcctagctaaggcctttcaagtgcaaaaggggacaattgattggcttcaagctcagttctgggagaacaaccactactgaaaaaatcaagtctgagttcaacatatgagaataaagaaatgtacttgtattttacatactactctatgtgttaacctttttctaggttgcgactgataataaaataaatgttcagtatttatgt

SEQ ID NO: 1906 - protein, 228 aa, Zea mays subsp. mays
  peptide (1)..(228): Ceres Seq. ID no. 12405190
MAASTFLLIAFLALITSQAIASDPSPLQDFCVADKDSPVKVNGFVCKDPMAVNADDFFKAAKLDQPRDTTKSKVGSNVTLINVMQLPGLNTLGISLARIDYAPLGQNPPHTHPRATEILTVLEGTLYVGFVTSNQADRSNRLFAKVLNKGDVFVFPQGLIHFQFNPVHDKPAVALAALSSQNPGAITIANAVFGSKPPISDDVLAKAFQVQKGTIDWLQAQFWENNHY

SEQ ID NO: 1907 - protein, 179 aa, Zea mays subsp. mays
  peptide (1)..(179): Ceres Seq. ID no. 12405191
MAVNADDFFKAAKLDQPRDTTKSKVGSNVTLINVMQLPGLNTLGISLARIDYAPLGQNPPHTHPRATEILTVLEGTLYVGFVTSNQADRSNRLFAKVLNKGDVFVFPQGLIHFQFNPVHDKPAVALAALSSQNPGAITIANAVFGSKPPISDDVLAKAFQVQKGTIDWLQAQFWENNHY

SEQ ID NO: 1908 - protein, 145 aa, Zea mays subsp. mays
  peptide (1)..(145): Ceres Seq. ID no. 12405192
MQLPGLNTLGISLARIDYAPLGQNPPHTHPRATEILTVLEGTLYVGFVTSNQADRSNRLFAKVLNKGDVFVFPQGLIHFQFNPVHDKPAVALAALSSQNPGAITIANAVFGSKPPISDDVLAKAFQVQKGTIDWLQAQFWENNHY

SEQ ID NO: 1909 - DNA, 934 bp, Zea mays subsp. mays
  misc_feature (1)..(934): Ceres Seq. ID no. 12351299
  misc_feature (1)..(934): Ortholog of  Ceres SEQ ID NO 12627215 as cited in SEQ ID NO 60976
  misc_feature (1)..(934): Ortholog of  Ceres SEQ ID NO 15178542 as cited in SEQ ID NO 65410
  misc_feature (1)..(934): Ortholog of  Ceres SEQ ID NO 12635879 as cited in SEQ ID NO 0
  misc_feature (1)..(934): Ortholog of  Ceres SEQ ID NO 13599649 as cited in SEQ ID NO 0
gttttggcgcaataaggcgacctgagtcctgaaccgcctcgagccgctctcggcttcgaatcccgacaacctccctccccaagctgcttagccgccgtctgggcctcagacctgcgtcaagcttccggcggcagcccatcgagcaccacaatggcgtccggcggagcggccatctcggcggggcctacaccgccgtcggcgacggcgtcgtcggttgagtggcaccagcggccgccgaacccgaagaaccccgtggtgttcttcgacgtgaccatcgggtccatcgccgccggccgcatcaagatggagctcttcgccgacatcgcccccaagaccgcggagaacttccggcagttctgcactggggagcatagaaaaaatgctttgccacaaggttataagggctgccaattccatagagtgatcaaagatttcatgattcagggtggtgacttcttgaagaatgatggtactggatgcacatcaatctacggtaccaaatttgatgatgaaaattttatagcaaagcatacagggcctggactgctctcgatggcaaacagtggaattaactctaatggatctcagttctttataacatgtgcaaagtgtgactggcttgacaacaaacatgtggtatttgggagagtgcttggagacggtttgctcgtcgtgaggaagattgaaaatgttgcaactggagcgaataacaaaccaaagcttgcctgcgttataagtgagtgtggtgaaatgtagtttgatccctttgtgtggctaatcgtggattcttgacgctgctgatgtagaccctgtttggttgatggaagtacttaaacagtggaaacattgatggaaatgtattgtgtctaggcaacctgcagaataatagaccaaaaaaactaatattcttgtttggcttgggagttcggccttc

SEQ ID NO: 1910 - protein, 201 aa, Zea mays subsp. mays
  peptide (1)..(201): Ceres Seq. ID no. 12351300
MASGGAAISAGPTPPSATASSVEWHQRPPNPKNPVVFFDVTIGSIAAGRIKMELFADIAPKTAENFRQFCTGEHRKNALPQGYKGCQFHRVIKDFMIQGGDFLKNDGTGCTSIYGTKFDDENFIAKHTGPGLLSMANSGINSNGSQFFITCAKCDWLDNKHVVFGRVLGDGLLVVRKIENVATGANNKPKLACVISECGEM

SEQ ID NO: 1911 - protein, 150 aa, Zea mays subsp. mays
  peptide (1)..(150): Ceres Seq. ID no. 12351301
MELFADIAPKTAENFRQFCTGEHRKNALPQGYKGCQFHRVIKDFMIQGGDFLKNDGTGCTSIYGTKFDDENFIAKHTGPGLLSMANSGINSNGSQFFITCAKCDWLDNKHVVFGRVLGDGLLVVRKIENVATGANNKPKLACVISECGEM

SEQ ID NO: 1912 - protein, 106 aa, Zea mays subsp. mays
  peptide (1)..(106): Ceres Seq. ID no. 12351302
MIQGGDFLKNDGTGCTSIYGTKFDDENFIAKHTGPGLLSMANSGINSNGSQFFITCAKCDWLDNKHVVFGRVLGDGLLVVRKIENVATGANNKPKLACVISECGEM

SEQ ID NO: 1913 - DNA, 1416 bp, Zea mays subsp. mays
  misc_feature (1)..(1416): Ceres Seq. ID no. 12373949
  misc_feature (1)..(1416): Ortholog of  Ceres SEQ ID NO 15170881 as cited in SEQ ID NO 54654
gcacgagaccattacctagaacatcctaatcgaaaactcggacccaaacccaaacatccatctcatcgatctccttatcccttcccgtcgcataaacccccgccgccgtgacctcgcagcgaccctgccctcgttctaggctttcattgcaggcctcgcgtctccagtggcagggcaagagaaaggagaggatggcgtcgccgataccgcgcgagtgggtcgggctgcagcagtttccggcggctacacagaccaagctgcacgaactcctcggcaaactcaaggaggaggatgtgagcacattaacaattctggtgatggggaaaggtggagtgggaaagtcatccactgttaactccatcgttggggagagggttgcctctgtcagcgctttgccagtctgagggtctgagaccaatgatgtgctcgcgcacaagggcagggttcactttgaacattatcgacactcctgggcttattgaaggtggatacattaatgagcaggccgttgacatcattaagagatttcttctaggcaagactatcgatgttctcctgtacgtggatcgtttggatgcgtatagaatggatacactggatgaacaggttataagagccatcaccaattcatttggaaaagatatttggcgaagatcattggttgtgttgacccatgcccaactctcaccacctgatggaatcgactataatgatttctttacaagaagatcagaggcacttttgcgatacatccactcaggagcaggaatcaacaaacgagaatatggggatttccccttgccaatagcattggtggagaacagtggaaggtgcaagactaatgagcatggggagaagatacttccggacggaactctgtgggttccaaacctgatgaaagaaattactgttgtcatctcaaacgggagcagtcccactcatgttgatcagaagttaattgatggtccaaaccctaacaatcgccgaaagttgttcataccacttatccttgctgtggagtacttcttggtggtaaaaggaatccggagggcgatccatgcagatatcgcaaacgggaaggtagatgactgggagcagcgttaccgggacctggtgggaagcagggacctcgtagagcagaaaggttctacctcccggaaccgcaaagcctaagttggtgtaccagaaaggattctattcgtgttgagacccacccactcgatctgctgctccttttcctaaatctgtgctgggggctttatagagttcgctggtactacttgaaaaaaaaatgctcctgttgtagttgataagattatgtttcccattttatgacgattggccgtcttcgcaattttgaagatgttatcgaatacgtgttattttattgttttaaattatatatggcatggaaac

SEQ ID NO: 1914 - protein, 251 aa, Zea mays subsp. mays
  peptide (1)..(251): Ceres Seq. ID no. 12373950
MMCSRTRAGFTLNIIDTPGLIEGGYINEQAVDIIKRFLLGKTIDVLLYVDRLDAYRMDTLDEQVIRAITNSFGKDIWRRSLVVLTHAQLSPPDGIDYNDFFTRRSEALLRYIHSGAGINKREYGDFPLPIALVENSGRCKTNEHGEKILPDGTLWVPNLMKEITVVISNGSSPTHVDQKLIDGPNPNNRRKLFIPLILAVEYFLVVKGIRRAIHADIANGKVDDWEQRYRDLVGSRDLVEQKGSTSRNRKA

SEQ ID NO: 1915 - protein, 250 aa, Zea mays subsp. mays
  peptide (1)..(250): Ceres Seq. ID no. 12373951
MCSRTRAGFTLNIIDTPGLIEGGYINEQAVDIIKRFLLGKTIDVLLYVDRLDAYRMDTLDEQVIRAITNSFGKDIWRRSLVVLTHAQLSPPDGIDYNDFFTRRSEALLRYIHSGAGINKREYGDFPLPIALVENSGRCKTNEHGEKILPDGTLWVPNLMKEITVVISNGSSPTHVDQKLIDGPNPNNRRKLFIPLILAVEYFLVVKGIRRAIHADIANGKVDDWEQRYRDLVGSRDLVEQKGSTSRNRKA

SEQ ID NO: 1916 - protein, 195 aa, Zea mays subsp. mays
  peptide (1)..(195): Ceres Seq. ID no. 12373952
MDTLDEQVIRAITNSFGKDIWRRSLVVLTHAQLSPPDGIDYNDFFTRRSEALLRYIHSGAGINKREYGDFPLPIALVENSGRCKTNEHGEKILPDGTLWVPNLMKEITVVISNGSSPTHVDQKLIDGPNPNNRRKLFIPLILAVEYFLVVKGIRRAIHADIANGKVDDWEQRYRDLVGSRDLVEQKGSTSRNRKA

SEQ ID NO: 1917 - DNA, 909 bp, Zea mays subsp. mays
  misc_feature (1)..(909): Ceres Seq. ID no. 12413503
  misc_feature (1)..(909): Ortholog of  Ceres SEQ ID NO 13596030 as cited in SEQ ID NO 62043
acacggcgtgccgcggtgggcgaccttttttgcaccgggagataaatcgacagcaccctgacctcaagtcctcaacccgcaggccgcagctgctcccgcccgccgcgcaagcggccaagcgccgccggttcttctcgagcaattctcataaatcattgtcctcataacttgtaatgggtggaagccagtatgatgatgactgggtgttgcccagtgccgatatcactcttgttctggttgggaaacttggctatggcaagagtgcaactggaaatagcatccttggacgggaagcatttgtatcagaatattcacatgccagtgttactaatacttgtcagttgggaagcactaccctgaaggacggccgcaccatcaatgttattgatacaccagggttatttgatatgagcattacatcggacgaggctggtaaagagattgttaaatgcatgaacatggctaaagatgggatacatgcagttctgatggttttttctgccacatctcggttttctcgagaggacgcaagtacagttgagaccattaaagtcttctttggtgaaaagattgtcgaccacatgattttagtcttcacttatggagatttagttggtgaatctaagttgaagaaaatgttaaataatgcgccagagtatttgcagaatgttgttgagctatgccaaaacagagtggttgtcttcgataacgtgactgaagaccgaaggctccaagcgcagcaacttgacaaattgctcgatgtagtggattcagtttgtgcaaaaaatggaggaaaaccattttcagatcaaatgttcactagcatcaaggaggtgcatgatagagaaaaagaggtgcatacctcgggatattcagatgagcagatatctgaattgaaaaaggagattc

SEQ ID NO: 1918 - protein, 245 aa, Zea mays subsp. mays
  peptide (1)..(245): Ceres Seq. ID no. 12413504
MGGSQYDDDWVLPSADITLVLVGKLGYGKSATGNSILGREAFVSEYSHASVTNTCQLGSTTLKDGRTINVIDTPGLFDMSITSDEAGKEIVKCMNMAKDGIHAVLMVFSATSRFSREDASTVETIKVFFGEKIVDHMILVFTYGDLVGESKLKKMLNNAPEYLQNVVELCQNRVVVFDNVTEDRRLQAQQLDKLLDVVDSVCAKNGGKPFSDQMFTSIKEVHDREKEVHTSGYSDEQISELKKEI

SEQ ID NO: 1919 - protein, 167 aa, Zea mays subsp. mays
  peptide (1)..(167): Ceres Seq. ID no. 12413505
MSITSDEAGKEIVKCMNMAKDGIHAVLMVFSATSRFSREDASTVETIKVFFGEKIVDHMILVFTYGDLVGESKLKKMLNNAPEYLQNVVELCQNRVVVFDNVTEDRRLQAQQLDKLLDVVDSVCAKNGGKPFSDQMFTSIKEVHDREKEVHTSGYSDEQISELKKEI

SEQ ID NO: 1920 - protein, 152 aa, Zea mays subsp. mays
  peptide (1)..(152): Ceres Seq. ID no. 12413506
MNMAKDGIHAVLMVFSATSRFSREDASTVETIKVFFGEKIVDHMILVFTYGDLVGESKLKKMLNNAPEYLQNVVELCQNRVVVFDNVTEDRRLQAQQLDKLLDVVDSVCAKNGGKPFSDQMFTSIKEVHDREKEVHTSGYSDEQISELKKEI

SEQ ID NO: 1921 - DNA, 1414 bp, Zea mays subsp. mays
  misc_feature (1)..(1414): Ceres Seq. ID no. 12410938
  misc_feature (1)..(1414): Ortholog of  Ceres SEQ ID NO 12578315 as cited in SEQ ID NO 62451
  misc_feature (1)..(1414): Ortholog of  Ceres SEQ ID NO 13597295 as cited in SEQ ID NO 63743
  misc_feature (1)..(1414): Ortholog of  Ceres SEQ ID NO 12617090 as cited in SEQ ID NO 64005
  misc_feature (1)..(1414): Ortholog of  Ceres SEQ ID NO 13597233 as cited in SEQ ID NO 64370
  misc_feature (1)..(1414): Ortholog of  Ceres SEQ ID NO 13584577 as cited in SEQ ID NO 65298
acacaagctagcaattgaaaaaaaaaacaggcaaggaaaatggctccgaccgccgccaaggacagtggctccgccgatcgctggcgcgaggtgcaggcgttcgaggacagcaagctgggtgtgaagggcctggtcgactccggcgtcaagtccatcccggccatgttccaccacccgccggagtccctcaaggatgtcatttctccaccagctctgccctcctccgacgatgcgccggccatcccagtggtggacctgtccgtggcgcggcgcgaggatctggtggcccaggtgaagcacgcggccgggacggtgggcttcttctgggtggtgaaccacggcgtgccggaggagctgatggccagcatgctcagcggggtgcgccagttcaacgagggctctctggaggccaagcaggcgctctactcacgggaccccgctcgcaacgtgcgcttcgcttccaacttcgacctcttcgagtccgcggcggccgactggcgcgacacgctctactgcaagattgcgccggatccggcgccgcgggagctcgtgccggagcctctccggaacgtgatgatggaatacggcgaggaactgacgaagctggcgcggtccatgttcgagctgctgtcggagtccctcggcatgcccagcgaccacctgcacaagatggagtgcatgcagcagctccacatcgtgtgccagtactacccgccatgcccggagccgcacctcaccatcggcgtcaggaagcactcggacaccggtttcttcaccatcctcctgcaggacggcatgggcggcctgcaggtgctagtcgatcgcggaggcggccgccagacgtgggtggacgtcactccccgacctggggcactcatggtcaacatgggcagctttcttcagcttgtgacgaatgaccggtacaagagcgtggatcaccgggtgccggctaacaagagcagtgacacggcgagggtctcggtagctgccttcttcaaccccgacgagaagagaaccgagaggctgtatggccccattccagaccccagcaagcctccgctgtacaggagcgtcacgttcccggacttcatcgccaagttcaacagcatcggactggacggtcgcgtgctcgaccacttccggttggaggacgacggccctactcgtcttgctgctcctgcacaccacgtctagtcttgttttcgttcgatcgaacaaacagttctcgtcgtcgtctcttttatttttcctgcaatctgaatttcgagttctccaaataaataagggtatccattcccttcatccgcagagcgcgcggatgccttcactagcagctctagttttgctatgtatatagctgtgtgtgtggtacctttgtgactcatatattatgcaataaagtatgctttctcct

SEQ ID NO: 1922 - protein, 384 aa, Zea mays subsp. mays
  peptide (1)..(384): Ceres Seq. ID no. 12410939
MAPTAAKDSGSADRWREVQAFEDSKLGVKGLVDSGVKSIPAMFHHPPESLKDVISPPALPSSDDAPAIPVVDLSVARREDLVAQVKHAAGTVGFFWVVNHGVPEELMASMLSGVRQFNEGSLEAKQALYSRDPARNVRFASNFDLFESAAADWRDTLYCKIAPDPAPRELVPEPLRNVMMEYGEELTKLARSMFELLSESLGMPSDHLHKMECMQQLHIVCQYYPPCPEPHLTIGVRKHSDTGFFTILLQDGMGGLQVLVDRGGGRQTWVDVTPRPGALMVNMGSFLQLVTNDRYKSVDHRVPANKSSDTARVSVAAFFNPDEKRTERLYGPIPDPSKPPLYRSVTFPDFIAKFNSIGLDGRVLDHFRLEDDGPTRLAAPAHHV

SEQ ID NO: 1923 - protein, 343 aa, Zea mays subsp. mays
  peptide (1)..(343): Ceres Seq. ID no. 12410940
MFHHPPESLKDVISPPALPSSDDAPAIPVVDLSVARREDLVAQVKHAAGTVGFFWVVNHGVPEELMASMLSGVRQFNEGSLEAKQALYSRDPARNVRFASNFDLFESAAADWRDTLYCKIAPDPAPRELVPEPLRNVMMEYGEELTKLARSMFELLSESLGMPSDHLHKMECMQQLHIVCQYYPPCPEPHLTIGVRKHSDTGFFTILLQDGMGGLQVLVDRGGGRQTWVDVTPRPGALMVNMGSFLQLVTNDRYKSVDHRVPANKSSDTARVSVAAFFNPDEKRTERLYGPIPDPSKPPLYRSVTFPDFIAKFNSIGLDGRVLDHFRLEDDGPTRLAAPAHHV

SEQ ID NO: 1924 - protein, 278 aa, Zea mays subsp. mays
  peptide (1)..(278): Ceres Seq. ID no. 12410941
MASMLSGVRQFNEGSLEAKQALYSRDPARNVRFASNFDLFESAAADWRDTLYCKIAPDPAPRELVPEPLRNVMMEYGEELTKLARSMFELLSESLGMPSDHLHKMECMQQLHIVCQYYPPCPEPHLTIGVRKHSDTGFFTILLQDGMGGLQVLVDRGGGRQTWVDVTPRPGALMVNMGSFLQLVTNDRYKSVDHRVPANKSSDTARVSVAAFFNPDEKRTERLYGPIPDPSKPPLYRSVTFPDFIAKFNSIGLDGRVLDHFRLEDDGPTRLAAPAHHV

SEQ ID NO: 1925 - DNA, 1186 bp, Zea mays subsp. mays
  misc_feature (1)..(1186): Ceres Seq. ID no. 12405834
  misc_feature (1)..(1186): Ortholog of  Ceres SEQ ID NO 15175048 as cited in SEQ ID NO 59975
  misc_feature (1)..(1186): Ortholog of  Ceres SEQ ID NO 13597333 as cited in SEQ ID NO 63974
  misc_feature (1)..(1186): Ortholog of  Ceres SEQ ID NO 13599307 as cited in SEQ ID NO 0
  misc_feature (1)..(1186): Ortholog of  Ceres SEQ ID NO 15179517 as cited in SEQ ID NO 0
aaaagtcccacttagacaatacgagtggagtggtctcatagatagcgctacgagcagtagaaaccgccgccactaggctaggagtggaagcctcgggccccggcagcagccatggcggcgttcctggcgcctccctgcacttccttctatcgctcgtccgcattccttaccccctgttcctcgaatcgccggagtacagcgctaagggcggcggccgttcgtgggtcggcggtgacgcgggcccagcggacggtctccgctaggtgggtcccatccaggttagcggtggcgaggccggcggccaggaaggcgtgcctagaggagcttgatacaaccaacatgctccttcgccagcgcatcgtcttcctgggttccccggtggatgatacaagtgctgatctcattatcagccaactcctactattggatgcagaggaccagactaaagatattaaattgtttatcaactcacctggaggctctataacagcagggatgggagtatatgatgctatgaaattttgcaaagctgatgtgtcaactgtttgctttggattggcggcttcaatgggtgcatttttacttgctgctgggacaaagggtaagaggtactgcatgccaaatgcgaggattatgatccatcagccatcaggtggcgctggcgggaaagtcacagagatgggactacagataagagagatgatgtacgaaaagattaagatcaataaaataatgtcgagaattactggaaaatctgaggagcagattgatgaagacacgaagtttgattatttcatgagtccttcggaagccaaggattatgggatagttgacaatatcatagatgaggggaaaccagggttggtagctcccttggcaggatctgttccgcctcccaaatcgcgtgtgtggtacttgtggaaggcttcggggccgaccaggaagatcatgaaacatctaccttcataggagaaactaattcacaatggtaacggaagtgcaactggagatgatggaaagctcaaggaggcaacggcaacttgaagacattttaggtgataaatagtaggtcgataatagaatggcttagtgcattacctgtattttaaatcattgtttgaatacagattattggaggatgttaatacagtgcagtattttggatgctgcgttttcatggggtgct

SEQ ID NO: 1926 - protein, 285 aa, Zea mays subsp. mays
  peptide (1)..(285): Ceres Seq. ID no. 12405835
MAAFLAPPCTSFYRSSAFLTPCSSNRRSTALRAAAVRGSAVTRAQRTVSARWVPSRLAVARPAARKACLEELDTTNMLLRQRIVFLGSPVDDTSADLIISQLLLLDAEDQTKDIKLFINSPGGSITAGMGVYDAMKFCKADVSTVCFGLAASMGAFLLAAGTKGKRYCMPNARIMIHQPSGGAGGKVTEMGLQIREMMYEKIKINKIMSRITGKSEEQIDEDTKFDYFMSPSEAKDYGIVDNIIDEGKPGLVAPLAGSVPPPKSRVWYLWKASGPTRKIMKHLPS

SEQ ID NO: 1927 - protein, 209 aa, Zea mays subsp. mays
  peptide (1)..(209): Ceres Seq. ID no. 12405836
MLLRQRIVFLGSPVDDTSADLIISQLLLLDAEDQTKDIKLFINSPGGSITAGMGVYDAMKFCKADVSTVCFGLAASMGAFLLAAGTKGKRYCMPNARIMIHQPSGGAGGKVTEMGLQIREMMYEKIKINKIMSRITGKSEEQIDEDTKFDYFMSPSEAKDYGIVDNIIDEGKPGLVAPLAGSVPPPKSRVWYLWKASGPTRKIMKHLPS

SEQ ID NO: 1928 - protein, 157 aa, Zea mays subsp. mays
  peptide (1)..(157): Ceres Seq. ID no. 12405837
MGVYDAMKFCKADVSTVCFGLAASMGAFLLAAGTKGKRYCMPNARIMIHQPSGGAGGKVTEMGLQIREMMYEKIKINKIMSRITGKSEEQIDEDTKFDYFMSPSEAKDYGIVDNIIDEGKPGLVAPLAGSVPPPKSRVWYLWKASGPTRKIMKHLPS

SEQ ID NO: 1929 - DNA, 1823 bp, Zea mays subsp. mays
  misc_feature (1)..(1823): Ceres Seq. ID no. 12405830
  misc_feature (1)..(1823): Ortholog of  Ceres SEQ ID NO 13597732 as cited in SEQ ID NO 64810
  misc_feature (1)..(1823): Ortholog of  Ceres SEQ ID NO 14301912 as cited in SEQ ID NO 67786
cccgtccttccctccgcctccgcctccgcccccgcccccgcccacgcccactcctcgctgccaccactcctgtcacctcttcccgcgccgacgcagccgccatggaccccgtcgccacatgggggctaaccccgctcgcgggcgccgacccggagatctacgacctcctggagcgcgagaagcggcgccagcgtcgcggcatcgagctcatcgcctccgagaacttcacctccttcgccgtcatggaggcgctcggctccgcgctcactaacaagtactccgagggcatgcccggcgcccgctactacggcggcaacgacgtcatcgacgagatcgagaacctctgccggtcacgcgcgctcgctgccttccaccttgacgccgcgtcctggggcgtcaacgtgcagccctactcgggctcccccgccaacttcgccgcctacaccgcgctgctcaacccgcacgaccggatcatggggctcgaccttccctccggcggacacctcactcacgggtactacacggccggcggtaagaagatctccgccacctcgatctactttgagagcctgccgtacaaggtgagcgccgcaacggggtacatcgactacgagaagctcgaggagaaggcacttgacttccgccccaagctcatcatctgcggtggcagtgcgtacccgagggactgggattacgccaagctcagggccgtcgccgacaaggtcggggccctgctgctctgcgacatggcgcacatcagcgggctcgtcgccgcgcaggaagctgcaaatccttttgaatattgtgatgtggttaccacaaccacgcacaagtccctcagagggccaagggctggcatgatcttctacaggaaaggccctaagccccccaagaagggccagcctgagggtgctgtttatgattacgaagacaagatcaactttgcagtgttcccatctctccaaggtggccctcacaaccaccagattgctgcacttgctgttgctctacagcaaactatgtcgcctggcttcaaggcctatgcaaagcaagtgaaggccaatgctgttgcaattggaaactatctcatgagcaagggctacaagatggtgactgatggaactgagaaccaccttgttctctgggatctccgcccccttggcttgactggaaacaaggtcgaaaagctatgtgatctttgccacatcacattgaacaagaatgctgtcttcggtgacagcagtgcattgtctccgggtggtgtccgcattggcgcgccagcaatgacctcgaggggtctactggagaaggatttcgagcagattggggagttcctccaccaggcagtgaccatctgcctgaacatccagaaggagtacggcaagctcctcaaggacttcaacaagggcctggtgaacaacaaggacatcgagaacctcaaggtccaggtggagaagtttgccgactccttcgacatgcctgggttcacgcttgagagcatgaaatacaaggagtagatatgcctctttcatgcgcggcaaggtcctcctgtaccgatgtctttccttgtggtggcgcagggtgccatggcactgcattgccgccacacttacgatgatgatgatgggttatggattttgtctacaatgtcagcaggataggctcacaattgccccctgccctccggtttggtcgcctctcaggttttcatttggtagttgttcgcagggaaccatatgagaattgcaatgtcaatcaggtgtttgccaataataattgggtggtttctgctaaaaaaaaaaaaaacaaaaaaaaaaaaaaaa

SEQ ID NO: 1930 - protein, 504 aa, Zea mays subsp. mays
  peptide (1)..(504): Ceres Seq. ID no. 12405831
RPSLRLRLRPRPRPRPLLAATTPVTSSRADAAAMDPVATWGLTPLAGADPEIYDLLEREKRRQRRGIELIASENFTSFAVMEALGSALTNKYSEGMPGARYYGGNDVIDEIENLCRSRALAAFHLDAASWGVNVQPYSGSPANFAAYTALLNPHDRIMGLDLPSGGHLTHGYYTAGGKKISATSIYFESLPYKVSAATGYIDYEKLEEKALDFRPKLIICGGSAYPRDWDYAKLRAVADKVGALLLCDMAHISGLVAAQEAANPFEYCDVVTTTTHKSLRGPRAGMIFYRKGPKPPKKGQPEGAVYDYEDKINFAVFPSLQGGPHNHQIAALAVALQQTMSPGFKAYAKQVKANAVAIGNYLMSKGYKMVTDGTENHLVLWDLRPLGLTGNKVEKLCDLCHITLNKNAVFGDSSALSPGGVRIGAPAMTSRGLLEKDFEQIGEFLHQAVTICLNIQKEYGKLLKDFNKGLVNNKDIENLKVQVEKFADSFDMPGFTLESMKYKE

SEQ ID NO: 1931 - protein, 471 aa, Zea mays subsp. mays
  peptide (1)..(471): Ceres Seq. ID no. 12405832
MDPVATWGLTPLAGADPEIYDLLEREKRRQRRGIELIASENFTSFAVMEALGSALTNKYSEGMPGARYYGGNDVIDEIENLCRSRALAAFHLDAASWGVNVQPYSGSPANFAAYTALLNPHDRIMGLDLPSGGHLTHGYYTAGGKKISATSIYFESLPYKVSAATGYIDYEKLEEKALDFRPKLIICGGSAYPRDWDYAKLRAVADKVGALLLCDMAHISGLVAAQEAANPFEYCDVVTTTTHKSLRGPRAGMIFYRKGPKPPKKGQPEGAVYDYEDKINFAVFPSLQGGPHNHQIAALAVALQQTMSPGFKAYAKQVKANAVAIGNYLMSKGYKMVTDGTENHLVLWDLRPLGLTGNKVEKLCDLCHITLNKNAVFGDSSALSPGGVRIGAPAMTSRGLLEKDFEQIGEFLHQAVTICLNIQKEYGKLLKDFNKGLVNNKDIENLKVQVEKFADSFDMPGFTLESMKYKE

SEQ ID NO: 1932 - protein, 424 aa, Zea mays subsp. mays
  peptide (1)..(424): Ceres Seq. ID no. 12405833
MEALGSALTNKYSEGMPGARYYGGNDVIDEIENLCRSRALAAFHLDAASWGVNVQPYSGSPANFAAYTALLNPHDRIMGLDLPSGGHLTHGYYTAGGKKISATSIYFESLPYKVSAATGYIDYEKLEEKALDFRPKLIICGGSAYPRDWDYAKLRAVADKVGALLLCDMAHISGLVAAQEAANPFEYCDVVTTTTHKSLRGPRAGMIFYRKGPKPPKKGQPEGAVYDYEDKINFAVFPSLQGGPHNHQIAALAVALQQTMSPGFKAYAKQVKANAVAIGNYLMSKGYKMVTDGTENHLVLWDLRPLGLTGNKVEKLCDLCHITLNKNAVFGDSSALSPGGVRIGAPAMTSRGLLEKDFEQIGEFLHQAVTICLNIQKEYGKLLKDFNKGLVNNKDIENLKVQVEKFADSFDMPGFTLESMKYKE

SEQ ID NO: 1933 - DNA, 1492 bp, Zea mays subsp. mays
  misc_feature (1)..(1492): Ceres Seq. ID no. 12349916
  misc_feature (1)..(1492): Ortholog of  Ceres SEQ ID NO 15177079 as cited in SEQ ID NO 51989
  misc_feature (1)..(1492): Ortholog of  Ceres SEQ ID NO 14315354 as cited in SEQ ID NO 58232
  misc_feature (1)..(1492): Ortholog of  Ceres SEQ ID NO 13596392 as cited in SEQ ID NO 62136
  misc_feature (1)..(1492): Ortholog of  Ceres SEQ ID NO 14313244 as cited in SEQ ID NO 66802
  misc_feature (1)..(1492): Ortholog of  Ceres SEQ ID NO 13654360 as cited in SEQ ID NO 67980
  misc_feature (1)..(1492): Ortholog of  Ceres SEQ ID NO 13596394 as cited in SEQ ID NO 68561
ctccccgatttccttccccactctgtcagtctagtgccccgcgcgcgctctctcgccgcctcgccgccggcgacgagcttgagctcgagctcgagctggtttctcgtatcgaagacgcggccgcggtatggatcccatgaacgtagacaacggcggctgcggcggccttgacgcgcagatcgagcagctgatgcagtgccgcccgctcgccgagcaggaggttaaggccctgtgcgagaaggccaaggagatattgatggaggaaagcaacgttcagcctgtcaagagtccagttacaatatgtggtgatatacatggacaattccatgatcttgtagagcttttccgaattggtgggaagtgtccagacaccaattacttatttatgggggattatgtagatcgtggctactattctgttgagactgtcactctgctagtagccactaaaagtgaggtacccacatcgaattacaatccttcgtggaaaccatgagagtcggcagatcacacaggtgtatggattctatgacgaatgtctacgcaagtatggcaatgcaaatctatggaagacatttacggatctttttgattattttcctctgacagctctggtggaatctgagattttctgccttcatggtggcttatccccatcaattgaaaatcttgatagtgtgcgcagcttagatcgagtccaagaggttcctcatgagggacctatgtgcgatcttttatggtcagatccggacgatcgatgtggttggggcatatccccacctggtgctggctacacttttggccaggacatatcggagcagtttaatcacacaaacaatctcaaacttgtagctcgggctcatcaattagttatggagggatataactgggctcatgaacagaaggttgtcaccatattcagtgctccaaactattgctaccgatgcggcaatatggcatccattttggaagttgacgactgcaatagtcacacattcatacagtttgacccagcccctaggagaggcgagccagatgtgacacgaagaacaccggactatttcctttgagttgtggtgttaccaattcccagcttgtgctgtgataatcgatgtcaacgtctgctggatcaagggccagacagaaataacaggggaataccaaagcactatgcgaaacttgaggtcctcattgccattggtcagtgcaagagatgtctgcaatcctgagagaaagcaattgtgccaagccatgcccgagtttcagccttttcaggtgatatagaggagcggacatccatttgttacagctctcgccgccctcccttttatgcactttttacagaggcttggaattggcaaaaaagaccgaactttcaattgtacttctgtagcgtaagcttgtaccaataggcgtgtactaatttgtatcatcattcatccatggcaagacattgttaaactccttttcatcagtaaattaattttttgtt

SEQ ID NO: 1934 - protein, 122 aa, Zea mays subsp. mays
  peptide (1)..(122): Ceres Seq. ID no. 12349917
MDPMNVDNGGCGGLDAQIEQLMQCRPLAEQEVKALCEKAKEILMEESNVQPVKSPVTICGDIHGQFHDLVELFRIGGKCPDTNYLFMGDYVDRGYYSVETVTLLVATKSEVPTSNYNPSWKP

SEQ ID NO: 1935 - protein, 119 aa, Zea mays subsp. mays
  peptide (1)..(119): Ceres Seq. ID no. 12349918
MNVDNGGCGGLDAQIEQLMQCRPLAEQEVKALCEKAKEILMEESNVQPVKSPVTICGDIHGQFHDLVELFRIGGKCPDTNYLFMGDYVDRGYYSVETVTLLVATKSEVPTSNYNPSWKP

SEQ ID NO: 1936 - protein, 115 aa, Zea mays subsp. mays
  peptide (1)..(115): Ceres Seq. ID no. 12349919
MCDLLWSDPDDRCGWGISPPGAGYTFGQDISEQFNHTNNLKLVARAHQLVMEGYNWAHEQKVVTIFSAPNYCYRCGNMASILEVDDCNSHTFIQFDPAPRRGEPDVTRRTPDYFL

SEQ ID NO: 1937 - DNA, 1240 bp, Zea mays subsp. mays
  misc_feature (1)..(1240): Ceres Seq. ID no. 12355975
  misc_feature (1)..(1240): Ortholog of  Ceres SEQ ID NO 14307619 as cited in SEQ ID NO 20411
gctagctatcccctcatcgtcttctcttatcctcactcgcgtagtcgcctccctcctcttctcttccgcggcctggtgcaagaccaagagggaggaggaggccacgatggccggcagcgtcagcaacggcagcgggaagagcctggcgcgctggctgcgggagaacgggttcgacgacgacgccgtggcgcgcatgtccaggcggtgcaggaacctgcacagcctcgacgccggcgaggccccgggcgtgtgggactacctcctgaccggcgtcaagatggagcggcggaagctgcggcacgtggtggccaagtgccccaagctgctcaccctgtccgtggacggcaagctcgcgcccacggtgcagtgcctcgccacgctgcaggccaggcccggggaggtggcgcaggccatcgccaagttcccccagatactgttccacagcgtcgaggagaagctctgcccgctcctcgccttcttccagacgctcggcgtctccgagaggcagctcgccaagctgctcatggtcaacccgcgcctcatcagctacagcatcgaggccaagttctcgcagaccgtcggcttcctcgccggcctcggcgtcgacagggaaggcatgatcggcaagatcctcaccaaggagccgtatatcatggggtacagcgtcgacaagcggttgcgccccactgccgagttcctcaagtcggaagtcgggttacaggggccagatctccagagggtggtcatgaccttccccgatatactgtcgcgagacgtggataagatcctgcggcccaatctggcgttcctacagagccgcggattcagcagggatcaggtcacggcactggtagctggttaccctcctgttctcatcaagagcatcaaacattgcctggagccaaggatcaagttcctggtcgaagagatggggcgggacatgggcgaggtggtaggttacccccagttctttcgccatggcctcaagaggagcctggagtaccgccacaaggtgcttaagcagatgaactcgagctgcagcctcagcgagatgctagactgtaaccacaagaagtttgccatgaaattcggtttggtcgcagcagtttaggtactcaacttttctctagtccaatccaaggtagtttgttttattctcaggtgaatctttccgtttgtaccgtcaggttgtgttgttcttttgaacatttgggcaatgataactaataattcaaggtcc

SEQ ID NO: 1938 - protein, 369 aa, Zea mays subsp. mays
  peptide (1)..(369): Ceres Seq. ID no. 12355976
LAIPSSSSLILTRVVASLLFSSAAWCKTKREEEATMAGSVSNGSGKSLARWLRENGFDDDAVARMSRRCRNLHSLDAGEAPGVWDYLLTGVKMERRKLRHVVAKCPKLLTLSVDGKLAPTVQCLATLQARPGEVAQAIAKFPQILFHSVEEKLCPLLAFFQTLGVSERQLAKLLMVNPRLISYSIEAKFSQTVGFLAGLGVDREGMIGKILTKEPYIMGYSVDKRLRPTAEFLKSEVGLQGPDLQRVVMTFPDILSRDVDKILRPNLAFLQSRGFSRDQVTALVAGYPPVLIKSIKHCLEPRIKFLVEEMGRDMGEVVGYPQFFRHGLKRSLEYRHKVLKQMNSSCSLSEMLDCNHKKFAMKFGLVAAV

SEQ ID NO: 1939 - protein, 334 aa, Zea mays subsp. mays
  peptide (1)..(334): Ceres Seq. ID no. 12355977
MAGSVSNGSGKSLARWLRENGFDDDAVARMSRRCRNLHSLDAGEAPGVWDYLLTGVKMERRKLRHVVAKCPKLLTLSVDGKLAPTVQCLATLQARPGEVAQAIAKFPQILFHSVEEKLCPLLAFFQTLGVSERQLAKLLMVNPRLISYSIEAKFSQTVGFLAGLGVDREGMIGKILTKEPYIMGYSVDKRLRPTAEFLKSEVGLQGPDLQRVVMTFPDILSRDVDKILRPNLAFLQSRGFSRDQVTALVAGYPPVLIKSIKHCLEPRIKFLVEEMGRDMGEVVGYPQFFRHGLKRSLEYRHKVLKQMNSSCSLSEMLDCNHKKFAMKFGLVAAV

SEQ ID NO: 1940 - protein, 305 aa, Zea mays subsp. mays
  peptide (1)..(305): Ceres Seq. ID no. 12355978
MSRRCRNLHSLDAGEAPGVWDYLLTGVKMERRKLRHVVAKCPKLLTLSVDGKLAPTVQCLATLQARPGEVAQAIAKFPQILFHSVEEKLCPLLAFFQTLGVSERQLAKLLMVNPRLISYSIEAKFSQTVGFLAGLGVDREGMIGKILTKEPYIMGYSVDKRLRPTAEFLKSEVGLQGPDLQRVVMTFPDILSRDVDKILRPNLAFLQSRGFSRDQVTALVAGYPPVLIKSIKHCLEPRIKFLVEEMGRDMGEVVGYPQFFRHGLKRSLEYRHKVLKQMNSSCSLSEMLDCNHKKFAMKFGLVAAV

SEQ ID NO: 1941 - DNA, 1411 bp, Zea mays subsp. mays
  misc_feature (1)..(1411): Ceres Seq. ID no. 12357466
  misc_feature (1)..(1411): Ortholog of  Ceres SEQ ID NO 14303531 as cited in SEQ ID NO 67674
agagagagagacaagagagagagagagagagagctaacgatggcgtccagagacgcggccagcagccccaaatcagcgccgcgtcgccatgggccggcggcgcccaagaatggcgccgacctgctcagcccacggttccggtcggctgccgcgctggccggctgggacgaggagtccgtcctccttgccgcgatggtcgtcgacgacaccccagtccgcgactcccgtcgcaagaggcgggcctccacctcctccgtcggcggcagcgccggatccagcaccaggaagaggaggccgcgcaggctgtctccggccaagatcccgccggtggttttcgcgctcgacgacgaaaagtcggacactgcggcagatagcaaatcggaagtgaaggccgccaaggaggaagagaagcctgtccttgtgggcgacaaggaggcgtccggttctggcgagaaagcagtggccgcggcaaacatgccgtgcatggatcggctccgggaggagctctcttgcgcgatttgcctggacatctgctttgagccgaccactacgccttgtggacacagcttctgcatgagatgcttaagacacgctgcagccaagtgcgggaaacggtgtcccaaatgcaggcagttcatcagcagctcgaaatcgtgcaccatcaacactgtgctctggaacaccattcagctcttatttcccagtgaggttgaggcaagaaagggttcgagctcatcaccttcaccatgcgacaaggacgatgtgagagctaataggttctcacaaggtggccccggtatgagaactaggagcaggagcagcggcagcggcttcatcagcagcgagggtaggacaagaagcagcttcatcgaacccggcgccagtgcgaacttcatcgtcagcacatatggcagcgcaagaagcagtaacagcaggaggggcttcgtccctgcctcgcagctgctgttgacaagattagagcaatctgaagatgccgcggcgttggcgtacaggttgcaacaggaggagttcgtgaatgcctttgaggagcctgagcaggagaggcagccacgcgacgccgtgtccacagcacgagacaccctgagagccatggcctcccgggccatccgcctccgtgctagaggctggcctgtttagtactactattgctctgctctgcatggaagttgagacctctgaacatataggcatcggtggggttgatagctctcgacattcactagggactctagaagatgtctgccccacgattgttcacgggaaggcccagcgacagctatgggctcccaactagaggagaagacgcgtaggctcaaagctgctgtcgccggtgagttgtaaaaatgctaaaaatctcattctctaagttttcagatgaagtgcacctagt

SEQ ID NO: 1942 - protein, 385 aa, Zea mays subsp. mays
  peptide (1)..(385): Ceres Seq. ID no. 12357467
RERDKRERERELTMASRDAASSPKSAPRRHGPAAPKNGADLLSPRFRSAAALAGWDEESVLLAAMVVDDTPVRDSRRKRRASTSSVGGSAGSSTRKRRPRRLSPAKIPPVVFALDDEKSDTAADSKSEVKAAKEEEKPVLVGDKEASGSGEKAVAAANMPCMDRLREELSCAICLDICFEPTTTPCGHSFCMRCLRHAAAKCGKRCPKCRQFISSSKSCTINTVLWNTIQLLFPSEVEARKGSSSSPSPCDKDDVRANRFSQGGPGMRTRSRSSGSGFISSEGRTRSSFIEPGASANFIVSTYGSARSSNSRRGFVPASQLLLTRLEQSEDAAALAYRLQQEEFVNAFEEPEQERQPRDAVSTARDTLRAMASRAIRLRARGWPV

SEQ ID NO: 1943 - protein, 372 aa, Zea mays subsp. mays
  peptide (1)..(372): Ceres Seq. ID no. 12357468
MASRDAASSPKSAPRRHGPAAPKNGADLLSPRFRSAAALAGWDEESVLLAAMVVDDTPVRDSRRKRRASTSSVGGSAGSSTRKRRPRRLSPAKIPPVVFALDDEKSDTAADSKSEVKAAKEEEKPVLVGDKEASGSGEKAVAAANMPCMDRLREELSCAICLDICFEPTTTPCGHSFCMRCLRHAAAKCGKRCPKCRQFISSSKSCTINTVLWNTIQLLFPSEVEARKGSSSSPSPCDKDDVRANRFSQGGPGMRTRSRSSGSGFISSEGRTRSSFIEPGASANFIVSTYGSARSSNSRRGFVPASQLLLTRLEQSEDAAALAYRLQQEEFVNAFEEPEQERQPRDAVSTARDTLRAMASRAIRLRARGWPV

SEQ ID NO: 1944 - protein, 321 aa, Zea mays subsp. mays
  peptide (1)..(321): Ceres Seq. ID no. 12357469
MVVDDTPVRDSRRKRRASTSSVGGSAGSSTRKRRPRRLSPAKIPPVVFALDDEKSDTAADSKSEVKAAKEEEKPVLVGDKEASGSGEKAVAAANMPCMDRLREELSCAICLDICFEPTTTPCGHSFCMRCLRHAAAKCGKRCPKCRQFISSSKSCTINTVLWNTIQLLFPSEVEARKGSSSSPSPCDKDDVRANRFSQGGPGMRTRSRSSGSGFISSEGRTRSSFIEPGASANFIVSTYGSARSSNSRRGFVPASQLLLTRLEQSEDAAALAYRLQQEEFVNAFEEPEQERQPRDAVSTARDTLRAMASRAIRLRARGWPV

SEQ ID NO: 1945 - DNA, 1691 bp, Zea mays subsp. mays
  misc_feature (1)..(1691): Ceres Seq. ID no. 12365235
  misc_feature (1)..(1691): Ortholog of  Ceres SEQ ID NO 15177285 as cited in SEQ ID NO 52481
ctgggccgttactagcttagctcatatacgtacgtacgcaggctgcaagtgatcgagaggagcaatataatggctggttcttccatggacactgaagctgcaggcaaggagctcaagcagggcagcggcggcggcggcggctacaccatgccggctactgctcatgcggtggacacagactcgtggcagcaggtggggctgctcctggtgatcggcttcaactgcgcctacgtgctcagcttctccaacctcatgatggtgcccctgggctgggcgtggggcgtcgcctgcctgctgctcgtcggcgccgccgcgtggtacgccaactggctcctcgccggcctccacttcgtcgacggccagaggttcatccgctacagggacctcatgggcttcatattcgggaggaacatgtactacatcacctggttcctgcagttcgcaactctacttctgtgcaacatgggcttcattttgctaggagcaagagcgctcaaggcaatcaacacggagtttacccacaccccagccaggctgcagtggttcatcacggccacgggaatcgtctacttcgccttcgcctacttcgtgccgacgatttctgccatgaggaactggctcgccacgtcggcggcgctgacgttagcttacgacgtcgctctgctggctatcttgatcagagatgggaaatcgaacaagcagaaggactatgacgtccatgccggatcccaagccgagaaggtgttcaacgcgttgggcgccgtcgctgccatcctcgtctgcaacacgtccgggctgctcccggagatacagtcgacggtgcgggagccggcggtgcgcggcatgaggcgggcgctgctgctgcagtacaccgccggcgccgcggggtactacggcatcagcgtggcggggtactgggcgtacgggtcagcggtgtcggagtacctccccaacgagctcggcggcccgaggtgggccgccgtcctcatcaacgccaccgccttcctgcagagcattgtgtcccaacacctgtttacggtgccgatccacgaggcgatggacacgcggctgcagcggctggacgaaggcatattctcccgctacaacctcacgcgccgcgtgcgcgcgggggctcgtcttcggcttcaacgtcttcgtcaccgcgctgttcccgttcatgggggatttcgtcaacctcgtcggctccttagcgctcgtcccgctcaccttcacgttccccagcatggccgtcctcaagatcaaaggcaagagctgtgggagatgtaacagactttggcattggggcatcatagttctgtcctcggctctctgcgttgctaccaccgccgccgccgttcgtttgatcttcaacaatgctaggatctaccacttcttcgccgacatgtagcgagcgagtagtagtgggattgacatgtgtatcgtcaccatgaggtgatagtatggccacttcgttctcaattttttgtttgcttcaagagtggaagggtacggtggtcacttagctcatgtttgataatggcactacatgattaataagcatgcatcatgtacgtagtcatcctatcaaaatttagaaatgagcttattgtaatcgatggaccacctccctctaaccaaacatctctgttttccgtgaaagcttaaaaggcaactcgtgaatgtgttctttt

SEQ ID NO: 1946 - protein, 405 aa, Zea mays subsp. mays
  peptide (1)..(405): Ceres Seq. ID no. 12365236
MAGSSMDTEAAGKELKQGSGGGGGYTMPATAHAVDTDSWQQVGLLLVIGFNCAYVLSFSNLMMVPLGWAWGVACLLLVGAAAWYANWLLAGLHFVDGQRFIRYRDLMGFIFGRNMYYITWFLQFATLLLCNMGFILLGARALKAINTEFTHTPARLQWFITATGIVYFAFAYFVPTISAMRNWLATSAALTLAYDVALLAILIRDGKSNKQKDYDVHAGSQAEKVFNALGAVAAILVCNTSGLLPEIQSTVREPAVRGMRRALLLQYTAGAAGYYGISVAGYWAYGSAVSEYLPNELGGPRWAAVLINATAFLQSIVSQHLFTVPIHEAMDTRLQRLDEGIFSRYNLTRRVRAGARLRLQRLRHRAVPVHGGFRQPRRLLSARPAHLHVPQHGRPQDQRQELWEM

SEQ ID NO: 1947 - protein, 400 aa, Zea mays subsp. mays
  peptide (1)..(400): Ceres Seq. ID no. 12365237
MDTEAAGKELKQGSGGGGGYTMPATAHAVDTDSWQQVGLLLVIGFNCAYVLSFSNLMMVPLGWAWGVACLLLVGAAAWYANWLLAGLHFVDGQRFIRYRDLMGFIFGRNMYYITWFLQFATLLLCNMGFILLGARALKAINTEFTHTPARLQWFITATGIVYFAFAYFVPTISAMRNWLATSAALTLAYDVALLAILIRDGKSNKQKDYDVHAGSQAEKVFNALGAVAAILVCNTSGLLPEIQSTVREPAVRGMRRALLLQYTAGAAGYYGISVAGYWAYGSAVSEYLPNELGGPRWAAVLINATAFLQSIVSQHLFTVPIHEAMDTRLQRLDEGIFSRYNLTRRVRAGARLRLQRLRHRAVPVHGGFRQPRRLLSARPAHLHVPQHGRPQDQRQELWEM

SEQ ID NO: 1948 - protein, 379 aa, Zea mays subsp. mays
  peptide (1)..(379): Ceres Seq. ID no. 12365238
MPATAHAVDTDSWQQVGLLLVIGFNCAYVLSFSNLMMVPLGWAWGVACLLLVGAAAWYANWLLAGLHFVDGQRFIRYRDLMGFIFGRNMYYITWFLQFATLLLCNMGFILLGARALKAINTEFTHTPARLQWFITATGIVYFAFAYFVPTISAMRNWLATSAALTLAYDVALLAILIRDGKSNKQKDYDVHAGSQAEKVFNALGAVAAILVCNTSGLLPEIQSTVREPAVRGMRRALLLQYTAGAAGYYGISVAGYWAYGSAVSEYLPNELGGPRWAAVLINATAFLQSIVSQHLFTVPIHEAMDTRLQRLDEGIFSRYNLTRRVRAGARLRLQRLRHRAVPVHGGFRQPRRLLSARPAHLHVPQHGRPQDQRQELWEM

SEQ ID NO: 1949 - DNA, 1720 bp, Zea mays subsp. mays
  misc_feature (1)..(1720): Ceres Seq. ID no. 12374340
  misc_feature (1)..(1720): Ortholog of  Ceres SEQ ID NO 15178181 as cited in SEQ ID NO 58740
  misc_feature (1)..(1720): Ortholog of  Ceres SEQ ID NO 12614739 as cited in SEQ ID NO 68587
gcacgagaccattacctagaacatcctaatcgaaaaataccttgctgggtcgttgccaaatgccaacgcaggcgccgggcagtgcacgcacatggctgcgcgcgtgggcctgctcccgcacgcgatcctcgtctcctcccgagctctacccacgccccgagctcgcgtcccttatcctcttccacccgtcccttcctacctccgccacgcctcctcctccgcctcccgctcctgccgcgcgtcgccgcgttttgtcgcagtccgcgccatggcttcggggaacccctacgccgccgagctcgccgccgccaagaaggccgttaccctcgccgccaaactctgccagacagttcaacaggatattatgcattctggcgttcaggctaaggcagacaaaagtcctgtcacagttgctgattatggatctcaaatattggtcggtttttccttaaagatggatgtatcatctggaccattttcattggtggctgaagaggactcagatgaattgagaaaagatggcgctgaagaaattttggaagatattactgaccttgtcaatgaaaccatctttgatgatggttcatataacatttcgtttacaaaggaaggtatactctctgcaattgatgatgggaagtctgagggaggtccatctggacgacattgggtgcttgatccgattgacggtactaaaggtttcttgaggggcgaccaatatgccattgcattggctctgcttgatgaaggtaaagttgttttgggtgtattggcttgtccaaatcttccattgtcatcaataaacaacatcaatggtaactcttcgggagataaagttggtgccctgttttctgctacaattggttgtggggctgaagtagagtccttagatggctctccaccacaaaagattagtgtttgctccatcgacaatcctgtcaatgcatcattttttgaatcctatgaaagtgcacactccatgcatgatttgactggctctattgcagagaaacttggtgtccaagctcctccagttagaatcgacagccaagcaaaatatggtgctctggcccgaggtgatggcgccatttacttgcgctttccacacaaaggttatagagagaaaatatgggaccatgcagcaggatcaattgtcgtgacagaagctggaggcatagtaacagatgctgcgggaaacgacttggatttctccaaagggagatttctcgatctcgacacaggcatcatcgcaaccaacaaggagttgatgccgtcgctcctgaaagctgtccaagaggctattaaagagacgaaccaggctgcctccctcttatagctgttgtagtggtcgacaaaaaagtagttgcaaaattttcgtactggcaaacagcattgctagaagtggacaacatgaataatttgagcatcatcaagacaggcgagcgcttggtgccggtgctcctaaaggccatccaagaggttatcaaggagaaagttgagcagtcgtaatgatgaacagaaattttagttgcacgtgacttacatatttcagctgtaccacttttgatcagacacgttcccagtgggtgcttagcagataacagttcttttactgaatactgtaaaagccttttttttcaaaaataaactaggtttcctccgttttcaaaaaaaaaaaaaaaaaaaaaaaaaaaaaaaaaaaagaaaaaaaaaaaaaaaa

SEQ ID NO: 1950 - protein, 414 aa, Zea mays subsp. mays
  peptide (1)..(414): Ceres Seq. ID no. 12374341
MAARVGLLPHAILVSSRALPTPRARVPYPLPPVPSYLRHASSSASRSCRASPRFVAVRAMASGNPYAAELAAAKKAVTLAAKLCQTVQQDIMHSGVQAKADKSPVTVADYGSQILVGFSLKMDVSSGPFSLVAEEDSDELRKDGAEEILEDITDLVNETIFDDGSYNISFTKEGILSAIDDGKSEGGPSGRHWVLDPIDGTKGFLRGDQYAIALALLDEGKVVLGVLACPNLPLSSINNINGNSSGDKVGALFSATIGCGAEVESLDGSPPQKISVCSIDNPVNASFFESYESAHSMHDLTGSIAEKLGVQAPPVRIDSQAKYGALARGDGAIYLRFPHKGYREKIWDHAAGSIVVTEAGGIVTDAAGNDLDFSKGRFLDLDTGIIATNKELMPSLLKAVQEAIKETNQAASLL

SEQ ID NO: 1951 - protein, 355 aa, Zea mays subsp. mays
  peptide (1)..(355): Ceres Seq. ID no. 12374342
MASGNPYAAELAAAKKAVTLAAKLCQTVQQDIMHSGVQAKADKSPVTVADYGSQILVGFSLKMDVSSGPFSLVAEEDSDELRKDGAEEILEDITDLVNETIFDDGSYNISFTKEGILSAIDDGKSEGGPSGRHWVLDPIDGTKGFLRGDQYAIALALLDEGKVVLGVLACPNLPLSSINNINGNSSGDKVGALFSATIGCGAEVESLDGSPPQKISVCSIDNPVNASFFESYESAHSMHDLTGSIAEKLGVQAPPVRIDSQAKYGALARGDGAIYLRFPHKGYREKIWDHAAGSIVVTEAGGIVTDAAGNDLDFSKGRFLDLDTGIIATNKELMPSLLKAVQEAIKETNQAASLL

SEQ ID NO: 1952 - protein, 323 aa, Zea mays subsp. mays
  peptide (1)..(323): Ceres Seq. ID no. 12374343
MHSGVQAKADKSPVTVADYGSQILVGFSLKMDVSSGPFSLVAEEDSDELRKDGAEEILEDITDLVNETIFDDGSYNISFTKEGILSAIDDGKSEGGPSGRHWVLDPIDGTKGFLRGDQYAIALALLDEGKVVLGVLACPNLPLSSINNINGNSSGDKVGALFSATIGCGAEVESLDGSPPQKISVCSIDNPVNASFFESYESAHSMHDLTGSIAEKLGVQAPPVRIDSQAKYGALARGDGAIYLRFPHKGYREKIWDHAAGSIVVTEAGGIVTDAAGNDLDFSKGRFLDLDTGIIATNKELMPSLLKAVQEAIKETNQAASLL

SEQ ID NO: 1953 - DNA, 1081 bp, Zea mays subsp. mays
  misc_feature (1)..(1081): Ceres Seq. ID no. 12373946
  misc_feature (1)..(1081): Ortholog of  Ceres SEQ ID NO 12610607 as cited in SEQ ID NO 56214
  misc_feature (1)..(1081): Ortholog of  Ceres SEQ ID NO 13664294 as cited in SEQ ID NO 61328
  misc_feature (1)..(1081): Ortholog of  Ceres SEQ ID NO 13596425 as cited in SEQ ID NO 62039
gcactccgcaagacgcaagaccacctcaccagcctcctcgtccccgatctcctcccacccgcatccaagggtttccttctcgaccgtgcggaacgagccagagaacaggtatggcggcggcgcggcacctcagatccggcctccccctcctccgcgcccacctcgcatcctccgaatccgcggccgtcgctcaggtttcgaggggcttcgcgtcgcaggccgccaagcccaccgggaaggagatcaaggttccaaaggctctgtttggcggcacaggcaactatgccagtgcactgttcctcacagcagctaaatctaatgcattggacaaagttgaatctgagattaaagctattgtagaggcttccaagaagagcccgttgttttctcaattcataaaggacttgtcagttccaaaagcgaccagggtgaaggctatagccgaaatatttgctgacgctgggttttcagatgttacaaagaatttcttggctgtcctggcggacaatggcaggctgaaatatattgaacgcattgcggagagatttgttgatttgactatggaacataagggggagatgaaggttgtggtcaggacagttatttcactcaccaaggaggaggagaaagaactcaaggaaaccttgcaggatatccttggggaaaacaaaactattttggttgaacagaagattgactacagcatcatgggaggattagtgattgaattcgggcagaaggtgcttgatatctcaatcaggaacagggcgaagcaaatggaggcgttcttgaggcaaccacttgacttctaacagccttttggataaaagaagcatcatcggaatgcagaggctgtcctgttgaaggttttcctgtgtctgcaattttaatctgtccttttgaataaaatgtttcctctaacaagtgaagggcactgtttttattgtctcgtgggccacagatgcctgctgaacaatttatgttcatttcttcttttcttaaagaagcatgcactaagaacatgaaggatgcatgtcatgaaagtttttgaaagtcattgaaacttatgagctcctcatgc

SEQ ID NO: 1954 - protein, 269 aa, Zea mays subsp. mays
  peptide (1)..(269): Ceres Seq. ID no. 12373947
TPQDARPPHQPPRPRSPPTRIQGFPSRPCGTSQRTGMAAARHLRSGLPLLRAHLASSESAAVAQVSRGFASQAAKPTGKEIKVPKALFGGTGNYASALFLTAAKSNALDKVESEIKAIVEASKKSPLFSQFIKDLSVPKATRVKAIAEIFADAGFSDVTKNFLAVLADNGRLKYIERIAERFVDLTMEHKGEMKVVVRTVISLTKEEEKELKETLQDILGENKTILVEQKIDYSIMGGLVIEFGQKVLDISIRNRAKQMEAFLRQPLDF

SEQ ID NO: 1955 - protein, 233 aa, Zea mays subsp. mays
  peptide (1)..(233): Ceres Seq. ID no. 12373948
MAAARHLRSGLPLLRAHLASSESAAVAQVSRGFASQAAKPTGKEIKVPKALFGGTGNYASALFLTAAKSNALDKVESEIKAIVEASKKSPLFSQFIKDLSVPKATRVKAIAEIFADAGFSDVTKNFLAVLADNGRLKYIERIAERFVDLTMEHKGEMKVVVRTVISLTKEEEKELKETLQDILGENKTILVEQKIDYSIMGGLVIEFGQKVLDISIRNRAKQMEAFLRQPLDF

SEQ ID NO: 1956 - DNA, 1542 bp, Zea mays subsp. mays
  misc_feature (1)..(1542): Ceres Seq. ID no. 12341469
  misc_feature (1)..(1542): Ortholog of  Ceres SEQ ID NO 13591224 as cited in SEQ ID NO 64140
ccggccccaccggccagtgatacgcactcctcccctcaaagccctagccagacgccgccgccgcacccgatctggctgcctcggtcgatttctaattctcctcgcgagcccaaaccctaaacctaaacctttcacccgccgccgccgccaccaccagcactgccactccgccaccaccgtcccgaagccccctcccagcgccatcgacttcatctcggattgaagcaatgtcgtcggacgatgaggtcagggaggagaaggagctcgacctctcctccaacgacgttgtcaccaagtacaaggctgccgccgaaatcctcaacaacgctctgaagattgttgtgtctcagtgcaagccaaaagtcaagattgttgacctttgcgagaagggcgactctttcataagagagcaaactgggaatgtttacaagaacgcaaagaggaagattgaaaggggtattgctttcccaacctgtgtatccgtcaatgacacagtttgccacttctcaccgcttgcaaccgatgatgccgttctggaagaaaatgacatggttaaaattgatatgggctgtcatattgatggctttattgctgtggtggcacatacacatgtaattacaaatgggcctgtcacaggaagggctggtgatgtgcttgctgctgccaacacagcagcagaagtcgcaatgcggcttgtgagacctgggaagaaaaataaggatgttactgaagcaattcagaaagttgctgctgcttatgattgcaaaattgtggaaggtgttcttagccatcaactgaaacaatttgtgattgatggtaacaaagttgtgctcagtgtctccaatgctgatacaaaggttgatgatgctgaatttgaagaaaatgaagtatatgcaatcgatattgtcaccagcactggggaggggaagcccaagttattggatgagaaacagaccaccatctacaaaagggccgtagacaagaattatcacttgaagatgaaagcgtcaaggtttattttcagtgagatcagccagaagttcccaatcatgccttttactgctagggcattagaagagaagcgtgcgcgtttaggcttggtggaatgcatgaaccatgaactattgcagccgtaccctgtacttcatgagaagccaggcgatcttgttgcacacataaagttcactgtgctgctgatgcccaatggatcagataagataacatcacatcctctacaggagttaaagcccaccaaatccattgaagacaatgcagagataaaggcatggcttgctttggggacgaaatcaaagaagaagggtggtgggaagaagaagaaaggcaagaaaggagatgcagcagaagcagatcccatggaggaggcgacaaacggtgctacaagccaagaataattctgatttttggaattactgccaccagcttttttcttgtttcttcgctgcatctgatggtgttatattacattcagttgtggaaaaattgagtactatttctagcttctaagaaatgaagcatcctatt

SEQ ID NO: 1957 - protein, 394 aa, Zea mays subsp. mays
  peptide (1)..(394): Ceres Seq. ID no. 12341470
MSSDDEVREEKELDLSSNDVVTKYKAAAEILNNALKIVVSQCKPKVKIVDLCEKGDSFIREQTGNVYKNAKRKIERGIAFPTCVSVNDTVCHFSPLATDDAVLEENDMVKIDMGCHIDGFIAVVAHTHVITNGPVTGRAGDVLAAANTAAEVAMRLVRPGKKNKDVTEAIQKVAAAYDCKIVEGVLSHQLKQFVIDGNKVVLSVSNADTKVDDAEFEENEVYAIDIVTSTGEGKPKLLDEKQTTIYKRAVDKNYHLKMKASRFIFSEISQKFPIMPFTARALEEKRARLGLVECMNHELLQPYPVLHEKPGDLVAHIKFTVLLMPNGSDKITSHPLQELKPTKSIEDNAEIKAWLALGTKSKKKGGGKKKKGKKGDAAEADPMEEATNGATSQE

SEQ ID NO: 1958 - protein, 287 aa, Zea mays subsp. mays
  peptide (1)..(287): Ceres Seq. ID no. 12341471
MVKIDMGCHIDGFIAVVAHTHVITNGPVTGRAGDVLAAANTAAEVAMRLVRPGKKNKDVTEAIQKVAAAYDCKIVEGVLSHQLKQFVIDGNKVVLSVSNADTKVDDAEFEENEVYAIDIVTSTGEGKPKLLDEKQTTIYKRAVDKNYHLKMKASRFIFSEISQKFPIMPFTARALEEKRARLGLVECMNHELLQPYPVLHEKPGDLVAHIKFTVLLMPNGSDKITSHPLQELKPTKSIEDNAEIKAWLALGTKSKKKGGGKKKKGKKGDAAEADPMEEATNGATSQE

SEQ ID NO: 1959 - protein, 282 aa, Zea mays subsp. mays
  peptide (1)..(282): Ceres Seq. ID no. 12341472
MGCHIDGFIAVVAHTHVITNGPVTGRAGDVLAAANTAAEVAMRLVRPGKKNKDVTEAIQKVAAAYDCKIVEGVLSHQLKQFVIDGNKVVLSVSNADTKVDDAEFEENEVYAIDIVTSTGEGKPKLLDEKQTTIYKRAVDKNYHLKMKASRFIFSEISQKFPIMPFTARALEEKRARLGLVECMNHELLQPYPVLHEKPGDLVAHIKFTVLLMPNGSDKITSHPLQELKPTKSIEDNAEIKAWLALGTKSKKKGGGKKKKGKKGDAAEADPMEEATNGATSQE

SEQ ID NO: 1960 - DNA, 2031 bp, Zea mays subsp. mays
  misc_feature (1)..(2031): Ceres Seq. ID no. 12348893
  misc_feature (1)..(2031): Ortholog of  Ceres SEQ ID NO 15171626 as cited in SEQ ID NO 57201
atcaggcccacgctttgttaacaaagaattccctcatagccgccgccgccgccgccgccgccgctcatctcgccgagaggtgacgggaccgaggaactcgccgagttctaagatagagaatcgcttttcacagcctggggtctgctgcgtagggtggtgttgaaggggagaagtttaagatctgttccacagatcacgcgtgcgcgctcgcgaatcgggggttccacacatagcttcgtcgttttgaatttgatgtactaatggagtctaagggtggcaagaagtctagcagtagtcgttccatgatgtatgaagctccccttggctacagcattgaggacgttcgacctgccggaggcgcgaagaagttccagtctgctgcttactccaactgcgcaaagaagccatcctgatatcccttttggcttcctcgttctagtagtttaggatttcttttctgacacttcgattcttaccaatccccctggcctgctgctttcctgacaatcgaccagttccccagtcttgctccctgcagtcctccctcctccatctccagcgttgtgttctgactcacctgcaccaatggctgttctttctgctgctggtgctcccccggcctcagctatcgggtttgagggctatgagaagcgccttgagatcacattctctgaggcacctgtctttgtggacccccatggcagcggtttgcgtgccctctccaggtcccagattgactctgttctggatcttgcacggtgcacgatcgtgtccgagctctccaacaaggattttgactcctatgttctctccgagtcaagcttgttcatctatcctctgaagattgtcatcaagacctgtggcactaccaagctcctgctcacaattccaaggatcctagagcttgctgaagagctgtctatgcctcttgctgctgtgaagtactcccgcgggacgttcatctttcctggcgcacagccagccccccaccggagcttctccgaggaagttgctgtacttaaccgatactttgggggcctgaagtctggtggcaatgcttatgtgattggagatgcagcaagaccaggacagaagtggcacatctactacgccactgagtacccagagcaaccaatggtcaaccttgagatgtgcatgactggtctggacacgaagaaagcttcagtcttcttcaagactaatgctgatggcaacacaacatgtgccaaggaaatgacgaagctctctggtatctctgaaattatccctgagatggagatctgtgattttgacttcgaaccctgcggctactccatgaatgcaatccatggctctgcgttctccacgatccatgtgacgcctgaggatgggttcagctacgccagttatgaggttatgggcttggatgccactgccctgtcttacggtgaccttgtcaagagggtccttgggtgcttcggcccctcggaattttctgtcgccgtgaccatcttcggcgggcggggccaagctgggacatggggaaaggaacttggtgcggaggcttatgactgcaacaacatggtcgagcaggagctgcctggaggtgggatcctcatctaccagagcttctgtgctgctgaagacgccgttgctagctcgcccaaatccgttcttcgctgctttgatggcgagaatgcagcaccttttgcgaaggactgcaagctggctaatcttgtctgcttggaggaagttggatgctatcgaggagaaggatggagtgcttgatgagtaagacgggtttctggtgtcgatttgcttctgagtttttttctttttatatcgttgcgatctcgtggttgtcgtttggttagcagccaagccaggctattagtacgaagaatgtcgtctataaacatgtgttcctacgttgccacatgctgagtcaatctgtatacagctagctctaggtggtcagctgcgtctaccacaatgagcatacatgtatggataaatcttctgtgaaagcattcgatgaataagggttgttct

SEQ ID NO: 1961 - protein, 393 aa, Zea mays subsp. mays
  peptide (1)..(393): Ceres Seq. ID no. 12348894
MAVLSAAGAPPASAIGFEGYEKRLEITFSEAPVFVDPHGSGLRALSRSQIDSVLDLARCTIVSELSNKDFDSYVLSESSLFIYPLKIVIKTCGTTKLLLTIPRILELAEELSMPLAAVKYSRGTFIFPGAQPAPHRSFSEEVAVLNRYFGGLKSGGNAYVIGDAARPGQKWHIYYATEYPEQPMVNLEMCMTGLDTKKASVFFKTNADGNTTCAKEMTKLSGISEIIPEMEICDFDFEPCGYSMNAIHGSAFSTIHVTPEDGFSYASYEVMGLDATALSYGDLVKRVLGCFGPSEFSVAVTIFGGRGQAGTWGKELGAEAYDCNNMVEQELPGGGILIYQSFCAAEDAVASSPKSVLRCFDGENAAPFAKDCKLANLVCLEEVGCYRGEGWSA

SEQ ID NO: 1962 - protein, 281 aa, Zea mays subsp. mays
  peptide (1)..(281): Ceres Seq. ID no. 12348895
MPLAAVKYSRGTFIFPGAQPAPHRSFSEEVAVLNRYFGGLKSGGNAYVIGDAARPGQKWHIYYATEYPEQPMVNLEMCMTGLDTKKASVFFKTNADGNTTCAKEMTKLSGISEIIPEMEICDFDFEPCGYSMNAIHGSAFSTIHVTPEDGFSYASYEVMGLDATALSYGDLVKRVLGCFGPSEFSVAVTIFGGRGQAGTWGKELGAEAYDCNNMVEQELPGGGILIYQSFCAAEDAVASSPKSVLRCFDGENAAPFAKDCKLANLVCLEEVGCYRGEGWSA

SEQ ID NO: 1963 - protein, 210 aa, Zea mays subsp. mays
  peptide (1)..(210): Ceres Seq. ID no. 12348896
MVNLEMCMTGLDTKKASVFFKTNADGNTTCAKEMTKLSGISEIIPEMEICDFDFEPCGYSMNAIHGSAFSTIHVTPEDGFSYASYEVMGLDATALSYGDLVKRVLGCFGPSEFSVAVTIFGGRGQAGTWGKELGAEAYDCNNMVEQELPGGGILIYQSFCAAEDAVASSPKSVLRCFDGENAAPFAKDCKLANLVCLEEVGCYRGEGWSA

SEQ ID NO: 1964 - DNA, 1078 bp, Zea mays subsp. mays
  misc_feature (1)..(1078): Ceres Seq. ID no. 12341568
  misc_feature (1)..(1078): Ortholog of  Ceres SEQ ID NO 12625805 as cited in SEQ ID NO 65246
gtaccaggctataccagcatcagcgaagagccggcgttcttgagacttgagagaggagagcgaccgacgacctcgaagcttggcctgcgcggtggtgacgatggatgtcaaatgccggcgtctggaggggaaggtggccgtcgtgacggcgtccacgcaggggatcggcctagccatcgccgagcgcctcggcctggagggcgccgccgccgtcgtctcctcccgcaagcagaagaacgtggacgaggccgtggaggggctcaaggccaaggggatcaccgtggtgggcgccgtctgccacgtatccgacgcacagcaacgcaagaacatcatcgagacggccgtcaagaactttgggcacattgatattcttgtctccaacgctgctgcaaatcctactgtgaatgtcatacttgaaatgaaagaggttgttctcgataagttgtgggatattaacgtcaaggcttctattcttcttattcaggatgctgctccccacctacgggcagggtcatctgtgatccttatttcttcaattgctggttacaatcctgagcaaggattgacaatgtatggtgttacaaagaccgctctctttggtctcacaaaggctcttgctggtgagatgggacccgatattcgtgttaattgtatagcccctggttttgttccgacacggtttgctagtttcttcatagacaacgagaccattaggaaaaagcttaacgagaggactatgcttaagagattgggttccgtggaagatatggcggcagctgccgcattcctggcatctgacgatgcatcattcatcacagctgaaaccattgttgttgctggaggggtgccgtcgagattgtaaatttggctcaagtttgtaccgattgttactaggttggtgacatagcaactatactgtaataatccactctgaaaatgtgggtcgtgctaagttggccaccgttagatctaataattttttaggtgtcttggtatttgtttgagataataatctactcagattatctgtcacttagttcaaattttattggattatataatataaatagataatccc

SEQ ID NO: 1965 - protein, 253 aa, Zea mays subsp. mays
  peptide (1)..(253): Ceres Seq. ID no. 12341569
MDVKCRRLEGKVAVVTASTQGIGLAIAERLGLEGAAAVVSSRKQKNVDEAVEGLKAKGITVVGAVCHVSDAQQRKNIIETAVKNFGHIDILVSNAAANPTVNVILEMKEVVLDKLWDINVKASILLIQDAAPHLRAGSSVILISSIAGYNPEQGLTMYGVTKTALFGLTKALAGEMGPDIRVNCIAPGFVPTRFASFFIDNETIRKKLNERTMLKRLGSVEDMAAAAAFLASDDASFITAETIVVAGGVPSRL

SEQ ID NO: 1966 - protein, 147 aa, Zea mays subsp. mays
  peptide (1)..(147): Ceres Seq. ID no. 12341570
MKEVVLDKLWDINVKASILLIQDAAPHLRAGSSVILISSIAGYNPEQGLTMYGVTKTALFGLTKALAGEMGPDIRVNCIAPGFVPTRFASFFIDNETIRKKLNERTMLKRLGSVEDMAAAAAFLASDDASFITAETIVVAGGVPSRL

SEQ ID NO: 1967 - DNA, 1270 bp, Zea mays subsp. mays
  misc_feature (1)..(1270): Ceres Seq. ID no. 12410926
  misc_feature (1)..(1270): Ortholog of  Ceres SEQ ID NO 14313518 as cited in SEQ ID NO 64228
agaaacccccttccttcccattcccactgctcggattgctttccccacctccaccgccaccagaccagatagcaagcaaccgacccctcctcgctgtattcgcagggaaggagaagatggagcctggccagagcgggactgagcaggcctctccacgcgggaacgattgggaggtcgtgcagctcaccgcgtccgcatacgccgccgcgcccgctccgaggaagcccgagccctccgacgaagcggaagctaagagatacggcgcaaagggggacgatctagccgccggcctactcatgtccggccacttctccgtgtctcagagcgaggtcgagagcctcctcgtaggcgccgacaccaaagaaccaccgcccaaggacaaggaggagccttgcgagcatactaagctgctggaggacgacgtccccaccatcccgttcgatgacggcaaggcgctgaaaggcatgggtctggtcggggaagagccggccgggttctcgtcgcctgtctacagctccatcacggagagcaggagtgacaagaggagcgaggagcctactactctgcatagtttgaaccccgtgactggctcaacaaaggtcgtctcacctgacgagcagagcgagcctgctgctgggtctgggtccgggtctgggtcaggcccgcgtgaagcgtggtggaagaagcagcttctctccctttacaggaacgccaaggagagcaagcatctctggcctatcgtcgccaccactgctgctttggtgggcctggcgtatctggggcggcgctggcataagggcaggctgcactttcagctgctcaagatatcgccgtctaccaacaacgagaaaatcagcgacgcggttggaccgttaaaccgcatcaacgacattctcgttgctggcaaccacccaagtcacggtgtccatgggcatgcccgtgcaggctgaatgcagtcagttcgcgaacccatcgggcgtcctggacccatatactatcatgtgtcgctttgagaatcggctcaagacaaaccatcgggcaggactggagtagttgtccaaggactgaggatgtttatgcagacacaagtatgtttggtggctcgatgtatgtgaattccaaaactccatctgggtatgtaaatatttgtatgggtttagtttggttgctttttcgtttggtcatctcatgaaacctctgctggtggtttccttgtctatattactgtcttatttggggttcgttcatgcatgcatacatgtgatggggc

SEQ ID NO: 1968 - protein, 315 aa, Zea mays subsp. mays
  peptide (1)..(315): Ceres Seq. ID no. 12410927
KPPSFPFPLLGLLSPPPPPPDQIASNRPLLAVFAGKEKMEPGQSGTEQASPRGNDWEVVQLTASAYAAAPAPRKPEPSDEAEAKRYGAKGDDLAAGLLMSGHFSVSQSEVESLLVGADTKEPPPKDKEEPCEHTKLLEDDVPTIPFDDGKALKGMGLVGEEPAGFSSPVYSSITESRSDKRSEEPTTLHSLNPVTGSTKVVSPDEQSEPAAGSGSGSGSGPREAWWKKQLLSLYRNAKESKHLWPIVATTAALVGLAYLGRRWHKGRLHFQLLKISPSTNNEKISDAVGPLNRINDILVAGNHPSHGVHGHARAG

SEQ ID NO: 1969 - protein, 277 aa, Zea mays subsp. mays
  peptide (1)..(277): Ceres Seq. ID no. 12410928
MEPGQSGTEQASPRGNDWEVVQLTASAYAAAPAPRKPEPSDEAEAKRYGAKGDDLAAGLLMSGHFSVSQSEVESLLVGADTKEPPPKDKEEPCEHTKLLEDDVPTIPFDDGKALKGMGLVGEEPAGFSSPVYSSITESRSDKRSEEPTTLHSLNPVTGSTKVVSPDEQSEPAAGSGSGSGSGPREAWWKKQLLSLYRNAKESKHLWPIVATTAALVGLAYLGRRWHKGRLHFQLLKISPSTNNEKISDAVGPLNRINDILVAGNHPSHGVHGHARAG

SEQ ID NO: 1970 - protein, 217 aa, Zea mays subsp. mays
  peptide (1)..(217): Ceres Seq. ID no. 12410929
MSGHFSVSQSEVESLLVGADTKEPPPKDKEEPCEHTKLLEDDVPTIPFDDGKALKGMGLVGEEPAGFSSPVYSSITESRSDKRSEEPTTLHSLNPVTGSTKVVSPDEQSEPAAGSGSGSGSGPREAWWKKQLLSLYRNAKESKHLWPIVATTAALVGLAYLGRRWHKGRLHFQLLKISPSTNNEKISDAVGPLNRINDILVAGNHPSHGVHGHARAG

SEQ ID NO: 1971 - DNA, 700 bp, Zea mays subsp. mays
  misc_feature (1)..(700): Ceres Seq. ID no. 13494781
  misc_feature (1)..(700): Ortholog of  Ceres SEQ ID NO 14308586 as cited in SEQ ID NO 55143
  misc_feature (1)..(700): Ortholog of  Ceres SEQ ID NO 14314308 as cited in SEQ ID NO 57259
  misc_feature (1)..(700): Ortholog of  Ceres SEQ ID NO 15226216 as cited in SEQ ID NO 62291
gatcagcgaacggaagaccgtggaagcaaagaggcgcaagcgagcacggaacaaatacaccttcaggtggcctccctccgactgccgactgaatcttccacctcgcttcgcgcctccggctccgcgccgggcccgcataatctgtgctcgggatcgcctcttcccgcggcaaatgggggccgactccgaggacgccgtcaagcagctcagcctcctcatggagcaagtggaggccccgctgaagagatcgtttcagaatatgcaccagggctatcctaaagaaacactggtgcgtttccttaaggctagagagtggaatgtagcaaaggctcataaaatgattgtagaatgtttgaattggaggattcaaaatgaaattgatagtgtgctagagaggcctatagtcccagtagatttatacaggtcaatacgtgattcacaacttattggcctgtcaggatacacaaaggagggtctcccaatttttggcattggtgttggacatagcacatatgacaaagcttcggtccactactatgtgcaatctcatatccagattaacgagtaccgtgatcgtataattttgcctaggctgacacaacagtttgggcggcctgttaccagctgtataaaagtgctggatatgactggtttgaagctatcagcactaagccaaataaagatgttgacttccatatcg

SEQ ID NO: 1972 - protein, 233 aa, Zea mays subsp. mays
  peptide (1)..(233): Ceres Seq. ID no. 13494782
ISERKTVEAKRRKRARNKYTFRWPPSDCRLNLPPRFAPPAPRRARIICARDRLFPRQMGADSEDAVKQLSLLMEQVEAPLKRSFQNMHQGYPKETLVRFLKAREWNVAKAHKMIVECLNWRIQNEIDSVLERPIVPVDLYRSIRDSQLIGLSGYTKEGLPIFGIGVGHSTYDKASVHYYVQSHIQINEYRDRIILPRLTQQFGRPVTSCIKVLDMTGLKLSALSQIKMLTSIS

SEQ ID NO: 1973 - protein, 176 aa, Zea mays subsp. mays
  peptide (1)..(176): Ceres Seq. ID no. 13494783
MGADSEDAVKQLSLLMEQVEAPLKRSFQNMHQGYPKETLVRFLKAREWNVAKAHKMIVECLNWRIQNEIDSVLERPIVPVDLYRSIRDSQLIGLSGYTKEGLPIFGIGVGHSTYDKASVHYYVQSHIQINEYRDRIILPRLTQQFGRPVTSCIKVLDMTGLKLSALSQIKMLTSIS

SEQ ID NO: 1974 - protein, 161 aa, Zea mays subsp. mays
  peptide (1)..(161): Ceres Seq. ID no. 13494784
MEQVEAPLKRSFQNMHQGYPKETLVRFLKAREWNVAKAHKMIVECLNWRIQNEIDSVLERPIVPVDLYRSIRDSQLIGLSGYTKEGLPIFGIGVGHSTYDKASVHYYVQSHIQINEYRDRIILPRLTQQFGRPVTSCIKVLDMTGLKLSALSQIKMLTSIS

SEQ ID NO: 1975 - DNA, 1185 bp, Zea mays subsp. mays
  misc_feature (1)..(1185): Ceres Seq. ID no. 12588534
  misc_feature (1)..(1185): Ortholog of  Ceres SEQ ID NO 13581327 as cited in SEQ ID NO 51165
  misc_feature (1)..(1185): Ortholog of  Ceres SEQ ID NO 12610002 as cited in SEQ ID NO 55823
  misc_feature (1)..(1185): Ortholog of  Ceres SEQ ID NO 14308310 as cited in SEQ ID NO 58573
  misc_feature (1)..(1185): Ortholog of  Ceres SEQ ID NO 14308795 as cited in SEQ ID NO 59140
  misc_feature (1)..(1185): Ortholog of  Ceres SEQ ID NO 14313354 as cited in SEQ ID NO 61520
  misc_feature (1)..(1185): Ortholog of  Ceres SEQ ID NO 13596744 as cited in SEQ ID NO 62765
catcgcgagcacccacccacctttgcttgcacggcccgcccattcaccggttgaggggagaagggagaggagaggtagctcagtcctcctctgaccgccgacccatccgccatggccgcctcctacgaccgcgagttctggaacttcagcgaccagctgcgcctgcacaacaacttctccaacctctccatcgccgaccctatctggtcctccaccacactggatcctccctcctccttcagcgacgccccgggcctcataggatccgccaagctcgcctttggcaacgccaccacggccaacgccgaccgctacaacgccaacgccgccggtgtcgccagcaagagcatgagcgtgggcatgatcgaccactacctcaacaagaacactaacaacgacgtcgtcaagagctacttcaacaagtccgtcggcagcaggccggccaacaacaacaccaccacaaccgtcaagaagaactccgccgcccaccacgacaagaagcacaagaactccggcaacggcgccggcgtcgacaagaggttcaagagcctgccggcggcggaggcgctgcccaggggcgaggccatcggcggctacatcttcgtctgcaacaacgacaccatggaggagaacctcaagaggcggctcttcgggctgccgtccaggtacagggattctgtgagggccatcaggcccggcctgcccctcttcctctacaactactccacccaccagctccacggcatctttgaggctgcaagcttcggaggatccaacatcgatccagcagcttgggaggacaagaagtgccccggcgagtcccgcttccctgctcaggtgagggttgcaacgcgcaagatctgttcgccgctggaggaggacgctttccgccccatcctccaccactacgacggccccaagttcaggctggagctcagtgtccctgaggcgctctcccttcttgatatatttgcggagaagatttttgacagacagacagcctgatgtctccatacttgcttccagttccagaggagtagtacatgtataatataaatataatatgctgattaccgacatctgattatctattctagtataagttacactcgaacttaggccctctttggaattatagtatttttatagttttaaaacaatactatgttatttggngatactata

SEQ ID NO: 1976 - protein, 297 aa, Zea mays subsp. mays
  peptide (1)..(297): Ceres Seq. ID no. 12588535
MAASYDREFWNFSDQLRLHNNFSNLSIADPIWSSTTLDPPSSFSDAPGLIGSAKLAFGNATTANADRYNANAAGVASKSMSVGMIDHYLNKNTNNDVVKSYFNKSVGSRPANNNTTTTVKKNSAAHHDKKHKNSGNGAGVDKRFKSLPAAEALPRGEAIGGYIFVCNNDTMEENLKRRLFGLPSRYRDSVRAIRPGLPLFLYNYSTHQLHGIFEAASFGGSNIDPAAWEDKKCPGESRFPAQVRVATRKICSPLEEDAFRPILHHYDGPKFRLELSVPEALSLLDIFAEKIFDRQTA

SEQ ID NO: 1977 - protein, 218 aa, Zea mays subsp. mays
  peptide (1)..(218): Ceres Seq. ID no. 12588536
MSVGMIDHYLNKNTNNDVVKSYFNKSVGSRPANNNTTTTVKKNSAAHHDKKHKNSGNGAGVDKRFKSLPAAEALPRGEAIGGYIFVCNNDTMEENLKRRLFGLPSRYRDSVRAIRPGLPLFLYNYSTHQLHGIFEAASFGGSNIDPAAWEDKKCPGESRFPAQVRVATRKICSPLEEDAFRPILHHYDGPKFRLELSVPEALSLLDIFAEKIFDRQTA

SEQ ID NO: 1978 - protein, 214 aa, Zea mays subsp. mays
  peptide (1)..(214): Ceres Seq. ID no. 12588537
MIDHYLNKNTNNDVVKSYFNKSVGSRPANNNTTTTVKKNSAAHHDKKHKNSGNGAGVDKRFKSLPAAEALPRGEAIGGYIFVCNNDTMEENLKRRLFGLPSRYRDSVRAIRPGLPLFLYNYSTHQLHGIFEAASFGGSNIDPAAWEDKKCPGESRFPAQVRVATRKICSPLEEDAFRPILHHYDGPKFRLELSVPEALSLLDIFAEKIFDRQTA

SEQ ID NO: 1979 - DNA, 1728 bp, Zea mays subsp. mays
  misc_feature (1)..(1728): Ceres Seq. ID no. 12367331
  misc_feature (1)..(1728): Ortholog of  Ceres SEQ ID NO 13596512 as cited in SEQ ID NO 62074
ccaatcggacggcctagacggctcccttcctctccttgccacacttgcgctcctcttcgagactccgagttgtcgtctccgtcgctgctggctgctgcgccactcccccagccccgagatctgctcaacaatggcgacgcggcgccacatcctcctcctcgccgctgccttcgtgtcccttctcgcgctcgaggctgtggagggcctcgaagaggggccccgcgggcgccggctgctggtcctgctggacgacctggccgtgcggtcgtcgcactcggccttcttcggctcgctccaggcgcgcgggttcgatctcgaattccgcctcgccgacgaccccaagctctcgctgcaccgctacggccagtacctctacgatggcctcgtgctgttcgccccctccaccccacgttttggtggatcagtggaccagaacgcagtccttgaatttattgatgctgggcatgatatgatcctggcggcagattcctctgcctctgatcttattcgtggcattgcgacagagtgtggggttgattttgatgaggatccagaggcaatggttattgaccacattaactatgccgctatggatgttgaaggcgatcacaccttgattgttggtgatgatcttattcaatcagatgtcatactggggtctaaaaagattgaggctcctgtattatttcgtggaattggacacacggctaatccatcaaacagtttggttctgaaagtcctatctgcctctccatcagcatactcagctaacccaaagactaagttattgttgcctccatcgcttactgggtcagctatatcactggtttcggttatgcaggcaagaaataatgctcgggtgctgctatctggatcacttgatctttttagcaaccggttcctgaagtctggtgttcaaaaggctggtagcaaaacgagatacgagagagctggaaatgagcaatttgtgacagagacaagcaaatgggtcttccatgagagggggcaccttaaggctgttaatgttaagcaccacaaggttggggagaccaatgaaccaggcatgtaccgcattaacgatgacctggaatactctgttgagatctatgaatggtctggaacaagctggaagccatatgttgctgatgatgtgcaactccagtttttcatgatgagtccttatgttctgaaaactatgtcgaatgacaacaagggtttatactcaacatccttcaaagttcctgatgtctacggagttttccagttcaaagttgagtaccagaggctgggatatactggtttgtcttttacaaagcagattccagtgcgcccttacaggcataacgagtatgagaggttcataacatcagcgtacccatactacactgcctcattttcaacgatgtgtgctttcttcatattctcgcttgtgtacctgtaccacaaataaaggactcacgggagcgcacaagtttctggaggctgctgatgcgacctagatctgtggccaagtgttacccggtgcaattttatggaatcatatatttgtagtaggccaacttagctagaattagacgaccgtgaccgcaatcatgggaaatttactcgtgctagtaggatgttcgatctgccccacaattttttgttttcggatccttctgatcagcacttgtgaaaacgtttacagtctgtagcattgaaaggatgatgaagcatgtagtgattttg

SEQ ID NO: 1980 - protein, 482 aa, Zea mays subsp. mays
  peptide (1)..(482): Ceres Seq. ID no. 12367332
QSDGLDGSLPLLATLALLFETPSCRLRRCWLLRHSPSPEICSTMATRRHILLLAAAFVSLLALEAVEGLEEGPRGRRLLVLLDDLAVRSSHSAFFGSLQARGFDLEFRLADDPKLSLHRYGQYLYDGLVLFAPSTPRFGGSVDQNAVLEFIDAGHDMILAADSSASDLIRGIATECGVDFDEDPEAMVIDHINYAAMDVEGDHTLIVGDDLIQSDVILGSKKIEAPVLFRGIGHTANPSNSLVLKVLSASPSAYSANPKTKLLLPPSLTGSAISLVSVMQARNNARVLLSGSLDLFSNRFLKSGVQKAGSKTRYERAGNEQFVTETSKWVFHERGHLKAVNVKHHKVGETNEPGMYRINDDLEYSVEIYEWSGTSWKPYVADDVQLQFFMMSPYVLKTMSNDNKGLYSTSFKVPDVYGVFQFKVEYQRLGYTGLSFTKQIPVRPYRHNEYERFITSAYPYYTASFSTMCAFFIFSLVYLYHK

SEQ ID NO: 1981 - protein, 439 aa, Zea mays subsp. mays
  peptide (1)..(439): Ceres Seq. ID no. 12367333
MATRRHILLLAAAFVSLLALEAVEGLEEGPRGRRLLVLLDDLAVRSSHSAFFGSLQARGFDLEFRLADDPKLSLHRYGQYLYDGLVLFAPSTPRFGGSVDQNAVLEFIDAGHDMILAADSSASDLIRGIATECGVDFDEDPEAMVIDHINYAAMDVEGDHTLIVGDDLIQSDVILGSKKIEAPVLFRGIGHTANPSNSLVLKVLSASPSAYSANPKTKLLLPPSLTGSAISLVSVMQARNNARVLLSGSLDLFSNRFLKSGVQKAGSKTRYERAGNEQFVTETSKWVFHERGHLKAVNVKHHKVGETNEPGMYRINDDLEYSVEIYEWSGTSWKPYVADDVQLQFFMMSPYVLKTMSNDNKGLYSTSFKVPDVYGVFQFKVEYQRLGYTGLSFTKQIPVRPYRHNEYERFITSAYPYYTASFSTMCAFFIFSLVYLYHK

SEQ ID NO: 1982 - protein, 326 aa, Zea mays subsp. mays
  peptide (1)..(326): Ceres Seq. ID no. 12367334
MILAADSSASDLIRGIATECGVDFDEDPEAMVIDHINYAAMDVEGDHTLIVGDDLIQSDVILGSKKIEAPVLFRGIGHTANPSNSLVLKVLSASPSAYSANPKTKLLLPPSLTGSAISLVSVMQARNNARVLLSGSLDLFSNRFLKSGVQKAGSKTRYERAGNEQFVTETSKWVFHERGHLKAVNVKHHKVGETNEPGMYRINDDLEYSVEIYEWSGTSWKPYVADDVQLQFFMMSPYVLKTMSNDNKGLYSTSFKVPDVYGVFQFKVEYQRLGYTGLSFTKQIPVRPYRHNEYERFITSAYPYYTASFSTMCAFFIFSLVYLYHK

SEQ ID NO: 1983 - DNA, 1180 bp, Zea mays subsp. mays
  misc_feature (1)..(1180): Ceres Seq. ID no. 12355979
  misc_feature (1)..(1180): Ortholog of  Ceres SEQ ID NO 14308430 as cited in SEQ ID NO 55350
  misc_feature (1)..(1180): Ortholog of  Ceres SEQ ID NO 15177799 as cited in SEQ ID NO 59221
  misc_feature (1)..(1180): Ortholog of  Ceres SEQ ID NO 13662846 as cited in SEQ ID NO 65519
attcgcgccgggttccgcgagatctctggtgccccccggtttcgctcccgcgccccaatgctccctgtcgcgagtcgtggtctccgccgctcgttgcatcttcgttaccgatcagttgatcccgctcatccggcgggggatcatccgaccattggcagtctaccttttcaacactaaagcttctaagttgatgagtgatgaggccaggcaagcaaagattgtcaaattctcggagtccatttggaaacttacatactatgcttctgttcaagcatgggtcctcatgataataaagcaagaaccatggtcgttggatatggtgcagtactttgatggctggccaaatcaacccatcgtgtcctcgttgatgcttttctatatgtgccagtgtggattttatatctacagcattggtgctcttgttgcttgggaaacccgcagaaaagattttgctgtaatgatgtctcatcatgtaataacatctactcttattggagtttcatatctgacaggattttttcgaattgggaccatcgttcttgctcttcatgatacaagtgatgtgtttcttgagactgccaaattgtgcaagtacacagaaaaggagttgggggctagcttgtttttcggtctcttcgctatctcctggcttctattgcgtttgatttacttcccgttttggataatcaaagcctctagctatcattccatcacattctggaggaagctggatgaattccctacagctttgtactatatcttcaatacaatgcttctcacattgcttgtattccatatgtactggtggaaactcatatgtttgatgataatgagacaattgaataataaaggacaggttacagatgatgttcgatctgattctgaggatgacgagtaatgggggagattcattctttgacatctgcaatgtgtcatttcttcgccaatacttatctacgcctgcttccagaattgattgttttgatcgtggcaagtctcgggcatggataggaaagtttatcctctgtatattgccttgtgatatcaaacatggctagaacgagaatggagcaggtcctatacattacgggtatagctagcaagcttacttgaaggttccttcaaaaaattttggttcaccttttctgatatatggggaaagatatgagagggggtacag

SEQ ID NO: 1984 - protein, 298 aa, Zea mays subsp. mays
  peptide (1)..(298): Ceres Seq. ID no. 12355980
FAPGSARSLVPPGFAPAPQCSLSRVVVSAARCIFVTDQLIPLIRRGIIRPLAVYLFNTKASKLMSDEARQAKIVKFSESIWKLTYYASVQAWVLMIIKQEPWSLDMVQYFDGWPNQPIVSSLMLFYMCQCGFYIYSIGALVAWETRRKDFAVMMSHHVITSTLIGVSYLTGFFRIGTIVLALHDTSDVFLETAKLCKYTEKELGASLFFGLFAISWLLLRLIYFPFWIIKASSYHSITFWRKLDEFPTALYYIFNTMLLTLLVFHMYWWKLICLMIMRQLNNKGQVTDDVRSDSEDDE

SEQ ID NO: 1985 - protein, 235 aa, Zea mays subsp. mays
  peptide (1)..(235): Ceres Seq. ID no. 12355981
MSDEARQAKIVKFSESIWKLTYYASVQAWVLMIIKQEPWSLDMVQYFDGWPNQPIVSSLMLFYMCQCGFYIYSIGALVAWETRRKDFAVMMSHHVITSTLIGVSYLTGFFRIGTIVLALHDTSDVFLETAKLCKYTEKELGASLFFGLFAISWLLLRLIYFPFWIIKASSYHSITFWRKLDEFPTALYYIFNTMLLTLLVFHMYWWKLICLMIMRQLNNKGQVTDDVRSDSEDDE

SEQ ID NO: 1986 - protein, 204 aa, Zea mays subsp. mays
  peptide (1)..(204): Ceres Seq. ID no. 12355982
MIIKQEPWSLDMVQYFDGWPNQPIVSSLMLFYMCQCGFYIYSIGALVAWETRRKDFAVMMSHHVITSTLIGVSYLTGFFRIGTIVLALHDTSDVFLETAKLCKYTEKELGASLFFGLFAISWLLLRLIYFPFWIIKASSYHSITFWRKLDEFPTALYYIFNTMLLTLLVFHMYWWKLICLMIMRQLNNKGQVTDDVRSDSEDDE

SEQ ID NO: 1987 - DNA, 1435 bp, Zea mays subsp. mays
  misc_feature (1)..(1435): Ceres Seq. ID no. 12355983
  misc_feature (1)..(1435): Ortholog of  Ceres SEQ ID NO 14314823 as cited in SEQ ID NO 52565
  misc_feature (1)..(1435): Ortholog of  Ceres SEQ ID NO 14307324 as cited in SEQ ID NO 54131
  misc_feature (1)..(1435): Ortholog of  Ceres SEQ ID NO 14303336 as cited in SEQ ID NO 54567
  misc_feature (1)..(1435): Ortholog of  Ceres SEQ ID NO 13594940 as cited in SEQ ID NO 55819
atcaaatcacacacccatcagatcacaaaggcaaagaggagagagagagagagagggatgatgaggacgacgatgagagagatatactactaaactatctatccatcaatcaatcaggtagcccggcagcaatcgcgtgccgcctttcctctcacgtacaccaccacacctcccaggctcagctcgattcgttcgttgccgcgtcaaatcgggacaagaagccagccggccctgttgcagtgttgcttcgcctgccctgctgctgttgcttgcgccacgcacgtacctgaagaaagcagcgacggattgatcgaccggtggttcgctgtcgccacggccggcatgtcgtcctcgtcctcgtcctcgtcgtcctccgccgcctccgccgccacggtgttcccgcggtccccgcagctgccgcctccggtcctggtggagaacggcctcacgccgctgcatcagcttacgccggtagccgcggccgcgccggccgccgagcagctctgctacgtgcactgctacttctgcgacaccgtcctcgtcgtgagcgtgcctacgagcagcttgttcaagacggtgacggtacgatgcggccactgcagcagcttgctcaccgtcgacatgaggggcctcctcttcccgggcacgccgacggacacggtcgcgggggccgcaccaccaccagctgctgacactagtacgactaccaccaccatcaccacggcgccgccgccggccaactcggtcaacaacgggcagttccacctcccccactcgctcaaccaccctcaccaccaatccctcctggtggtacgcgcgtggttcaaagctgccggtggagctagctagctcgctctgatctgatgtcatatatcgcatgcctaatctcttgtttccgcgcgcgcgcgtgcatgcaggacgagatatccagcgccgcgaacccgagcctgcagttgcagatggagcagcacggcggcctcggcggcctgatactcggcggcagcaggaacacggccgcgccgcctccgccgcagccgcctgcagcgggtaaaggggccaaagagccgtcgccgcgcactaatcccgccgtcaacagacctccggagaagaggcagcgcgtgccgtcggcctacaaccgcttcatcaaggacgaaatccaacgcatcaaggctggcaatcccaacatctcgcacagggaggccttcagcgcggcggccaagaactgggcgcactttccacatatccactttggactcatgccggatcaccaggggctcaagacgacaagcctgctacctcagggtcaccagagaaaggacgggcttcttaaggaagggctctacgcggcagcggcggcggccgcagctcatgcggcagccaacatggggattgctccatactaatttacaattactcctactcaagcttgctactg

SEQ ID NO: 1988 - protein, 179 aa, Zea mays subsp. mays
  peptide (1)..(179): Ceres Seq. ID no. 12355984
MSYIACLISCFRARACMQDEISSAANPSLQLQMEQHGGLGGLILGGSRNTAAPPPPQPPAAGKGAKEPSPRTNPAVNRPPEKRQRVPSAYNRFIKDEIQRIKAGNPNISHREAFSAAAKNWAHFPHIHFGLMPDHQGLKTTSLLPQGHQRKDGLLKEGLYAAAAAAAAHAAANMGIAPY

SEQ ID NO: 1989 - protein, 168 aa, Zea mays subsp. mays
  peptide (1)..(168): Ceres Seq. ID no. 12355985
MSSSSSSSSSSAASAATVFPRSPQLPPPVLVENGLTPLHQLTPVAAAAPAAEQLCYVHCYFCDTVLVVSVPTSSLFKTVTVRCGHCSSLLTVDMRGLLFPGTPTDTVAGAAPPPAADTSTTTTTITTAPPPANSVNNGQFHLPHSLNHPHHQSLLVVRAWFKAAGGAS

SEQ ID NO: 1990 - protein, 163 aa, Zea mays subsp. mays
  peptide (1)..(163): Ceres Seq. ID no. 12355986
MQDEISSAANPSLQLQMEQHGGLGGLILGGSRNTAAPPPPQPPAAGKGAKEPSPRTNPAVNRPPEKRQRVPSAYNRFIKDEIQRIKAGNPNISHREAFSAAAKNWAHFPHIHFGLMPDHQGLKTTSLLPQGHQRKDGLLKEGLYAAAAAAAAHAAANMGIAPY

SEQ ID NO: 1991 - DNA, 941 bp, Zea mays subsp. mays
  misc_feature (1)..(941): Ceres Seq. ID no. 12374363
  misc_feature (1)..(941): Ortholog of  Ceres SEQ ID NO 15176423 as cited in SEQ ID NO 53228
aaggataaatctggtgataaaagtagcatctctccagcaagcatgacaaagaagtgtacgccgttggcacctaggaagactttgcagcctgagcaagcatttcaccctctggaagaggactcttgttctgtgacttcctcgactacaacatcatcaagagctggcagaactaagacaactgttcctgttgccccatcatttgtgtgtgctaaccgtgctgacaagaggaaggagttctacacaaaattagaggagaaacataaagctttggaagcagagaaggacgaggctgaggccaggaaaaaggaagagcaagacgttgctataaagcaactaaggaagtcattggtgattagagcgaaacccatgccaagcttctatcaagaaggccccccaccaaaggctgaacttaagaaggtgcctcctactcgtgccaaatcaccaaagtttacaagctcaaggagaaagagctgcaatgacacaccacagacacccgagggaaaaaacaccaacgcaacatctaccacccggccacatcgtcacagcatcggggcttctaaagatgccagcagagtacagtgctcgccgaagagcggcgtggcgaccaaaactagatctgtcaagcctgagctgaaggccctctgaagcgcatgcgaagcagccaagtgctgcgattgtctctgtacaaacagaatcgcctgactcttagccgtttccatttccatgcattttttgttttgttttgttttgttctatacccagcatctccaccaaaaagaaggctgtagggccaatgacgttgttcgcgatgctggaccttgtccccattttcgtcttgtactcgttaagaactttgttgctgctgggaccatgtgacattcattccatgtaaattacctggggatccctgtagggatctcgactggtgttttggtcttgtg

SEQ ID NO: 1992 - protein, 214 aa, Zea mays subsp. mays
  peptide (1)..(214): Ceres Seq. ID no. 12374364
KDKSGDKSSISPASMTKKCTPLAPRKTLQPEQAFHPLEEDSCSVTSSTTTSSRAGRTKTTVPVAPSFVCANRADKRKEFYTKLEEKHKALEAEKDEAEARKKEEQDVAIKQLRKSLVIRAKPMPSFYQEGPPPKAELKKVPPTRAKSPKFTSSRRKSCNDTPQTPEGKNTNATSTTRPHRHSIGASKDASRVQCSPKSGVATKTRSVKPELKAL

SEQ ID NO: 1993 - protein, 200 aa, Zea mays subsp. mays
  peptide (1)..(200): Ceres Seq. ID no. 12374365
MTKKCTPLAPRKTLQPEQAFHPLEEDSCSVTSSTTTSSRAGRTKTTVPVAPSFVCANRADKRKEFYTKLEEKHKALEAEKDEAEARKKEEQDVAIKQLRKSLVIRAKPMPSFYQEGPPPKAELKKVPPTRAKSPKFTSSRRKSCNDTPQTPEGKNTNATSTTRPHRHSIGASKDASRVQCSPKSGVATKTRSVKPELKAL

SEQ ID NO: 1994 - DNA, 1365 bp, Zea mays subsp. mays
  misc_feature (1)..(1365): Ceres Seq. ID no. 12410913
  misc_feature (1)..(1365): Ortholog of  Ceres SEQ ID NO 13581804 as cited in SEQ ID NO 51424
  misc_feature (1)..(1365): Ortholog of  Ceres SEQ ID NO 13663874 as cited in SEQ ID NO 67003
atataccctttcgtctccgcccagcagcaacggcacccaccgaatccgcccctccctctttccgttccgcctcgtcgcgctcgctctcgctgcgccgcccgccccacctcacggagctcacggcaacaccggcagggacggaaaaggaaagccgaggaggcgaggagagagagatacaaggcaggcagccaggcacaggcagcccgcggctggctacggggccaaaacccttacgcgcgacgcggccccctcctcttcttctctctcccaccaccgccctccccttgccatttttgccgcaggagccgccgccatccgatccggaagagggaggaggggggagggaggaggatctgtgtcccgattcgattggagctctcgtccccggcggtccaggatggtgcggggcaagacgcagatgaagcggatagagaacccggccagtcgccaggtcaccttctccaagcgccgcaacggcctgctcaagaaggcgttcgagctctccgtcctctgcgacgccgaggtcgcgctcgtcgtcttctccccgcgcggcaagctctacgaattcgccagcggaagtgcccagaaaacaattgaacgttatagaacgtacacaaaggataatgtcagcaacaagacagcacatcaggacattgagcaagtaaaagctgatgctgagggcctggcaaagaaactggaagcacttgaagcttacaaaagaaaacttttgggtgagaggttggaagaatgctcctttgaagaactgcacagtttggaagtgaaactcgaaaagagccttcattgcatcaggggaagaaagactcagctgctggaggagcaactccataagctgaaggagaaggagatgaatctgcgcaagagcaacgaagatttacgtgaaaagtgcaagaagcagccgccgccgccgccgccctatgctgatggctcctccgccgcctccagccgccggcagccatcgatcacacggggccgaaggatgtcgggatggacgtggagacggagctgtacataggattgcccggcagagattaccgctcaaacaacaaagacatgactgcacagtagctgtcaggtcaggtcaggtcaggctagccagcagtgcagagaataatcttagatctgtggtgcggagaactggagatgcaagccaagcccaagccaatcaacatgataaggatcatgagtgtcgcgtcgtgttttacaaacctgtccaccgtccgtcaaaggcacatgcgccagaacgtccgtcagagaacacttaccccctcatctccctctattagctagctgctccggcctgctcatgtcgaaaccttctgttcaagtatgttctcctcctgatgt

SEQ ID NO: 1995 - protein, 343 aa, Zea mays subsp. mays
  peptide (1)..(343): Ceres Seq. ID no. 12410914
YTLSSPPSSNGTHRIRPSLFPFRLVALALAAPPAPPHGAHGNTGRDGKGKPRRRGERDTRQAARHRQPAAGYGAKTLTRDAAPSSSSLSHHRPPLAIFAAGAAAIRSGRGRRGEGGGSVSRFDWSSRPRRSRMVRGKTQMKRIENPASRQVTFSKRRNGLLKKAFELSVLCDAEVALVVFSPRGKLYEFASGSAQKTIERYRTYTKDNVSNKTAHQDIEQVKADAEGLAKKLEALEAYKRKLLGERLEECSFEELHSLEVKLEKSLHCIRGRKTQLLEEQLHKLKEKEMNLRKSNEDLREKCKKQPPPPPPYADGSSAASSRRQPSITRGRRMSGWTWRRSCT

SEQ ID NO: 1996 - protein, 211 aa, Zea mays subsp. mays
  peptide (1)..(211): Ceres Seq. ID no. 12410915
MVRGKTQMKRIENPASRQVTFSKRRNGLLKKAFELSVLCDAEVALVVFSPRGKLYEFASGSAQKTIERYRTYTKDNVSNKTAHQDIEQVKADAEGLAKKLEALEAYKRKLLGERLEECSFEELHSLEVKLEKSLHCIRGRKTQLLEEQLHKLKEKEMNLRKSNEDLREKCKKQPPPPPPYADGSSAASSRRQPSITRGRRMSGWTWRRSCT

SEQ ID NO: 1997 - protein, 204 aa, Zea mays subsp. mays
  peptide (1)..(204): Ceres Seq. ID no. 12410916
MKRIENPASRQVTFSKRRNGLLKKAFELSVLCDAEVALVVFSPRGKLYEFASGSAQKTIERYRTYTKDNVSNKTAHQDIEQVKADAEGLAKKLEALEAYKRKLLGERLEECSFEELHSLEVKLEKSLHCIRGRKTQLLEEQLHKLKEKEMNLRKSNEDLREKCKKQPPPPPPYADGSSAASSRRQPSITRGRRMSGWTWRRSCT

SEQ ID NO: 1998 - DNA, 1461 bp, Zea mays subsp. mays
  misc_feature (1)..(1461): Ceres Seq. ID no. 12348941
  misc_feature (1)..(1461): Ortholog of  Ceres SEQ ID NO 15176911 as cited in SEQ ID NO 54868
  misc_feature (1)..(1461): Ortholog of  Ceres SEQ ID NO 13596433 as cited in SEQ ID NO 68721
  misc_feature (1)..(1461): Ortholog of  Ceres SEQ ID NO 13599169 as cited in SEQ ID NO 0
tccaccgaagcatctccatcgcctccccgtccgcctcctcctcctcctccacctctacctccaccggcgccgccgcctcgtcctactccaacaacaacaatccgctcgcccgcttccccgtcgagcccgcccaccaccgcgacgtggccacgcggcacttcgtcggcggcaaggtgccgctgggcctcaaacggaaggcgctccgcgtcctcgtcaccggcggcgccggcttcgtcggcagccacctggtggaccgcctcctcgagcgcggcgacagcgttatcgtcgtcgataacttcttcaccggccgcaaggacaacgttctgcaccacctcaacgacccaaacttcgagatgatccgccacgatgtcgtcgagcccatcctgctcgaggtcgaccagatctaccacctcgcctgcccggcgtcccccgtccactacaaatacaaccccatcaagacaatcaagaccaatgtggttgggactctgaacatgctcggattagcaaagaggatcaacgccaggttcctcctcaccagtaccagtgaggtctatggtgatcctctccagcacccgcaggtggagacttactggggcaatgtcaatcccatcggtgtcaggagctgttacgatgagggcaagcgtacagctgaaacgttgaccatggattaccaccgtggtgccaaccttgaggttaggatcgcacgtatcttcaatacatatggccctcgcatgtgcattgacgatggccgtgttgtcagtaactttgttgctcaggcactgaggaaggagcccttgacggtttatggtgatggaaagcaaaccaggagtttccaatatgtttctgatctggttgagggtctgatgaagctgatggaaggcgagcatgtggggccattcaacctgggtaaccctggcgagttcaccatgcttgagcttgccaaggttgtccaggacaccatcgaccccaacgcacggatcgagttccgcaagaacacccaggacgacccgcacaagcgcaagcccgacatcagccgcgccaaggagttccttgggtgggagccgaagatccccctgcgtgagggccttcccctcatggtctccgacttccgcaagcgcatcttcggcgaccaagacgctgctgccaccaccaccggaaaccagcaaggttaggatgaaggagcgcacatgacatggaaatttttggtggccctgcttctagctgcttggttgctctctccttactgacaaaagctatgggccacgtagttcgttgggaatgtgttactggaatacctcggctgatgctgtaatgccattctttttttcccctgtattttttctttctcagttctctcagtccttagctatacaaaaaaaaagttcagttgaacagttggagataaacccggatgatctaattctttgttgagagcatagcatcatatatatggtataaacc

SEQ ID NO: 1999 - protein, 389 aa, Zea mays subsp. mays
  peptide (1)..(389): Ceres Seq. ID no. 12348942
HRSISIASPSASSSSSTSTSTGAAASSYSNNNNPLARFPVEPAHHRDVATRHFVGGKVPLGLKRKALRVLVTGGAGFVGSHLVDRLLERGDSVIVVDNFFTGRKDNVLHHLNDPNFEMIRHDVVEPILLEVDQIYHLACPASPVHYKYNPIKTIKTNVVGTLNMLGLAKRINARFLLTSTSEVYGDPLQHPQVETYWGNVNPIGVRSCYDEGKRTAETLTMDYHRGANLEVRIARIFNTYGPRMCIDDGRVVSNFVAQALRKEPLTVYGDGKQTRSFQYVSDLVEGLMKLMEGEHVGPFNLGNPGEFTMLELAKVVQDTIDPNARIEFRKNTQDDPHKRKPDISRAKEFLGWEPKIPLREGLPLMVSDFRKRIFGDQDAAATTTGNQQG

SEQ ID NO: 2000 - protein, 272 aa, Zea mays subsp. mays
  peptide (1)..(272): Ceres Seq. ID no. 12348943
MIRHDVVEPILLEVDQIYHLACPASPVHYKYNPIKTIKTNVVGTLNMLGLAKRINARFLLTSTSEVYGDPLQHPQVETYWGNVNPIGVRSCYDEGKRTAETLTMDYHRGANLEVRIARIFNTYGPRMCIDDGRVVSNFVAQALRKEPLTVYGDGKQTRSFQYVSDLVEGLMKLMEGEHVGPFNLGNPGEFTMLELAKVVQDTIDPNARIEFRKNTQDDPHKRKPDISRAKEFLGWEPKIPLREGLPLMVSDFRKRIFGDQDAAATTTGNQQG

SEQ ID NO: 2001 - protein, 226 aa, Zea mays subsp. mays
  peptide (1)..(226): Ceres Seq. ID no. 12348944
MLGLAKRINARFLLTSTSEVYGDPLQHPQVETYWGNVNPIGVRSCYDEGKRTAETLTMDYHRGANLEVRIARIFNTYGPRMCIDDGRVVSNFVAQALRKEPLTVYGDGKQTRSFQYVSDLVEGLMKLMEGEHVGPFNLGNPGEFTMLELAKVVQDTIDPNARIEFRKNTQDDPHKRKPDISRAKEFLGWEPKIPLREGLPLMVSDFRKRIFGDQDAAATTTGNQQG

SEQ ID NO: 2002 - DNA, 1473 bp, Zea mays subsp. mays
  misc_feature (1)..(1473): Ceres Seq. ID no. 12407354
  misc_feature (1)..(1473): Ortholog of  Ceres SEQ ID NO 13594345 as cited in SEQ ID NO 58043
  misc_feature (1)..(1473): Ortholog of  Ceres SEQ ID NO 13597678 as cited in SEQ ID NO 65375
  misc_feature (1)..(1473): Ortholog of  Ceres SEQ ID NO 13596180 as cited in SEQ ID NO 67941
  misc_feature (1)..(1473): Ortholog of  Ceres SEQ ID NO 14313563 as cited in SEQ ID NO 68700
aatgtccactcagatctgaaatgtcaatggaatccgttgccgttgccgtcgtggcggtgccgttcccggcgcagggccacctcaacggcatgctgcacttgtctctgctactcgcgtcccgagggctttccgtgcactacgcggcgccggggccgcacgtccgccaggcgcgcgcgcgcgtgcacggctggggcgacgacgcccaccgccgcatcgagttccacgagctcgaggtccccgcgtacgccaccccgccgccggacccggtcgcgccctcgccgttcccgacccacctcatccccatgagcgaggccttcctcgcgggcgcgcgcgccccagtcgccagcctcatcgggagggtctccgcgcgccaccgccgcgtggtggtcctgtacgatcgcctcagctccttcgccgcccccgaggcggcgcggatccccaacggcgaagcgttctgcctgcagtgcgtggccgcgtgcttcgacgccgcgtggacggacgccgggcagcggctcctgcgcaagcacggcctcgacgccccgcaccccggcgcctgcatgccgagggagttcgtggagtacattgtcaggacgcaggaggacagccggagtccggcgttcgctggggtagtggcgaacacgtgccgcgcgatcgagagcgagttcatcgacgtggtggccggggaccctgagaaccgaggaaagagagtcttcgcagtcgggccgatgaatccgctgcttaacgtgaccgcgccgacagcgggacagagtgcacggcacgagtgcttggactggctcgacaagcaaccgccggcgtcggtgctgtacgtgtcgttcggcacgacgtcgtcgctgcgggcggagcagatcgcggaactcgccgcggcgctgcgcgacagcaaacagcggttcgtctgggttctgcgcgacgctgatcgcggtgtggtacacgaggaggaagccgtggagagtaggcacgccaggttcctatccgagttcaccgaggaaactcaaggcatcgggttggtgatcaccgggtgggcgccgcagctggagatcctggcccacggcgccacggcagctttcatgagtcactgcggctggaactcgaccatggagagcctgagccacgggaagccgatgctcgcctggcccatgcactccgaccagccgctggtggcggagctcgtgtgcaagtgcctcaaggccgggctcctcgtaaggccatgggagcaacacagtgctgtgacacctgcggaaaccatccgcgaggtgatcgagaaggtgatggcacgcgatgaaggtttggcggtccgggagagggccaaggagctcatggagtttattcgccgctctgtggccgagggcgggtcttcgcgcaaggaccttgacgacttcgttgcttacatagcaagatgaaatgcgtcctgtatttgactatttctactagtttcaattttgagttctcgtgatg

SEQ ID NO: 2003 - protein, 471 aa, Zea mays subsp. mays
  peptide (1)..(471): Ceres Seq. ID no. 12407355
CPLRSEMSMESVAVAVVAVPFPAQGHLNGMLHLSLLLASRGLSVHYAAPGPHVRQARARVHGWGDDAHRRIEFHELEVPAYATPPPDPVAPSPFPTHLIPMSEAFLAGARAPVASLIGRVSARHRRVVVLYDRLSSFAAPEAARIPNGEAFCLQCVAACFDAAWTDAGQRLLRKHGLDAPHPGACMPREFVEYIVRTQEDSRSPAFAGVVANTCRAIESEFIDVVAGDPENRGKRVFAVGPMNPLLNVTAPTAGQSARHECLDWLDKQPPASVLYVSFGTTSSLRAEQIAELAAALRDSKQRFVWVLRDADRGVVHEEEAVESRHARFLSEFTEETQGIGLVITGWAPQLEILAHGATAAFMSHCGWNSTMESLSHGKPMLAWPMHSDQPLVAELVCKCLKAGLLVRPWEQHSAVTPAETIREVIEKVMARDEGLAVRERAKELMEFIRRSVAEGGSSRKDLDDFVAYIAR

SEQ ID NO: 2004 - protein, 465 aa, Zea mays subsp. mays
  peptide (1)..(465): Ceres Seq. ID no. 12407356
MSMESVAVAVVAVPFPAQGHLNGMLHLSLLLASRGLSVHYAAPGPHVRQARARVHGWGDDAHRRIEFHELEVPAYATPPPDPVAPSPFPTHLIPMSEAFLAGARAPVASLIGRVSARHRRVVVLYDRLSSFAAPEAARIPNGEAFCLQCVAACFDAAWTDAGQRLLRKHGLDAPHPGACMPREFVEYIVRTQEDSRSPAFAGVVANTCRAIESEFIDVVAGDPENRGKRVFAVGPMNPLLNVTAPTAGQSARHECLDWLDKQPPASVLYVSFGTTSSLRAEQIAELAAALRDSKQRFVWVLRDADRGVVHEEEAVESRHARFLSEFTEETQGIGLVITGWAPQLEILAHGATAAFMSHCGWNSTMESLSHGKPMLAWPMHSDQPLVAELVCKCLKAGLLVRPWEQHSAVTPAETIREVIEKVMARDEGLAVRERAKELMEFIRRSVAEGGSSRKDLDDFVAYIAR

SEQ ID NO: 2005 - protein, 463 aa, Zea mays subsp. mays
  peptide (1)..(463): Ceres Seq. ID no. 12407357
MESVAVAVVAVPFPAQGHLNGMLHLSLLLASRGLSVHYAAPGPHVRQARARVHGWGDDAHRRIEFHELEVPAYATPPPDPVAPSPFPTHLIPMSEAFLAGARAPVASLIGRVSARHRRVVVLYDRLSSFAAPEAARIPNGEAFCLQCVAACFDAAWTDAGQRLLRKHGLDAPHPGACMPREFVEYIVRTQEDSRSPAFAGVVANTCRAIESEFIDVVAGDPENRGKRVFAVGPMNPLLNVTAPTAGQSARHECLDWLDKQPPASVLYVSFGTTSSLRAEQIAELAAALRDSKQRFVWVLRDADRGVVHEEEAVESRHARFLSEFTEETQGIGLVITGWAPQLEILAHGATAAFMSHCGWNSTMESLSHGKPMLAWPMHSDQPLVAELVCKCLKAGLLVRPWEQHSAVTPAETIREVIEKVMARDEGLAVRERAKELMEFIRRSVAEGGSSRKDLDDFVAYIAR

SEQ ID NO: 2006 - DNA, 1491 bp, Zea mays subsp. mays
  misc_feature (1)..(1491): Ceres Seq. ID no. 12382090
  misc_feature (1)..(1491): Ortholog of  Ceres SEQ ID NO 15177291 as cited in SEQ ID NO 52286
  misc_feature (1)..(1491): Ortholog of  Ceres SEQ ID NO 13595164 as cited in SEQ ID NO 56222
  misc_feature (1)..(1491): Ortholog of  Ceres SEQ ID NO 14315021 as cited in SEQ ID NO 57018
  misc_feature (1)..(1491): Ortholog of  Ceres SEQ ID NO 15177783 as cited in SEQ ID NO 58894
  misc_feature (1)..(1491): Ortholog of  Ceres SEQ ID NO 13591068 as cited in SEQ ID NO 69043
  misc_feature (1)..(1491): Ortholog of  Ceres SEQ ID NO 13623041 as cited in SEQ ID NO 0
agtggcacagtggcagtggctggccacccaatcgtctcgttcgtcatctacctctccctcctccaacccaagctaagctaaacagcttacagctcgctccgccatcaccgtatcgagagagacagagacaggctagcgagggaatggagaggatgctggccaggctgatgcagcggcggagctccgtccccctgtccggcctcctccaccacggaggagcgcccgccccgctgcaggccgccggcgccactggggcctccccgctgatcttctcgcaccagcagcagcagcagcacacggccgcctccgccgtcctgccggggctcaagatcagggactccgcgtcccagctgatcgggaggactccgatggtgtacctgaacaaggtgaccgaggggtgcggcgcccgggtggctgccaagctcgagttcctgcagccgtccttcagcgtcaaagacagaccggcgatctcgatgctggaagacgccgaaaagagggggctcatcactccaggaaagaccacgttgatcgagcccacgtcggggaacatgggcatcgggctggcgttcatggcggcgctcaaggggtacgagctcgtgctcaccatgccgtcctacaccagcctggagaggagggtgacgatgcgggcgttcggcgccaacctggtgctgaccgacccggccaaagggatgggcgggacggtgaggaaggcgacggagctgtacgagagacatcccagcgcgcacatgctccagcagttccagaaccctgccaacgtcaaggtgcactacgacacgacgggaccggagatctgggaggacacgcttggccaggtcgatatcttcgtcatggggatcgggagcggcggcaccgtcacgggagtcggcaagtacctcaaggagaaaaaccctaacgcaaagatctatggagttgaacctgccgaggcaaatgttctgaatggtggaaagccaggacctcacctcatcactggaaacggagtagggttcaagccagatattctggacatggacgtgatggaaaaggtgctcgaggtgaaaggtgaggacgccgtcaagatggctcgagagctggcagtcaaggagggtcttttggtcgggatatcatcgggagccaacaccgttgctgctctcgagctagccaagaggccggagaacaaggggaagctcatcgtgaccgttcttccgagccttggcgagcggtacctgtcgtccgcgctgttcgatgagctgaggaaggaggcacaagccatggaaccggtcgcggtggattgatctcgccggtcaagctagctagcctgccgggcacgctggagatctggttcctatcgtcacagctgccagccaagccaattgtacttccattcccccctcatccagttttttattttattttaccgtcagtgtgtcacctcatctatgaaccttgcgaaaaggaaaaaaaaagtgcatgaataatgatgggaaaatgttg

SEQ ID NO: 2007 - protein, 429 aa, Zea mays subsp. mays
  peptide (1)..(429): Ceres Seq. ID no. 12382091
WHSGSGWPPNRLVRHLPLPPPTQAKLNSLQLAPPSPYRERQRQASEGMERMLARLMQRRSSVPLSGLLHHGGAPAPLQAAGATGASPLIFSHQQQQQHTAASAVLPGLKIRDSASQLIGRTPMVYLNKVTEGCGARVAAKLEFLQPSFSVKDRPAISMLEDAEKRGLITPGKTTLIEPTSGNMGIGLAFMAALKGYELVLTMPSYTSLERRVTMRAFGANLVLTDPAKGMGGTVRKATELYERHPSAHMLQQFQNPANVKVHYDTTGPEIWEDTLGQVDIFVMGIGSGGTVTGVGKYLKEKNPNAKIYGVEPAEANVLNGGKPGPHLITGNGVGFKPDILDMDVMEKVLEVKGEDAVKMARELAVKEGLLVGISSGANTVAALELAKRPENKGKLIVTVLPSLGERYLSSALFDELRKEAQAMEPVAVD

SEQ ID NO: 2008 - protein, 382 aa, Zea mays subsp. mays
  peptide (1)..(382): Ceres Seq. ID no. 12382092
MERMLARLMQRRSSVPLSGLLHHGGAPAPLQAAGATGASPLIFSHQQQQQHTAASAVLPGLKIRDSASQLIGRTPMVYLNKVTEGCGARVAAKLEFLQPSFSVKDRPAISMLEDAEKRGLITPGKTTLIEPTSGNMGIGLAFMAALKGYELVLTMPSYTSLERRVTMRAFGANLVLTDPAKGMGGTVRKATELYERHPSAHMLQQFQNPANVKVHYDTTGPEIWEDTLGQVDIFVMGIGSGGTVTGVGKYLKEKNPNAKIYGVEPAEANVLNGGKPGPHLITGNGVGFKPDILDMDVMEKVLEVKGEDAVKMARELAVKEGLLVGISSGANTVAALELAKRPENKGKLIVTVLPSLGERYLSSALFDELRKEAQAMEPVAVD

SEQ ID NO: 2009 - protein, 379 aa, Zea mays subsp. mays
  peptide (1)..(379): Ceres Seq. ID no. 12382093
MLARLMQRRSSVPLSGLLHHGGAPAPLQAAGATGASPLIFSHQQQQQHTAASAVLPGLKIRDSASQLIGRTPMVYLNKVTEGCGARVAAKLEFLQPSFSVKDRPAISMLEDAEKRGLITPGKTTLIEPTSGNMGIGLAFMAALKGYELVLTMPSYTSLERRVTMRAFGANLVLTDPAKGMGGTVRKATELYERHPSAHMLQQFQNPANVKVHYDTTGPEIWEDTLGQVDIFVMGIGSGGTVTGVGKYLKEKNPNAKIYGVEPAEANVLNGGKPGPHLITGNGVGFKPDILDMDVMEKVLEVKGEDAVKMARELAVKEGLLVGISSGANTVAALELAKRPENKGKLIVTVLPSLGERYLSSALFDELRKEAQAMEPVAVD

SEQ ID NO: 2010 - DNA, 1844 bp, Zea mays subsp. mays
  misc_feature (1)..(1844): Ceres Seq. ID no. 12405181
  misc_feature (1)..(1844): Ortholog of  Ceres SEQ ID NO 13600098 as cited in SEQ ID NO 0
ctaatcgaaaatcttgtttgtttgcttccgtcgtcccctctccacgtagagcacgcccccggaccaccttttataagcaccaaccatctggccttgccgcgccgattcgccacgaagccgcactgtgagagagggacgcggcctgttgtcccggcttttagacgcaacttccatcgctgcgaagctatccattcgtgttcgtcatggccgccagcgtcaccgtggaaaacctcaaccccaaggtcttaaaatgtgagtatgcagtccgtggggagattgtcatccatgctcagcgcctgcagcaacaactacaaacacaaccagggtctcttccttttgatgagatcctctattgcaatattgggaatccccaatctcttggtcagcaacctgtgacattcttcagggaggttcttgctctttgtgattatccgtgcctcttggaaaaagaggaaaccaaatcattgttcagtgctgatgcaatttctcgagcaaagcagattcttgcaactattcctggaagggcaacaggtgcatatagtcacagtcagggtatcaaaggactgcgtgatgcaattgctgctggaatcatgtcacgtgatggattccctgcaaatgcagatgacattttcattacagacggagcaagtcctggggtccacatgatgatgcaattactgattaggaatgagaaagatggcattctgtgcccaattcctcagtaccccttgtactcagcctccatagctcttcatggtggagctcttgtcccctattaccttaatgaaaaaactgggtggggtttggagatctctgatcttaagatgcaactggaaaatgctcggtcaaaaggcattgatgttagggctttggtggttatcaatccaggaaatccgactgggcaggttcttgctgaagacaaccaatatgatatagtgaaattctgcaaaaatgagggccttgttcttctagctgatgaggtatatcaagagaacatctatgtggacaacaagaaatttaactctttcaagaagattgtaagatccatggggtatggcgaggatgatctccctctagtatcgttacagtctgtttccaaaggatactatggagagtgtggtaaaagaggagggtacatggagattactggcttcagtactccagtaagagagcagatctacaagatagcttcagtgaacctgtgctccaatatcactggtcaaatccttgcgagcctcgtcatgaatccaccaaaggttggagacgaatcatatgcttcctacaaggcagagaaagatggaatccttgagtctttagctcgtcgtgcaaaggcgttggaggatgcattcaacaagcttgagggattttcatgtaacaaggccgaaggagcaatgtatcttttccctcagattcatctgccacagaaggcaatcgaggctgctaaagctgctaagaaagcgcctgacgctttctacgctctccgtctccttgaatcaactggaatcgtcgtggtccctggatctggatttcgtcaagttcctggaacatggcacatcagatgcacgatcctgccgcaggaagacaagatccccgcggtgatcagccgcttcagggctttccatgaggcgttcttggccgaataccgcgactaaactgttacgctgtgtgtgagttaagttggaggttcagtagaactgtagaagagctcagtgacagcgcagaaagaggcagtgttagaaaggcttaggtccttcttcacaggagcaacagttgtctccatcaaggagaaataaaaattttagttttacaacttctcattgacactgttgggttcttgacatggc

SEQ ID NO: 2011 - protein, 482 aa, Zea mays subsp. mays
  peptide (1)..(482): Ceres Seq. ID no. 12405182
MAASVTVENLNPKVLKCEYAVRGEIVIHAQRLQQQLQTQPGSLPFDEILYCNIGNPQSLGQQPVTFFREVLALCDYPCLLEKEETKSLFSADAISRAKQILATIPGRATGAYSHSQGIKGLRDAIAAGIMSRDGFPANADDIFITDGASPGVHMMMQLLIRNEKDGILCPIPQYPLYSASIALHGGALVPYYLNEKTGWGLEISDLKMQLENARSKGIDVRALVVINPGNPTGQVLAEDNQYDIVKFCKNEGLVLLADEVYQENIYVDNKKFNSFKKIVRSMGYGEDDLPLVSLQSVSKGYYGECGKRGGYMEITGFSTPVREQIYKIASVNLCSNITGQILASLVMNPPKVGDESYASYKAEKDGILESLARRAKALEDAFNKLEGFSCNKAEGAMYLFPQIHLPQKAIEAAKAAKKAPDAFYALRLLESTGIVVVPGSGFRQVPGTWHIRCTILPQEDKIPAVISRFRAFHEAFLAEYRD

SEQ ID NO: 2012 - protein, 353 aa, Zea mays subsp. mays
  peptide (1)..(353): Ceres Seq. ID no. 12405183
MSRDGFPANADDIFITDGASPGVHMMMQLLIRNEKDGILCPIPQYPLYSASIALHGGALVPYYLNEKTGWGLEISDLKMQLENARSKGIDVRALVVINPGNPTGQVLAEDNQYDIVKFCKNEGLVLLADEVYQENIYVDNKKFNSFKKIVRSMGYGEDDLPLVSLQSVSKGYYGECGKRGGYMEITGFSTPVREQIYKIASVNLCSNITGQILASLVMNPPKVGDESYASYKAEKDGILESLARRAKALEDAFNKLEGFSCNKAEGAMYLFPQIHLPQKAIEAAKAAKKAPDAFYALRLLESTGIVVVPGSGFRQVPGTWHIRCTILPQEDKIPAVISRFRAFHEAFLAEYRD

SEQ ID NO: 2013 - protein, 329 aa, Zea mays subsp. mays
  peptide (1)..(329): Ceres Seq. ID no. 12405184
MMMQLLIRNEKDGILCPIPQYPLYSASIALHGGALVPYYLNEKTGWGLEISDLKMQLENARSKGIDVRALVVINPGNPTGQVLAEDNQYDIVKFCKNEGLVLLADEVYQENIYVDNKKFNSFKKIVRSMGYGEDDLPLVSLQSVSKGYYGECGKRGGYMEITGFSTPVREQIYKIASVNLCSNITGQILASLVMNPPKVGDESYASYKAEKDGILESLARRAKALEDAFNKLEGFSCNKAEGAMYLFPQIHLPQKAIEAAKAAKKAPDAFYALRLLESTGIVVVPGSGFRQVPGTWHIRCTILPQEDKIPAVISRFRAFHEAFLAEYRD

SEQ ID NO: 2014 - DNA, 1416 bp, Zea mays subsp. mays
  misc_feature (1)..(1416): Ceres Seq. ID no. 12351956
  misc_feature (1)..(1416): Ortholog of  Ceres SEQ ID NO 14314068 as cited in SEQ ID NO 52242
  misc_feature (1)..(1416): Ortholog of  Ceres SEQ ID NO 14314999 as cited in SEQ ID NO 52342
  misc_feature (1)..(1416): Ortholog of  Ceres SEQ ID NO 15177057 as cited in SEQ ID NO 55817
  misc_feature (1)..(1416): Ortholog of  Ceres SEQ ID NO 13585458 as cited in SEQ ID NO 60907
  misc_feature (1)..(1416): Ortholog of  Ceres SEQ ID NO 13598678 as cited in SEQ ID NO 61508
  misc_feature (1)..(1416): Ortholog of  Ceres SEQ ID NO 12625392 as cited in SEQ ID NO 63315
  misc_feature (1)..(1416): Ortholog of  Ceres SEQ ID NO 13598319 as cited in SEQ ID NO 68758
  misc_feature (1)..(1416): Ortholog of  Ceres SEQ ID NO 12589816 as cited in SEQ ID NO 0
aactcaccaaacaaacactcgagcaaagctcagcctcacacagcctctcctctcgagctagagtgctactagcttagaagaagcagcagcttaccgctgaagctgcagcaatggcgaaatcttacaccttactgttcgtcgcactggtcgttctggcccttctagtgagccccattgcttgctcccgcaagctcgccaagccgaacaagcccaagccgacccacaagccggcggccagggtcacgcccggcagcaaccacaccggtatccccgcagtgtccgccgcctacggctccggcggctggttgtctgccggcgcgacgtactacggcgccccaaacggcgacggcagtgacggcggtgcgtgcgggtaccagaccgccgtcgggcagcgccccttctcgtcgatgatcgccgccgggagcccgtctctgttcaagggaggcaagggctgcggcgcctgctacgaggttaaatgcgacggcaacccggcatgctccggccagccggccaccgtggtcatcaccgacgagtgccccggcggtgtctgcctcgcagaggcggctcacttcgacatgagcggcacctccatgggcgccatggcgaagcccggcatggccgacaggcttcgcgccgccggcatcctcaagatccagtacaagagggtgccgtgcaagtacagcggcgtgaacatcgccttccgggtggaccagggatccaacccgttctacttggaggtgctcatcgagttcgaggacggcgacggcgacctcagcgccgtccacctcatggaggccgggtgcggcacgtggaccccgatggtgcagaactggggcgcgctctggcgctacaactccaacaccggcaaggcgctgaaggcgcccttctcgctccggctgacctccgactccggcagggtgctcgtcgccaacaacgtcatccccgccggctggaaccccggggccacgtaccgctccttggtgaactactcctgattgatgaactgcggcggcggttcggttctccgcgccccattgcatgcgcttggctggattattatgcgtggccaagaagtgctttgcagggtgcgtggtgtttaaggaacgagctagctagtctcgagtttgttttctgagaagaagaaaaaaatgtctgttcgggtgtccgcgagaggcggtggaagaagaagaggaggaggaggacaagaaggttaaggagccgtgtgttcttcactccctccacggtctctgcagtcacctagttatgtgtgtagtggtcggtgtaggtttctttttcgttgtgatggctcaggagaggagttggattggacgttgtatcagtctgtgtgtgtgtgcgcgcgtagttttctgtaccacgcaatcctttcagagaattgaattcctgctttcttgtttc

SEQ ID NO: 2015 - protein, 294 aa, Zea mays subsp. mays
  peptide (1)..(294): Ceres Seq. ID no. 12351957
MAKSYTLLFVALVVLALLVSPIACSRKLAKPNKPKPTHKPAARVTPGSNHTGIPAVSAAYGSGGWLSAGATYYGAPNGDGSDGGACGYQTAVGQRPFSSMIAAGSPSLFKGGKGCGACYEVKCDGNPACSGQPATVVITDECPGGVCLAEAAHFDMSGTSMGAMAKPGMADRLRAAGILKIQYKRVPCKYSGVNIAFRVDQGSNPFYLEVLIEFEDGDGDLSAVHLMEAGCGTWTPMVQNWGALWRYNSNTGKALKAPFSLRLTSDSGRVLVANNVIPAGWNPGATYRSLVNYS

SEQ ID NO: 2016 - protein, 219 aa, Zea mays subsp. mays
  peptide (1)..(219): Ceres Seq. ID no. 12351958
MRRQPGMLRPAGHRGHHRRVPRRCLPRRGGSLRHERHLHGRHGEARHGRQASRRRHPQDPVQEGAVQVQRREHRLPGGPGIQPVLLGGAHRVRGRRRRPQRRPPHGGRVRHVDPDGAELGRALALQLQHRQGAEGALLAPADLRLRQGARRQQRHPRRLEPRGHVPLLGELLLIDELRRRFGSPRPIACAWLDYYAWPRSALQGAWCLRNELASLEFVF

SEQ ID NO: 2017 - protein, 213 aa, Zea mays subsp. mays
  peptide (1)..(213): Ceres Seq. ID no. 12351959
MLRPAGHRGHHRRVPRRCLPRRGGSLRHERHLHGRHGEARHGRQASRRRHPQDPVQEGAVQVQRREHRLPGGPGIQPVLLGGAHRVRGRRRRPQRRPPHGGRVRHVDPDGAELGRALALQLQHRQGAEGALLAPADLRLRQGARRQQRHPRRLEPRGHVPLLGELLLIDELRRRFGSPRPIACAWLDYYAWPRSALQGAWCLRNELASLEFVF

SEQ ID NO: 2018 - DNA, 1845 bp, Zea mays subsp. mays
  misc_feature (1)..(1845): Ceres Seq. ID no. 12345235
  misc_feature (1)..(1845): Ortholog of  Ceres SEQ ID NO 13593889 as cited in SEQ ID NO 53305
  misc_feature (1)..(1845): Ortholog of  Ceres SEQ ID NO 13581959 as cited in SEQ ID NO 56156
  misc_feature (1)..(1845): Ortholog of  Ceres SEQ ID NO 15171809 as cited in SEQ ID NO 57329
aaaacaaactccaagcccatccatcaccagtcctctgtcccctccccgaccgcaacgatctgctttgcatcttccccttcctccaattccagtcccatgcgtaatcgtctttcggaattgaatctctccatgtcatggcgctctgagcaagtacagctgcagtcagtgagagaaatgtaggcaccacaaatcggtccagcaaatccctgctcgtgctctaccaaaaaatccagtctttttccagcccaaatccgcctcttccgctgctgccataaagtccggactttacgaggctttcacgacgtgcgagatttctgttatcgatctccacgaacccgatagcctgccataaagtctgcacagacgcttcgcattgcttcaaccaaagatccatccaaactctgcaccccaaaagctagtacgatctcggggggacatgaagcgcctgcagtgcttcaagaagagcagcggcggcggcaatggtggcgggccggggaagcgcctggagcggcagctgtcgctgggcgagtacaagaaggcagtgtcgtggtccaagtacctcgtagcgccgccgggggctaggatccggagcggcggcgaggagctgtggagcgccgacctgtccaagctggagatccggggcaagtttgcgtcaggccggcacagccgcgtctactccggcaggtacaccggccgcgaggtggccatcaagatggtcagtcanccggaggaggacgccgcgctcgccgctgagctagagcgccagttcgcctccgaggtcgcgctcctacttcgcctccaccacccaaacatcatctcgtttgttgcagcatgcaagaaaccaccagtattctgcatcatcactgagttcatggcagggggctcccttaggaagtatctacatcagcaggagcctcactcagttcccctcaacctagtgctgaaattagctctagatatcgctcgcggaatgagctacctacactcccagggtatactccatagagacctgaaatcagagaacatacttctgggagaagatatgtcagtcaaagtcgcagatttcgggatttcatgcttggaatcacagtgtggaagtggcaaggggtttacaggaacctacaggtggatggctccggagatgatcaaagaggaacatcatactaggaaagtggacgtgtacagctttggaatcgtcatgtgggagatcttgactgctttggtcccgttcagcgacatgactccagagcaggctgctgttgctgttgccctgaagaatgcaaggccgccactgcctgcttcatgccctgtggcaataagccacctgatcatgcagtgctgggcgaccaaccctgacaaaagacctcagtttgatgacatcgtggcgatcctcgagagctacaaggaagcccttgatgaggacccgtcgttcttcttgtcgtatataccacctccaccggaccacggccaccaccaccatcatcagagccttctccggtgcttccctcgctccatgcgaaggtctgcatctctgaaagtatgatcaggccgggatgttgcctctgctcatcgatgctgtgtacaatatgcaccccctttcgactttctttgttttctatgcgcgcgtcggccctctattatgcggcattagcatgctatatgagctagtttatgctctcattttctccttgttggttaattatttccgtcattgatgccttgagtaatgtagagatgacaggcaggcatgcagcttccggttattatctatggatgccatttgcttttggtgatgggaaacatgaaagagccccagtaaatgtaatataattaagctctccatcc

SEQ ID NO: 2019 - protein, 368 aa, Zea mays subsp. mays
  peptide (1)..(368): Ceres Seq. ID no. 12345236
  misc_feature (96)..(96): Xaa is any aa, unknown or other
MKRLQCFKKSSGGGNGGGPGKRLERQLSLGEYKKAVSWSKYLVAPPGARIRSGGEELWSADLSKLEIRGKFASGRHSRVYSGRYTGREVAIKMVSXPEEDAALAAELERQFASEVALLLRLHHPNIISFVAACKKPPVFCIITEFMAGGSLRKYLHQQEPHSVPLNLVLKLALDIARGMSYLHSQGILHRDLKSENILLGEDMSVKVADFGISCLESQCGSGKGFTGTYRWMAPEMIKEEHHTRKVDVYSFGIVMWEILTALVPFSDMTPEQAAVAVALKNARPPLPASCPVAISHLIMQCWATNPDKRPQFDDIVAILESYKEALDEDPSFFLSYIPPPPDHGHHHHHQSLLRCFPRSMRRSASLKV

SEQ ID NO: 2020 - protein, 276 aa, Zea mays subsp. mays
  peptide (1)..(276): Ceres Seq. ID no. 12345237
  misc_feature (4)..(4): Xaa is any aa, unknown or other
MVSXPEEDAALAAELERQFASEVALLLRLHHPNIISFVAACKKPPVFCIITEFMAGGSLRKYLHQQEPHSVPLNLVLKLALDIARGMSYLHSQGILHRDLKSENILLGEDMSVKVADFGISCLESQCGSGKGFTGTYRWMAPEMIKEEHHTRKVDVYSFGIVMWEILTALVPFSDMTPEQAAVAVALKNARPPLPASCPVAISHLIMQCWATNPDKRPQFDDIVAILESYKEALDEDPSFFLSYIPPPPDHGHHHHHQSLLRCFPRSMRRSASLKV

SEQ ID NO: 2021 - protein, 223 aa, Zea mays subsp. mays
  peptide (1)..(223): Ceres Seq. ID no. 12345238
MAGGSLRKYLHQQEPHSVPLNLVLKLALDIARGMSYLHSQGILHRDLKSENILLGEDMSVKVADFGISCLESQCGSGKGFTGTYRWMAPEMIKEEHHTRKVDVYSFGIVMWEILTALVPFSDMTPEQAAVAVALKNARPPLPASCPVAISHLIMQCWATNPDKRPQFDDIVAILESYKEALDEDPSFFLSYIPPPPDHGHHHHHQSLLRCFPRSMRRSASLKV

SEQ ID NO: 2022 - DNA, 1385 bp, Zea mays subsp. mays
  misc_feature (1)..(1385): Ceres Seq. ID no. 12351964
  misc_feature (1)..(1385): Ortholog of  Ceres SEQ ID NO 15169415 as cited in SEQ ID NO 59010
  misc_feature (1)..(1385): Ortholog of  Ceres SEQ ID NO 13656546 as cited in SEQ ID NO 65729
accagcctgctccggtcctcttggagttgggcctgcccacctcccggccggtccgccgcgcggttccagtttcgcctctcgtcgccggtcctggcgagccccgcctccttgatctccgaccagcagcttccccactgcccactccccagccccggacgtgcccttcgccggtgctgtcatggcgttcggccgacggagccccggatcctcgcggcaccctcccgcgctcaccatcgtcacggcgctactcctcgcctccctctacttcgccgccgcggcggcggctctatcgcccaccgacgcgatgcacaacaacaactgggccgtgctcgtgtgtacctcccgcttctggtttaattatcgacacatggcgaatacattgtccctatacaggactgttaagagattaggaatacctgatgagcgaatcatacttatgttggcggacgatatggcctgtaacccaaggaacagctatcctgcccaagttttcaataatgagaaccaccagctaaatctctatggtgacaatgttgaggtcgattatcgagggtatgaggtgacagttgaaaatttcttgagagttttgactggccgacatgaaagtgctgtaccaagatcgaagcgtcttcttagtgatgaaggaagtcatatacttttgtacatgactggacatggtggtgatgaatttttgaagttccaagattctgaagagcttcagagccatgacttagcagatgctgtgaagcaaatgaaggagaagcatagatttaaagagctgctgataatggtagatacctgccaagctgctactctcttttcacagcttcagtcacctggtgttttggcgattggtagtagcatgaagggtgaaaactcttattctcaccatcttgattcagatgtaggtgtttctgttgtggataggtttacctattatacacttgctttctttgagaaactgaacatgtatagcaatgcctcactgaacagccttttcacctcatacaatccttccatgctgttgtctactgcatattatcgaatggatctttatgaacgtcccttaaatgaggtgcctgtgacaaatttttttggatcagtcatgaagactctccacactgattcagcctacacaggtttcttggctgcgcatgacaatgaaactccaatgtccacgggagataaccttgatgatcatttcatgttaaagggcagggctatcgcacgaagatcaaccatagaaaaggaggcacaattaacaccgcatggatggactgaagttctggctgaacagctggagggaaagaatactgatactgttgtgatgtatggtctgggagctatgggtatactgttggcactttcaacctggttatcaatgt

SEQ ID NO: 2023 - protein, 402 aa, Zea mays subsp. mays
  peptide (1)..(402): Ceres Seq. ID no. 12351965
MAFGRRSPGSSRHPPALTIVTALLLASLYFAAAAAALSPTDAMHNNNWAVLVCTSRFWFNYRHMANTLSLYRTVKRLGIPDERIILMLADDMACNPRNSYPAQVFNNENHQLNLYGDNVEVDYRGYEVTVENFLRVLTGRHESAVPRSKRLLSDEGSHILLYMTGHGGDEFLKFQDSEELQSHDLADAVKQMKEKHRFKELLIMVDTCQAATLFSQLQSPGVLAIGSSMKGENSYSHHLDSDVGVSVVDRFTYYTLAFFEKLNMYSNASLNSLFTSYNPSMLLSTAYYRMDLYERPLNEVPVTNFFGSVMKTLHTDSAYTGFLAAHDNETPMSTGDNLDDHFMLKGRAIARRSTIEKEAQLTPHGWTEVLAEQLEGKNTDTVVMYGLGAMGILLALSTWLSM

SEQ ID NO: 2024 - protein, 360 aa, Zea mays subsp. mays
  peptide (1)..(360): Ceres Seq. ID no. 12351966
MHNNNWAVLVCTSRFWFNYRHMANTLSLYRTVKRLGIPDERIILMLADDMACNPRNSYPAQVFNNENHQLNLYGDNVEVDYRGYEVTVENFLRVLTGRHESAVPRSKRLLSDEGSHILLYMTGHGGDEFLKFQDSEELQSHDLADAVKQMKEKHRFKELLIMVDTCQAATLFSQLQSPGVLAIGSSMKGENSYSHHLDSDVGVSVVDRFTYYTLAFFEKLNMYSNASLNSLFTSYNPSMLLSTAYYRMDLYERPLNEVPVTNFFGSVMKTLHTDSAYTGFLAAHDNETPMSTGDNLDDHFMLKGRAIARRSTIEKEAQLTPHGWTEVLAEQLEGKNTDTVVMYGLGAMGILLALSTWLSM

SEQ ID NO: 2025 - protein, 339 aa, Zea mays subsp. mays
  peptide (1)..(339): Ceres Seq. ID no. 12351967
MANTLSLYRTVKRLGIPDERIILMLADDMACNPRNSYPAQVFNNENHQLNLYGDNVEVDYRGYEVTVENFLRVLTGRHESAVPRSKRLLSDEGSHILLYMTGHGGDEFLKFQDSEELQSHDLADAVKQMKEKHRFKELLIMVDTCQAATLFSQLQSPGVLAIGSSMKGENSYSHHLDSDVGVSVVDRFTYYTLAFFEKLNMYSNASLNSLFTSYNPSMLLSTAYYRMDLYERPLNEVPVTNFFGSVMKTLHTDSAYTGFLAAHDNETPMSTGDNLDDHFMLKGRAIARRSTIEKEAQLTPHGWTEVLAEQLEGKNTDTVVMYGLGAMGILLALSTWLSM

SEQ ID NO: 2026 - DNA, 1477 bp, Zea mays subsp. mays
  misc_feature (1)..(1477): Ceres Seq. ID no. 12405682
  misc_feature (1)..(1477): Ortholog of  Ceres SEQ ID NO 12616212 as cited in SEQ ID NO 63390
aaaagactgcgagtgcgcatccttcgtccttccccttcccagccgccctctccccccctctcccggtcgcctctaacgtcgctggtgactcacgaagacctccatcgacggcggtgaaactggggccgacttctggagggtttgacttgttggatacagcgctggctcttccaatcgccgggtgctctctgccactctgtcttgcggagccctcaccgcggaaaccagttggtgcgcgtggccatggcggtggcgaaggtcaaatcggtcgccctctccgtcagtcacaagtgccggaacatcttggccgccggttgggaagcccacctcaacactgtcaaggctgacaacaagggaagcaagaatgagatttacacgtcgagggtgcactacatgatccataagggcacgccctacttgattgtccccgagaacgacatgcacaacattaacattataatcgatgagcgggggtctcttgcagtattcagtccgatccgtggccgagttgcgagcttattgaagccatcgaagacacctcctcgtgttgctatgactggtgatgttctgcgcctgaaagactcaaaggttccaattattgccgatagcctgaagcaaactattctgaaggaacatgaagctgctagtaaagctagttatggagtgtcagcaatactgtcttcggcaggtgctacctgcaggtcccggagtgagggcctccttagtctactcagtgaggagagctcttacaacatcttaaaatttgacataggttcctgtgtctacatagacttcaatgggagcagccataatattgaattggacagctttgaagcaccaaaagcagatctgctaatgccattctctgcgaagcttgtggatggtatcaaccaaaatgactctaggaggagggcactggtgatgttctgttttgcgtattttaatagcgctgtcatgctttccattgaccaccatggttttgatgtcctcgccaaagtgcctcaaggagacatccttactaatccacaataccactggaaggagttcaggttcacattcaaggaacctgccaaggatgctgaggacttctgccgcatgctggttgggttagaggaagagggtttgcagaccgtgaagagctgtagcggttacggttgacaacccacttgcaaggttcacattcaaggaaccagccaaggatgctgaggactctgccgcatgctggttcgattagagggattttgcagcgcgtgaagagctatagcggtctaggtgacagctcacttgccacaaaaccagtgagaaactatatatccgttattttggaactttgaaatatggttttagattgctatgttttattcgaagatctatggcttctcgaatttaatagagtagatgatgtttgaacatggagccgtaaactatcaatatctgtttgaatggtatttatataaataataaaactggtaacggc

SEQ ID NO: 2027 - protein, 304 aa, Zea mays subsp. mays
  peptide (1)..(304): Ceres Seq. ID no. 12405683
MAVAKVKSVALSVSHKCRNILAAGWEAHLNTVKADNKGSKNEIYTSRVHYMIHKGTPYLIVPENDMHNINIIIDERGSLAVFSPIRGRVASLLKPSKTPPRVAMTGDVLRLKDSKVPIIADSLKQTILKEHEAASKASYGVSAILSSAGATCRSRSEGLLSLLSEESSYNILKFDIGSCVYIDFNGSSHNIELDSFEAPKADLLMPFSAKLVDGINQNDSRRRALVMFCFAYFNSAVMLSIDHHGFDVLAKVPQGDILTNPQYHWKEFRFTFKEPAKDAEDFCRMLVGLEEEGLQTVKSCSGYG

SEQ ID NO: 2028 - protein, 254 aa, Zea mays subsp. mays
  peptide (1)..(254): Ceres Seq. ID no. 12405684
MIHKGTPYLIVPENDMHNINIIIDERGSLAVFSPIRGRVASLLKPSKTPPRVAMTGDVLRLKDSKVPIIADSLKQTILKEHEAASKASYGVSAILSSAGATCRSRSEGLLSLLSEESSYNILKFDIGSCVYIDFNGSSHNIELDSFEAPKADLLMPFSAKLVDGINQNDSRRRALVMFCFAYFNSAVMLSIDHHGFDVLAKVPQGDILTNPQYHWKEFRFTFKEPAKDAEDFCRMLVGLEEEGLQTVKSCSGYG

SEQ ID NO: 2029 - protein, 239 aa, Zea mays subsp. mays
  peptide (1)..(239): Ceres Seq. ID no. 12405685
MHNINIIIDERGSLAVFSPIRGRVASLLKPSKTPPRVAMTGDVLRLKDSKVPIIADSLKQTILKEHEAASKASYGVSAILSSAGATCRSRSEGLLSLLSEESSYNILKFDIGSCVYIDFNGSSHNIELDSFEAPKADLLMPFSAKLVDGINQNDSRRRALVMFCFAYFNSAVMLSIDHHGFDVLAKVPQGDILTNPQYHWKEFRFTFKEPAKDAEDFCRMLVGLEEEGLQTVKSCSGYG

SEQ ID NO: 2030 - DNA, 1339 bp, Zea mays subsp. mays
  misc_feature (1)..(1339): Ceres Seq. ID no. 12405822
  misc_feature (1)..(1339): Ortholog of  Ceres SEQ ID NO 12625805 as cited in SEQ ID NO 65246
cggttctttaattgcgcgccaatctgttttatatatacggagagagcactcctgttttgtggcaaattctattactagctgcaaaagggcgtgtttgagactagcggaccgaccttgaagttgaagttgaaaaggccggcctgcgcggcgatggatgtcaagtgccggcgtctggaggggaaggtggccatcgtgacggcgtccacgatggggatcggcctcgccatcgccgagcgcctcggtctggagggcgccgccgtcgtcatctcctcccgcaagcagaagaacgtgaacgaggcggtggaggggctcagggccaagggtatcaccgcggttggtgccgtctgccacgtctccgacgcacagcagcgcaagagcctcatcgagacggccgtcaagagctttgggcacatagatattcttgtctccaatgctgccgcaaatccttctgtagatagcatacttgaaatgaaagagtctgttctcgataagttgtgggatattaacgtcaaggcttctatccttcttatccaggatgctgctcctcacctacggaaggggtcatctgtgattattatttcttcaattgctggttacaatccagaacaaggattgacaatgtatagtgtcacaaagactgctctctttggtctcacgaaggctcttgctggtgagatgggacccgatactcgtgttaactgtatagcccctggttttgttcctacacggtttgctagtttcctcacagaaaatgagaccattaggaaagagcttaacgagaggaccaagcttaagagattgggtactgtggaagacatggctgcggctgcggctttcctggcatctgacgacgcatcatacattacggctgaaaccattgttgttgctggaggggtgcagtctaggctgtaaatctggctgaagtttatatttacttggttaataatgtgtactagtgccctaggcgtggctaataatgtgtactagtgccgctagagcatcaggctaccttctatatatgacaggcaactctaaaatattttctatatcttattcctcttcaataatgtcctctctatcagcatcttctatatgtcgttctccagtctccacgcttaaaaaaatttgtattaaggatatattttgttttcagttttttttaagcgtggagaacataagtagcctcggttcatgaatcagatgtatggattattgtaacgcattcttgaaagggaaaaacatgtattatagcgtgataactgtaccttttgtgtttgttgtacagaaccatagaattgtacttcattttaggtgaagacgcctttgaacatttaagccc

SEQ ID NO: 2031 - protein, 253 aa, Zea mays subsp. mays
  peptide (1)..(253): Ceres Seq. ID no. 12405823
MDVKCRRLEGKVAIVTASTMGIGLAIAERLGLEGAAVVISSRKQKNVNEAVEGLRAKGITAVGAVCHVSDAQQRKSLIETAVKSFGHIDILVSNAAANPSVDSILEMKESVLDKLWDINVKASILLIQDAAPHLRKGSSVIIISSIAGYNPEQGLTMYSVTKTALFGLTKALAGEMGPDTRVNCIAPGFVPTRFASFLTENETIRKELNERTKLKRLGTVEDMAAAAAFLASDDASYITAETIVVAGGVQSRL

SEQ ID NO: 2032 - protein, 234 aa, Zea mays subsp. mays
  peptide (1)..(234): Ceres Seq. ID no. 12405824
MGIGLAIAERLGLEGAAVVISSRKQKNVNEAVEGLRAKGITAVGAVCHVSDAQQRKSLIETAVKSFGHIDILVSNAAANPSVDSILEMKESVLDKLWDINVKASILLIQDAAPHLRKGSSVIIISSIAGYNPEQGLTMYSVTKTALFGLTKALAGEMGPDTRVNCIAPGFVPTRFASFLTENETIRKELNERTKLKRLGTVEDMAAAAAFLASDDASYITAETIVVAGGVQSRL

SEQ ID NO: 2033 - protein, 147 aa, Zea mays subsp. mays
  peptide (1)..(147): Ceres Seq. ID no. 12405825
MKESVLDKLWDINVKASILLIQDAAPHLRKGSSVIIISSIAGYNPEQGLTMYSVTKTALFGLTKALAGEMGPDTRVNCIAPGFVPTRFASFLTENETIRKELNERTKLKRLGTVEDMAAAAAFLASDDASYITAETIVVAGGVQSRL

SEQ ID NO: 2034 - DNA, 1309 bp, Zea mays subsp. mays
  misc_feature (1)..(1309): Ceres Seq. ID no. 12365183
  misc_feature (1)..(1309): Ortholog of  Ceres SEQ ID NO 14315892 as cited in SEQ ID NO 57776
  misc_feature (1)..(1309): Ortholog of  Ceres SEQ ID NO 13662173 as cited in SEQ ID NO 62002
atgcacaggcggactcgcggactcggggctcgtaccaacaggaaaaaaggcccagaggcagtgccgtgaccgattcgagacgcaagagaaggatcgagacgaggcggcggttttccggggcagcatcgtctcggccacgaagatgtcttactcaaggggctcaaggtatggatctcgctcaccttactcgagaagcacaaggtaccgaagtcgctctaggagtgtcgactctagtgatgctgaaaaccctgggaacaacctgtatgtgactggtttgtcggctcgtgtaacggatcgagatctggagaagcacttctccactgagggtgaggtgattgatgcaagcgttgtgtatgatccttggacaagggaatcacgggggtttggttttgttaccatggctgctgttaaagatgcagatcgctgcatcaaatatctggaccgttctgtgttgcaaggtcgggtcataactgttgagaagggtagatgttggtagctgctctgcaacaaactgatacaacctaacaccaaaccatgccaacctcagccaaagggcaaagagaagacgaggtagaaccccaacacctgggaagtatcttggcacaaaatcatcccgtggacggaggtactccacaagctactcacctgatcggaggggccgttacagttcccgctactcacctgatcggagggactgtcatggtagagaccggtcatactctccatatgacagaaggcgatcatactctccttacggcagggatgaatcatattccccttactatggccggcgatcatactcaccttactacagcagacggtatcgttcaaggtccccatactgctacagaagacgcaggtcaccttctgtttcgccatactaccgccggcacaggtacagatctgtctccaagtcatccagttcatctccaagggccagaggacggagctattcgtgcagtttatcaccacagagaagctactcgcgcagccattccccagaatccgagagatcaacaagctattctcctaagaaagggagtaaaagggaaccctcgcgtagcagatactctggcaagagtcgtcattcaagggaaagccactctcatagccgcagttcgtactccaggtctgtgtccagggagcgctcagcttgatctgcgaggtgtgtcgtcctaggtggttataagatatgcgctgtatttgcatctatcagaacttgtgtacttcgtatattacgaacttgagaactgtatggatgtgtgcattgtgccaaattatgttcattctgtgctatctttctgatgct

SEQ ID NO: 2035 - protein, 214 aa, Zea mays subsp. mays
  peptide (1)..(214): Ceres Seq. ID no. 12365184
MPTSAKGQREDEVEPQHLGSILAQNHPVDGGTPQATHLIGGAVTVPATHLIGGTVMVETGHTLHMTEGDHTLLTAGMNHIPLTMAGDHTHLTTADGIVQGPHTATEDAGHLLFRHTTAGTGTDLSPSHPVHLQGPEDGAIRAVYHHREATRAAIPQNPRDQQAILLRKGVKGNPRVADTLARVVIQGKATLIAAVRTPGLCPGSAQLDLRGVSS

SEQ ID NO: 2036 - protein, 164 aa, Zea mays subsp. mays
  peptide (1)..(164): Ceres Seq. ID no. 12365185
CTGGLADSGLVPTGKKAQRQCRDRFETQEKDRDEAAVFRGSIVSATKMSYSRGSRYGSRSPYSRSTRYRSRSRSVDSSDAENPGNNLYVTGLSARVTDRDLEKHFSTEGEVIDASVVYDPWTRESRGFGFVTMAAVKDADRCIKYLDRSVLQGRVITVEKGRCW

SEQ ID NO: 2037 - protein, 159 aa, Zea mays subsp. mays
  peptide (1)..(159): Ceres Seq. ID no. 12365186
MVETGHTLHMTEGDHTLLTAGMNHIPLTMAGDHTHLTTADGIVQGPHTATEDAGHLLFRHTTAGTGTDLSPSHPVHLQGPEDGAIRAVYHHREATRAAIPQNPRDQQAILLRKGVKGNPRVADTLARVVIQGKATLIAAVRTPGLCPGSAQLDLRGVSS

SEQ ID NO: 2038 - DNA, 1379 bp, Zea mays subsp. mays
  misc_feature (1)..(1379): Ceres Seq. ID no. 12353653
  misc_feature (1)..(1379): Ortholog of  Ceres SEQ ID NO 14305750 as cited in SEQ ID NO 52458
  misc_feature (1)..(1379): Ortholog of  Ceres SEQ ID NO 14314252 as cited in SEQ ID NO 57492
  misc_feature (1)..(1379): Ortholog of  Ceres SEQ ID NO 12608276 as cited in SEQ ID NO 57871
  misc_feature (1)..(1379): Ortholog of  Ceres SEQ ID NO 13598492 as cited in SEQ ID NO 63882
  misc_feature (1)..(1379): Ortholog of  Ceres SEQ ID NO 13657914 as cited in SEQ ID NO 66230
  misc_feature (1)..(1379): Ortholog of  Ceres SEQ ID NO 13595877 as cited in SEQ ID NO 67702
  misc_feature (1)..(1379): Ortholog of  Ceres SEQ ID NO 13622667 as cited in SEQ ID NO 0
cccagctagacctacagaaaaaaaactctaaaatagttgttggtaaaccagcaggtgagcagtcgaacatcgtggccgcctctgctcagcccagatctccgatggccaccgcacccgccgccccgccgccggcctccgcggacgacgagatcatctacgagtccatgccctgcatccgcgtctacaaggaccgcgtggagcgctacttcggcaccgagttcgtcgccgcctcgacgaacgactccaccggcgtggcctccagggacgtcgtcatctcccccaacgtctccgcgcgcctctacctcccgcgcctggacgacgggaacgccaagctccccatcttcgtctactaccacggcggcggcttctgcatcggctccgccttcaaccccatcttccacgactacttcaactgcctcgtggccctcgccgacatcctcgtcgtctccgtcgagtaccgcctcgccccggagcaccccgtccccgccgcctacgccgactcctgggaagcgctcgcctgggtcatctctcacctcggccccgccggcgacggcgcccgggacccgtggatcgcgagccacgccgacttctcccgcctcttcctgggcggcgagagcgcgggctccaacatcgcgcaccacatggcgatgcgcgctgccgcggaggggctggcccacggcgcccggatccggggactcgtcatgatccacccctacttcctgggcacggacaaggtgccctccgacgacctcagcccggaggtgcgcgagagcctggggtccctgtggcgcttcatgtgcccgaccaccacgggggaggacgacccgctcatcaaccccttcgttgacggcgccccgccgctagcgtccctgccgtgcggccgcgtgctcgtgtgcatcggcgagggcgacgtcctccgcgaccgcggccgcgcctactacgaccggctcagggccagcgggtggcccggcaaggcagagatttggcaggcgcccggcaagggacacacgttccacctcctggatccgtgctgcgacgaggccatcgcgcaggataaagtcatcagctacttcctcagccactgactcgcctcgcgtcctcgccggtggtggtggcgttgttgggcttggatcaaaattagcttctttcatgctggcgctacactacataccttacttctagtacatatcaggttcagagttgtatccgtattctttgaaattggatctcagaatggagctttgcccattgttagtaggcaatggtgttgatgtattgcacctggtaatttggggacgatgatacagtcatagtgtcatacatatgaaattatacttgtttgtcacacagaatttgttgaaacaaatgttccatctttt

SEQ ID NO: 2039 - protein, 360 aa, Zea mays subsp. mays
  peptide (1)..(360): Ceres Seq. ID no. 12353654
QLDLQKKNSKIVVGKPAGEQSNIVAASAQPRSPMATAPAAPPPASADDEIIYESMPCIRVYKDRVERYFGTEFVAASTNDSTGVASRDVVISPNVSARLYLPRLDDGNAKLPIFVYYHGGGFCIGSAFNPIFHDYFNCLVALADILVVSVEYRLAPEHPVPAAYADSWEALAWVISHLGPAGDGARDPWIASHADFSRLFLGGESAGSNIAHHMAMRAAAEGLAHGARIRGLVMIHPYFLGTDKVPSDDLSPEVRESLGSLWRFMCPTTTGEDDPLINPFVDGAPPLASLPCGRVLVCIGEGDVLRDRGRAYYDRLRASGWPGKAEIWQAPGKGHTFHLLDPCCDEAIAQDKVISYFLSH

SEQ ID NO: 2040 - protein, 327 aa, Zea mays subsp. mays
  peptide (1)..(327): Ceres Seq. ID no. 12353655
MATAPAAPPPASADDEIIYESMPCIRVYKDRVERYFGTEFVAASTNDSTGVASRDVVISPNVSARLYLPRLDDGNAKLPIFVYYHGGGFCIGSAFNPIFHDYFNCLVALADILVVSVEYRLAPEHPVPAAYADSWEALAWVISHLGPAGDGARDPWIASHADFSRLFLGGESAGSNIAHHMAMRAAAEGLAHGARIRGLVMIHPYFLGTDKVPSDDLSPEVRESLGSLWRFMCPTTTGEDDPLINPFVDGAPPLASLPCGRVLVCIGEGDVLRDRGRAYYDRLRASGWPGKAEIWQAPGKGHTFHLLDPCCDEAIAQDKVISYFLSH

SEQ ID NO: 2041 - protein, 306 aa, Zea mays subsp. mays
  peptide (1)..(306): Ceres Seq. ID no. 12353656
MPCIRVYKDRVERYFGTEFVAASTNDSTGVASRDVVISPNVSARLYLPRLDDGNAKLPIFVYYHGGGFCIGSAFNPIFHDYFNCLVALADILVVSVEYRLAPEHPVPAAYADSWEALAWVISHLGPAGDGARDPWIASHADFSRLFLGGESAGSNIAHHMAMRAAAEGLAHGARIRGLVMIHPYFLGTDKVPSDDLSPEVRESLGSLWRFMCPTTTGEDDPLINPFVDGAPPLASLPCGRVLVCIGEGDVLRDRGRAYYDRLRASGWPGKAEIWQAPGKGHTFHLLDPCCDEAIAQDKVISYFLSH

SEQ ID NO: 2042 - DNA, 1005 bp, Zea mays subsp. mays
  misc_feature (1)..(1005): Ceres Seq. ID no. 13492805
  misc_feature (1)..(1005): Ortholog of  Ceres SEQ ID NO 14310291 as cited in SEQ ID NO 20682
  misc_feature (1)..(1005): Ortholog of  Ceres SEQ ID NO 14311256 as cited in SEQ ID NO 59050
  misc_feature (1)..(1005): Ortholog of  Ceres SEQ ID NO 13656079 as cited in SEQ ID NO 64220
aggagagcacaacgttacaaggacgcatcgaggagactacctacggccatggcgaggagaaggcttctcgcgctcgcctcccggctctacgggaggcctcaggcgacgcagccgtggcggcgacccccgccccggtttctctcctcagctgcgtccggcaccctcgatcacctgaagtcgccgcctttcgcgcgtccggctgcccggaaccccgcctcctatccatgggatcgattcggaggagggcagaagaggaccatgttcatccagacacagtcgaccccgaacccgcagtcactcatgttctatcctggaaagccagttatggagattgggagctctgatttccctaatgctcggactgcgatgacatcccctttggctaagtcgctttttgctattgatggagtaaccagggtattctttggatctgattttgtaactgttacaaaatcagaagaaacttcatgggattgcctcaaacctgaggtttttgctgcaataatggacttctactcatctgggcaaccactttttctggactcaaatgctgcagcttctatggacacagcaattcacgaggatgattctgaaatagttgccatgataaaagaattattggagactcgtattcgaccagctgttcaagatgacggcggtgacattgaataccgaggattcgacccagaaacaggaacagttaagcttaaaatgcaaggtgcctgcagcggctgtccaagttcgtcagtcacattgaagtctgggatagaaaacatgcttatgcactatgtgcctgaggtgaaaggagtagaacaggagttcgatggtgatgaggaagctgaagtggctggatagatcgagagagtttttacaggttttgagggtcaacacagcctgatgttatagcaacttcgcacgtacggtattgccgatcctgatgtatgcaggaggcaggcttagatagcagaggcgtcaatagtctnaaataacatccgttgcnctagt

SEQ ID NO: 2043 - protein, 284 aa, Zea mays subsp. mays
  peptide (1)..(284): Ceres Seq. ID no. 13492806
RRAQRYKDASRRLPTAMARRRLLALASRLYGRPQATQPWRRPPPRFLSSAASGTLDHLKSPPFARPAARNPASYPWDRFGGGQKRTMFIQTQSTPNPQSLMFYPGKPVMEIGSSDFPNARTAMTSPLAKSLFAIDGVTRVFFGSDFVTVTKSEETSWDCLKPEVFAAIMDFYSSGQPLFLDSNAAASMDTAIHEDDSEIVAMIKELLETRIRPAVQDDGGDIEYRGFDPETGTVKLKMQGACSGCPSSSVTLKSGIENMLMHYVPEVKGVEQEFDGDEEAEVAG

SEQ ID NO: 2044 - protein, 268 aa, Zea mays subsp. mays
  peptide (1)..(268): Ceres Seq. ID no. 13492807
MARRRLLALASRLYGRPQATQPWRRPPPRFLSSAASGTLDHLKSPPFARPAARNPASYPWDRFGGGQKRTMFIQTQSTPNPQSLMFYPGKPVMEIGSSDFPNARTAMTSPLAKSLFAIDGVTRVFFGSDFVTVTKSEETSWDCLKPEVFAAIMDFYSSGQPLFLDSNAAASMDTAIHEDDSEIVAMIKELLETRIRPAVQDDGGDIEYRGFDPETGTVKLKMQGACSGCPSSSVTLKSGIENMLMHYVPEVKGVEQEFDGDEEAEVAG

SEQ ID NO: 2045 - protein, 198 aa, Zea mays subsp. mays
  peptide (1)..(198): Ceres Seq. ID no. 13492808
MFIQTQSTPNPQSLMFYPGKPVMEIGSSDFPNARTAMTSPLAKSLFAIDGVTRVFFGSDFVTVTKSEETSWDCLKPEVFAAIMDFYSSGQPLFLDSNAAASMDTAIHEDDSEIVAMIKELLETRIRPAVQDDGGDIEYRGFDPETGTVKLKMQGACSGCPSSSVTLKSGIENMLMHYVPEVKGVEQEFDGDEEAEVAG

SEQ ID NO: 2046 - DNA, 1157 bp, Zea mays subsp. mays; identical to SEQ ID NO: 1745
  misc_feature (1)..(1157): Ceres Seq. ID no. 12373468
  misc_feature (1)..(1157): Ortholog of  Ceres SEQ ID NO 13574766 as cited in SEQ ID NO 33

SEQ ID NO: 2047 - protein, 189 aa, Zea mays subsp. mays; identical to SEQ ID NO: 1746
  peptide (1)..(189): Ceres Seq. ID no. 12373469

SEQ ID NO: 2048 - protein, 137 aa, Zea mays subsp. mays; identical to SEQ ID NO: 1747
  peptide (1)..(137): Ceres Seq. ID no. 12373470

SEQ ID NO: 2049 - protein, 101 aa, Zea mays subsp. mays; identical to SEQ ID NO: 1748
  peptide (1)..(101): Ceres Seq. ID no. 12373471

SEQ ID NO: 2050 - DNA, 1168 bp, Zea mays subsp. mays
  misc_feature (1)..(1168): Ceres Seq. ID no. 13493084
  misc_feature (1)..(1168): Ortholog of  Ceres SEQ ID NO 14308120 as cited in SEQ ID NO 58423
  misc_feature (1)..(1168): Ortholog of  Ceres SEQ ID NO 12617197 as cited in SEQ ID NO 63406
  misc_feature (1)..(1168): Ortholog of  Ceres SEQ ID NO 13597804 as cited in SEQ ID NO 64182
  misc_feature (1)..(1168): Ortholog of  Ceres SEQ ID NO 13598565 as cited in SEQ ID NO 65250
  misc_feature (1)..(1168): Ortholog of  Ceres SEQ ID NO 13598597 as cited in SEQ ID NO 65496
  misc_feature (1)..(1168): Ortholog of  Ceres SEQ ID NO 13596284 as cited in SEQ ID NO 68273
atcgaaaacttcaatgtgcacaatataaactagctgggatcaaatacaggagcacctcgagtctgagagaatggctaacactgctaagggtaaggtctgtgtcactggggcgtctggtttcatcgcctcctggctcgtcaagcggcttcttgagtctgggtaccatgtcctgggaacagtcagagacccagggaatggcaagaaagtagggcacctctggggcctggaaggcgcaaaggaaaggctgcagctcgtgagagctgatctcttggaggaagggagcttcgacgacgctgtgatggcttgcgagggcgtcttccacaccgcatcgcccgtcgtcaccggatctaattccaaggaggagatgcttgattcagcaataaacggcacgatgaacgtgctacgctcgtgcaagaagaacccatcgctcangagggttgtcctgacatcctcgtcgtcgacagtgaggatcaaggacgaagccgacctgccccctaacgtgctgctggacgaatcgtcgtggagctccatcgagttctgcgaaagtctccagatatggtacgccgtcgcaaagatcctcgccgagaaggcagcctgggagttcgccggagagcacaggatcgacctcgtcaccgttcttccgaccttcgttgtcggacctactctgtctcctgagctcggccccaccgcttctgatgtcctcggcctgttccaaggagagacggggaagttcacgacgtacgggaggatggggtacgtccacatcgacgacgtggcgaggtgccacatgctggcgtacgaggccgcgggcgcccgagggaggtacatctgcagcgcggcggtgctggactgcggcgacctcgccgccctgctcgcgcggcggttcccagcgtaccccgtcccgaggagcctgccccgcgcctacggcgagcagtcgtacggcttcgacacgtccaaggcccgcgcgctggggctggcggaattcaagggcgtcgaggagatgttcgacgacgccgtcgcctcgttcataggccatggccatctccccgccgccgaggaacgccggcacgcgtagcctcttggtctgaaactacatgaatgaacgtatcatgtactaattaaattatttaatacttttaactagcatctaatcatgccgtttagtctc

SEQ ID NO: 2051 - protein, 334 aa, Zea mays subsp. mays
  peptide (1)..(334): Ceres Seq. ID no. 13493085
  misc_feature (121)..(121): Xaa is any aa, unknown or other
MANTAKGKVCVTGASGFIASWLVKRLLESGYHVLGTVRDPGNGKKVGHLWGLEGAKERLQLVRADLLEEGSFDDAVMACEGVFHTASPVVTGSNSKEEMLDSAINGTMNVLRSCKKNPSLXRVVLTSSSSTVRIKDEADLPPNVLLDESSWSSIEFCESLQIWYAVAKILAEKAAWEFAGEHRIDLVTVLPTFVVGPTLSPELGPTASDVLGLFQGETGKFTTYGRMGYVHIDDVARCHMLAYEAAGARGRYICSAAVLDCGDLAALLARRFPAYPVPRSLPRAYGEQSYGFDTSKARALGLAEFKGVEEMFDDAVASFIGHGHLPAAEERRHA

SEQ ID NO: 2052 - protein, 258 aa, Zea mays subsp. mays
  peptide (1)..(258): Ceres Seq. ID no. 13493086
  misc_feature (45)..(45): Xaa is any aa, unknown or other
MACEGVFHTASPVVTGSNSKEEMLDSAINGTMNVLRSCKKNPSLXRVVLTSSSSTVRIKDEADLPPNVLLDESSWSSIEFCESLQIWYAVAKILAEKAAWEFAGEHRIDLVTVLPTFVVGPTLSPELGPTASDVLGLFQGETGKFTTYGRMGYVHIDDVARCHMLAYEAAGARGRYICSAAVLDCGDLAALLARRFPAYPVPRSLPRAYGEQSYGFDTSKARALGLAEFKGVEEMFDDAVASFIGHGHLPAAEERRHA

SEQ ID NO: 2053 - protein, 236 aa, Zea mays subsp. mays
  peptide (1)..(236): Ceres Seq. ID no. 13493087
  misc_feature (23)..(23): Xaa is any aa, unknown or other
MLDSAINGTMNVLRSCKKNPSLXRVVLTSSSSTVRIKDEADLPPNVLLDESSWSSIEFCESLQIWYAVAKILAEKAAWEFAGEHRIDLVTVLPTFVVGPTLSPELGPTASDVLGLFQGETGKFTTYGRMGYVHIDDVARCHMLAYEAAGARGRYICSAAVLDCGDLAALLARRFPAYPVPRSLPRAYGEQSYGFDTSKARALGLAEFKGVEEMFDDAVASFIGHGHLPAAEERRHA

SEQ ID NO: 2054 - DNA, 1514 bp, Zea mays subsp. mays
  misc_feature (1)..(1514): Ceres Seq. ID no. 12340715
  misc_feature (1)..(1514): Ortholog of  Ceres SEQ ID NO 13638540 as cited in SEQ ID NO 51531
  misc_feature (1)..(1514): Ortholog of  Ceres SEQ ID NO 13595337 as cited in SEQ ID NO 56160
  misc_feature (1)..(1514): Ortholog of  Ceres SEQ ID NO 12615230 as cited in SEQ ID NO 62513
aaaacagccgcatccctctctccctactacctctccctagcagcgganagcttctctcccagccgcagctcctccctctgtcccctctcccaaaacccctctctctccacgcttctccctcactctcccagccgctgcagccgcgctgncctccgccccggcgcccgtcgcgctgccctcccatctccctccggtgttgngtngtcatttgtcaggtagccgcctcccccccccccccccccctnttnagcttgttctccncggcggcggcggcggcggcttggatcggagcggagggagaagatggtggcatcaatcagggtgcccaagacccaacgcgccaggagggagcttctcaagcacgcgcccaagcttgttgagaccagcaagaagacactgatcctccatggtaccaagactagtgctgtgttgaactctgtgctgtcagatatttaccacctaaagcgtgataatgctgtgaaatataccaagaagaatgacaacattaggccttttgaaagtggtggagaatcttctctggaatttttctccctcaaggcagactgtagccttatagtgtatggttctcattcaaagaagaggcccaacaatctgattttggctagaacgtatgaccaccacatatatgaccttgttgaagtaggagttgagaactacaagtcaatggaatcttatgtttatgataagaagctagcaccattacttggatcgaagcctttctttgctttcataggggaacactttgagagttctgaagagctgaaacatttgaaagaagtgctgcttgatcttttcagaggagaggtcgtagagaatctgaaccttgccggtgtggatcggatctatgtgtgcactgcaatctctcccaccactgtttacatgatgcactgtgctctccgtctaaaaaggtcaggtacatctattcctaggatggagctggtcgaagttggaccttcaatggatctggttgtaaggaggcacagacttccagctgaaagtttgaagaaagaagctatgaagaccgctgaacatgctaagaagatgaaaaatgtcaccaaggatccagtgcagggcaagctgggcaaggtctacatgccagaccagcaggttggaaagttgaccttatcaaacgacgtaaagggactaaagagggagcgccgcgaagccaagaaaaatcaggactcaaagaagcaaaaggtcaaccctgagtaaagagcactgaagtttacctttgtattggatacaggtcaggttaagaaaccctggcttgtatctgtttccaactgctgtgttatccaagtagaagttgctcgctgtcagattagtgccatcttgttaggctaaagatctctgtacgactttcacatcagtattgtgtaccaatccatgttatgacataagcatggaattttgagaatgtgttatcctatcaaatatcaaacgtcttctgaggtctcaagccctgttaaaggaggattgtggtaggcttggcg

SEQ ID NO: 2055 - protein, 309 aa, Zea mays subsp. mays
  peptide (1)..(309): Ceres Seq. ID no. 12340716
MVASIRVPKTQRARRELLKHAPKLVETSKKTLILHGTKTSAVLNSVLSDIYHLKRDNAVKYTKKNDNIRPFESGGESSLEFFSLKADCSLIVYGSHSKKRPNNLILARTYDHHIYDLVEVGVENYKSMESYVYDKKLAPLLGSKPFFAFIGEHFESSEELKHLKEVLLDLFRGEVVENLNLAGVDRIYVCTAISPTTVYMMHCALRLKRSGTSIPRMELVEVGPSMDLVVRRHRLPAESLKKEAMKTAEHAKKMKNVTKDPVQGKLGKVYMPDQQVGKLTLSNDVKGLKRERREAKKNQDSKKQKVNPE

SEQ ID NO: 2056 - protein, 182 aa, Zea mays subsp. mays
  peptide (1)..(182): Ceres Seq. ID no. 12340717
MESYVYDKKLAPLLGSKPFFAFIGEHFESSEELKHLKEVLLDLFRGEVVENLNLAGVDRIYVCTAISPTTVYMMHCALRLKRSGTSIPRMELVEVGPSMDLVVRRHRLPAESLKKEAMKTAEHAKKMKNVTKDPVQGKLGKVYMPDQQVGKLTLSNDVKGLKRERREAKKNQDSKKQKVNPE

SEQ ID NO: 2057 - DNA, 1370 bp, Zea mays subsp. mays
  misc_feature (1)..(1370): Ceres Seq. ID no. 12377688
  misc_feature (1)..(1370): Ortholog of  Ceres SEQ ID NO 13594740 as cited in SEQ ID NO 51721
  misc_feature (1)..(1370): Ortholog of  Ceres SEQ ID NO 14316497 as cited in SEQ ID NO 58285
  misc_feature (1)..(1370): Ortholog of  Ceres SEQ ID NO 13595944 as cited in SEQ ID NO 68153
acacacatacactcactcgtacgccgtcgcttcctgcggtacgtactctctgtccgcagcgttcctccagctagtagcagtagcagctagctagctagctagcaactggccatcggggctgctagcagcgtacgtacgtggcgcgatggctcctccagctcatgataggctccgccgcctggtgctgctcctcgtcgttgccaccgccgcggcggctttgcttctggcgccgacgacggcggatgctgcgctgccgcgggtgcagcacacgcccaccaaggccgacgggtcgctcgccatcctcgtcgtcggcgactggggccgccgtggacagttcaaccagaccttggttgcccagcagatgggcgtggtggggcagaagctggacatcgacttcgtcatctccaccggcgacaacatctacgacgacggcatcgccaacactagcgaccccctcttcaaggaatcgttctccaatatctacactgccaacagccttcagaagccttggtacctggtccttggtaaccatgactacacgggaaacgcgctcgcgcagctcgaccctgccattcgcaaagtggatagccggtacaccgccattgccaagtccttcattgtcaactcagggattgcggattttttcctcgtcgacacaacgccgttcattgtccactactggaacaacaccaagttcgattggagaggcgtcgctcctcgagacacctacatcgcgaatctcctcaaggacttgaagtgtgcactgacagcgtccaaggctccctggaagatcgtcgtgggtcaccaccccatcagcagcgcctgcgggcatgggaacaacactgagctggaggagttgcttctcccggtcctcaggacacacggggttgacatgtacttgaatggccatgaccactgccttcagcgcgtcagcagcagagacagtcgtcttcagctactaaccagcggcggcgggtccaaggcatgggctggcaagttcaagcccaccctcgacaaagtggagttcctctacgacggccaggggttcatgtcgatgcgcctgagcaggacggaagcccgcctcgcgttcttcgacgtcgctggcagcgtcctgcactgctggaccatgcatgcccaaaaattaaagacgacgacgacgacgaccgctgctgctgctgggcactaaattaagctttgctgggtacgatgagttgatgatgcaattaattatttggttttgtcgtcttttcgtgcgtgagagggaagcaataataattaattgctgctgcttctgttgttgtgtgcacatgcatgtgagggtgtcaagtatgttcagcctcttgcaagataaaatctctcgtcttctgtgg

SEQ ID NO: 2058 - protein, 346 aa, Zea mays subsp. mays
  peptide (1)..(346): Ceres Seq. ID no. 12377689
MAPPAHDRLRRLVLLLVVATAAAALLLAPTTADAALPRVQHTPTKADGSLAILVVGDWGRRGQFNQTLVAQQMGVVGQKLDIDFVISTGDNIYDDGIANTSDPLFKESFSNIYTANSLQKPWYLVLGNHDYTGNALAQLDPAIRKVDSRYTAIAKSFIVNSGIADFFLVDTTPFIVHYWNNTKFDWRGVAPRDTYIANLLKDLKCALTASKAPWKIVVGHHPISSACGHGNNTELEELLLPVLRTHGVDMYLNGHDHCLQRVSSRDSRLQLLTSGGGSKAWAGKFKPTLDKVEFLYDGQGFMSMRLSRTEARLAFFDVAGSVLHCWTMHAQKLKTTTTTTAAAAGH

SEQ ID NO: 2059 - protein, 274 aa, Zea mays subsp. mays
  peptide (1)..(274): Ceres Seq. ID no. 12377690
MGVVGQKLDIDFVISTGDNIYDDGIANTSDPLFKESFSNIYTANSLQKPWYLVLGNHDYTGNALAQLDPAIRKVDSRYTAIAKSFIVNSGIADFFLVDTTPFIVHYWNNTKFDWRGVAPRDTYIANLLKDLKCALTASKAPWKIVVGHHPISSACGHGNNTELEELLLPVLRTHGVDMYLNGHDHCLQRVSSRDSRLQLLTSGGGSKAWAGKFKPTLDKVEFLYDGQGFMSMRLSRTEARLAFFDVAGSVLHCWTMHAQKLKTTTTTTAAAAGH

SEQ ID NO: 2060 - protein, 197 aa, Zea mays subsp. mays
  peptide (1)..(197): Ceres Seq. ID no. 12377691
MIGSAAWCCSSSLPPPRRLCFWRRRRRMLRCRGCSTRPPRPTGRSPSSSSATGAAVDSSTRPWLPSRWAWWGRSWTSTSSSPPATTSTTTASPTLATPSSRNRSPISTLPTAFRSLGTWSLVTMTTRETRSRSSTLPFAKWIAGTPPLPSPSLSTQGLRIFSSSTQRRSLSTTGTTPSSIGEASLLETPTSRISSRT

SEQ ID NO: 2061 - DNA, 1543 bp, Zea mays subsp. mays
  misc_feature (1)..(1543): Ceres Seq. ID no. 12405173
  misc_feature (1)..(1543): Ortholog of  Ceres SEQ ID NO 14304838 as cited in SEQ ID NO 59750
acggacgtacagaagggacgccgccggccacacaaaccgcaggttcgggagtgctccggaacccgccgccgcatccgcaccgcacgacgccacggctgacgactgggagccccgttcccctccaccgccacctccccgcgtagaagcagagagggaagcttagcagcgagaagccgagaaccctgtcgatctctcctgaagcaatccgctcatgtcgtgagctgaaccctacagttcgtatcacctcctctcgcagcagctgcagaaagagcaagggggatggccaaggacggaggccccgactggaacggcctgttcaagtggagcatcgcccacggagacggcaccaacccgccgcgtgctctcagtgaagaagacagaaaatggtttatggaggctatgcaagccaacacgatagatgttgtgaagaggatgaaggagatcactcgggtgatgagaactccacaagatgtcttgcagtctcagggtgtgaccccagagaacattgaagatatgttggatgagctacacgagcatgttgaatccattgacatggcaaatgatttacattctattggtggcctggatcccctgttcggttacttgaaaaattcaaatgctggcatccgcgcaaaggcagcagaagttgttagtacagtcgcgcagaataatcccaagagtcagcaacttgtcatggaatccaatggtctcgagccactgttgagaaacttcaaatcagatccaagtacaaatgcacgcacaaaagctttaggagccatatcttctataatacgtcataaccagcctggagtttccgcatttcgcctgggaaatggctatgctggattgaaggatgctcctggttctgatgatgccaaacttcaaaggaaagctctcaatctcatacaatacctgctacacaacaacaaggcagacaggagttttgctacagagcttggtcttccaaagctgatgatgcaccttgcggctagcgatgatcccttggtgcgtgaagctgctctaagcggcctccttgagttgtcacaggaccagacatctggtaatgcgctacctgaccaagacaagctgaaaagagatcctgaacctgaagagccgaatcgaaggggtcagtgcgatggactctgacgatctccatgccgcacgcgaggagcggcagctggtggactcactgtggaaggagtgctacagcgagcctcctctcagggagaagagcctcgtcgtgcttcctggagaggatgctccccaacagccgccaccagacgatacagtgaagatgtttgagccaccgctgggtgccctgggcggctgtaagacctgctgaggaaggagattctgattctggctgtggaaagaaggatccaccattgctgctaaagttttgacggtattcaaataccaattccaccactttggcttggtgttgggtgtggaagaaggctgtaagagcagagctgatggatggatggcttttgtcatatattgtatggcgcagtagcgtttctgataatgtgctctgcatttt

SEQ ID NO: 2062 - protein, 288 aa, Zea mays subsp. mays
  peptide (1)..(288): Ceres Seq. ID no. 12405174
MAKDGGPDWNGLFKWSIAHGDGTNPPRALSEEDRKWFMEAMQANTIDVVKRMKEITRVMRTPQDVLQSQGVTPENIEDMLDELHEHVESIDMANDLHSIGGLDPLFGYLKNSNAGIRAKAAEVVSTVAQNNPKSQQLVMESNGLEPLLRNFKSDPSTNARTKALGAISSIIRHNQPGVSAFRLGNGYAGLKDAPGSDDAKLQRKALNLIQYLLHNNKADRSFATELGLPKLMMHLAASDDPLVREAALSGLLELSQDQTSGNALPDQDKLKRDPEPEEPNRRGQCDGL

SEQ ID NO: 2063 - protein, 251 aa, Zea mays subsp. mays
  peptide (1)..(251): Ceres Seq. ID no. 12405175
MEAMQANTIDVVKRMKEITRVMRTPQDVLQSQGVTPENIEDMLDELHEHVESIDMANDLHSIGGLDPLFGYLKNSNAGIRAKAAEVVSTVAQNNPKSQQLVMESNGLEPLLRNFKSDPSTNARTKALGAISSIIRHNQPGVSAFRLGNGYAGLKDAPGSDDAKLQRKALNLIQYLLHNNKADRSFATELGLPKLMMHLAASDDPLVREAALSGLLELSQDQTSGNALPDQDKLKRDPEPEEPNRRGQCDGL

SEQ ID NO: 2064 - protein, 248 aa, Zea mays subsp. mays
  peptide (1)..(248): Ceres Seq. ID no. 12405176
MQANTIDVVKRMKEITRVMRTPQDVLQSQGVTPENIEDMLDELHEHVESIDMANDLHSIGGLDPLFGYLKNSNAGIRAKAAEVVSTVAQNNPKSQQLVMESNGLEPLLRNFKSDPSTNARTKALGAISSIIRHNQPGVSAFRLGNGYAGLKDAPGSDDAKLQRKALNLIQYLLHNNKADRSFATELGLPKLMMHLAASDDPLVREAALSGLLELSQDQTSGNALPDQDKLKRDPEPEEPNRRGQCDGL

SEQ ID NO: 2065 - DNA, 1611 bp, Zea mays subsp. mays
  misc_feature (1)..(1611): Ceres Seq. ID no. 12423958
  misc_feature (1)..(1611): Ortholog of  Ceres SEQ ID NO 14311025 as cited in SEQ ID NO 53369
  misc_feature (1)..(1611): Ortholog of  Ceres SEQ ID NO 13596872 as cited in SEQ ID NO 62785
gcacgagaccattacctagaacatcctaatcgaaaaaacaaagcccccaaaaccctacggccacctcgccacccccaacgaaaacccagaccacgagatggcccccggtggagagggcaagccaagcacgggcggcggcggcggcggcgtcaagggtgggaggaagcgcaagttccttccccacgggaagccggtgcggaagggggcctacccgctgcgccccggcgtgcagggcttcttcatcacctgcgacggcggccgcgagcaccaggccacccgcgaggcgctctccctcctcgactccttctatgaagacctggtggatgggaaaggatcggatgagaagcctaaaaacattccagacaagccactgaacaaaaagataaattttgaggactctgattcctcagatgatgaggatgaagacaactctggtgaggaagccgacaatgggaatgtgaatgatgtggagaaaggtgaaaccgctccatctgagaagcaacaggaggtgcttgatacctctaataccgcaagcaaggacaatactgctctatctgagaagaaagaggaggtgcttgatacctctgataccgtgagtaaggacaatgaggaacaagcagtcactgctgatgaaccaagagaaaagaagcaacgagtgnaagatcctccagtttttgagcaggccgtgcaaaaagagnntgntgatgaaccaaaggagtccnctgataaaccaaaggagtccagtgaaaaaaatattgacgatttaattgatgaggacctgaaagaaataggggacaggaaaaagaggctctttgcaagcctcgagacaggctgcaatggatgcatattcattcaaatgcataaaagagcaggagaccctggtccagttgagattgtacaaaacatgatgtcatctgctgcattgactcgtaaacatatgtcaagatttattctgcgagttttgcctgttgaggtggcatgctatgcatctgaagaggaaataacaaaggcaattagtccccttattgaaaagtacttcccaaaagaatgctcctcaggtcataagtttgcagtgttatatgaagcaaggtcaaacacaggaattgatagaatgaaaatcataaacgcagcagcgaaatctgtaccacaacctcataaagttgacctgaagaacccagacaagactattgttgtccagattgcaaagaccatatgcatgattggagttgtggaaaggtacaaagagctctcgaagttcaacctaaggcagctgacctcaccggagtcggagaagtaagcctatgagtgacaaaatcttccaggcaaaacgtggaccaacttaaatcagcagcagcgtcaggtggttaggcgctagcgaattaaattaaggccggccgaacctcactgtcttgaaagattcagatgttctaatgtttaatgctttaccaccagtggttagtggttgctggttcatgcttcccaggttagagtcacgatttttttttttttgaggctgtagaaagatctgacgatacttcatgtgtgctttctctctgacgatggttccatacaggggcttaccaaagacgtagaatctatcgttgcagctcc

SEQ ID NO: 2066 - protein, 399 aa, Zea mays subsp. mays
  peptide (1)..(399): Ceres Seq. ID no. 12423959
  misc_feature (188)..(188): Xaa is any aa, unknown or other
  misc_feature (201)..(201): Xaa is any aa, unknown or other
  misc_feature (202)..(202): Xaa is any aa, unknown or other
  misc_feature (209)..(209): Xaa is any aa, unknown or other
MAPGGEGKPSTGGGGGGVKGGRKRKFLPHGKPVRKGAYPLRPGVQGFFITCDGGREHQATREALSLLDSFYEDLVDGKGSDEKPKNIPDKPLNKKINFEDSDSSDDEDEDNSGEEADNGNVNDVEKGETAPSEKQQEVLDTSNTASKDNTALSEKKEEVLDTSDTVSKDNEEQAVTADEPREKKQRVXDPPVFEQAVQKEXXDEPKESXDKPKESSEKNIDDLIDEDLKEIGDRKKRLFASLETGCNGCIFIQMHKRAGDPGPVEIVQNMMSSAALTRKHMSRFILRVLPVEVACYASEEEITKAISPLIEKYFPKECSSGHKFAVLYEARSNTGIDRMKIINAAAKSVPQPHKVDLKNPDKTIVVQIAKTICMIGVVERYKELSKFNLRQLTSPESEK

SEQ ID NO: 2067 - DNA, 1418 bp, Zea mays subsp. mays
  misc_feature (1)..(1418): Ceres Seq. ID no. 12410901
  misc_feature (1)..(1418): Ortholog of  Ceres SEQ ID NO 13594727 as cited in SEQ ID NO 52169
  misc_feature (1)..(1418): Ortholog of  Ceres SEQ ID NO 13598714 as cited in SEQ ID NO 62656
  misc_feature (1)..(1418): Ortholog of  Ceres SEQ ID NO 13596969 as cited in SEQ ID NO 63375
  misc_feature (1)..(1418): Ortholog of  Ceres SEQ ID NO 13584480 as cited in SEQ ID NO 64751
  misc_feature (1)..(1418): Ortholog of  Ceres SEQ ID NO 13597870 as cited in SEQ ID NO 64982
  misc_feature (1)..(1418): Ortholog of  Ceres SEQ ID NO 13595926 as cited in SEQ ID NO 67778
  misc_feature (1)..(1418): Ortholog of  Ceres SEQ ID NO 13596362 as cited in SEQ ID NO 67877
  misc_feature (1)..(1418): Ortholog of  Ceres SEQ ID NO 13587054 as cited in SEQ ID NO 0
aggcacacacacttagacttagctatagtagctactactgtagtagatatatatgggtatggctgcaacaaggaggacgagagcaagctcaggtaataatgtcctcctcctgctggccatcggccttgtgttctccgcggcatcgacgacgacaccggctgtagcagctgcggcgttgaacggcagcgacgacgacattggtgctgctgccagggcggcgggcctgtccgtggacttccacgcggcgtcgtgcccggacctggacggcatcgtgcgctccgccgttgaggaggcgcggcggtgggacgcccaggtcacggcgggcctcctccgcatcttcttccacgactgcttcccgcagggctgcgacgcgtcgatcctgctgggcaggaaccagggcggcagcgagcaggacgcaccccagaacacgggcctgcagcaggcggcgctggacctcgtcgagaggatccgcggcagggtgcactcccgctgcggcgcctccgtctcctgcgccgacatcctggcgctcgccaccagccacgccgtcaaccaggccggcggccccttcatccctatggagctgggccgcagcgacagcaggggccccgctccaggatgggccgtcaacaggctcccgccccccaccgatggcgtctccgagctcctcggcaacttcggtaacaggggcctcgatggctccgacgtcgtggtgctctccggcgcgcacaccgtgggcgtggcgcgttgctcctcgttccaggaccgtatcgacaagaagaccggcaaggataacttcgagtgggggctcaccggctactgcaacggagacaaggagaagaagcacgcgctggaccgtacgcccttcaacttcgacaacagctacttcgtggagctgcagaacggcagaggggtgctcacctccgaccaggcgctctacagggacggccgcaccaggtggctcgtcgaccgctgcgcctccagccaggacgaattcttcaagcgcttcgtggaatccatgctcaagctcagcaggctcaggggggccgatccgggcccagtgcgcaacaactgcttcgtccgcgccagcttcggcgctagtagcgctaccaaagacgaccttgtcattgacaccaccgccggagacggagacggagacgaggaccttattcttgcagcagctgcatgatcgctgctgctacagtgtacttacatccgatccggccgctatcatatcgtcgtcgtcgtcgaataattaagcagatcaacatgtttgtttatttgcttattagtttctattccgcagtccgcactagctagctagctgctgtagtacctctcgtaatacaatgcatgcatgtaccttgcgtgttttagcgtggcacgcctccttaattcactcggtatttctttgatcatgc

SEQ ID NO: 2068 - protein, 377 aa, Zea mays subsp. mays
  peptide (1)..(377): Ceres Seq. ID no. 12410902
MGMAATRRTRASSGNNVLLLLAIGLVFSAASTTTPAVAAAALNGSDDDIGAAARAAGLSVDFHAASCPDLDGIVRSAVEEARRWDAQVTAGLLRIFFHDCFPQGCDASILLGRNQGGSEQDAPQNTGLQQAALDLVERIRGRVHSRCGASVSCADILALATSHAVNQAGGPFIPMELGRSDSRGPAPGWAVNRLPPPTDGVSELLGNFGNRGLDGSDVVVLSGAHTVGVARCSSFQDRIDKKTGKDNFEWGLTGYCNGDKEKKHALDRTPFNFDNSYFVELQNGRGVLTSDQALYRDGRTRWLVDRCASSQDEFFKRFVESMLKLSRLRGADPGPVRNNCFVRASFGASSATKDDLVIDTTAGDGDGDEDLILAAAA

SEQ ID NO: 2069 - protein, 375 aa, Zea mays subsp. mays
  peptide (1)..(375): Ceres Seq. ID no. 12410903
MAATRRTRASSGNNVLLLLAIGLVFSAASTTTPAVAAAALNGSDDDIGAAARAAGLSVDFHAASCPDLDGIVRSAVEEARRWDAQVTAGLLRIFFHDCFPQGCDASILLGRNQGGSEQDAPQNTGLQQAALDLVERIRGRVHSRCGASVSCADILALATSHAVNQAGGPFIPMELGRSDSRGPAPGWAVNRLPPPTDGVSELLGNFGNRGLDGSDVVVLSGAHTVGVARCSSFQDRIDKKTGKDNFEWGLTGYCNGDKEKKHALDRTPFNFDNSYFVELQNGRGVLTSDQALYRDGRTRWLVDRCASSQDEFFKRFVESMLKLSRLRGADPGPVRNNCFVRASFGASSATKDDLVIDTTAGDGDGDEDLILAAAA

SEQ ID NO: 2070 - protein, 203 aa, Zea mays subsp. mays
  peptide (1)..(203): Ceres Seq. ID no. 12410904
MELGRSDSRGPAPGWAVNRLPPPTDGVSELLGNFGNRGLDGSDVVVLSGAHTVGVARCSSFQDRIDKKTGKDNFEWGLTGYCNGDKEKKHALDRTPFNFDNSYFVELQNGRGVLTSDQALYRDGRTRWLVDRCASSQDEFFKRFVESMLKLSRLRGADPGPVRNNCFVRASFGASSATKDDLVIDTTAGDGDGDEDLILAAAA

SEQ ID NO: 2071 - DNA, 1056 bp, Zea mays subsp. mays
  misc_feature (1)..(1056): Ceres Seq. ID no. 13493663
  misc_feature (1)..(1056): Ortholog of  Ceres SEQ ID NO 15224625 as cited in SEQ ID NO 1390
ctcttattctcattcgattacacacacacacggagagatcaaattgatacactgcgatctcgatcaaacaaatcaaaaaaaaaaaaaaatcttgcgagacattactgaccgatgaagttcggcaagcgcctcaagaagcagatcgaggagagcctgccggagtggcggagccagttcctcaactacaaggagctgaagcggcgcgtgaatgccgtgtcctcccgcgggtcggcggcggatccgtcgtcgtccagcgccgcggaggccgacttcctgacgctcctggacgccgagatcgacaagttcaacgccttcttcctggagcgggaggaggagttcgtgatccggcagagggagctccaggagcgcatcgggcgtgcgggcgggcccgaggccacgctggcgcgcgtccggcgcgaggtggtggacttgcacggcgagatggtgctgctgctcaactacagcagcgtcaactacacgggcctcgccaagatcctcaagaagttcgacaagcgcaccggcggcgtgctccgcctccccgtcatcgcgcgggtgctgcggcagcccttcttcaccaccgacctcatctccgagctggtcagggactgcgaggccgcgatggaggccgtcttcccgcccgccgccagcagggacctccacgggcgccaggcgctggccgtcgccgggcagggcatcttccgcaacaccgtcgccgctctgctcaccatgcaggaggtgcgcagcgggagctccaccgtcggccatttctcgctgccgcccatgcagccgctgccggagtcggactggctcgtccagtccgttgacagcacgccgacggcgtcgcccctcatccccacccagtgactgacgacaccatggtccacttccagttccatggcactacagtgctacaccacagcggcgtattatatagtatgcaatatatataatctacatactgtagtagtggtgctcggtatgcggctgatgtgtacagtagtagtatttttttctctccttttgttgatgagacttgagaggtgtcctttttgctct

SEQ ID NO: 2072 - protein, 250 aa, Zea mays subsp. mays
  peptide (1)..(250): Ceres Seq. ID no. 13493664
MKFGKRLKKQIEESLPEWRSQFLNYKELKRRVNAVSSRGSAADPSSSSAAEADFLTLLDAEIDKFNAFFLEREEEFVIRQRELQERIGRAGGPEATLARVRREVVDLHGEMVLLLNYSSVNYTGLAKILKKFDKRTGGVLRLPVIARVLRQPFFTTDLISELVRDCEAAMEAVFPPAASRDLHGRQALAVAGQGIFRNTVAALLTMQEVRSGSSTVGHFSLPPMQPLPESDWLVQSVDSTPTASPLIPTQ

SEQ ID NO: 2073 - protein, 140 aa, Zea mays subsp. mays
  peptide (1)..(140): Ceres Seq. ID no. 13493665
MVLLLNYSSVNYTGLAKILKKFDKRTGGVLRLPVIARVLRQPFFTTDLISELVRDCEAAMEAVFPPAASRDLHGRQALAVAGQGIFRNTVAALLTMQEVRSGSSTVGHFSLPPMQPLPESDWLVQSVDSTPTASPLIPTQ

SEQ ID NO: 2074 - DNA, 1589 bp, Zea mays subsp. mays
  misc_feature (1)..(1589): Ceres Seq. ID no. 12373920
  misc_feature (1)..(1589): Ortholog of  Ceres SEQ ID NO 14307273 as cited in SEQ ID NO 54302
  misc_feature (1)..(1589): Ortholog of  Ceres SEQ ID NO 14315317 as cited in SEQ ID NO 58242
  misc_feature (1)..(1589): Ortholog of  Ceres SEQ ID NO 13655375 as cited in SEQ ID NO 63347
  misc_feature (1)..(1589): Ortholog of  Ceres SEQ ID NO 12626166 as cited in SEQ ID NO 64505
  misc_feature (1)..(1589): Ortholog of  Ceres SEQ ID NO 14301599 as cited in SEQ ID NO 65699
  misc_feature (1)..(1589): Ortholog of  Ceres SEQ ID NO 14301978 as cited in SEQ ID NO 0
  misc_feature (1)..(1589): Ortholog of  Ceres SEQ ID NO 14303290 as cited in SEQ ID NO 0
gcacgagaccattacctagaacatcctaatcgaaaaaatccaattcacaaacacacacgggcaatcaattagcagaacccgcgccaccccccttcctcggagtcggagcgagtcgaggaacggctcgtctgcctctcccgttctccttcctctcctccccagaagatccgatccatcatcgaggactcgccgggaagaatcaaggatatatagataatatacaaacaaaggttcctccagagcccagaggagggaagtcaccggccgtcggcggggaggagatgtcggacggcgcgggctcccggacgggcgtcgctggcgcgctgggcctctcggtcacctcgtcggtggccatcgtcatctgcaacaagtacctcatcagcactctaggcttcttcttcggtcacgacgacgctgacgagctggcacctcatggtgaccttcttcacgctgtacgttcgcgcagcggctgcgcttcttcgagccaaagccgatcgacgcgcgcaccgtcatctccttcggcctgctcaacggcatctccattggcctcctcaacctctgcctcgggttcaactctgttggcttctaccagatgaccaagctggccatcatacccttcaccatagtcttggaaaccctctttctgagcaagaagttcagagcatcaaggcctccctcatggttctgctgctgggagtcgggatcgcgtcggtcacggatctccagctcaacctcctcggctcgatcatcgccgtgctcaccatcgctgcgacatgcgtcgggcagattctgaccaaccaaatccagaggaggctgaaggtttcgtcgacgcagctgctgtaccagtcgtcgccgtaccagtccgcggtgctgctcgtcaccgggcctttcgtggacaagctcctcaccaagcgtgacgtcttcgcgttcagctacaccacccaagtcgtggtgttcatcctgctgtcgtgctcgatcgcggtgtgcgtaaacttcagcacgttcctggtgatcggcacgacgtcgcccgtgacgtaccaggtgctgggccacctcaagacgtgtttggtgctctccttcggctacatcatcctcaaagaccccttcagcgcgcgcaacgtggtgggcatcctcatcgccatcttcggcatgggcctctactcctactactccgtcgtcgagagcaggaagaagaccgaggacgctagctcgctgccggtcgccgcgcagatgagcgagaaggactcggcgccactcctcggcgccaagagctcgccgcggacagagaacaaggccgaggaaaccttcgactacatgccgaggacggccaagagcgcgttcaccggccggtgagcgcgtagcttgtaaggagtacgtatctttctagagttgtgggtagacgacgagcaacaaggcgggaatgtgttagtgaaagatgtaacggcggcaagtgacattccaattatcatttttgcgatttctcctctagggtggtctgcgtggtcatggtttaccagagcataaacagcagaatgtgtggtctactggtcttgaccgagcttgaaatagtagattggattggtgataat

SEQ ID NO: 2075 - protein, 306 aa, Zea mays subsp. mays
  peptide (1)..(306): Ceres Seq. ID no. 12373921
MVTFFTLYVRAAAALLRAKADRRAHRHLLRPAQRHLHWPPQPLPRVQLCWLLPDDQAGHHTLHHSLGNPLSEQEVQSIKASLMVLLLGVGIASVTDLQLNLLGSIIAVLTIAATCVGQILTNQIQRRLKVSSTQLLYQSSPYQSAVLLVTGPFVDKLLTKRDVFAFSYTTQVVVFILLSCSIAVCVNFSTFLVIGTTSPVTYQVLGHLKTCLVLSFGYIILKDPFSARNVVGILIAIFGMGLYSYYSVVESRKKTEDASSLPVAAQMSEKDSAPLLGAKSSPRTENKAEETFDYMPRTAKSAFTGR

SEQ ID NO: 2076 - protein, 224 aa, Zea mays subsp. mays
  peptide (1)..(224): Ceres Seq. ID no. 12373922
MVLLLGVGIASVTDLQLNLLGSIIAVLTIAATCVGQILTNQIQRRLKVSSTQLLYQSSPYQSAVLLVTGPFVDKLLTKRDVFAFSYTTQVVVFILLSCSIAVCVNFSTFLVIGTTSPVTYQVLGHLKTCLVLSFGYIILKDPFSARNVVGILIAIFGMGLYSYYSVVESRKKTEDASSLPVAAQMSEKDSAPLLGAKSSPRTENKAEETFDYMPRTAKSAFTGR

SEQ ID NO: 2077 - DNA, 1732 bp, Zea mays subsp. mays
  misc_feature (1)..(1732): Ceres Seq. ID no. 12341485
  misc_feature (1)..(1732): Ortholog of  Ceres SEQ ID NO 15177012 as cited in SEQ ID NO 56256
  misc_feature (1)..(1732): Ortholog of  Ceres SEQ ID NO 14314300 as cited in SEQ ID NO 57386
  misc_feature (1)..(1732): Ortholog of  Ceres SEQ ID NO 14311993 as cited in SEQ ID NO 60371
  misc_feature (1)..(1732): Ortholog of  Ceres SEQ ID NO 13596509 as cited in SEQ ID NO 62004
  misc_feature (1)..(1732): Ortholog of  Ceres SEQ ID NO 13659971 as cited in SEQ ID NO 67565
  misc_feature (1)..(1732): Ortholog of  Ceres SEQ ID NO 13500385 as cited in SEQ ID NO 67583
aacttcgacccggccggccctatcaaaagctggccccttccacagcgcactccctcaccttcctccacggctccaccatcccctcccctgccctgcccccaccgccccgcttccttccgccttgctccgttgcttcctcccaccacagtccactccactcgccggccctgcagctcagtatttgactgagactggtggtggagctgctagcagcgagcctgctacttcctggtcctgacggtgcgttcagacctcagaccagtgccgacgacgagctgtgaggagagggcaaggaagcaagcctgtgaggaaggcggcgatggagaggtacgaggtgatcaaggacataggatcgggcaacttcggggtggccaagctggtccgggacgtcaggaccaaggagctcttcgccgtcaagttcatcgagcgggggatgaagattgatgagaatgtccaaagggagatcatgaaccacaggtcactgaggcatccaaacatagttaaatttaaggaggttgtgctaactcccacacatttggccatagttatggaatatgctgctggtggtgagctatttgaaaggatctgtaatgctggaagatttagtgaggatgaggcgagatttttcttccaacaactgatttcaggagttagttattgccactcaatgcaaatatgccatagagatttgaaactagaaaacactctcctggatgatagtatagcacctcggctaaagatatgtgattttggttactccaagtcctctgtgttgcactctcaaccaaaatcaactgtcgggacaccagcttacattgctcctgaggtccttgctagaaaggaatatgatggaaaggtcgccgatgtttggtcatgtggagttactctgtatgtgatgcttgttggtgcctatccctttgaggaccccgacgaaccgaagaatttccgcaagacgcttactcggattatcagcgtccagtacgcggttcctgattttgtccgagtttcaatggagtgcaggcatctgctgtctcggatctttgtggcgaaacctgagcaacggataaccatcccagagatcaagaaccacccatggttcttgaagaacctgcccatcgagatgaccgacgagtaccagatgaacctacagctagtcgacatgaatgtcccctcgcaaagcctggaggagatcatgtccatcatactggaggcccggaagcccggcgacgggctgaagcatgcgggacagctccccggccttgggagcatggagctggatgacattgatgttgacgacatagacgttgaggacagtggcgactttgtatgtgccttgtgacgcggttcaggctgtccggcaccgttgctgcggtggactctcccccactctcctggtctttgtgtcttgctgttattccatgttgtttgtttcagcgagctccgagctcccattttgttgttgtaatatcacatgttttgtgtaaccaaggtagtgacgctgtggataaataatagacgttatgtgttgtattcttgctgaattgttgttcagctccttctgtttgccctgtatgaactgggcagtttcatgagtaccacaatgtgtatgttgatggctctgtcttcccttgtctcagcctgatattttgacctgctgcatgtagccaatgtgttttttcttgtatttttgctagaagcaatcttatgagttacgagtactattaccaccctg

SEQ ID NO: 2078 - protein, 339 aa, Zea mays subsp. mays
  peptide (1)..(339): Ceres Seq. ID no. 12341486
MERYEVIKDIGSGNFGVAKLVRDVRTKELFAVKFIERGMKIDENVQREIMNHRSLRHPNIVKFKEVVLTPTHLAIVMEYAAGGELFERICNAGRFSEDEARFFFQQLISGVSYCHSMQICHRDLKLENTLLDDSIAPRLKICDFGYSKSSVLHSQPKSTVGTPAYIAPEVLARKEYDGKVADVWSCGVTLYVMLVGAYPFEDPDEPKNFRKTLTRIISVQYAVPDFVRVSMECRHLLSRIFVAKPEQRITIPEIKNHPWFLKNLPIEMTDEYQMNLQLVDMNVPSQSLEEIMSIILEARKPGDGLKHAGQLPGLGSMELDDIDVDDIDVEDSGDFVCAL

SEQ ID NO: 2079 - protein, 301 aa, Zea mays subsp. mays
  peptide (1)..(301): Ceres Seq. ID no. 12341487
MKIDENVQREIMNHRSLRHPNIVKFKEVVLTPTHLAIVMEYAAGGELFERICNAGRFSEDEARFFFQQLISGVSYCHSMQICHRDLKLENTLLDDSIAPRLKICDFGYSKSSVLHSQPKSTVGTPAYIAPEVLARKEYDGKVADVWSCGVTLYVMLVGAYPFEDPDEPKNFRKTLTRIISVQYAVPDFVRVSMECRHLLSRIFVAKPEQRITIPEIKNHPWFLKNLPIEMTDEYQMNLQLVDMNVPSQSLEEIMSIILEARKPGDGLKHAGQLPGLGSMELDDIDVDDIDVEDSGDFVCAL

SEQ ID NO: 2080 - protein, 290 aa, Zea mays subsp. mays
  peptide (1)..(290): Ceres Seq. ID no. 12341488
MNHRSLRHPNIVKFKEVVLTPTHLAIVMEYAAGGELFERICNAGRFSEDEARFFFQQLISGVSYCHSMQICHRDLKLENTLLDDSIAPRLKICDFGYSKSSVLHSQPKSTVGTPAYIAPEVLARKEYDGKVADVWSCGVTLYVMLVGAYPFEDPDEPKNFRKTLTRIISVQYAVPDFVRVSMECRHLLSRIFVAKPEQRITIPEIKNHPWFLKNLPIEMTDEYQMNLQLVDMNVPSQSLEEIMSIILEARKPGDGLKHAGQLPGLGSMELDDIDVDDIDVEDSGDFVCAL

SEQ ID NO: 2081 - DNA, 878 bp, Zea mays subsp. mays
  misc_feature (1)..(878): Ceres Seq. ID no. 12367342
  misc_feature (1)..(878): Ortholog of  Ceres SEQ ID NO 13504447 as cited in SEQ ID NO 57609
aaaaaacacgcgaatcgtaccggcacgaacactgagcacgcacgcacgcaaactcaaaggagtgtgaccacggaactgaagccatggcggttacagttgagaagggcgctatgggcgagccggcgctgctgctggagcgcagccgggcgatcaccctgcacggccgtgaccggaagggccgtgccgtcgtcaggatcgtcggcaactattttccagcgcgcgcgctcggcggccgggcggaggaggcgctgcggtcgtacctgcgggagcgcgtcctcccggagatcggggacccgagttcgtggtcgtgtacatgcactcccgcgtggatcgcggccacaacttccccggcgtcggtgcgatccgcggcgcgtacgagacgctgccggccgcggccaaggagaggctgcgcgccgtctacttcgtgcacccggccctccaatccaggatcttcttcgccaccttcgggcgcttcctcttcagctcagggttgtatgagaagctgcgatacatgagccggcttgagtacgtttgggcccacatagacaaggagcagctggaggtccccgactgcgtgcgcgagcacgacgacgagctggagcgccgcccgctgatggactacggcatcgaggcgacggagacccgctgcatgtatgacgccgcgtccatggacacctcggcgtccctgcactcgctccgctgcgtctcctagtcgcctggacacttggacagtggcatcccgattcccgccgccggtacggcgtgctttctgtgttctggttggtaggaggtagctgcatggcttcatagcgcttcggtactgtagtttagctgtgtatttataatggataaagtttggagtaccgagatggcttctg

SEQ ID NO: 2082 - protein, 165 aa, Zea mays subsp. mays
  peptide (1)..(165): Ceres Seq. ID no. 12367343
KKHANRTGTNTEHARTQTQRSVTTELKPWRLQLRRALWASRRCCWSAAGRSPCTAVTGRAVPSSGSSATIFQRARSAAGRRRRCGRTCGSASSRRSGTRVRGRVHALPRGSRPQLPRRRCDPRRVRDAAGRGQGEAARRLLRAPGPPIQDLLRHLRALPLQLRVV

SEQ ID NO: 2083 - protein, 143 aa, Zea mays subsp. mays
  peptide (1)..(143): Ceres Seq. ID no. 12367344
MAVTVEKGAMGEPALLLERSRAITLHGRDRKGRAVVRIVGNYFPARALGGRAEEALRSYLRERVLPEIGDPSSWSCTCTPAWIAATTSPASVRSAARTRRCRPRPRRGCAPSTSCTRPSNPGSSSPPSGASSSAQGCMRSCDT

SEQ ID NO: 2084 - protein, 134 aa, Zea mays subsp. mays
  peptide (1)..(134): Ceres Seq. ID no. 12367345
MGEPALLLERSRAITLHGRDRKGRAVVRIVGNYFPARALGGRAEEALRSYLRERVLPEIGDPSSWSCTCTPAWIAATTSPASVRSAARTRRCRPRPRRGCAPSTSCTRPSNPGSSSPPSGASSSAQGCMRSCDT

SEQ ID NO: 2085 - protein, 132 aa, Zea mays subsp. mays
  peptide (1)..(132): Ceres Seq. ID no. 12367346
MHSRVDRGHNFPGVGAIRGAYETLPAAAKERLRAVYFVHPALQSRIFFATFGRFLFSSGLYEKLRYMSRLEYVWAHIDKEQLEVPDCVREHDDELERRPLMDYGIEATETRCMYDAASMDTSASLHSLRCVS

SEQ ID NO: 2086 - DNA, 1589 bp, Zea mays subsp. mays
  misc_feature (1)..(1589): Ceres Seq. ID no. 12408021
  misc_feature (1)..(1589): Ortholog of  Ceres SEQ ID NO 15177969 as cited in SEQ ID NO 58823
  misc_feature (1)..(1589): Ortholog of  Ceres SEQ ID NO 15177963 as cited in SEQ ID NO 59105
  misc_feature (1)..(1589): Ortholog of  Ceres SEQ ID NO 14302746 as cited in SEQ ID NO 66646
actcacatcactcccagactgcttccacctacgttcattatttccgcaatgtacaaccgagtatgatatgcagtcgtagtatcatggataaccaccttatgtcgtccttcgccatcctactgctttcttcttttgctgcaatggttgcatatcctgctcgcagtgaattacagcctaaccagatgaaaaaccaccattctgtatcatcatacagcccacaaccgaaggattttccaactgagcaactctacagcgcctacctagtaatccagcgattcaagagcaccatcactagcgaccccaagaacgtcaccgccacctggattggtcatgatatctgcggagaaacgacctacgtggggttctactgcggatcgccggccggaggagataagaagttgacagtcacgggggttattttgaatggctatagtctacatgcaccaacgttggaaggtttcgtcaatcagctccctgatctagctcttttccatgctgcttccaacaattttggtggcgatataccccagctaaccgcccttgggtacatgtacgagctcagtgtcgccgctaaagatgtgccattacagactagggatgcggatgattttgtgggggggaggggcatcggtcgcgtgcaattaggtagatgcgtaactgctgattttgacttttcatttaatgtcggaattaataagggtcacaaatttcctggttttacgcatgccaaggctctccttctcaaccgcaacaatttgtccggtccacttccgtcaaacctcggtttctcaaaactgagctaccttgccctcgccaacaacaaactcaccgggccaatcccgccgtcaatcagtaagctggaagactctctcttcgaggtactccttctcaacaaccagctctccggctgcctcccccacgagctcggcatgctcaccaaggcggccgtgattgacgccggcatgaaccagctcaccggcccaatcccgtcatctttctcctgcctaagcagcgtcgagcagctcaacctggccggaaaccgcctctacggtcaggtacccgacgcgctctgcaagcttgctgggcccgctggccgcctcgccaacctcacgctgtccggcaactacttcacatccgccgggccggcatgcgcggcgctgatcaaagacggagtgctggacgtgaagaacaactgcattccggggctcaccaaccagaggcgccccgcggagtgcgcggcgttccagagccaaccaaagacttgcccggcagcgagcgctcaggtgacatgccccgccgccgcagcttccaggaacgcggcggcgccaggggagaggaaggtcaaggattactccagctacgtgacgtacgctactctgcatgactgagccacactggcatgcagtaggagacagaatgccttgctggctatgtgtctcttgtattcagcatgagtgtaccctagcgtgtgttgttgtgattgtgattgctgtctatttgcattattgtacgtgtgttgctgtcacatctagatcatcccattatttgtacgtccaaatccattttatggaaagtactgttggtgtttt

SEQ ID NO: 2087 - protein, 461 aa, Zea mays subsp. mays
  peptide (1)..(461): Ceres Seq. ID no. 12408022
SHHSQTASTYVHYFRNVQPSMICSRSIMDNHLMSSFAILLLSSFAAMVAYPARSELQPNQMKNHHSVSSYSPQPKDFPTEQLYSAYLVIQRFKSTITSDPKNVTATWIGHDICGETTYVGFYCGSPAGGDKKLTVTGVILNGYSLHAPTLEGFVNQLPDLALFHAASNNFGGDIPQLTALGYMYELSVAAKDVPLQTRDADDFVGGRGIGRVQLGRCVTADFDFSFNVGINKGHKFPGFTHAKALLLNRNNLSGPLPSNLGFSKLSYLALANNKLTGPIPPSISKLEDSLFEVLLLNNQLSGCLPHELGMLTKAAVIDAGMNQLTGPIPSSFSCLSSVEQLNLAGNRLYGQVPDALCKLAGPAGRLANLTLSGNYFTSAGPACAALIKDGVLDVKNNCIPGLTNQRRPAECAAFQSQPKTCPAASAQVTCPAAAASRNAAAPGERKVKDYSSYVTYATLHD

SEQ ID NO: 2088 - protein, 441 aa, Zea mays subsp. mays
  peptide (1)..(441): Ceres Seq. ID no. 12408023
MICSRSIMDNHLMSSFAILLLSSFAAMVAYPARSELQPNQMKNHHSVSSYSPQPKDFPTEQLYSAYLVIQRFKSTITSDPKNVTATWIGHDICGETTYVGFYCGSPAGGDKKLTVTGVILNGYSLHAPTLEGFVNQLPDLALFHAASNNFGGDIPQLTALGYMYELSVAAKDVPLQTRDADDFVGGRGIGRVQLGRCVTADFDFSFNVGINKGHKFPGFTHAKALLLNRNNLSGPLPSNLGFSKLSYLALANNKLTGPIPPSISKLEDSLFEVLLLNNQLSGCLPHELGMLTKAAVIDAGMNQLTGPIPSSFSCLSSVEQLNLAGNRLYGQVPDALCKLAGPAGRLANLTLSGNYFTSAGPACAALIKDGVLDVKNNCIPGLTNQRRPAECAAFQSQPKTCPAASAQVTCPAAAASRNAAAPGERKVKDYSSYVTYATLHD

SEQ ID NO: 2089 - protein, 434 aa, Zea mays subsp. mays
  peptide (1)..(434): Ceres Seq. ID no. 12408024
MDNHLMSSFAILLLSSFAAMVAYPARSELQPNQMKNHHSVSSYSPQPKDFPTEQLYSAYLVIQRFKSTITSDPKNVTATWIGHDICGETTYVGFYCGSPAGGDKKLTVTGVILNGYSLHAPTLEGFVNQLPDLALFHAASNNFGGDIPQLTALGYMYELSVAAKDVPLQTRDADDFVGGRGIGRVQLGRCVTADFDFSFNVGINKGHKFPGFTHAKALLLNRNNLSGPLPSNLGFSKLSYLALANNKLTGPIPPSISKLEDSLFEVLLLNNQLSGCLPHELGMLTKAAVIDAGMNQLTGPIPSSFSCLSSVEQLNLAGNRLYGQVPDALCKLAGPAGRLANLTLSGNYFTSAGPACAALIKDGVLDVKNNCIPGLTNQRRPAECAAFQSQPKTCPAASAQVTCPAAAASRNAAAPGERKVKDYSSYVTYATLHD

SEQ ID NO: 2090 - DNA, 866 bp, Zea mays subsp. mays
  misc_feature (1)..(866): Ceres Seq. ID no. 12351502
  misc_feature (1)..(866): Ortholog of  Ceres SEQ ID NO 14304202 as cited in SEQ ID NO 56346
  misc_feature (1)..(866): Ortholog of  Ceres SEQ ID NO 14304159 as cited in SEQ ID NO 56494
  misc_feature (1)..(866): Ortholog of  Ceres SEQ ID NO 12613472 as cited in SEQ ID NO 60611
  misc_feature (1)..(866): Ortholog of  Ceres SEQ ID NO 12623915 as cited in SEQ ID NO 61013
  misc_feature (1)..(866): Ortholog of  Ceres SEQ ID NO 15173393 as cited in SEQ ID NO 63704
  misc_feature (1)..(866): Ortholog of  Ceres SEQ ID NO 15175545 as cited in SEQ ID NO 0
aaaaaaatccagtcgcatctccctctccgaaatcaaggtagcgtacaccgctgcagtttctagagccctctctgccactcgtgatcccactagtcacaatgcctgccctcgccaagcccgcctcccgcaccgccaagcccgccgcggctccgaagccgaagcctgccgccgccaagccgaaggcggccaccgctggtgcctcccacccgccttacttcgagatgatcaaggaggctatcacggcgctcaaggagaggaccggctccagctcgcaagcgatcgccaagtatgtgggggacaagcacggcgcgtctctgccggccaacttcaagaagatgctttccatccagctccgtgggtccgcagccaagggcaagctcgtgaaggtcaaggcttcgtacaagctctcggacgccgccaagaaggcatcccccaagaccaaggctaagccggcaaaggccgccgctgccaagaccaccgcccccaagccggccaaggccgccgccgccaagtcaaagaaggcagcggctgccaagccaaagaaggccgctgctgctgggaccaagcgcaaagtgcccgagaagaaggtcgtggcgaagccgaagaagtcccccgccgccaaggccaaggccaagccgaagaccgtgaagtcccctgcctccaagaaggcacggaaggcctccgcatgagatgggttgctttaggtctaagctctgattgtggttggtgtcagttaggtactgtacaaactaagtgtgtgcccaaagtgtctcaggcggtgtgttatgtgcttagcaagttctatctatcagagtgttttagtttaacaatggttttacctctggcttttgtagtcaggtttctgg

SEQ ID NO: 2091 - protein, 196 aa, Zea mays subsp. mays
  peptide (1)..(196): Ceres Seq. ID no. 12351503
MPALAKPASRTAKPAAAPKPKPAAAKPKAATAGASHPPYFEMIKEAITALKERTGSSSQAIAKYVGDKHGASLPANFKKMLSIQLRGSAAKGKLVKVKASYKLSDAAKKASPKTKAKPAKAAAAKTTAPKPAKAAAAKSKKAAAAKPKKAAAAGTKRKVPEKKVVAKPKKSPAAKAKAKPKTVKSPASKKARKASA

SEQ ID NO: 2092 - protein, 155 aa, Zea mays subsp. mays
  peptide (1)..(155): Ceres Seq. ID no. 12351504
MIKEAITALKERTGSSSQAIAKYVGDKHGASLPANFKKMLSIQLRGSAAKGKLVKVKASYKLSDAAKKASPKTKAKPAKAAAAKTTAPKPAKAAAAKSKKAAAAKPKKAAAAGTKRKVPEKKVVAKPKKSPAAKAKAKPKTVKSPASKKARKASA

SEQ ID NO: 2093 - protein, 148 aa, Zea mays subsp. mays
  peptide (1)..(148): Ceres Seq. ID no. 12351505
KKSSRISLSEIKVAYTAAVSRALSATRDPTSHNACPRQARLPHRQARRGSEAEACRRQAEGGHRWCLPPALLRDDQGGYHGAQGEDRLQLASDRQVCGGQARRVSAGQLQEDAFHPAPWVRSQGQAREGQGFVQALGRRQEGIPQDQG

SEQ ID NO: 2094 - DNA, 1387 bp, Zea mays subsp. mays
  misc_feature (1)..(1387): Ceres Seq. ID no. 12374463
  misc_feature (1)..(1387): Ortholog of  Ceres SEQ ID NO 13594301 as cited in SEQ ID NO 60110
acccgtctggtggccggcctatctggtgcggtgcggcgcggctcgatccggcccgacgattccgatcccctcccgtcccgtccatcccgtctcgtctcgcctcgccctccacgccggcgaccggagaaggggccgtgcagcgcaggcgacgcccacaacgaatccgtccccccgcgccggcttcgcccagccccgcggcgacgcaccaggattgaaggaggcatgagaaggtggacatcattgctatagcgatttgattactggagatggtgttggtggtaaagcagcaccgctgcacacactctgcgagctgcgtttgcatcaagggccacctcagtgaggatgctctgttcctcgtcttccgccacatgaactggaacccgaggctgattgctatcttgtcgtgtgtgtgcaagtggtttgacgaggttgccaagcaggtgctgtggaaggagttctgtcatgcaagggctccaaagatgatgctggatttgcattcaggtggcagccacattgttgatgggaactggaaggcactggggaagctgctcatctattgcaatggctgcacaaaaggggggctgtttaataacattcacgttccaggccattttgtgttcaggacacgcttttctaggactgcgggcaggagtttcctgcctctgccatgtaagtcggatgtcctgtatgtgtcagatccatgcgagcatcttgatcagggggaagaaggcgacataggtttcttccgaggcatctttatgtcatttgccacttcaagggtaaagaagatgttgattgagaagcgggcgaggtttcatccaagggagttgtgcccttattgtaaggccaagctatggaacatgtttcaggaaaatatgatcccaaggagtgcttccgcaaggctgggtgcctatgatgactctgtggagtattttgtatgcctgaatggacatgttattggactcggtaccctactaccactctcagactcagaggaggcagcagatgagtgatcatcaagaacatgaatcaggtttagaagattgaagcccagggcttgtgaaatggtactgaatcttggttgtgactagcagataatgacattggttctgcaaactgttgcacgacaggaacctgtgatgggatctgcatcgaactgcagctgtgttcttcagggggtgccttgcatcagattgaaaaaaagagctactttatagtgcctctcctttatttattgatatgtcactacttgtttttgtaactgcaatcaagatactgggacgctacccgcttgcctgtttagacatgttcacatcatgtgtagtgaggtgttttatttaacgagatgttaaatttgtgctcatgatattcatgtgctgttatcttc

SEQ ID NO: 2095 - protein, 248 aa, Zea mays subsp. mays
  peptide (1)..(248): Ceres Seq. ID no. 12374464
MVLVVKQHRCTHSASCVCIKGHLSEDALFLVFRHMNWNPRLIAILSCVCKWFDEVAKQVLWKEFCHARAPKMMLDLHSGGSHIVDGNWKALGKLLIYCNGCTKGGLFNNIHVPGHFVFRTRFSRTAGRSFLPLPCKSDVLYVSDPCEHLDQGEEGDIGFFRGIFMSFATSRVKKMLIEKRARFHPRELCPYCKAKLWNMFQENMIPRSASARLGAYDDSVEYFVCLNGHVIGLGTLLPLSDSEEAADE

SEQ ID NO: 2096 - protein, 214 aa, Zea mays subsp. mays
  peptide (1)..(214): Ceres Seq. ID no. 12374465
MNWNPRLIAILSCVCKWFDEVAKQVLWKEFCHARAPKMMLDLHSGGSHIVDGNWKALGKLLIYCNGCTKGGLFNNIHVPGHFVFRTRFSRTAGRSFLPLPCKSDVLYVSDPCEHLDQGEEGDIGFFRGIFMSFATSRVKKMLIEKRARFHPRELCPYCKAKLWNMFQENMIPRSASARLGAYDDSVEYFVCLNGHVIGLGTLLPLSDSEEAADE

SEQ ID NO: 2097 - protein, 177 aa, Zea mays subsp. mays
  peptide (1)..(177): Ceres Seq. ID no. 12374466
MMLDLHSGGSHIVDGNWKALGKLLIYCNGCTKGGLFNNIHVPGHFVFRTRFSRTAGRSFLPLPCKSDVLYVSDPCEHLDQGEEGDIGFFRGIFMSFATSRVKKMLIEKRARFHPRELCPYCKAKLWNMFQENMIPRSASARLGAYDDSVEYFVCLNGHVIGLGTLLPLSDSEEAADE

SEQ ID NO: 2098 - DNA, 1772 bp, Zea mays subsp. mays
  misc_feature (1)..(1772): Ceres Seq. ID no. 12355987
  misc_feature (1)..(1772): Ortholog of  Ceres SEQ ID NO 13663419 as cited in SEQ ID NO 66561
  misc_feature (1)..(1772): Ortholog of  Ceres SEQ ID NO 13586237 as cited in SEQ ID NO 0
actagacttgttttttccgtccatcgtttcgtttgttccacctgcgcaactgcgacggggataagtacgtcttccagatgacgacggcggcatggccgcggccacgcttcctcgtcctcccccagcctggattcctccgctcggtctgccacggcctctgctcccgctgtctcttctgcttcctgctgctcctcgccttcgcctgcagctccagctccgggcgggtggtggtcactagcttgcctggcttcgacggcgacctccccttccacctcgaaacagggtacgtggaggtggaggaggacgccggcgtggagctcttctactacttcgtccaggccgagtccggcgccgccgccgccgccgatgacacccctttcctcttctggctcaccggcggcgaccgctgctccgtcttcagcggcctcgcctacgagatcggtcccatcagattcgtcctggaaccctacaacggcaccctgccgcgcctgcgatacaaccacaactcgtggtcaaaggtgtcacatatcctcttcgtcgattcaccggttggagctggattttccttctcgagagatcccaaaggctacgatgtcggagacatctcggcctcactgcagctacaggaattcctcatcaagtggttcagtgatcatcccgagtacctcgcgaatcctttctacattggcggggactcctatgtcggaaaaatcgtgccgttcctcgggcagatgatttcagaaggtattgaacttggaagaagacccttccctaacctcaagggctatctggtgggtaacccaatcacgggcgaaagtatagatttcacttccagagtgccctacgctcatggagtcggtatcatatcagatcaattgtatgagacgatattggggcattgccaaggagaggactacactagtcctgcaaacgctctgtgtgctcaggctctggacactttcaacaatctcatcaacgaagtccagaacgcccagatcttactggacacgtgcgtctacgcgtctcctgcgccaaacgttctcagcagaccggtggacggtggtagaaggatcctgagggcggcggggatgggaggaggggcgacgctgaaccatccgccagctcgtcctcggtttggctgcatcacctacggctactacctgtcgtatttctgggcgaacgatgaacgcactcgaacagctcttgggatcaagaagggaacagtggacgagtgggtgaggtgtcacgacgcagacctgccgtacacgatcgacctcaagagcgccatcaagtaccaccggaacctgacgtccagaggctaccgcgccctggtgtacagcggcgaccatgacctgctggtgccacacctgggcacccaggcatgggtcaggtccctcaacttccccgtcgtcgacgactggagggcgtggcatctcggtggccaagccgccgggttcacgataaattactcaaacaacatgacgtttgcgacgatcaaaggtggcgggcacacggcgccggagtacgagccggagaggtgtttcgccatgttcagccgctggatactcgaccgtccactctaatctccactcgtacattgccggattcttgcaccatgaccatgattgatggactgtgtggattgcagttcataggtggaataaaatggatgatttctgtgaatggataggtctgccaactaggcaactttgtgtaaattaactaggtctgtgtcagcgcgctttaacgtaatatatgcggggataaatcgt

SEQ ID NO: 2099 - protein, 501 aa, Zea mays subsp. mays
  peptide (1)..(501): Ceres Seq. ID no. 12355988
MTTAAWPRPRFLVLPQPGFLRSVCHGLCSRCLFCFLLLLAFACSSSSGRVVVTSLPGFDGDLPFHLETGYVEVEEDAGVELFYYFVQAESGAAAAADDTPFLFWLTGGDRCSVFSGLAYEIGPIRFVLEPYNGTLPRLRYNHNSWSKVSHILFVDSPVGAGFSFSRDPKGYDVGDISASLQLQEFLIKWFSDHPEYLANPFYIGGDSYVGKIVPFLGQMISEGIELGRRPFPNLKGYLVGNPITGESIDFTSRVPYAHGVGIISDQLYETILGHCQGEDYTSPANALCAQALDTFNNLINEVQNAQILLDTCVYASPAPNVLSRPVDGGRRILRAAGMGGGATLNHPPARPRFGCITYGYYLSYFWANDERTRTALGIKKGTVDEWVRCHDADLPYTIDLKSAIKYHRNLTSRGYRALVYSGDHDLLVPHLGTQAWVRSLNFPVVDDWRAWHLGGQAAGFTINYSNNMTFATIKGGGHTAPEYEPERCFAMFSRWILDRPL

SEQ ID NO: 2100 - protein, 283 aa, Zea mays subsp. mays
  peptide (1)..(283): Ceres Seq. ID no. 12355989
MISEGIELGRRPFPNLKGYLVGNPITGESIDFTSRVPYAHGVGIISDQLYETILGHCQGEDYTSPANALCAQALDTFNNLINEVQNAQILLDTCVYASPAPNVLSRPVDGGRRILRAAGMGGGATLNHPPARPRFGCITYGYYLSYFWANDERTRTALGIKKGTVDEWVRCHDADLPYTIDLKSAIKYHRNLTSRGYRALVYSGDHDLLVPHLGTQAWVRSLNFPVVDDWRAWHLGGQAAGFTINYSNNMTFATIKGGGHTAPEYEPERCFAMFSRWILDRPL

SEQ ID NO: 2101 - DNA, 1201 bp, Zea mays subsp. mays
  misc_feature (1)..(1201): Ceres Seq. ID no. 13498951
  misc_feature (1)..(1201): Ortholog of  Ceres SEQ ID NO 13594416 as cited in SEQ ID NO 51058
  misc_feature (1)..(1201): Ortholog of  Ceres SEQ ID NO 15177991 as cited in SEQ ID NO 53915
  misc_feature (1)..(1201): Ortholog of  Ceres SEQ ID NO 15174347 as cited in SEQ ID NO 58577
  misc_feature (1)..(1201): Ortholog of  Ceres SEQ ID NO 13596609 as cited in SEQ ID NO 63070
  misc_feature (1)..(1201): Ortholog of  Ceres SEQ ID NO 12616895 as cited in SEQ ID NO 63909
  misc_feature (1)..(1201): Ortholog of  Ceres SEQ ID NO 14302096 as cited in SEQ ID NO 68356
  misc_feature (1)..(1201): Ortholog of  Ceres SEQ ID NO 13598574 as cited in SEQ ID NO 69083
aaatcaacccaacacggcgtccccgtcccgagtcaccaccgacccaagcaaaaccgcacgcaccctgccagcggccccccaactcccaacccaacccctactccggctagctcgcggcggcggcccagcggccatggccttccggctgagcaacaacctgatcggggtcctaaacttcgtcaccttcctgctctccgtcccgatcctgggcgcgggcatctggctgggccaccgcgccgacggcaccgagtgcgagcgctacctctcggcgcccgtcatcgcgctgggggccttcctcctcgccgtctccctggcgggcctcgtcggcgcctgctgccgcgtcacctggctgctctgggcctacctcctcgccatgttcgtcctcatcctcgtcctcttctgcttcaccgtcttcgccttcgtcgtcaccaacaggggcgccggcgaggccgtctccggccgcggatacaaggagtaccgcctcggggactactccaactggctgcagaagcgcgtcgagaacaccaggaactgggaccggatcaggagctgcctccaggactccaaggtctgcaagagcctgcaggacaagaacgagaccgtcgcccagttcatgagttccagcctctcccccatcgagtctggctgctgcaagccccccaccagctgcggctacacctacgtcggcggcacggactggacgccggtgaccaccaactcgacggacccggactgcaagacctggagcaacgacgcctcggcgctctgctacaactgccagtcgtgcaaggccggcgtggtggccacgttccagcggaactggaagcgcgtcgccgtcgtctgcatcgtcttcctcgtcttcatcatcatcgtctactccgtcggctgctgcgccttcaggaacaaccgcagagacaacgcctaccgcggcgggtggaagggcgggtacgcttgatccaccatcgcgtcgtttaggagcggagccatgcacgcgcgctcggtgctctgctctgctccctgcccgccgctgtcgtcgtacgtacatgtttagtaggctcgttgtagctctgtacaggtgatggagatcgttgttgcggattcttatcgtcttcctggttacatacttacattattgttatgatctgatcagcggtaggttttgtatacgctgctcattgattcgtctgcctgctattttcgt

SEQ ID NO: 2102 - protein, 324 aa, Zea mays subsp. mays
  peptide (1)..(324): Ceres Seq. ID no. 13498952
KSTQHGVPVPSHHRPKQNRTHPASGPPTPNPTPTPASSRRRPSGHGLPAEQQPDRGPKLRHLPALRPDPGRGHLAGPPRRRHRVRALPLGARHRAGGLPPRRLPGGPRRRLLPRHLAALGLPPRHVRPHPRPLLLHRLRLRRHQQGRRRGRLRPRIQGVPPRGLLQLAAEARREHQELGPDQELPPGLQGLQEPAGQERDRRPVHEFQPLPHRVWLLQAPHQLRLHLRRRHGLDAGDHQLDGPGLQDLEQRRLGALLQLPVVQGRRGGHVPAELEARRRRLHRLPRLHHHRLLRRLLRLQEQPQRQRLPRRVEGRVRLIHHRVV

SEQ ID NO: 2103 - protein, 317 aa, Zea mays subsp. mays
  peptide (1)..(317): Ceres Seq. ID no. 13498953
NQPNTASPSRVTTDPSKTARTLPAAPQLPTQPLLRLARGGGPAAMAFRLSNNLIGVLNFVTFLLSVPILGAGIWLGHRADGTECERYLSAPVIALGAFLLAVSLAGLVGACCRVTWLLWAYLLAMFVLILVLFCFTVFAFVVTNRGAGEAVSGRGYKEYRLGDYSNWLQKRVENTRNWDRIRSCLQDSKVCKSLQDKNETVAQFMSSSLSPIESGCCKPPTSCGYTYVGGTDWTPVTTNSTDPDCKTWSNDASALCYNCQSCKAGVVATFQRNWKRVAVVCIVFLVFIIIVYSVGCCAFRNNRRDNAYRGGWKGGYA

SEQ ID NO: 2104 - protein, 273 aa, Zea mays subsp. mays
  peptide (1)..(273): Ceres Seq. ID no. 13498954
MAFRLSNNLIGVLNFVTFLLSVPILGAGIWLGHRADGTECERYLSAPVIALGAFLLAVSLAGLVGACCRVTWLLWAYLLAMFVLILVLFCFTVFAFVVTNRGAGEAVSGRGYKEYRLGDYSNWLQKRVENTRNWDRIRSCLQDSKVCKSLQDKNETVAQFMSSSLSPIESGCCKPPTSCGYTYVGGTDWTPVTTNSTDPDCKTWSNDASALCYNCQSCKAGVVATFQRNWKRVAVVCIVFLVFIIIVYSVGCCAFRNNRRDNAYRGGWKGGYA

SEQ ID NO: 2105 - DNA, 1780 bp, Zea mays subsp. mays
  misc_feature (1)..(1780): Ceres Seq. ID no. 12367347
  misc_feature (1)..(1780): Ortholog of  Ceres SEQ ID NO 13594209 as cited in SEQ ID NO 59089
  misc_feature (1)..(1780): Ortholog of  Ceres SEQ ID NO 14306857 as cited in SEQ ID NO 60035
  misc_feature (1)..(1780): Ortholog of  Ceres SEQ ID NO 13585332 as cited in SEQ ID NO 60654
  misc_feature (1)..(1780): Ortholog of  Ceres SEQ ID NO 14316039 as cited in SEQ ID NO 62062
  misc_feature (1)..(1780): Ortholog of  Ceres SEQ ID NO 15176783 as cited in SEQ ID NO 65590
  misc_feature (1)..(1780): Ortholog of  Ceres SEQ ID NO 15176091 as cited in SEQ ID NO 65733
  misc_feature (1)..(1780): Ortholog of  Ceres SEQ ID NO 14308019 as cited in SEQ ID NO 65849
  misc_feature (1)..(1780): Ortholog of  Ceres SEQ ID NO 14307964 as cited in SEQ ID NO 66191
  misc_feature (1)..(1780): Ortholog of  Ceres SEQ ID NO 15170167 as cited in SEQ ID NO 66224
  misc_feature (1)..(1780): Ortholog of  Ceres SEQ ID NO 13502874 as cited in SEQ ID NO 66298
  misc_feature (1)..(1780): Ortholog of  Ceres SEQ ID NO 14307944 as cited in SEQ ID NO 66503
  misc_feature (1)..(1780): Ortholog of  Ceres SEQ ID NO 12614124 as cited in SEQ ID NO 68392
  misc_feature (1)..(1780): Ortholog of  Ceres SEQ ID NO 14307980 as cited in SEQ ID NO 69214
ataaataggccagcatttgcaatccaactttagctgccatctgtttctgaaccatggatccatttgttctctccatcctcttatgctcatcgatctttgttgtagtgtactggagaaggctgaacagcatgaggctaagacttccaccgggacctccaacatggccaattttcggcaatcttctccagttgagccctcttccccacaaagactttgcccaattttgcaccaaatatggccctctcgtctatcttcgcctgggaaccatcgatgccatcaccactgatgaccccgaagtgatccgtgaaatactcatccggcaagatgaggtctttgcttcgcggcctcggacactggctgccgtccatctcgcctatgggtgtggtgatgtggctctagctccactgggacccaactggaaaaggatgaggagagtttgcatggagcacttgctgacgaccaggcggctcgagtctttcgctgctcaccgagctcaggaggccgagcacctctgccagtttgtgtgggctaaatctcagtccgggaagcccgtgaacctcagagaggttctcggtgccttctcgatgaacaacgtcacgcggatgctgctggggaagcagtactttgggatccagtcggcaggccccggcgaggcaatggagttcatgcacatcacccacgagctgttcttcctgctgggcctgatctatctcggggactacttgccggcttggaggtgggtcgacccgtacgggtgtgagaagaggatgagggaggtggagaagaaggtggacgacttccaccagaagatcattgatgagcacaggagagctagggaggccaggaagagtcgttcctccgttgaggaagatggcggcaacggcaaagatgagatggacttcgtcgatgtgctgttatctttgcctggtgagaacgggaaggagcacatggacgacatggagatcaaagcgttgatgcaggacatgatcgctgctgctactgatacttcatcggtgacgaacgagtgggtgatggcggaggtaatcaagaacccgcgcgtgctccggcgcgtccaggaggagctggacgcggtggtggggcgcgaccggatggtggcggagtcggacctggcccacctcccctacctccggtgcgtggtgcgcgagtcattccggatgcacccggcggggccgttccttatcccgcacgagtcgctgaaggcgacgaccatcatggggtaccacgtgccggcgcgcacgcgcgtgttcatcaacacgcacgcgctggggcggaacccgcgcgtgtgggactcccgtgggcgagttccggccggagcggcacctgccggcggaggagggggcgcgggtggagatcagccacctgccggacttcaagatcctgccgttcagcgccgggaagcgcaagtgccccggcgcgccgctgggcgtggcgctggtgctcatggcgctcgccaggctcttccactgcttcgactggtccccgcccgacggcctccgccccgaggacgtggacacccgggaggtgtacggcatgaccatgcccaaggccacgcccctcgtcgccgtcgccactccgcgcctgccgccgcacttgtacggcggcggcggcggcagctcggctccttagttcgatgacactttgacgcacgtgcgctgcactgccagtctcattagtcattatacgcatgatgtacttccctccatatacaatacaccgcataaaccaaacgatgaatgaaatgtagtcgttctatggtttc

SEQ ID NO: 2106 - protein, 533 aa, Zea mays subsp. mays
  peptide (1)..(533): Ceres Seq. ID no. 12367348
MDPFVLSILLCSSIFVVVYWRRLNSMRLRLPPGPPTWPIFGNLLQLSPLPHKDFAQFCTKYGPLVYLRLGTIDAITTDDPEVIREILIRQDEVFASRPRTLAAVHLAYGCGDVALAPLGPNWKRMRRVCMEHLLTTRRLESFAAHRAQEAEHLCQFVWAKSQSGKPVNLREVLGAFSMNNVTRMLLGKQYFGIQSAGPGEAMEFMHITHELFFLLGLIYLGDYLPAWRWVDPYGCEKRMREVEKKVDDFHQKIIDEHRRAREARKSRSSVEEDGGNGKDEMDFVDVLLSLPGENGKEHMDDMEIKALMQDMIAAATDTSSVTNEWVMAEVIKNPRVLRRVQEELDAVVGRDRMVAESDLAHLPYLRCVVRESFRMHPAGPFLIPHESLKATTIMGYHVPARTRVFINTHALGRNPRVWDSRGRVPAGAAPAGGGGGAGGDQPPAGLQDPAVQRREAQVPRRAAGRGAGAHGARQALPLLRLVPARRPPPRGRGHPGGVRHDHAQGHAPRRRRHSAPAAALVRRRRRQLGSLVR

SEQ ID NO: 2107 - protein, 508 aa, Zea mays subsp. mays
  peptide (1)..(508): Ceres Seq. ID no. 12367349
MRLRLPPGPPTWPIFGNLLQLSPLPHKDFAQFCTKYGPLVYLRLGTIDAITTDDPEVIREILIRQDEVFASRPRTLAAVHLAYGCGDVALAPLGPNWKRMRRVCMEHLLTTRRLESFAAHRAQEAEHLCQFVWAKSQSGKPVNLREVLGAFSMNNVTRMLLGKQYFGIQSAGPGEAMEFMHITHELFFLLGLIYLGDYLPAWRWVDPYGCEKRMREVEKKVDDFHQKIIDEHRRAREARKSRSSVEEDGGNGKDEMDFVDVLLSLPGENGKEHMDDMEIKALMQDMIAAATDTSSVTNEWVMAEVIKNPRVLRRVQEELDAVVGRDRMVAESDLAHLPYLRCVVRESFRMHPAGPFLIPHESLKATTIMGYHVPARTRVFINTHALGRNPRVWDSRGRVPAGAAPAGGGGGAGGDQPPAGLQDPAVQRREAQVPRRAAGRGAGAHGARQALPLLRLVPARRPPPRGRGHPGGVRHDHAQGHAPRRRRHSAPAAALVRRRRRQLGSLVR

SEQ ID NO: 2108 - protein, 409 aa, Zea mays subsp. mays
  peptide (1)..(409): Ceres Seq. ID no. 12367350
MRRVCMEHLLTTRRLESFAAHRAQEAEHLCQFVWAKSQSGKPVNLREVLGAFSMNNVTRMLLGKQYFGIQSAGPGEAMEFMHITHELFFLLGLIYLGDYLPAWRWVDPYGCEKRMREVEKKVDDFHQKIIDEHRRAREARKSRSSVEEDGGNGKDEMDFVDVLLSLPGENGKEHMDDMEIKALMQDMIAAATDTSSVTNEWVMAEVIKNPRVLRRVQEELDAVVGRDRMVAESDLAHLPYLRCVVRESFRMHPAGPFLIPHESLKATTIMGYHVPARTRVFINTHALGRNPRVWDSRGRVPAGAAPAGGGGGAGGDQPPAGLQDPAVQRREAQVPRRAAGRGAGAHGARQALPLLRLVPARRPPPRGRGHPGGVRHDHAQGHAPRRRRHSAPAAALVRRRRRQLGSLVR

SEQ ID NO: 2109 - DNA, 1081 bp, Zea mays subsp. mays
  misc_feature (1)..(1081): Ceres Seq. ID no. 12373916
  misc_feature (1)..(1081): Ortholog of  Ceres SEQ ID NO 13583434 as cited in SEQ ID NO 62329
aaaccgcgtcaccccctcccccaatcgtctcgctcgcaagtcgcatcgcacgtacggtctcaggcgcatcggcctcgccgctgcacaacgccggagacgagacgacggcggctgcgggatgacggtcttccacttcctcaactgcgccttcctcaccttcggccctcacgtcgtctactactccgccacgcccctgtcagagtatgatacaatcggcacttctataaaagcagctgctgtttatcttggaactgcgcttgtaaagcttgtttgcttggcaacattgctcaaagtacctgagaatgatagctttgacccctatcaggagttaatgaaagtttttattggattcatagatgtagctggactgtattttgctttgacccagctgacccacagaaacatctctcagaatcataagttccaggctgttggtcttggttgggcttttgctgattcagttttgcaccgactggcacctctctggattggggcaagagggcttgaatttacatgggagtacatatttcaaggacttgaagcgaatgctaatcttgtgatgaccctctcccttgctgcattggggtccttgatgtggcttaggaagaacaagcctaggactttggttccaataatttatgcatgtgctctgctcttggcaacaatgccatctatcaccagctacttgaggaggtcattggagtggcagacaccaaaggtggttggcttcgagctcttctcctcccttgttatggctttcatcagctggcagctgttctcggcttgtcagagaccgatgtaacaagacatccataccactgccaattttacgtgcaatttgaagctcctgcagatgctcctgagtacgtcagaagaattaggaagatcctttgaactttgagctacaactcttcttcttggcgttcggttacagaacattttacttagaacatctgttgtaacttgtgagctgtagagcagaaacacatgcctgaaatgagttattctataacagatgctcatgtaggcgtttgatctgaaacatttgtttattattattgcggtgtgcatttcagatgct

SEQ ID NO: 2110 - protein, 266 aa, Zea mays subsp. mays
  peptide (1)..(266): Ceres Seq. ID no. 12373917
NRVTPSPNRLARKSHRTYGLRRIGLAAAQRRRRDDGGCGMTVFHFLNCAFLTFGPHVVYYSATPLSEYDTIGTSIKAAAVYLGTALVKLVCLATLLKVPENDSFDPYQELMKVFIGFIDVAGLYFALTQLTHRNISQNHKFQAVGLGWAFADSVLHRLAPLWIGARGLEFTWEYIFQGLEANANLVMTLSLAALGSLMWLRKNKPRTLVPIIYACALLLATMPSITSYLRRSLEWQTPKVVGFELFSSLVMAFISWQLFSACQRPM

SEQ ID NO: 2111 - protein, 227 aa, Zea mays subsp. mays
  peptide (1)..(227): Ceres Seq. ID no. 12373918
MTVFHFLNCAFLTFGPHVVYYSATPLSEYDTIGTSIKAAAVYLGTALVKLVCLATLLKVPENDSFDPYQELMKVFIGFIDVAGLYFALTQLTHRNISQNHKFQAVGLGWAFADSVLHRLAPLWIGARGLEFTWEYIFQGLEANANLVMTLSLAALGSLMWLRKNKPRTLVPIIYACALLLATMPSITSYLRRSLEWQTPKVVGFELFSSLVMAFISWQLFSACQRPM

SEQ ID NO: 2112 - protein, 156 aa, Zea mays subsp. mays
  peptide (1)..(156): Ceres Seq. ID no. 12373919
MKVFIGFIDVAGLYFALTQLTHRNISQNHKFQAVGLGWAFADSVLHRLAPLWIGARGLEFTWEYIFQGLEANANLVMTLSLAALGSLMWLRKNKPRTLVPIIYACALLLATMPSITSYLRRSLEWQTPKVVGFELFSSLVMAFISWQLFSACQRPM

SEQ ID NO: 2113 - DNA, 1137 bp, Zea mays subsp. mays
  misc_feature (1)..(1137): Ceres Seq. ID no. 12359692
  misc_feature (1)..(1137): Ortholog of  Ceres SEQ ID NO 14304202 as cited in SEQ ID NO 56346
  misc_feature (1)..(1137): Ortholog of  Ceres SEQ ID NO 14304159 as cited in SEQ ID NO 56494
  misc_feature (1)..(1137): Ortholog of  Ceres SEQ ID NO 14314198 as cited in SEQ ID NO 57472
  misc_feature (1)..(1137): Ortholog of  Ceres SEQ ID NO 12613472 as cited in SEQ ID NO 60611
  misc_feature (1)..(1137): Ortholog of  Ceres SEQ ID NO 12623915 as cited in SEQ ID NO 61013
  misc_feature (1)..(1137): Ortholog of  Ceres SEQ ID NO 15173393 as cited in SEQ ID NO 63704
acccagcaccgcagagctctcatctcctctctctctctctctctctctctctctcgcgctcgctttgcttcctcgtcgaggtccagttcctgcattgatggcgaccgaggtggctgagactcccgcgccgttggcggaggcggtccccgagacccccgcggaggcaccggcggcgcccgccgccgaggcgaattctaccaaggccaagaaggcctctgcgcccaagaagcgtgccaacccgacccacccgccgtacgccgagatgatctcggaggctgtcacgtcgctcaaggagcggacggggtccagccagtacgcgatcgccaagttcgtcgaggacaagcacaaggacaagctcccgcccaacttccgcaagctcctgctcggccagctcaagaagctcgtcgccgccggcaagctcaccaaggtgaagaactcctacaagctgcccgcacgcgccccggccgccgccaagccgaagcccaagtccaagaccgctgtgaagaagcccaaggccggggcgaagaagcccaaggccgccaccaagcccaagcccaaggccaaggccaagtcccccgctaaggcgaagcccgctgcaaagcccaaggcagccgcgaagccgaaacccgcagcagccaagcccaaggcggccgccaagccgaaggccaagccagctgccaaggctaagccgaaggctgtcgctgccaagccgaagccagctgccaagaaggccggccgccctgccaaggccgccaagacgtcagccaaggacacgcccgggaagaaagcggcgcccgccaagaagcccgctgctgcggccaagaaggcccctgccaagaaggccgccccagccaagaaggctcccaccccgtcgcggaaggtgccgtcgcgtaaggcgaagaagtagagcggtggtcttggcaggaatctagggtttcatgctccttcgattttagatgtttactcgtttttgctctagttgtgggtggtgtgcggggtgggttactaggttgtaaatttgatgccggaggctggggtacacatgggcattctgtaccagcggtggaagggcggaggcgccggcgacgatgacgaaccagtgtgtgttattattagaagacgaagttgtatttctgc

SEQ ID NO: 2114 - protein, 301 aa, Zea mays subsp. mays
  peptide (1)..(301): Ceres Seq. ID no. 12359693
PSTAELSSPLSLSLSLSLALALLPRRGPVPALMATEVAETPAPLAEAVPETPAEAPAAPAAEANSTKAKKASAPKKRANPTHPPYAEMISEAVTSLKERTGSSQYAIAKFVEDKHKDKLPPNFRKLLLGQLKKLVAAGKLTKVKNSYKLPARAPAAAKPKPKSKTAVKKPKAGAKKPKAATKPKPKAKAKSPAKAKPAAKPKAAAKPKPAAAKPKAAAKPKAKPAAKAKPKAVAAKPKPAAKKAGRPAKAAKTSAKDTPGKKAAPAKKPAAAAKKAPAKKAAPAKKAPTPSRKVPSRKAKK

SEQ ID NO: 2115 - protein, 269 aa, Zea mays subsp. mays
  peptide (1)..(269): Ceres Seq. ID no. 12359694
MATEVAETPAPLAEAVPETPAEAPAAPAAEANSTKAKKASAPKKRANPTHPPYAEMISEAVTSLKERTGSSQYAIAKFVEDKHKDKLPPNFRKLLLGQLKKLVAAGKLTKVKNSYKLPARAPAAAKPKPKSKTAVKKPKAGAKKPKAATKPKPKAKAKSPAKAKPAAKPKAAAKPKPAAAKPKAAAKPKAKPAAKAKPKAVAAKPKPAAKKAGRPAKAAKTSAKDTPGKKAAPAKKPAAAAKKAPAKKAAPAKKAPTPSRKVPSRKAKK

SEQ ID NO: 2116 - protein, 214 aa, Zea mays subsp. mays
  peptide (1)..(214): Ceres Seq. ID no. 12359695
MISEAVTSLKERTGSSQYAIAKFVEDKHKDKLPPNFRKLLLGQLKKLVAAGKLTKVKNSYKLPARAPAAAKPKPKSKTAVKKPKAGAKKPKAATKPKPKAKAKSPAKAKPAAKPKAAAKPKPAAAKPKAAAKPKAKPAAKAKPKAVAAKPKPAAKKAGRPAKAAKTSAKDTPGKKAAPAKKPAAAAKKAPAKKAAPAKKAPTPSRKVPSRKAKK

SEQ ID NO: 2117 - DNA, 1605 bp, Zea mays subsp. mays
  misc_feature (1)..(1605): Ceres Seq. ID no. 12341578
  misc_feature (1)..(1605): Ortholog of  Ceres SEQ ID NO 14314331 as cited in SEQ ID NO 57390
atttataaacactgccaattagtccgcgccggacctccaacccgcccccacggcccacgccatcctccacaccccccacgccggacaaccggggctcgccgcgccgctacgctcccaagccggaactccgaactcgccgcgccgttctcactgtggcaccagagctgctcgatctgccccgccctcgcccctcgcccctcgcccccttgccggaggggcgcgaactcgcaaaaattattgggtgtgcatttatacacccatgttctttgctgaccctgtctggtagcagattaaggtttggttgcggaaaatattggtgggttgtccaccatgacgagtccgccaagggtgagcatggagatcaccgacgacatgctcaagagcatggaggtcggcctagctttccgggactataatggtagaattagttctatggattttcacagcaaggctaccaactatcttgtgacagctagcgacgatgaatcaatccgcctatacgacactcaaaatgcagtatgtttgaagactattaatagcaaaaaatatggggtcgaactagtgtgcttcactgataacccaaatattgtcttatattcatcaaaaaatggctgggatgaatctctgcgtctactctcactgaatgataatcggtttcttagatattttaaaggtcaccttgacagggttgtctgcatctcattttgctctgagaaagaaaattttctctctggttcacttgaccgtactgttctcttatgggatcaacgggctgaaaaatcacagggcttactgcgtgtgcaagggaggcctgcagtttcatatgacgatcagggcatggtatttgcagttgcctatggtggtcacataaggatgtttgatgctcgaaaatttgaaaaggggccttttgagatcttctctgttggtaataacgattcagaggcccatgtcataaagttcagcagtgatggcaggcggattctgttaaccactaaagctggacgtgtccatgtgctagattcattccatggcaatagcattgcgtcgtgcaatgtgaagccagtggtaaccaactcaacactggaggcgtcgttcagccctgatggaaaccatatcatatctggctccggtgacggtagtgtttatgcttggaatgttaggagtggaaaggtcgcgcgctggggaagcacagacgacgaaccgccgctggtaaggtgggctccaggatccttgatgttcgtgacaggatcatcagaactgtcatgctgggttccggacctgtctaagctgggatcctttaccattagcaagtaggtgaaaatgatgagaggtggactgcccttgcaaaccctgttcgtccctgtatggtatgtcgtgtggctggttgaagcgactcatcctttagccaggtggccgtggtaaacttgcaacctgttacaattgaatgacttgtatagagcatcggctgtggcgatctggcttctgaagccagcggctagacaatgaagatggatccatgctttagttctgtaaaccggagattgtagctgagtattgctgtatctctttgtttctggaaggcgtcttggctcgtaaagattctgg

SEQ ID NO: 2118 - protein, 327 aa, Zea mays subsp. mays
  peptide (1)..(327): Ceres Seq. ID no. 12341579
MTSPPRVSMEITDDMLKSMEVGLAFRDYNGRISSMDFHSKATNYLVTASDDESIRLYDTQNAVCLKTINSKKYGVELVCFTDNPNIVLYSSKNGWDESLRLLSLNDNRFLRYFKGHLDRVVCISFCSEKENFLSGSLDRTVLLWDQRAEKSQGLLRVQGRPAVSYDDQGMVFAVAYGGHIRMFDARKFEKGPFEIFSVGNNDSEAHVIKFSSDGRRILLTTKAGRVHVLDSFHGNSIASCNVKPVVTNSTLEASFSPDGNHIISGSGDGSVYAWNVRSGKVARWGSTDDEPPLVRWAPGSLMFVTGSSELSCWVPDLSKLGSFTISK

SEQ ID NO: 2119 - protein, 319 aa, Zea mays subsp. mays
  peptide (1)..(319): Ceres Seq. ID no. 12341580
MEITDDMLKSMEVGLAFRDYNGRISSMDFHSKATNYLVTASDDESIRLYDTQNAVCLKTINSKKYGVELVCFTDNPNIVLYSSKNGWDESLRLLSLNDNRFLRYFKGHLDRVVCISFCSEKENFLSGSLDRTVLLWDQRAEKSQGLLRVQGRPAVSYDDQGMVFAVAYGGHIRMFDARKFEKGPFEIFSVGNNDSEAHVIKFSSDGRRILLTTKAGRVHVLDSFHGNSIASCNVKPVVTNSTLEASFSPDGNHIISGSGDGSVYAWNVRSGKVARWGSTDDEPPLVRWAPGSLMFVTGSSELSCWVPDLSKLGSFTISK

SEQ ID NO: 2120 - protein, 313 aa, Zea mays subsp. mays
  peptide (1)..(313): Ceres Seq. ID no. 12341581
MLKSMEVGLAFRDYNGRISSMDFHSKATNYLVTASDDESIRLYDTQNAVCLKTINSKKYGVELVCFTDNPNIVLYSSKNGWDESLRLLSLNDNRFLRYFKGHLDRVVCISFCSEKENFLSGSLDRTVLLWDQRAEKSQGLLRVQGRPAVSYDDQGMVFAVAYGGHIRMFDARKFEKGPFEIFSVGNNDSEAHVIKFSSDGRRILLTTKAGRVHVLDSFHGNSIASCNVKPVVTNSTLEASFSPDGNHIISGSGDGSVYAWNVRSGKVARWGSTDDEPPLVRWAPGSLMFVTGSSELSCWVPDLSKLGSFTISK

SEQ ID NO: 2121 - DNA, 481 bp, Zea mays subsp. mays
  misc_feature (1)..(481): Ceres Seq. ID no. 12633478
  misc_feature (1)..(481): Ortholog of  Ceres SEQ ID NO 15178246 as cited in SEQ ID NO 52038
gcttctgctctcacctgtttcgctgctcgcccgatctcgcgctgccgatctgagatcgagcgamkaagctttttcatcgagatggtgcttgtactgcatgctaacagtggtaacaaaaatgcattcaaaacactaattgccgcagaatacagcggtgtcaaggttgagttggtgaaggactttcaaatgggtgtctccaacaaaactccagagttcctcaagatgaaccctattgggaagattcctgtcctggagactcctgatggtcctgtttttgagagcaatgcaattsaagatatgnnacncgcttgaaggctgataacccactttatggatcttcactgattgattatgcccatattgagcaatggattgactttgctgcaacagagattgatgcaaacattggaaagtggttgtacccacggatggggttttatccccatgctggtgtggtagaagaatcaactattgctgcctt

SEQ ID NO: 2122 - protein, 103 aa, Zea mays subsp. mays
  peptide (1)..(103): Ceres Seq. ID no. 12633479
  misc_feature (22)..(22): Xaa is any aa, unknown or other
  misc_feature (98)..(98): Xaa is any aa, unknown or other
  misc_feature (101)..(101): Xaa is any aa, unknown or other
  misc_feature (102)..(102): Xaa is any aa, unknown or other
ASALTCFAARPISRCRSEIERXSFFIEMVLVLHANSGNKNAFKTLIAAEYSGVKVELVKDFQMGVSNKTPEFLKMNPIGKIPVLETPDGPVFESNAIXDMXXA

SEQ ID NO: 2123 - protein, 76 aa, Zea mays subsp. mays
  peptide (1)..(76): Ceres Seq. ID no. 12633480
  misc_feature (71)..(71): Xaa is any aa, unknown or other
  misc_feature (74)..(74): Xaa is any aa, unknown or other
  misc_feature (75)..(75): Xaa is any aa, unknown or other
MVLVLHANSGNKNAFKTLIAAEYSGVKVELVKDFQMGVSNKTPEFLKMNPIGKIPVLETPDGPVFESNAIXDMXXA

SEQ ID NO: 2124 - DNA, 1378 bp, Zea mays subsp. mays
  misc_feature (1)..(1378): Ceres Seq. ID no. 12410879
  misc_feature (1)..(1378): Ortholog of  Ceres SEQ ID NO 13638599 as cited in SEQ ID NO 51866
aacacggatggaattggcgcgggcggcgggctggcagttgcgcagcaataactcccgctgcccaccggctcacctgtccttcatccgccccgatccgaccccaaatcaattccaaattcaatccggtctcagtggttggcccgccgctgccagtgccagatcgaatcggactctcggctcgtgtgcagcccaccggcgagacgccgaagctatatttttatgcccatctgatccgatgcgtggtgtggcgtcgtctccgcttttactagatcatcagtagccagctcaggagccgagcctggtcagggtagccaagcccatcccggtcctctcccggcgtcttctccctccgcaccgcggctccgggcgatggcgggcgtcggctccgcgctgcgtcggctctacctctccgtctacaactgggtcgtcttcttcggatgggcgcaggtgctgtactacgcggtcctgacgctgcgtttgagcgggcacaaggccgtctacgccgccgtcgagaggccgctgcagttcgcgcagacagccgccatcatggagatcgttcatgggctcgtagggttggtgaggtctccggtctctgcaactcttccacagattggatccaggttgttccttacgtggggtgtcttgtggagttttcctgagacccagtcacaccttcttgttactaccctggtcataagctggtctatcactgagatcatcagatactctttctttggaacgaaggaggcatttggctttgcgccttcctggttattatggcttaggtacagcacctttatgttgttgtatcctactggcatctctagtgaagttggtctgatctacattgccttgccttacatgaaggcatcggagaaatactgtattaggatgcccaacaaatggaacttctcatacgattacttctattcatctgtccttgccctcctgatctatgttccaggaagcccacacatgtaccgttacatgctctcccagaggaagaaggcgctatcaaaggccaaagcggcgtgatgatgccgcgcaagcaagggaatcggtggactggtttgcgtgatggatgtcggaacgtgttcaagttttcgacatccccagtagaatctagtggtcgggggatatatattactagaatggggctcttcatatgaactgccccgtatgcgtaatgtgttgtaccggagtcatcatttcagatatcagctgttgcgtggttaaatcgtagtttgcttccggatcacccatcagttggggggtggatttccatgttgattatatatggcaatgcgttccgcatccttccctcaactggtgctgtgctctcttgtttctagcgtacaatgtatgatggattttatcc

SEQ ID NO: 2125 - protein, 221 aa, Zea mays subsp. mays
  peptide (1)..(221): Ceres Seq. ID no. 12410880
MAGVGSALRRLYLSVYNWVVFFGWAQVLYYAVLTLRLSGHKAVYAAVERPLQFAQTAAIMEIVHGLVGLVRSPVSATLPQIGSRLFLTWGVLWSFPETQSHLLVTTLVISWSITEIIRYSFFGTKEAFGFAPSWLLWLRYSTFMLLYPTGISSEVGLIYIALPYMKASEKYCIRMPNKWNFSYDYFYSSVLALLIYVPGSPHMYRYMLSQRKKALSKAKAA

SEQ ID NO: 2126 - protein, 162 aa, Zea mays subsp. mays
  peptide (1)..(162): Ceres Seq. ID no. 12410881
MEIVHGLVGLVRSPVSATLPQIGSRLFLTWGVLWSFPETQSHLLVTTLVISWSITEIIRYSFFGTKEAFGFAPSWLLWLRYSTFMLLYPTGISSEVGLIYIALPYMKASEKYCIRMPNKWNFSYDYFYSSVLALLIYVPGSPHMYRYMLSQRKKALSKAKAA

SEQ ID NO: 2127 - DNA, 1455 bp, Zea mays subsp. mays
  misc_feature (1)..(1455): Ceres Seq. ID no. 12373785
  misc_feature (1)..(1455): Ortholog of  Ceres SEQ ID NO 13596523 as cited in SEQ ID NO 62578
  misc_feature (1)..(1455): Ortholog of  Ceres SEQ ID NO 15169674 as cited in SEQ ID NO 64731
  misc_feature (1)..(1455): Ortholog of  Ceres SEQ ID NO 13597701 as cited in SEQ ID NO 65129
gaaatttccgatttctgccagatccaatcgcggctaccatcatggcagaagcggccggcggcggacccctgctccccgaggaactcattatctgggagatcctaacccgtctgccggcgaagcccctcctccgatgccgcgctgtctgcctctcctggtgccgccgactcacctccgacgccaaattcctcctcgcccaccaccgtcgccagccctcgctcccgctcctcactgaaggggacaggagcaccgaggagaggaggatcgacgccctggactaccgcaccggcgagcggcgccccatcgcgcggacaacaggccggaccgccgccaacggggacgacctgaacgtgctggcttcctgcgaaggcctcctcatcctcctcgccaacggcggcctccagatctgcaacccggcgacccgccagcgcgcgccactcactcttctccacggcgcctattgcatctccgcgctttaccctcacatcccgtccaggtcgtaccgtgtgctctgctgcttcgagagagccgaggacggccacgccgtgtaccacgtgcacaccgtcgggtcgcgcgagctcaggtgcgtcggagaacctcccgcgccgtgggcgtccggggatatggtaatggcgatgccgatgatggtgtaccttcacccgcacgtcgtggcagacagcaggatctactggcagccggtaaagctgcccgtcggcaacggcaaggtcaacaacatgctcgtgttcgacacaatgaccgagtccttccagcaactgctgtcgcccgtggagggcccctttcttgaactgtttcagatgaacagcggcgcccttggattgtaccactgccgcagcggcaaggttgatctttgggtgttacaggatcacgggagctggtcctggtcgatgaaccaccggatcaaattggacgtgatgtttttctccctgctgccggtgctggacccggaaggagatgtgctagtgctttctaaaagaggggaaacaggcatcctgtggcaacatctgcatcacatctctggtgtcaatggcagtttgctggccctgtatcaatggagcgcttatctgaagcttagcaggcataggctcaaagaaagtctagtccaccatgacttcttctcgatggaaggtaatgagggtggtgtggatgaaaaaccattgttcgatggcttgtcaactgtggcattgcttcgtgatgataattctgagccacattgagaaacaaaggtattactcaagctgtttcatctcatcaggatggagtcactcctgcctagtaataacagcactgcagattagtaataacctgaaactatacctcgagtctgatttttcccttttcacatgagtcataaacactgttatgactggtattttattttcccttttcacgtgagtcatgaacactgttattactggtattttattttccattttc

SEQ ID NO: 2128 - protein, 410 aa, Zea mays subsp. mays
  peptide (1)..(410): Ceres Seq. ID no. 12373786
NFRFLPDPIAATIMAEAAGGGPLLPEELIIWEILTRLPAKPLLRCRAVCLSWCRRLTSDAKFLLAHHRRQPSLPLLTEGDRSTEERRIDALDYRTGERRPIARTTGRTAANGDDLNVLASCEGLLILLANGGLQICNPATRQRAPLTLLHGAYCISALYPHIPSRSYRVLCCFERAEDGHAVYHVHTVGSRELRCVGEPPAPWASGDMVMAMPMMVYLHPHVVADSRIYWQPVKLPVGNGKVNNMLVFDTMTESFQQLLSPVEGPFLELFQMNSGALGLYHCRSGKVDLWVLQDHGSWSWSMNHRIKLDVMFFSLLPVLDPEGDVLVLSKRGETGILWQHLHHISGVNGSLLALYQWSAYLKLSRHRLKESLVHHDFFSMEGNEGGVDEKPLFDGLSTVALLRDDNSEPH

SEQ ID NO: 2129 - protein, 397 aa, Zea mays subsp. mays
  peptide (1)..(397): Ceres Seq. ID no. 12373787
MAEAAGGGPLLPEELIIWEILTRLPAKPLLRCRAVCLSWCRRLTSDAKFLLAHHRRQPSLPLLTEGDRSTEERRIDALDYRTGERRPIARTTGRTAANGDDLNVLASCEGLLILLANGGLQICNPATRQRAPLTLLHGAYCISALYPHIPSRSYRVLCCFERAEDGHAVYHVHTVGSRELRCVGEPPAPWASGDMVMAMPMMVYLHPHVVADSRIYWQPVKLPVGNGKVNNMLVFDTMTESFQQLLSPVEGPFLELFQMNSGALGLYHCRSGKVDLWVLQDHGSWSWSMNHRIKLDVMFFSLLPVLDPEGDVLVLSKRGETGILWQHLHHISGVNGSLLALYQWSAYLKLSRHRLKESLVHHDFFSMEGNEGGVDEKPLFDGLSTVALLRDDNSEPH

SEQ ID NO: 2130 - DNA, 1149 bp, Zea mays subsp. mays
  misc_feature (1)..(1149): Ceres Seq. ID no. 12406482
  misc_feature (1)..(1149): Ortholog of  Ceres SEQ ID NO 13622393 as cited in SEQ ID NO 1256
aacaaatagggttttatcattttgggaaggagcagatcaggatccattaacacccctacgtacgcctttcctctggaaacccttctctcgcctgcctctcccccgccgcgccgccacttcccctctcccgtcaactccggcttccgcgcgaggtcgagctagcgtttggagttctcgagacctgctgtgatggcgacagagcaagcggcggagaactacacggtggaggacctcgtggccctgaacccctacaaccccgacatcctcaacgacctcgagaagttcgtcaatgagcaggtctcatctcagacatataacttggatgcaaatctcagccttcttcgcttgtaccagtttgagccagaaaggatgagcatacagattgtggcccacatactgattaaggctctcatggcaatgccagcccctgacttcagtttgtgcttattcttaatccctgaacatgtgcaaatggaggagcaattcaaggtattgatagttctttctcactacctagagactgctaggttcagtcaattttgggatgaagcagcaaagaaccgccacatatcggaagcagtgccaggtttcgaacaagcaatccaatcctatgcgattcatgtactttccttgacataccagaaagttccaaggcctattcttgtagaggcaatcaacatcgaaggtctcgcgttggacaagtttcttgagtaccatgccgcgaactcaggttgggtgattgagaagggtgggcagtctcaagtgattgttcttccgcgtaatgagttcaatcacccagagctcaagaagaacacagccgatatccttccgtttgaacacgtaacacgcatattccctgtccttggctgattcaggcgtgctgagagatctatacaaaactcagcgagtgaagcttctcttagtcattgcatcttcagtttgtagtgtaccctattgagattatctcggtataccagtcctttttatgccggagttggtttctgcaacctatggttattgttattactataacgaaatgctcagatatgagattggtcttgtccttcgaaggaggctgtcaggtccattgtttgagaacgtgtgttgtgaatggtgtgtgctgggaatgagtctcattagctatcgccg

SEQ ID NO: 2131 - protein, 226 aa, Zea mays subsp. mays
  peptide (1)..(226): Ceres Seq. ID no. 12406483
MATEQAAENYTVEDLVALNPYNPDILNDLEKFVNEQVSSQTYNLDANLSLLRLYQFEPERMSIQIVAHILIKALMAMPAPDFSLCLFLIPEHVQMEEQFKVLIVLSHYLETARFSQFWDEAAKNRHISEAVPGFEQAIQSYAIHVLSLTYQKVPRPILVEAINIEGLALDKFLEYHAANSGWVIEKGGQSQVIVLPRNEFNHPELKKNTADILPFEHVTRIFPVLG

SEQ ID NO: 2132 - protein, 166 aa, Zea mays subsp. mays
  peptide (1)..(166): Ceres Seq. ID no. 12406484
MSIQIVAHILIKALMAMPAPDFSLCLFLIPEHVQMEEQFKVLIVLSHYLETARFSQFWDEAAKNRHISEAVPGFEQAIQSYAIHVLSLTYQKVPRPILVEAINIEGLALDKFLEYHAANSGWVIEKGGQSQVIVLPRNEFNHPELKKNTADILPFEHVTRIFPVLG

SEQ ID NO: 2133 - protein, 152 aa, Zea mays subsp. mays
  peptide (1)..(152): Ceres Seq. ID no. 12406485
MAMPAPDFSLCLFLIPEHVQMEEQFKVLIVLSHYLETARFSQFWDEAAKNRHISEAVPGFEQAIQSYAIHVLSLTYQKVPRPILVEAINIEGLALDKFLEYHAANSGWVIEKGGQSQVIVLPRNEFNHPELKKNTADILPFEHVTRIFPVLG

SEQ ID NO: 2134 - DNA, 1731 bp, Zea mays subsp. mays
  misc_feature (1)..(1731): Ceres Seq. ID no. 12345243
  misc_feature (1)..(1731): Ortholog of  Ceres SEQ ID NO 13542155 as cited in SEQ ID NO 64236
aagaattgttcggttacattttgcctgtttgctgtttttttcgtcggttcgcctcgtcttctccgcctggcccgagactcacactcaattcggtcgttttctgcattaacggagtcaggcccaggcctaacctcagtacatcagagcagccgaacacgcccgcggcaaccgccgccattctaccccaggtcggacggacccttgccggagacgagcacacgccacagcaggaattatcgggcgtagagcagcgcgaagcgagagatccaatggcggcggcggaggggcagtgggtgctcatggcaacggggcggacgccgaccaacattgcggtgatcaagtactgggggaagcgggacgaggcgctcatcctccccatcaacgacagcatcagcgtaacgctcgaccccgaccatctctccgccaccaccactgtcgccgtcagcccctcattcccttccgaccgcatgtggctcaatggcaaggagatctcgctattaggaggaaggtttcagagctgcctcagagaaatcagaaagcgtgctcgtgactttgaggacaaggagaagggcgtcaagatcaagaaagaggactgggacaagttgcatgttcacatagcctcgtacaacaacttccccactgctgctggtttggcctcttcagctgctggccttgcctgtttcgttttcacccttggaaagctgatgaatgcgaaagaagattatggagaactttcttcaatagcaaggcagggatctgggagtgcatgccgcagtatatatggtggttttgtgaaatggtgcatgggagaaaaagatgatggaagtgacagtattgccgtgcagcttgctgacgaaacacactggaatgatcttgtaattattattgcagtggtcagttcaaagcagaaggaaaccagtagcaccagtgggatgcgagatagtgttgaaacaagtcctctcttgcagtacagggcccagacagtggtgccaggtcgggtgttgaaaatggaagaagctatcaagaaccgtgactttgaatcctttgccaaattaacttgtgcggatagcaaccagtttcatgctgtatgcttagacacgagccctcctatcttctatatgaatgacacgtcacaccgaataattagccttgtggaaaaatggaaccactcagaaggaaccccacaggtcgcttacaccttcgatgctgggccaaacgctgttctaatcgcacaaaaccgtaaaactgcagcacatctcctccagaagctcctatactatttccctccacaggataatgatttgagcagctatctggttggcgataaatcgattctaggtgtcgccggattgcattccatgaaagacgtcgaggctcttccagcacctccagagacgaagataccggatcagaaattcaagggcgatgttagctacttcatctgcagcaggcttggcgctggtccaaaggttgtttctgacgaaggtcaagcattgatcgattcagtcaccggacttccaaaaggcgtgtagttctagatttaggttggaataatggtttaagctggggattaaagacaatggtatcatacaagcaacctgggccgggaagatacattaggctcgtgtcacgttggtttcgtgctgattgacttgacggtgtattggtcatgtattatgcatttgcgctggtgttcgttgctgtccaataaagatagaacacgttctcgcc

SEQ ID NO: 2135 - protein, 509 aa, Zea mays subsp. mays
  peptide (1)..(509): Ceres Seq. ID no. 12345244
ELFGYILPVCCFFRRFASSSPPGPRLTLNSVVFCINGVRPRPNLSTSEQPNTPAATAAILPQVGRTLAGDEHTPQQELSGVEQREARDPMAAAEGQWVLMATGRTPTNIAVIKYWGKRDEALILPINDSISVTLDPDHLSATTTVAVSPSFPSDRMWLNGKEISLLGGRFQSCLREIRKRARDFEDKEKGVKIKKEDWDKLHVHIASYNNFPTAAGLASSAAGLACFVFTLGKLMNAKEDYGELSSIARQGSGSACRSIYGGFVKWCMGEKDDGSDSIAVQLADETHWNDLVIIIAVVSSKQKETSSTSGMRDSVETSPLLQYRAQTVVPGRVLKMEEAIKNRDFESFAKLTCADSNQFHAVCLDTSPPIFYMNDTSHRIISLVEKWNHSEGTPQVAYTFDAGPNAVLIAQNRKTAAHLLQKLLYYFPPQDNDLSSYLVGDKSILGVAGLHSMKDVEALPAPPETKIPDQKFKGDVSYFICSRLGAGPKVVSDEGQALIDSVTGLPKGV

SEQ ID NO: 2136 - protein, 420 aa, Zea mays subsp. mays
  peptide (1)..(420): Ceres Seq. ID no. 12345245
MAAAEGQWVLMATGRTPTNIAVIKYWGKRDEALILPINDSISVTLDPDHLSATTTVAVSPSFPSDRMWLNGKEISLLGGRFQSCLREIRKRARDFEDKEKGVKIKKEDWDKLHVHIASYNNFPTAAGLASSAAGLACFVFTLGKLMNAKEDYGELSSIARQGSGSACRSIYGGFVKWCMGEKDDGSDSIAVQLADETHWNDLVIIIAVVSSKQKETSSTSGMRDSVETSPLLQYRAQTVVPGRVLKMEEAIKNRDFESFAKLTCADSNQFHAVCLDTSPPIFYMNDTSHRIISLVEKWNHSEGTPQVAYTFDAGPNAVLIAQNRKTAAHLLQKLLYYFPPQDNDLSSYLVGDKSILGVAGLHSMKDVEALPAPPETKIPDQKFKGDVSYFICSRLGAGPKVVSDEGQALIDSVTGLPKGV

SEQ ID NO: 2137 - protein, 410 aa, Zea mays subsp. mays
  peptide (1)..(410): Ceres Seq. ID no. 12345246
MATGRTPTNIAVIKYWGKRDEALILPINDSISVTLDPDHLSATTTVAVSPSFPSDRMWLNGKEISLLGGRFQSCLREIRKRARDFEDKEKGVKIKKEDWDKLHVHIASYNNFPTAAGLASSAAGLACFVFTLGKLMNAKEDYGELSSIARQGSGSACRSIYGGFVKWCMGEKDDGSDSIAVQLADETHWNDLVIIIAVVSSKQKETSSTSGMRDSVETSPLLQYRAQTVVPGRVLKMEEAIKNRDFESFAKLTCADSNQFHAVCLDTSPPIFYMNDTSHRIISLVEKWNHSEGTPQVAYTFDAGPNAVLIAQNRKTAAHLLQKLLYYFPPQDNDLSSYLVGDKSILGVAGLHSMKDVEALPAPPETKIPDQKFKGDVSYFICSRLGAGPKVVSDEGQALIDSVTGLPKGV

SEQ ID NO: 2138 - DNA, 1984 bp, Zea mays subsp. mays
  misc_feature (1)..(1984): Ceres Seq. ID no. 12595533
  misc_feature (1)..(1984): Ortholog of  Ceres SEQ ID NO 12626078 as cited in SEQ ID NO 69113
agaagtttcagatcctcgcatcgtccgcaccttatcctctcgactttacagtacctgctctcagctcctccctatctcaatggcatccgcgaatgccatctccaccgcctcccccttccggcccctctctcagggcagggcgacgaggtcacagcggttcgtggtgcgtgcgaacgccaaagacattgcctttgaccagaaatccagggcagcgctgcaggccggcgtcgagaagctcgcaaacgccgtcggtgtcaccctcgggccacgagggaggaatgtggtgctcgatgagtacggcaaccccaaagttgtgaatgatggagtcactattgcccgtgctattgagctgtatgatccaatggaaaatgctggtgcagcattgattcgtgaggttgctagcaagaccaatgattcagctggtgatgggactacaactgcatgcgtccttgctcgtgaaatcatcaagctaggccttctgagtgtaacatctggtgcaaatcctgtatcactaaagaaaggaatagacaaaactgtgcagggcctaattcaggagcttgagaataagtctagaccaatcaagggtggtggtgatatcaaagctgttgcatctatctctgctggcaatgatgaatttatcggatccatgattgctgaagcaattgacaaagtggggcctgatggtgttctatcaattgaatcctcctcgtcttttgagaccactgttgaagttgaagaaggaatggagattgaccgcggttatatttccccacaatttgtgacaaaccttgagaaatcaattgtggagtttgagaattgtaaggttcttattactgatcagaagatcacaagcataaaggaaatccttccgattttggagaagaccacacagctgagagcccctctgttcattattgctgaggacattactggtgaagctttggcaactcttgttgttaacaagcttcgaggaattctcaatgttgcagcgattaaggctccaagttttggtgagcggcggaaggctgtacttcaggacattgccatcgtcacaggtgctgagttcctagcaaaagatcttggtttgttggttgaaaatgctacagaggaacaacttggcacagcaaggaaagtcacgatacatcagactacaacaaccctcatagcagatgcagccagtaaagatgagatccaggcgagaattgcacaactgaagaaggagcttgctgagactgattcagtttatgatactgagaaattggccgagagaattgctaagcttgccggtggtgttgctgttatcaaggttggagctgcaactgagactgagcttgaggaccgccagctaagaattgaggatgcaaaaaatgccacttttgcagctatagaggagggcattgttccaggaggtggtgcggcatatgtgcacctatctacggttgtccctaagatcaaagaagcaattgaggaccctgatgagcgtcttggcgctgatattattcaaaaggcattggtagcacctgcttcattgattgcacacaatgctggagtagagggtgaagtagttgtcgagaagatcaaggacagcgattgggaggtgggctacaatgcaatgactgacaagtacgagaacctgatggaggctggtgtgatcgaccctgccaaggtgaccaggtgtgcgctccagaatgcggcctcagtagctggaatggtcctaaccacacaggccattgttgttgagaagccaaagccgaagcctcaagtggcagagccaccggagggagcccttaccgtttaaaacttaacgttcttgaggctgctgtccagacggttcagatcagttgagagggtagaactttggtttgagaattttggttcagatccactgggagttatagagtaggattgctatttttcagacgaagagtaattttactctggtctgaacttatccgaatcgaagacatttgcatcaccatttttt

SEQ ID NO: 2139 - protein, 598 aa, Zea mays subsp. mays
  peptide (1)..(598): Ceres Seq. ID no. 12595534
EVSDPRIVRTLSSRLYSTCSQLLPISMASANAISTASPFRPLSQGRATRSQRFVVRANAKDIAFDQKSRAALQAGVEKLANAVGVTLGPRGRNVVLDEYGNPKVVNDGVTIARAIELYDPMENAGAALIREVASKTNDSAGDGTTTACVLAREIIKLGLLSVTSGANPVSLKKGIDKTVQGLIQELENKSRPIKGGGDIKAVASISAGNDEFIGSMIAEAIDKVGPDGVLSIESSSSFETTVEVEEGMEIDRGYISPQFVTNLEKSIVEFENCKVLITDQKITSIKEILPILEKTTQLRAPLFIIAEDITGEALATLVVNKLRGILNVAAIKAPSFGERRKAVLQDIAIVTGAEFLAKDLGLLVENATEEQLGTARKVTIHQTTTTLIADAASKDEIQARIAQLKKELAETDSVYDTEKLAERIAKLAGGVAVIKVGAATETELEDRQLRIEDAKNATFAAIEEGIVPGGGAAYVHLSTVVPKIKEAIEDPDERLGADIIQKALVAPASLIAHNAGVEGEVVVEKIKDSDWEVGYNAMTDKYENLMEAGVIDPAKVTRCALQNAASVAGMVLTTQAIVVEKPKPKPQVAEPPEGALTV

SEQ ID NO: 2140 - protein, 572 aa, Zea mays subsp. mays
  peptide (1)..(572): Ceres Seq. ID no. 12595535
MASANAISTASPFRPLSQGRATRSQRFVVRANAKDIAFDQKSRAALQAGVEKLANAVGVTLGPRGRNVVLDEYGNPKVVNDGVTIARAIELYDPMENAGAALIREVASKTNDSAGDGTTTACVLAREIIKLGLLSVTSGANPVSLKKGIDKTVQGLIQELENKSRPIKGGGDIKAVASISAGNDEFIGSMIAEAIDKVGPDGVLSIESSSSFETTVEVEEGMEIDRGYISPQFVTNLEKSIVEFENCKVLITDQKITSIKEILPILEKTTQLRAPLFIIAEDITGEALATLVVNKLRGILNVAAIKAPSFGERRKAVLQDIAIVTGAEFLAKDLGLLVENATEEQLGTARKVTIHQTTTTLIADAASKDEIQARIAQLKKELAETDSVYDTEKLAERIAKLAGGVAVIKVGAATETELEDRQLRIEDAKNATFAAIEEGIVPGGGAAYVHLSTVVPKIKEAIEDPDERLGADIIQKALVAPASLIAHNAGVEGEVVVEKIKDSDWEVGYNAMTDKYENLMEAGVIDPAKVTRCALQNAASVAGMVLTTQAIVVEKPKPKPQVAEPPEGALTV

SEQ ID NO: 2141 - protein, 478 aa, Zea mays subsp. mays
  peptide (1)..(478): Ceres Seq. ID no. 12595536
MENAGAALIREVASKTNDSAGDGTTTACVLAREIIKLGLLSVTSGANPVSLKKGIDKTVQGLIQELENKSRPIKGGGDIKAVASISAGNDEFIGSMIAEAIDKVGPDGVLSIESSSSFETTVEVEEGMEIDRGYISPQFVTNLEKSIVEFENCKVLITDQKITSIKEILPILEKTTQLRAPLFIIAEDITGEALATLVVNKLRGILNVAAIKAPSFGERRKAVLQDIAIVTGAEFLAKDLGLLVENATEEQLGTARKVTIHQTTTTLIADAASKDEIQARIAQLKKELAETDSVYDTEKLAERIAKLAGGVAVIKVGAATETELEDRQLRIEDAKNATFAAIEEGIVPGGGAAYVHLSTVVPKIKEAIEDPDERLGADIIQKALVAPASLIAHNAGVEGEVVVEKIKDSDWEVGYNAMTDKYENLMEAGVIDPAKVTRCALQNAASVAGMVLTTQAIVVEKPKPKPQVAEPPEGALTV

SEQ ID NO: 2142 - DNA, 1320 bp, Zea mays subsp. mays
  misc_feature (1)..(1320): Ceres Seq. ID no. 12365213
  misc_feature (1)..(1320): Ortholog of  Ceres SEQ ID NO 14315013 as cited in SEQ ID NO 57760
  misc_feature (1)..(1320): Ortholog of  Ceres SEQ ID NO 13598248 as cited in SEQ ID NO 64224
gtcaggacccggaccaaaccaatcagggcggctcgggcgcggcggcgacacagggcaaggaggccgaacgttggggggaccggggctcgacgccagccgtggatcgcctgcggagggggacaagcgtctgcctcatgtcccgcgacggcggggaatagggcgacggcgtcggcggcggggatcggttgcggcggcgtgacgaggcggctacggcggcggctcgggagggaggcggcaccatgtctgcggtagtctgtggcaagaggtcctcctccatcttcgccgacgagctcctcccgccgtctccttcctcccctcactcctcccaccagccggcggccaagaggtcccgccgctccccctcgcaccgcggcggctccgacggactccgaccggaggcgctcgtcgactatctacttgccctcttccccgacatggatccacagttacttgaaaaagctctggaagcatctggagatgacttggattctgcgataaaaagtttgaatttgctgcgcttagagtcagcagaagctatcttgtcatcgactggtttcaaacctgaaaattgtctgcaaacagccaattcagccttctcttgaaggtattcctaatggtggtgtggatacggttacagaacatccgcctagcgtagataattaccagacaagttataatggctctgaatgggttgagctattagtcacagagatgagaaatgcttctgacataaacgatgcacgggctcgtgcgtcaagagctctggaggctttggagaaaacgattgtagagcgtgcaggagctgaagctacacaaaacctgcataaggaaaacatgatgctcaaggagcagttgactgttgttctgcgagagaactccgtgctgaagcgggcagtcgccattcagcacgagcgccaaaaggagttcgacgagaggtctcacgaggtccagaacttgaagcaacttgttctgcagtaccaggagcaagttaggactctagagatgaacaactacgccctcacaatgcatctcaagcaggctcaacagaacagctccatacctgggcgtttcaaccctgatgttttctaagcgtagtagctgctgaacggtccgccccagattaataagctatgtatgaatatatcttgttctaccaactgctcctgagatggggatatccgataggtggattcaccgcccaagggtccagaattttcaagtcactatggttttgatttcgatatactccgtatttatttaaacgtgttgctttcatgcaattggctatccgatatattgtgtgcgcccacttttccgggc

SEQ ID NO: 2143 - protein, 125 aa, Zea mays subsp. mays
  peptide (1)..(125): Ceres Seq. ID no. 12365214
MRNASDINDARARASRALEALEKTIVERAGAEATQNLHKENMMLKEQLTVVLRENSVLKRAVAIQHERQKEFDERSHEVQNLKQLVLQYQEQVRTLEMNNYALTMHLKQAQQNSSIPGRFNPDVF

SEQ ID NO: 2144 - protein, 120 aa, Zea mays subsp. mays
  peptide (1)..(120): Ceres Seq. ID no. 12365215
MSAVVCGKRSSSIFADELLPPSPSSPHSSHQPAAKRSRRSPSHRGGSDGLRPEALVDYLLALFPDMDPQLLEKALEASGDDLDSAIKSLNLLRLESAEAILSSTGFKPENCLQTANSAFS

SEQ ID NO: 2145 - protein, 84 aa, Zea mays subsp. mays
  peptide (1)..(84): Ceres Seq. ID no. 12365216
MMLKEQLTVVLRENSVLKRAVAIQHERQKEFDERSHEVQNLKQLVLQYQEQVRTLEMNNYALTMHLKQAQQNSSIPGRFNPDVF

SEQ ID NO: 2146 - DNA, 1345 bp, Zea mays subsp. mays
  misc_feature (1)..(1345): Ceres Seq. ID no. 12341582
  misc_feature (1)..(1345): Ortholog of  Ceres SEQ ID NO 13596643 as cited in SEQ ID NO 62565
  misc_feature (1)..(1345): Ortholog of  Ceres SEQ ID NO 13597550 as cited in SEQ ID NO 65037
gcgcgactagactagccttcagccttctccagttctcctctcctcctcgttttttcccctcctcaacgcctggacggaactgaagccagccagcctgcccagccaaggtgaccggagacaagtaaaaatctcgccggtcttctcacagaccacaaacattgcgcttgctgcccagctataagtactcgccggactaggcggccaactcatcccatcccatttcatccatctcggagcagaggcaacgcaatccggcaaaaaggcgcttctttcttgccctgttcgggacaggacacagacacagagccaggagacggaaccgtcggaggctaagcttcttcttcgtctttcctgggcgcgctcaagtggcgatggcatttgcggtctccgacgagctgctgggcaccttcgtgccgattgcggtgtactggctctactcggggctctacgtcgtcctggacgggctcgggatggacgactacaggctccatcccaagggggaggaggaggccaagaacatcgtttccaggtccacggtcgtcaggggcgtccttgttcagcaggcgtttcaaatcgctgtctcccttcttctcttcacggttcttggtgatgagaatgaggctgcgaggaagcaacctccggctctggtgttggcattgcaatttatcgttgcaatgttcgtcatggacacatggcagtatttcatgcacagatacatgcacatcaacaagttcttgtacaagcacgtccactctaagcaccacacccttgtcgtcccctacgcttttggagctctgtacaaccaccccctggagggactcatcctggacaccatcggtggcgcgctctcgttcctcatctctggcatgaccccgaggactggcatattcttcttctcgttcgcgaccatcaagaccgtcgacgaccactgtggtctgtggcttcctgggaacatcctccatgtattcttcagcaacaacagcgcttaccatgacatccaccatcagctctacggcaacaagtacaacttctctcagcccttctttgtcatgtgggacaagatccttggaacatacatgccttacactctggagacccgcaagggaggtggtctcgaggcgcgcccggttaagctcaaccaagcacagcagaccaaggctgattgagcagtgtggtttctcctgtttatctactacttcccctgattttttccccttctgactgcatttgtactgtagaagtatttcctgtccatatagtaaaatcatttaggcaaatgccatgttgtacccaacagatatagcaaataaaacatcttgttaatggagatccattgatgtttgtt

SEQ ID NO: 2147 - protein, 264 aa, Zea mays subsp. mays
  peptide (1)..(264): Ceres Seq. ID no. 12341583
MAFAVSDELLGTFVPIAVYWLYSGLYVVLDGLGMDDYRLHPKGEEEAKNIVSRSTVVRGVLVQQAFQIAVSLLLFTVLGDENEAARKQPPALVLALQFIVAMFVMDTWQYFMHRYMHINKFLYKHVHSKHHTLVVPYAFGALYNHPLEGLILDTIGGALSFLISGMTPRTGIFFFSFATIKTVDDHCGLWLPGNILHVFFSNNSAYHDIHHQLYGNKYNFSQPFFVMWDKILGTYMPYTLETRKGGGLEARPVKLNQAQQTKAD

SEQ ID NO: 2148 - protein, 231 aa, Zea mays subsp. mays
  peptide (1)..(231): Ceres Seq. ID no. 12341584
MDDYRLHPKGEEEAKNIVSRSTVVRGVLVQQAFQIAVSLLLFTVLGDENEAARKQPPALVLALQFIVAMFVMDTWQYFMHRYMHINKFLYKHVHSKHHTLVVPYAFGALYNHPLEGLILDTIGGALSFLISGMTPRTGIFFFSFATIKTVDDHCGLWLPGNILHVFFSNNSAYHDIHHQLYGNKYNFSQPFFVMWDKILGTYMPYTLETRKGGGLEARPVKLNQAQQTKAD

SEQ ID NO: 2149 - protein, 163 aa, Zea mays subsp. mays
  peptide (1)..(163): Ceres Seq. ID no. 12341585
MFVMDTWQYFMHRYMHINKFLYKHVHSKHHTLVVPYAFGALYNHPLEGLILDTIGGALSFLISGMTPRTGIFFFSFATIKTVDDHCGLWLPGNILHVFFSNNSAYHDIHHQLYGNKYNFSQPFFVMWDKILGTYMPYTLETRKGGGLEARPVKLNQAQQTKAD

SEQ ID NO: 2150 - DNA, 1721 bp, Zea mays subsp. mays
  misc_feature (1)..(1721): Ceres Seq. ID no. 12372921
  misc_feature (1)..(1721): Ortholog of  Ceres SEQ ID NO 13659033 as cited in SEQ ID NO 66372
  misc_feature (1)..(1721): Ortholog of  Ceres SEQ ID NO 13655724 as cited in SEQ ID NO 68973
  misc_feature (1)..(1721): Ortholog of  Ceres SEQ ID NO 12625899 as cited in SEQ ID NO 69079
  misc_feature (1)..(1721): Ortholog of  Ceres SEQ ID NO 15180366 as cited in SEQ ID NO 0
ataattccatagtctaacctgccaaccacttccaccgccaccgccgagcgcggtggcaccgacacgacacacgtagctgcagacctgcagtgccagcacggctgccaatccctgctggcgctgttcccggctccgagatcatttggactcggcactcggcagggatggggatggggacggaatggccgccgacgcctgcgcagcagaggaaagcggtggtgagcgccgggtcggcgctgaagctggtactgttcgtgattctcgcgggcctcgcactgcggctgctggtggggcccccagcctacctcctgccgcccaccgccgcgccagagggggccgctcgtcttttcgcggtgccggagagggaaagaaccgccggcggcggcggcggcggataccttccgtcgaaacggatgatgcggtttttactttgaccgattcagaacctctaacagctttaggcaagaaggaaggttccacaaaaccagaagaaagttgtgatcttttccatggcgagtgggttcccaattcatcaggaccagcttatactaatgcaagctgccgcttcattgagtctcctcagaactgtatgacaaatggaagacctgacacagattatctcaattggagatggaagccatatggttgtgaggtatcaccatttgacggcaagaagtttttggatggcatgaaaggcaagcattgggcactcattggtgattccatccttcgcaaccacgtccagtcattgctttgtcttctttccaaggtcgaagatgctactgaggtttaccacgacgatacattcagatccagaagatggcacttcccttcgtacaattttacgatctcccttgtctgggcaccattcctggtcaaagctaaaatatttgaggacgacgatggagtttctactgctgatctccagctgcaccttgacgttctcgagacagactggactagtcaatgggagaagttcgattacgcggtgatatccacgggccaatggttcttcaagactgcagtgtactgggagaatggagctgcgattggctgccactcctgccagaacaaaaccctggaagagaggcctccggagtactccttccgcagggcactcagggtggccttccagttcatcacatcctcacctcacaagccagtagtcttctacagaacgtgggctccctcgcattttgagaacggcgagtggttcagcggcgggacttgcaacaggacggccccattcaagccaggggaggccggtgacagagaatgggacaatagtatgtggaggattgagagagaagagtttcacaacgcggtgcctatcggtggtgaccgtctgaaactgctcgatacatttgagctctctctcctcaggcctgatggtcatccagggccttatagagcataccatccttacgagaagggcgtgacagccaaagtccagaatgactgcctccactggtgcttgcctgggcctattgatgcgtggaacgatgtaattatgaagatggtggcaaaggactgaagcattatcaggtggtagtgtggtaccctaggcatggcatctgatctgaacaccagtattgtctcaagtctcattttcatacatatgtatgtttctgggcattgcatggcgtctcctctatctggtgtcaagaaactcaagtagattcggacttctcttcatggtgggtatgatttttttttatgtt

SEQ ID NO: 2151 - protein, 450 aa, Zea mays subsp. mays
  peptide (1)..(450): Ceres Seq. ID no. 12372922
MAADACAAEESGGERRVGAEAGTVRDSRGPRTAAAGGAPSLPPAAHRRARGGRSSFRGAGEGKNRRRRRRRIPSVETDDAVFTLTDSEPLTALGKKEGSTKPEESCDLFHGEWVPNSSGPAYTNASCRFIESPQNCMTNGRPDTDYLNWRWKPYGCEVSPFDGKKFLDGMKGKHWALIGDSILRNHVQSLLCLLSKVEDATEVYHDDTFRSRRWHFPSYNFTISLVWAPFLVKAKIFEDDDGVSTADLQLHLDVLETDWTSQWEKFDYAVISTGQWFFKTAVYWENGAAIGCHSCQNKTLEERPPEYSFRRALRVAFQFITSSPHKPVVFYRTWAPSHFENGEWFSGGTCNRTAPFKPGEAGDREWDNSMWRIEREEFHNAVPIGGDRLKLLDTFELSLLRPDGHPGPYRAYHPYEKGVTAKVQNDCLHWCLPGPIDAWNDVIMKMVAKD

SEQ ID NO: 2152 - protein, 314 aa, Zea mays subsp. mays
  peptide (1)..(314): Ceres Seq. ID no. 12372923
MTNGRPDTDYLNWRWKPYGCEVSPFDGKKFLDGMKGKHWALIGDSILRNHVQSLLCLLSKVEDATEVYHDDTFRSRRWHFPSYNFTISLVWAPFLVKAKIFEDDDGVSTADLQLHLDVLETDWTSQWEKFDYAVISTGQWFFKTAVYWENGAAIGCHSCQNKTLEERPPEYSFRRALRVAFQFITSSPHKPVVFYRTWAPSHFENGEWFSGGTCNRTAPFKPGEAGDREWDNSMWRIEREEFHNAVPIGGDRLKLLDTFELSLLRPDGHPGPYRAYHPYEKGVTAKVQNDCLHWCLPGPIDAWNDVIMKMVAKD

SEQ ID NO: 2153 - protein, 281 aa, Zea mays subsp. mays
  peptide (1)..(281): Ceres Seq. ID no. 12372924
MKGKHWALIGDSILRNHVQSLLCLLSKVEDATEVYHDDTFRSRRWHFPSYNFTISLVWAPFLVKAKIFEDDDGVSTADLQLHLDVLETDWTSQWEKFDYAVISTGQWFFKTAVYWENGAAIGCHSCQNKTLEERPPEYSFRRALRVAFQFITSSPHKPVVFYRTWAPSHFENGEWFSGGTCNRTAPFKPGEAGDREWDNSMWRIEREEFHNAVPIGGDRLKLLDTFELSLLRPDGHPGPYRAYHPYEKGVTAKVQNDCLHWCLPGPIDAWNDVIMKMVAKD

SEQ ID NO: 2154 - DNA, 1372 bp, Zea mays subsp. mays
  misc_feature (1)..(1372): Ceres Seq. ID no. 12365191
  misc_feature (1)..(1372): Ortholog of  Ceres SEQ ID NO 13660287 as cited in SEQ ID NO 67316
atcatcctcaacgccatggccgtgctgatgctcccgctctacctcttcgccacccctatcctgcgcttcttccaccaggacgccgagattgccgcgctcgccggccgcctagcgctctacatgatcccgcagctcttcgcctacgccttcaacttccccatccagaagttcctgcaggcgcagagcaaggtgatggccatggcggtcgtgtcggtggcggcgctgctgctccacgtcgccatcagctggctcctcatggggcccatggggatggggatcgtcggcctggccgtcgcgctcaacgcgtcttggtggctcgtcgtgctgggccagctcgcctacattctcatgggctactgccccggcgcctggaacggattcgactggctcgccttctccgacctctccggcttcgcgcgcctgtcgcttggctccgccgtcatgctctgcctggagttctggttctacatgttcctgatcgtcatcgtcggcaacctggagaacgctcaggtcgccgttgctgcagtctccatttgcacgaacctgttcgggtggcagatcatggtgttcttcggattcaacgcggccatcagcgtgcgggtgtcgaacgagctgggcgccgggcggccccgcgcggccaagttcgcgatcctggtggtgctcatgtcttcggtggccatcgggttggccttcttcgtcctcgtcctggccttccgcgacgtgtacggcgcgcccttcacggaaagccccgaggtggtgcgcgccgtgggccagcctcggcgtcgtcttcgccttctcgctgctcctcaacagcgtgcagccggtgctgtcgggcgttgccgtcggggccggctggcagtggctggtggcgtacatcaacctcggctgctactacctcgttggcatccccgtcgggtacatcatcgccttcccgctgcgcggcggggtgcaggggatgtggggcggcatgctcacgggcgtcggcctgcagaccctcatcctggtcgccatcacgctgcgcaccaactgggacaaggaggccagcgaggcccattccaggatacagaaatggggtggatcggcggcggccaaagtttcacatgcatgactagtctgaatgacgcgcgccaccatgagaatacaatacaacagatgccatgcgagcagaatggcatgctgcggtgcgtaagcttgattgtacgtgcaggttgcgttttgggctgcttaagtagttggagacaaagtcatacttaggttgttttgtttccagcagatatatgcttgtaaaacacgtattgtgccatagactgcatgattcttagcagagtttgaaatagaaaataatatatctctactactacttaattacctg

SEQ ID NO: 2155 - protein, 417 aa, Zea mays subsp. mays
  peptide (1)..(417): Ceres Seq. ID no. 12365192
IILNAMAVLMLPLYLFATPILRFFHQDAEIAALAGRLALYMIPQLFAYAFNFPIQKFLQAQSKVMAMAVVSVAALLLHVAISWLLMGPMGMGIVGLAVALNASWWLVVLGQLAYILMGYCPGAWNGFDWLAFSDLSGFARLSLGSAVMLCLEFWFYMFLIVIVGNLENAQVAVAAVSICTNLFGWQIMVFFGFNAAISVRVSNELGAGRPRAAKFAILVVLMSSVAIGLAFFVLVLAFRDVYGAPFTESPEVVRAVGQPRRRLRLLAAPQQRAAGAVGRCRRGRLAVAGGVHQPRLLLPRWHPRRVHHRLPAARRGAGDVGRHAHGRRPADPHPGRHHAAHQLGQGGQRGPFQDTEMGWIGGGQSFTCMTSLNDARHHENTIQQMPCEQNGMLRCVSLIVRAGCVLGCLSSWRQSHT

SEQ ID NO: 2156 - protein, 412 aa, Zea mays subsp. mays
  peptide (1)..(412): Ceres Seq. ID no. 12365193
MAVLMLPLYLFATPILRFFHQDAEIAALAGRLALYMIPQLFAYAFNFPIQKFLQAQSKVMAMAVVSVAALLLHVAISWLLMGPMGMGIVGLAVALNASWWLVVLGQLAYILMGYCPGAWNGFDWLAFSDLSGFARLSLGSAVMLCLEFWFYMFLIVIVGNLENAQVAVAAVSICTNLFGWQIMVFFGFNAAISVRVSNELGAGRPRAAKFAILVVLMSSVAIGLAFFVLVLAFRDVYGAPFTESPEVVRAVGQPRRRLRLLAAPQQRAAGAVGRCRRGRLAVAGGVHQPRLLLPRWHPRRVHHRLPAARRGAGDVGRHAHGRRPADPHPGRHHAAHQLGQGGQRGPFQDTEMGWIGGGQSFTCMTSLNDARHHENTIQQMPCEQNGMLRCVSLIVRAGCVLGCLSSWRQSHT

SEQ ID NO: 2157 - protein, 408 aa, Zea mays subsp. mays
  peptide (1)..(408): Ceres Seq. ID no. 12365194
MLPLYLFATPILRFFHQDAEIAALAGRLALYMIPQLFAYAFNFPIQKFLQAQSKVMAMAVVSVAALLLHVAISWLLMGPMGMGIVGLAVALNASWWLVVLGQLAYILMGYCPGAWNGFDWLAFSDLSGFARLSLGSAVMLCLEFWFYMFLIVIVGNLENAQVAVAAVSICTNLFGWQIMVFFGFNAAISVRVSNELGAGRPRAAKFAILVVLMSSVAIGLAFFVLVLAFRDVYGAPFTESPEVVRAVGQPRRRLRLLAAPQQRAAGAVGRCRRGRLAVAGGVHQPRLLLPRWHPRRVHHRLPAARRGAGDVGRHAHGRRPADPHPGRHHAAHQLGQGGQRGPFQDTEMGWIGGGQSFTCMTSLNDARHHENTIQQMPCEQNGMLRCVSLIVRAGCVLGCLSSWRQSHT

SEQ ID NO: 2158 - DNA, 1377 bp, Zea mays subsp. mays
  misc_feature (1)..(1377): Ceres Seq. ID no. 12355901
  misc_feature (1)..(1377): Ortholog of  Ceres SEQ ID NO 15178042 as cited in SEQ ID NO 54787
  misc_feature (1)..(1377): Ortholog of  Ceres SEQ ID NO 13597899 as cited in SEQ ID NO 64374
aaaaccgcaaatatcttcttaccccaacgccggcacgccgcccaaaaacccttgcggcgtcgcactcacactagcgaccaacccccaaccccagaccttcctctccggcggcggccggcgcgcgcgcgcgagggagatggaccgcccttccggcacatcgtaccagcgctttccccgcgttcggatccgcgagctcaaggacgactacgccaagttcgaactccgcgacaccgacgctagcatggccaacgccctccgccgcgtcatgatcgccgaagtcccaactgtcgccatcgatctcgtagagatcgaggttaactcctccgtcctcaacgacgagttcatcgcccaccgtctggggctcatcccgctcacctccgccgccgccatgcaaatgcgcttctctcgggactgcgacgcttgcgacggcgacggctcctgcgagtactgctccgtcgagtttcacctctccgtgcacgccaccgactctgaccagacgctcgaggtcacatccaacgacctgagatccatggaccccaaggtctgcccagtcgaccaagcacgcgcctaccagcacgcgctcggaggcaccgacccctttggagccaatgcctcgaacgaaaacaggggcatacttattgtaaagctgcgtcggggacaagaactaaggcttcgtgccatagctaggaaaggaattggcaaggaccatgccaaatggtcaccagctgctaccgtgactttcatgtatgagcctgacatacgtatcaatgaagaactaatggaaacattgacggtggaagagagaataagcttgattgaaagcagccctacaaaagtatttgagcttgattctgccaatcaggtggtggtgaaaaacgcggaggcatacacctacgacgacgaggtgatcaagcacgccgaggccatcgggaagccaggcttggtggagatcaccgccaaggaggacagcttcgtcttcaccgtagaaacaaccggtgccatcacagcctacgagctgatcatgaacgcgatcacggtgctgaggcagaagctggatgccgtccgccttcaggacgacgacggcgaccttggcgagctcggcgcccaccttggtgggccttaggagctttgagcaagaaggaatcgccctgtggcctccctccctcccactgcctacgtaggcctatctaactgccgtgcgtgctagtcgatcgatcgaaaccgaacggttctgataaaccttatggtgtctaaagctccagatttatggattgccaaacacccagcaccgaattccagtttaatttccttgcccgccttgttttcgtgcgggtgacatctgcgccgtgaatttgcatgcttgtgcgtcttgttatt

SEQ ID NO: 2159 - protein, 373 aa, Zea mays subsp. mays
  peptide (1)..(373): Ceres Seq. ID no. 12355902
KPQISSYPNAGTPPKNPCGVALTLATNPQPQTFLSGGGRRARAREMDRPSGTSYQRFPRVRIRELKDDYAKFELRDTDASMANALRRVMIAEVPTVAIDLVEIEVNSSVLNDEFIAHRLGLIPLTSAAAMQMRFSRDCDACDGDGSCEYCSVEFHLSVHATDSDQTLEVTSNDLRSMDPKVCPVDQARAYQHALGGTDPFGANASNENRGILIVKLRRGQELRLRAIARKGIGKDHAKWSPAATVTFMYEPDIRINEELMETLTVEERISLIESSPTKVFELDSANQVVVKNAEAYTYDDEVIKHAEAIGKPGLVEITAKEDSFVFTVETTGAITAYELIMNAITVLRQKLDAVRLQDDDGDLGELGAHLGGP

SEQ ID NO: 2160 - protein, 328 aa, Zea mays subsp. mays
  peptide (1)..(328): Ceres Seq. ID no. 12355903
MDRPSGTSYQRFPRVRIRELKDDYAKFELRDTDASMANALRRVMIAEVPTVAIDLVEIEVNSSVLNDEFIAHRLGLIPLTSAAAMQMRFSRDCDACDGDGSCEYCSVEFHLSVHATDSDQTLEVTSNDLRSMDPKVCPVDQARAYQHALGGTDPFGANASNENRGILIVKLRRGQELRLRAIARKGIGKDHAKWSPAATVTFMYEPDIRINEELMETLTVEERISLIESSPTKVFELDSANQVVVKNAEAYTYDDEVIKHAEAIGKPGLVEITAKEDSFVFTVETTGAITAYELIMNAITVLRQKLDAVRLQDDDGDLGELGAHLGGP

SEQ ID NO: 2161 - protein, 293 aa, Zea mays subsp. mays
  peptide (1)..(293): Ceres Seq. ID no. 12355904
MANALRRVMIAEVPTVAIDLVEIEVNSSVLNDEFIAHRLGLIPLTSAAAMQMRFSRDCDACDGDGSCEYCSVEFHLSVHATDSDQTLEVTSNDLRSMDPKVCPVDQARAYQHALGGTDPFGANASNENRGILIVKLRRGQELRLRAIARKGIGKDHAKWSPAATVTFMYEPDIRINEELMETLTVEERISLIESSPTKVFELDSANQVVVKNAEAYTYDDEVIKHAEAIGKPGLVEITAKEDSFVFTVETTGAITAYELIMNAITVLRQKLDAVRLQDDDGDLGELGAHLGGP

SEQ ID NO: 2162 - DNA, 747 bp, Zea mays subsp. mays
  misc_feature (1)..(747): Ceres Seq. ID no. 13492760
  misc_feature (1)..(747): Ortholog of  Ceres SEQ ID NO 14306110 as cited in SEQ ID NO 1363
  misc_feature (1)..(747): Ortholog of  Ceres SEQ ID NO 12609333 as cited in SEQ ID NO 51833
gccgtgtgcatagcagcaaatagtggtcggcctgttggtactctatatcgtcccttccagtgtacccgtcctccagcccattatacatcatacttgctccagataagaccaagagcatcatggccaacgccttgcctctcatcgtcgcgctggtcgccgccgccgggtgcgcggcgctggcttcggccacgtcgtacaccgtcggcgactcgcagggctggacgaccaccggcgtcgactacagcagctgggccagccgcaacactttcgtcgtcggagacacactagtgttcaactacgtgagcaaggcgcacacggtgacggaggtgagcaaggccggctacgacgcctgctccggcgccaacgcgctcagcgacgacgacaccggctccaccaccatcacgctccagaccccgggcacgcactatttcatctgcaacgtccccggccactgcgccagcggcatgaagctagcggtcgccgtctccgcctcgccctcgggcacggccccttccaccggagccctgcaggttccggcgatggcatccgtcgtcgccgcggccgcgggcgctgccatcaagctcgcgctcttctgacggagcacggccgggtcgtctcaggggagagacagtgcatgcagactacgttcttggcggttgatagtttcccgctggcgattgttcgccgcgcagttcatgtacgtatgtatgtgtgtatgctactctgcggtggcgaatgctttttctg

SEQ ID NO: 2163 - protein, 158 aa, Zea mays subsp. mays
  peptide (1)..(158): Ceres Seq. ID no. 13492761
MANALPLIVALVAAAGCAALASATSYTVGDSQGWTTTGVDYSSWASRNTFVVGDTLVFNYVSKAHTVTEVSKAGYDACSGANALSDDDTGSTTITLQTPGTHYFICNVPGHCASGMKLAVAVSASPSGTAPSTGALQVPAMASVVAAAAGAAIKLALF

SEQ ID NO: 2164 - protein, 95 aa, Zea mays subsp. mays
  peptide (1)..(95): Ceres Seq. ID no. 13492762
AVCIAANSGRPVGTLYRPFQCTRPPAHYTSYLLQIRPRASWPTPCLSSSRWSPPPGARRWLRPRRTPSATRRAGRPPASTTAAGPAATLSSSETH

SEQ ID NO: 2165 - DNA, 1553 bp, Zea mays subsp. mays
  misc_feature (1)..(1553): Ceres Seq. ID no. 12407344
  misc_feature (1)..(1553): Ortholog of  Ceres SEQ ID NO 14313548 as cited in SEQ ID NO 68496
gcgtgcgtccacctccttggtcttctcttcccttccttctgtgcgaaaagcgagcacccaaaccctatcttactatttgtattcggatctgagctactggatgcgcccctgatctggggcagtattcctcatatttggccaaagaggaatataatacttcccctgatttccagcagcttccggaactttgtaaagaaacgaaagaaaagtttaacacagcgcgcgcgcgcgatcctttccgacaggacagtatagcggatggcttcgtcggtgcgggcgccatcggggtcggtgatcgccgtggcatcgtcctcttcctcagcagccttggccggggtgtgcggcacgggctcgccgtgcgccgcgtgcaagttcctgcgtcgcaagtgccagccggactgcgtgttcgcgccctacttcccaccggacaacccgcagaagttcgtgcgcgtgcaccgcgtcttcggcgcgagcaacgtgaccaagctgatgaacgaaatccacccgttgcagcgcgaggacgccatgaactcgctcgcctacgaggccgacatgcgaattcgcgaccccgtctacggctgcgtgggcgtcatctccatcctccagcacaacctacggcagctccagcaggacctcgcccgcgccaagtacgagctctccaagtaccaggcggcagcggcggcagcatccgcgtcgacggcgccgaccgggccgcaggcgatggcagagttcatcggcagcgcgatgccgaacggcgccgcgcacaacttcatcaaccttggacactcggcggcgctcggctccctcggaggctccaccgccatgttcgggcagcaggagcagttcggcagcaacgcgcagatgctgtccaggagctacgacggcggcgagcccatcgcgaggatagggatgaacaacggcggctacgagttcggttactcgagcgcgacgacgatgggcgggtctgcaggcgctgtctctggcggcctcgggacgctcggcatcagcagcccgccgttcttgaagtctggaaccgccggcggcgacgagaagcccagcggcggtcagtaggcggttccatccgtgtgaccgatccttctatccatccatccatccatcagtcttgtcaggttactgacgcgatgaagaaacggggaggaaaaaaatatccatgaaacgcgtgcaaggacttatcctagacgtccgccgttgtcaggagggggctaatttccagacgattttacatggaaaaagtgcgtcgcttgcgtgcgtgcgtgcttgcttttgttgctagattcattgcttgtttgttaattaccacgctatctaccctccccatccacatcatccacgagatcgtcagatattccatgccagcgtccacagagtggcctatgttcttgttattagttgctgtactgcgaagggagggggacaaaatgcatgcttgtccggcccggacctttttttttaccccactcggaagactagcgcccatttgtactccatgtattattgctaggttggctgtaatatatgaagttgaccttttg

SEQ ID NO: 2166 - protein, 270 aa, Zea mays subsp. mays
  peptide (1)..(270): Ceres Seq. ID no. 12407345
MASSVRAPSGSVIAVASSSSSAALAGVCGTGSPCAACKFLRRKCQPDCVFAPYFPPDNPQKFVRVHRVFGASNVTKLMNEIHPLQREDAMNSLAYEADMRIRDPVYGCVGVISILQHNLRQLQQDLARAKYELSKYQAAAAAASASTAPTGPQAMAEFIGSAMPNGAAHNFINLGHSAALGSLGGSTAMFGQQEQFGSNAQMLSRSYDGGEPIARIGMNNGGYEFGYSSATTMGGSAGAVSGGLGTLGISSPPFLKSGTAGGDEKPSGGQ

SEQ ID NO: 2167 - protein, 193 aa, Zea mays subsp. mays
  peptide (1)..(193): Ceres Seq. ID no. 12407346
MNEIHPLQREDAMNSLAYEADMRIRDPVYGCVGVISILQHNLRQLQQDLARAKYELSKYQAAAAAASASTAPTGPQAMAEFIGSAMPNGAAHNFINLGHSAALGSLGGSTAMFGQQEQFGSNAQMLSRSYDGGEPIARIGMNNGGYEFGYSSATTMGGSAGAVSGGLGTLGISSPPFLKSGTAGGDEKPSGGQ

SEQ ID NO: 2168 - protein, 181 aa, Zea mays subsp. mays
  peptide (1)..(181): Ceres Seq. ID no. 12407347
MNSLAYEADMRIRDPVYGCVGVISILQHNLRQLQQDLARAKYELSKYQAAAAAASASTAPTGPQAMAEFIGSAMPNGAAHNFINLGHSAALGSLGGSTAMFGQQEQFGSNAQMLSRSYDGGEPIARIGMNNGGYEFGYSSATTMGGSAGAVSGGLGTLGISSPPFLKSGTAGGDEKPSGGQ

SEQ ID NO: 2169 - DNA, 1413 bp, Zea mays subsp. mays
  misc_feature (1)..(1413): Ceres Seq. ID no. 12410874
  misc_feature (1)..(1413): Ortholog of  Ceres SEQ ID NO 14310524 as cited in SEQ ID NO 58840
  misc_feature (1)..(1413): Ortholog of  Ceres SEQ ID NO 15169541 as cited in SEQ ID NO 67500
atccattgcgatacttgagacgcttcgctctctctcttgttcttctcgccttctgcccgagtgatggccagcctcaccgacctcgtcaacctcgacctgagtgactgcaccgacaggatcatcgccgagtacatctggattggaggaaccgggatagacctcaggagcaaagcgaggacggtgaaaggccccatcaccgacccgatccagctgccgaaatggaactacgacggctccagcaccgggcaggctcccggagaggacagcgaagtcatcctctaccctcaagccattttcaaggacccgttcaggaagggtaaccacatccttgtgatgtgtgactgctacacgccacaaggcgagccaatccccaccaacaagaggtacagcgccgccaaggttttcagccaccccgacgtcgcagctgaggtgccgtggtacggtattgagcaggagtacaccctccttcagaaggacgtgagctggcccctcggctggcccgttggtggataccctggtccccagggaccatactactgcgccgccggtgccgacaaggcctttgggcgcgacgtggttgacgcccactacaaggcctgcctctacgccggcatcaacatcagcggcatcaacggcgaagtcatgcctggacagtgggagttccaagtggggccgtccgttgggatctctgccggcgacgagatatgggtcgcccgctacattctcgagaggatcaccgagatggccggaatcgtcctctccctcgacccgaagccgatcaagggcgactggaacggcgccggcgcccacaccaactacagcaccaagtcgatgagggaggccgggggatacgaggtcatcaaggcggcgatcgacaagctggggaagaggcacaaggagcacatcgccgcgtacggcgagggcaacgagcgccgcctcacgggccgccacgagaccgccgacatcaacaccttcaaatggggcgtggcgaaccgcggcgcgtccatccgcgtcggccgcgacaccgagagggagggcaagggctacttcgaggaccgcaggccggcgtccaacatggacccctacgtcgtcaccggcatgatcgccgagaccaccatcctgtggaatggaaactgatcaagcatgtgcattctcgagggagcccactgtttttcttctgcacaacgcatccgccgtggtgtcgctttggttttgaaatttagattccgttgtcctaaaatttatcactacggtctccagtgtattgctcgggaacgaatgaataacgactgcgatgtttgtttttttttttgctggcgtagtagatgtacgtttggctgtgcttccagtttattgggtaaatgaaaaaatgtaatggtctaccggtcttaaaatagtagtcattttagctct

SEQ ID NO: 2170 - protein, 357 aa, Zea mays subsp. mays
  peptide (1)..(357): Ceres Seq. ID no. 12410875
MASLTDLVNLDLSDCTDRIIAEYIWIGGTGIDLRSKARTVKGPITDPIQLPKWNYDGSSTGQAPGEDSEVILYPQAIFKDPFRKGNHILVMCDCYTPQGEPIPTNKRYSAAKVFSHPDVAAEVPWYGIEQEYTLLQKDVSWPLGWPVGGYPGPQGPYYCAAGADKAFGRDVVDAHYKACLYAGINISGINGEVMPGQWEFQVGPSVGISAGDEIWVARYILERITEMAGIVLSLDPKPIKGDWNGAGAHTNYSTKSMREAGGYEVIKAAIDKLGKRHKEHIAAYGEGNERRLTGRHETADINTFKWGVANRGASIRVGRDTEREGKGYFEDRRPASNMDPYVVTGMIAETTILWNGN

SEQ ID NO: 2171 - protein, 267 aa, Zea mays subsp. mays
  peptide (1)..(267): Ceres Seq. ID no. 12410876
MCDCYTPQGEPIPTNKRYSAAKVFSHPDVAAEVPWYGIEQEYTLLQKDVSWPLGWPVGGYPGPQGPYYCAAGADKAFGRDVVDAHYKACLYAGINISGINGEVMPGQWEFQVGPSVGISAGDEIWVARYILERITEMAGIVLSLDPKPIKGDWNGAGAHTNYSTKSMREAGGYEVIKAAIDKLGKRHKEHIAAYGEGNERRLTGRHETADINTFKWGVANRGASIRVGRDTEREGKGYFEDRRPASNMDPYVVTGMIAETTILWNGN

SEQ ID NO: 2172 - DNA, 1829 bp, Zea mays subsp. mays
  misc_feature (1)..(1829): Ceres Seq. ID no. 12365195
  misc_feature (1)..(1829): Ortholog of  Ceres SEQ ID NO 12780298 as cited in SEQ ID NO 65880
  misc_feature (1)..(1829): Ortholog of  Ceres SEQ ID NO 13654539 as cited in SEQ ID NO 68015
ttcttctcccccagatctctctcttcttctcttgcgaagtcgccaaggccagtccccaatccccatccagccagaccgccggcgatgacggaccaccgcgacgtgatgttgcccttgtccctccaatacatagccacccgtgccctcctcctgctcgtcatcgcgtccgccgtttcctgctcttccttgccgccggaggacggcatccgggtcgtctctgcagagaaaagaatcgacctcacgggtcccatcgtcaaagtcttcctaacattgaaggttgagaatgctcccacggcctctgaagcatcacgagttctcctcgccttcacgcccacagagtttcaacatctctctattgtcaaggccacaagagcggaggggaagcgcaagaagaaggcattcgtacccctctcggtccaagcctctgagctcgccaccaccgctcccgacgcccctcgcctctactctgttctgctcagcactcctctgaaaccgggcgatgcaaccactctagaagtgctatacatgctcactcactctttagagcccttccccgctgagattagccagtcagagtcccagttggtttactaccgtgacagtgcggtgcttctctcgccctaccatgtcctggagcaggttacctacatcaaaatgccaagcaataggatcgaatccttcacaagggtcgatcctaccacacgagctggttctgaagtgaaatatggcacatacagtaaccagatgccaaactcctatttgccagttcttgtgcattatgagaataaccgcccatttgctgttgttgaggagcttgtacgcaaggtggagatttctcactggggaaacatccaaatcaccgagcagtataaactgaaacacggtggtgctcgtcacaaaggagtcttttccaggcttgagtatcaatctaggccatctatcagtggagcttcgtcctttaagaatcttcttgcaaggctgccacctcgggttcattcagtttactatcgtgatgagattggtaacatctcctcatcccatctgcgcactgattcacacaagtccgatctagaaattgagcccagatatccgttatttggtgggtggcactgcacgttcaccattggctatggtcttccattgcaagattttgtctttgagtcagttgatggccggcgctacatcaaccttacttttggttgccctctattggatactgtggttgacgatcttacagttaaagttgtgcttcctgaaggatcaaaaaatccagagcatgtagttccttttgtgacagagaaacatcttgagactagttattcataccttgacgttgttggaaggacgacggttgtactgaagaagaaaaatgttgtaggggagcacaacgttcctttccaggtgtactatgaattcaatccgatcttcatgctggcggaaccattgatgctgatatctgcagtgttgctgtttttcgttgccttcattgcgtatcttcacatggatctttccatcagaaaatcatcataggcctgttggcaattctgtccaccacagtattttttgaggcacatgttctgctaactgtgattgatgaagtaacaatccttgttctagcgcactagttgaactgtttatcagtgcaccatccccaatggagaaggacgatgtttttttttttgtgtgtgtgtgggtggaatatgattgcttcatgtagggctcacaacgatcagaaacgatatcatctataggaaaacgattgcctagaaatttagctggtttcataattaatcaacgtggtgactacaatacgatattgatatatgttc

SEQ ID NO: 2173 - protein, 509 aa, Zea mays subsp. mays
  peptide (1)..(509): Ceres Seq. ID no. 12365196
FFSPRSLSSSLAKSPRPVPNPHPARPPAMTDHRDVMLPLSLQYIATRALLLLVIASAVSCSSLPPEDGIRVVSAEKRIDLTGPIVKVFLTLKVENAPTASEASRVLLAFTPTEFQHLSIVKATRAEGKRKKKAFVPLSVQASELATTAPDAPRLYSVLLSTPLKPGDATTLEVLYMLTHSLEPFPAEISQSESQLVYYRDSAVLLSPYHVLEQVTYIKMPSNRIESFTRVDPTTRAGSEVKYGTYSNQMPNSYLPVLVHYENNRPFAVVEELVRKVEISHWGNIQITEQYKLKHGGARHKGVFSRLEYQSRPSISGASSFKNLLARLPPRVHSVYYRDEIGNISSSHLRTDSHKSDLEIEPRYPLFGGWHCTFTIGYGLPLQDFVFESVDGRRYINLTFGCPLLDTVVDDLTVKVVLPEGSKNPEHVVPFVTEKHLETSYSYLDVVGRTTVVLKKKNVVGEHNVPFQVYYEFNPIFMLAEPLMLISAVLLFFVAFIAYLHMDLSIRKSS

SEQ ID NO: 2174 - protein, 481 aa, Zea mays subsp. mays
  peptide (1)..(481): Ceres Seq. ID no. 12365197
MTDHRDVMLPLSLQYIATRALLLLVIASAVSCSSLPPEDGIRVVSAEKRIDLTGPIVKVFLTLKVENAPTASEASRVLLAFTPTEFQHLSIVKATRAEGKRKKKAFVPLSVQASELATTAPDAPRLYSVLLSTPLKPGDATTLEVLYMLTHSLEPFPAEISQSESQLVYYRDSAVLLSPYHVLEQVTYIKMPSNRIESFTRVDPTTRAGSEVKYGTYSNQMPNSYLPVLVHYENNRPFAVVEELVRKVEISHWGNIQITEQYKLKHGGARHKGVFSRLEYQSRPSISGASSFKNLLARLPPRVHSVYYRDEIGNISSSHLRTDSHKSDLEIEPRYPLFGGWHCTFTIGYGLPLQDFVFESVDGRRYINLTFGCPLLDTVVDDLTVKVVLPEGSKNPEHVVPFVTEKHLETSYSYLDVVGRTTVVLKKKNVVGEHNVPFQVYYEFNPIFMLAEPLMLISAVLLFFVAFIAYLHMDLSIRKSS

SEQ ID NO: 2175 - protein, 474 aa, Zea mays subsp. mays
  peptide (1)..(474): Ceres Seq. ID no. 12365198
MLPLSLQYIATRALLLLVIASAVSCSSLPPEDGIRVVSAEKRIDLTGPIVKVFLTLKVENAPTASEASRVLLAFTPTEFQHLSIVKATRAEGKRKKKAFVPLSVQASELATTAPDAPRLYSVLLSTPLKPGDATTLEVLYMLTHSLEPFPAEISQSESQLVYYRDSAVLLSPYHVLEQVTYIKMPSNRIESFTRVDPTTRAGSEVKYGTYSNQMPNSYLPVLVHYENNRPFAVVEELVRKVEISHWGNIQITEQYKLKHGGARHKGVFSRLEYQSRPSISGASSFKNLLARLPPRVHSVYYRDEIGNISSSHLRTDSHKSDLEIEPRYPLFGGWHCTFTIGYGLPLQDFVFESVDGRRYINLTFGCPLLDTVVDDLTVKVVLPEGSKNPEHVVPFVTEKHLETSYSYLDVVGRTTVVLKKKNVVGEHNVPFQVYYEFNPIFMLAEPLMLISAVLLFFVAFIAYLHMDLSIRKSS

SEQ ID NO: 2176 - DNA, 1484 bp, Zea mays subsp. mays
  misc_feature (1)..(1484): Ceres Seq. ID no. 12410870
  misc_feature (1)..(1484): Ortholog of  Ceres SEQ ID NO 15177079 as cited in SEQ ID NO 51989
  misc_feature (1)..(1484): Ortholog of  Ceres SEQ ID NO 14315354 as cited in SEQ ID NO 58232
  misc_feature (1)..(1484): Ortholog of  Ceres SEQ ID NO 13596392 as cited in SEQ ID NO 62136
  misc_feature (1)..(1484): Ortholog of  Ceres SEQ ID NO 14313244 as cited in SEQ ID NO 66802
  misc_feature (1)..(1484): Ortholog of  Ceres SEQ ID NO 13654360 as cited in SEQ ID NO 67980
  misc_feature (1)..(1484): Ortholog of  Ceres SEQ ID NO 13596394 as cited in SEQ ID NO 68561
agtatccagactctctctcgggcctctcggctctcctctccccgatttccttccccacccgctgtcagtctcactccccccgcgcgcgctctctctttcctcgccttcgccgccggcgacgagcttgagctcgagctggttcctcgtatagaagacgacggccgcggtatggagcccatgaacgtagacaacggcggctgcggaggccttgacgcgcagatcgaacagctgatgcagtgccgcccgctcgccgagcaagaggttaaggcactgtgcgagaaggccaaggagatattgatggaggaaagcaacgttcagcctgtcaagagtccagtgacaatatgtggtgatatacatggacaattccatgatcttgtagagcttttccgaattggcgggaagtgtccagacaccaattacttatttatgggagattatgtagatcgtggctactattctgttgagactgtcacgatgctagtagcactaaaagtgaggtatccacatcgaattacaatccttcgtggaaaccacgagagtcggcagatcacacaggtgtatggattctacgacgaatgcctacgaaagtatggcaatgcaaatgtatggaagacatttacggatctttttgattattttcctctgacagctctggtggaatctgagattttctgccttcacggtggtctatctccatcaattgaaaatcttgatagtgtgcgcagcttagatcgagtccaagaggttccccatgagggacctatgtgcgatctcttatggtcagatccagacgaccgatgtggttggggcatctcccctcgcggtgctggctacactttcgggcaggacatatcagagcagtttaatcacacaaacaatctcaaactcgtagctcgggctcatcaattagttatggagggatataactgggctcatgagcaaaaggttgtcaccatattcagtgctccaaattactgctatcgatgcggcaatatggcatccattttggaagttgacgactgcaacagccacacattcatccagtttgaaccagcccctaggagaggtgagccagatgtgacgcgaagaacaccggattatttcctttgagctgtcgatgttaccgtttcccagcctgtgtcgtgataatcgatgccaacgtctgctggatcaagggccagacagaaataacaggggaatgccgaagcactatgcccagagtttcacccttttcaggcgacagagaagggcggccatccacctacaactctggccgccctctgttttatgcactttttacagagtcgtggaactggccaaaaagaccggagtaccatttgcacctgtgtagcgtaagcttgtactacaaataggcgtgtgctaatctgtatcaccattcatcaattgcaacgaactgttgaactccttccatcagtaaagtaaattttggtaaaagaacggcttacagtgtcggtaatgacact

SEQ ID NO: 2177 - protein, 369 aa, Zea mays subsp. mays
  peptide (1)..(369): Ceres Seq. ID no. 12410871
SIQTLSRASRLSSPRFPSPPAVSLTPPARALSFLAFAAGDELELELVPRIEDDGRGMEPMNVDNGGCGGLDAQIEQLMQCRPLAEQEVKALCEKAKEILMEESNVQPVKSPVTICGDIHGQFHDLVELFRIGGKCPDTNYLFMGDYVDRGYYSVETVTMLVALKVRYPHRITILRGNHESRQITQVYGFYDECLRKYGNANVWKTFTDLFDYFPLTALVESEIFCLHGGLSPSIENLDSVRSLDRVQEVPHEGPMCDLLWSDPDDRCGWGISPRGAGYTFGQDISEQFNHTNNLKLVARAHQLVMEGYNWAHEQKVVTIFSAPNYCYRCGNMASILEVDDCNSHTFIQFEPAPRRGEPDVTRRTPDYFL

SEQ ID NO: 2178 - protein, 313 aa, Zea mays subsp. mays
  peptide (1)..(313): Ceres Seq. ID no. 12410872
MEPMNVDNGGCGGLDAQIEQLMQCRPLAEQEVKALCEKAKEILMEESNVQPVKSPVTICGDIHGQFHDLVELFRIGGKCPDTNYLFMGDYVDRGYYSVETVTMLVALKVRYPHRITILRGNHESRQITQVYGFYDECLRKYGNANVWKTFTDLFDYFPLTALVESEIFCLHGGLSPSIENLDSVRSLDRVQEVPHEGPMCDLLWSDPDDRCGWGISPRGAGYTFGQDISEQFNHTNNLKLVARAHQLVMEGYNWAHEQKVVTIFSAPNYCYRCGNMASILEVDDCNSHTFIQFEPAPRRGEPDVTRRTPDYFL

SEQ ID NO: 2179 - protein, 310 aa, Zea mays subsp. mays
  peptide (1)..(310): Ceres Seq. ID no. 12410873
MNVDNGGCGGLDAQIEQLMQCRPLAEQEVKALCEKAKEILMEESNVQPVKSPVTICGDIHGQFHDLVELFRIGGKCPDTNYLFMGDYVDRGYYSVETVTMLVALKVRYPHRITILRGNHESRQITQVYGFYDECLRKYGNANVWKTFTDLFDYFPLTALVESEIFCLHGGLSPSIENLDSVRSLDRVQEVPHEGPMCDLLWSDPDDRCGWGISPRGAGYTFGQDISEQFNHTNNLKLVARAHQLVMEGYNWAHEQKVVTIFSAPNYCYRCGNMASILEVDDCNSHTFIQFEPAPRRGEPDVTRRTPDYFL

SEQ ID NO: 2180 - DNA, 1102 bp, Zea mays subsp. mays
  misc_feature (1)..(1102): Ceres Seq. ID no. 12412419
  misc_feature (1)..(1102): Ortholog of  Ceres SEQ ID NO 15226223 as cited in SEQ ID NO 65500
actgtgtgttccttctccggggaaaccacgaatccaagtactgcacgtcagtatatggtttcgagaaggaggtaatgactaaatacaaagatcagggccctcaaatttaccggaagtttttaagatgttttgaggaccttcctctggcgacaataatagcaggatgtgtgtacactgcacacggcggtatcttccgtggaacaattgtagtgccatcaaagaaatcaaaaaagggaaagaagggtcacaaatacaaggcgaattttactgttgatctgacttccatgaaacttggatccttggatgagttattgaaagcaaggagaactgttctcgaccctccttgggaaggctcaaatttgatccctggggatgtgctgtggtctgacccttccttgcagatgggtctttctccgaataaagaacgaggcataggtttgctttggggtcctgatatcactcagcagtttctgaggacaaatcatttgaagctaatcatcaggtcacatgaaaggtccagacgcgagagacaaagcgacacgatctcttaggaatggataaaggatatacgattgatcatgaagtagaatgtgggaaactaattactctcttcagtgctccggactacccacagtttcaggcttcagaggagcgatacaacaatcgtggagcatatattgtccttagtccacctgattttgctacccctgttttccatagcttcggagctgtaaagcctcgacctgcggcccatccgttctatgattttgaacaagtgatcgactcagatgaagaattggatttaatcgccatggacagcggcacgtcgagcctgtcatgacgactcgccatgtaccttttgcacttagggttgtatttattattatcgctccaattgttgccatggaagcgtggcatcaaggttttttgctgtcgttgttgtaagctaatgccaacgtagtaacgttgcaggtttctggatggcctgagtcctgacatgcacacgccaaatctgatctgttggtttggttgaggttgatttgtatctaaaactaagtgagcgtgagatgtcatctaaaggctgaaggaagtcagcggttgc

SEQ ID NO: 2181 - protein, 182 aa, Zea mays subsp. mays
  peptide (1)..(182): Ceres Seq. ID no. 12412420
CVFLLRGNHESKYCTSVYGFEKEVMTKYKDQGPQIYRKFLRCFEDLPLATIIAGCVYTAHGGIFRGTIVVPSKKSKKGKKGHKYKANFTVDLTSMKLGSLDELLKARRTVLDPPWEGSNLIPGDVLWSDPSLQMGLSPNKERGIGLLWGPDITQQFLRTNHLKLIIRSHERSRRERQSDTIS

SEQ ID NO: 2182 - protein, 158 aa, Zea mays subsp. mays
  peptide (1)..(158): Ceres Seq. ID no. 12412421
MTKYKDQGPQIYRKFLRCFEDLPLATIIAGCVYTAHGGIFRGTIVVPSKKSKKGKKGHKYKANFTVDLTSMKLGSLDELLKARRTVLDPPWEGSNLIPGDVLWSDPSLQMGLSPNKERGIGLLWGPDITQQFLRTNHLKLIIRSHERSRRERQSDTIS

SEQ ID NO: 2183 - protein, 95 aa, Zea mays subsp. mays
  peptide (1)..(95): Ceres Seq. ID no. 12412422
MDKGYTIDHEVECGKLITLFSAPDYPQFQASEERYNNRGAYIVLSPPDFATPVFHSFGAVKPRPAAHPFYDFEQVIDSDEELDLIAMDSGTSSLS

SEQ ID NO: 2184 - DNA, 950 bp, Zea mays subsp. mays
  misc_feature (1)..(950): Ceres Seq. ID no. 12352680
  misc_feature (1)..(950): Ortholog of  Ceres SEQ ID NO 13597142 as cited in SEQ ID NO 63351
  misc_feature (1)..(950): Ortholog of  Ceres SEQ ID NO 13599342 as cited in SEQ ID NO 0
gccgcaatacacactactgttcctccgattaacggaccggccggcgacgtgcatagcaggtacgcagcagctctagctagcaatggcgcctccccgccggccgagcatggggcggcagaagatcgagatccggcgcatagagagcgacgaggcgcggcaggtgtgcttctcgaagcgccgcgcggggctgttcaagaaggccagcgagctgtccatcctctgcggcgccgacgtggccgccgtcgtcttctcccccgccggcaaggccttctccttcggccacccgtccgtggagtccgtcgtcgagcgcttcctcgcctcgtcgtccccctcgcctgccggtgccggtgccggccactccgccagcggcggcgaggaccgcgcggtctcggagctgaaccgccagcacggcgagctgcgcgcgcagctggacgccgtgaaggcgaggcaggagcgcgcggacgaggcgatccggaaggagcgcgaggcggggagcccggcgatggcgtggatcgacgcggaactgagcgggggcgcgatggggcacgacgacctggtcgcgttctgggccgcgcttgcgggcgtgcaggccgccgtggcggccagcgccgaccggctgctgcgcgacgcgctgctcgtcgggcgcaggggccggcagcagcagcagccggcccagcttgccgggggtggtggcgtggcctttgacgtcggcgcgtttggcggcgttggcgtgcaggtgcagccgcctccgggattcgccggcgtcgtcgacctgcaggggttcggggggcaggctgcggccatcctcggcgccggcggtccctcatgagtgatcgaatgcgtgtgtgcatacttcactcaagttgtttggagataacgtcgcaaataaatttgcgacaaatgttttggttaatttgttcgtatgcattgttcgttctcaccttgctctc

SEQ ID NO: 2185 - protein, 248 aa, Zea mays subsp. mays
  peptide (1)..(248): Ceres Seq. ID no. 12352681
MAPPRRPSMGRQKIEIRRIESDEARQVCFSKRRAGLFKKASELSILCGADVAAVVFSPAGKAFSFGHPSVESVVERFLASSSPSPAGAGAGHSASGGEDRAVSELNRQHGELRAQLDAVKARQERADEAIRKEREAGSPAMAWIDAELSGGAMGHDDLVAFWAALAGVQAAVAASADRLLRDALLVGRRGRQQQQPAQLAGGGGVAFDVGAFGGVGVQVQPPPGFAGVVDLQGFGGQAAAILGAGGPS

SEQ ID NO: 2186 - protein, 240 aa, Zea mays subsp. mays
  peptide (1)..(240): Ceres Seq. ID no. 12352682
MGRQKIEIRRIESDEARQVCFSKRRAGLFKKASELSILCGADVAAVVFSPAGKAFSFGHPSVESVVERFLASSSPSPAGAGAGHSASGGEDRAVSELNRQHGELRAQLDAVKARQERADEAIRKEREAGSPAMAWIDAELSGGAMGHDDLVAFWAALAGVQAAVAASADRLLRDALLVGRRGRQQQQPAQLAGGGGVAFDVGAFGGVGVQVQPPPGFAGVVDLQGFGGQAAAILGAGGPS

SEQ ID NO: 2187 - protein, 234 aa, Zea mays subsp. mays
  peptide (1)..(234): Ceres Seq. ID no. 12352683
AAIHTTVPPINGPAGDVHSRYAAALASNGASPPAEHGAAEDRDPAHRERRGAAGVLLEAPRGAVQEGQRAVHPLRRRRGRRRLLPRRQGLLLRPPVRGVRRRALPRLVVPLACRCRCRPLRQRRRGPRGLGAEPPARRAARAAGRREGEAGARGRGDPEGARGGEPGDGVDRRGTERGRDGARRPGRVLGRACGRAGRRGGQRRPAAARRAARRAQGPAAAAAGPACRGWWRGL

SEQ ID NO: 2188 - DNA, 1232 bp, Zea mays subsp. mays
  misc_feature (1)..(1232): Ceres Seq. ID no. 13635672
  misc_feature (1)..(1232): Ortholog of  Ceres SEQ ID NO 15224319 as cited in SEQ ID NO 66044
gcacgagaccattacctagaacatcctaatcaaaaaacaagtagatctcgcggtgttattcctcccgagtcgcctccccctcaagttccacaaacgcaagccccaatctcgccgtcaccacctcaatccagcaaacgcaaaccccatctcgccgccgccgcgatgtctcgccgctatgacagccgcacgacgatcttctcgccggaggggcgtctctaccaggtggagtacgcgatggaggcgatcggcaacgccggngtcagccctcgggatcctagcggccgacggcgtggtcctcgtcggcgagaagaaggtgacctccaagctcctccagacctcgcgctccgccgagaagatgtacaagatcgactcccacctggcgtgcgccgtggccgggatcatgtccgacgccaacatcctcatcaacaccgcccgcctccacgcccaacgctacgcgctctcctaccaggaacccatccccgtcgagcagctcgtccagtccctctgcgacaccaagcaggggtacacccagttcggaggcctccgccccttcggggtctccttcctattcgctgggtgggacaagcaccacggcttccagctctacatgagcgacccatccgggaactacggcgggtggaaggccgccgctgttggggccaacagccaggccgcgcagtccatgctcaagcaggactacaaggacggcttgacccgcgaggaggccgtcgccctcgcgcttaaggtcctcagcaagaccatggactccaccagcctgactgccgagaagctggagctggccgaggtgtttctgcagccgggctccggggaggtacagtaccaggtgtgctctcctgaagcgctggggaagctgcttgcaaagtccggcctgacacagccaacacccgaggcataatgctctgttttgctgtggcttgtgatgcctactactgctcttagacatggtttaagcatttgtgcttctgttgtgtgaacttgaatattcgacgattatgtggtctaattttatgttgagcatcctagatacgttaatgtttcatctgtaactgtggattgccttgaactggttgcaaattggtgatttctatctgctctgcttgattattgtcgtgattagggagcatgtgggataatggaacaggcaaaattaggtttggttctaacgcatctggatgataccgactgtatttagtgaccatggcaaaattttc

SEQ ID NO: 2189 - protein, 247 aa, Zea mays subsp. mays
  peptide (1)..(247): Ceres Seq. ID no. 15220349
  misc_feature (86)..(86): Xaa is any aa, unknown or other
ARDHYLEHPNQKTSRSRGVIPPESPPPQVPQTQAPISPSPPQSSKRKPHLAAAAMSRRYDSRTTIFSPEGRLYQVEYAMEAIGNAXVSPRDPSGRRRGPRRREEGDLQAPPDLALRREDVQDRLPPGVRRGRDHVRRQHPHQHRPPPRPTLRALLPGTHPRRAARPVPLRHQAGVHPVRRPPPLRGLLPIRWVGQAPRLPALHERPIRELRRVEGRRCWGQQPGRAVHAQAGLQGRLDPRGGRRPRA

SEQ ID NO: 2190 - protein, 246 aa, Zea mays subsp. mays
  peptide (1)..(246): Ceres Seq. ID no. 15220350
  misc_feature (28)..(28): Xaa is any aa, unknown or other
MTAARRSSRRRGVSTRWSTRWRRSATPXSALGILAADGVVLVGEKKVTSKLLQTSRSAEKMYKIDSHLACAVAGIMSDANILINTARLHAQRYALSYQEPIPVEQLVQSLCDTKQGYTQFGGLRPFGVSFLFAGWDKHHGFQLYMSDPSGNYGGWKAAAVGANSQAAQSMLKQDYKDGLTREEAVALALKVLSKTMDSTSLTAEKLELAEVFLQPGSGEVQYQVCSPEALGKLLAKSGLTQPTPEA

SEQ ID NO: 2191 - protein, 193 aa, Zea mays subsp. mays
  peptide (1)..(193): Ceres Seq. ID no. 15220351
  misc_feature (32)..(32): Xaa is any aa, unknown or other
MSRRYDSRTTIFSPEGRLYQVEYAMEAIGNAXVSPRDPSGRRRGPRRREEGDLQAPPDLALRREDVQDRLPPGVRRGRDHVRRQHPHQHRPPPRPTLRALLPGTHPRRAARPVPLRHQAGVHPVRRPPPLRGLLPIRWVGQAPRLPALHERPIRELRRVEGRRCWGQQPGRAVHAQAGLQGRLDPRGGRRPRA

SEQ ID NO: 2192 - DNA, 1856 bp, Zea mays subsp. mays
  misc_feature (1)..(1856): Ceres Seq. ID no. 12373912
  misc_feature (1)..(1856): Ortholog of  Ceres SEQ ID NO 13597604 as cited in SEQ ID NO 65175
cttcttccgtctgtccgcttctccctctctccctccctcccccaccccgcgagaccgccggcgaatttgttgcagtgcactgaagccaacagctgcaggacaggaggaggaggaggagctgtttcaacaattatcccccgcgcgcccaggccagccccgcccccgcccgcccactctcccgaggtgagcaacccctttcctccagcggctgtctgtttaatttgggtctacagctcttccccccctcgtggtctcgtctatggaattcccggttcaatttggacttgggctcctcccttgtttactgtaaccgtgtgcttgctactgtatcgaagaaatcccagcgtcaatcatgctgctgcgcgaggtctctcgatgatggatgacagataatgatggttgttgtatgatgatgatggcgcatggcggctgccaacgcctgtttttccccgctgcagtacctttgcttcactgatattagcaacctctatccaggattccaggttctcaacacaacagacaacaccgctcaccgcatatatatatatatagatgggttccgaggggccttctcccgtcaccgtccacgtcaccggattcaagaggttccatggagtcgccgagaacccgacggagaggatcgtgcgcggtctccagccattcatggagacgagagggttgcccaagggccttgttctcgggagctgcaccgtccttgaggccgccgggcagggcgcgcttggcccgctgtatgaactgctggagtcgaccgtctccggccgggaacgtcaggagcgagtaattctgctccattttggcgccaacagtggttcacataggtttgctcttgagaatcaagctgttaatgaagctactttccgttgccctgatgagctaggatggaaaccacagaggacacctatcatatcgtcagatggaagcatcttacacgcaagacaggtatattttaacagttactacctcgataaatcattgagaatctctaagcatcctacttggaagactagtatttcatattatgctgcttacctactgacttactgtcctacatatcctccgttttaatgaacatgctgtcagtcgattgaatccttttcgtttccaacagtagaaacagagtatcgattttccatcattaaacttagatgtaatactttcgatacaccactctcattaaccactgtgcatacagattcgtcctccttaaaaggtcttcgagtaaggaggtttccccaaggaaatactgcgattgatctctaatgttctccagcttctagatcaatgattaatttgcacagctgcctgtattctgtcagttatcttgtcatgtgcatcatctgctgaactacgttttgtttcataataaccaagcagactacactgccagtggaggagataagcaagtctctccaacagatgggatacgacgtggtgccttcagacgacgctggtcgatttgtgtgcaactacgtctactaccactcactcaagtttgcagagaagcatgggatcgggtctctgtttgtccatttccccctcttcctggcaatcgacgaggaagtccagatgcagtttgtcgcttcccttctagaggtcctcgcttccttgaacttccagtgaacctagtggtagatctaccacttcccggtggtgtattgttcccagattatttgggaaaggtttaagttgttcccaacttacctgtggagaataagatcgaggaatcattcgtggaattatgtgtgtggttcaaaatgtgtaggggaacaaaaacaagtcttctcaaagaacatgtacatgcagtccagatgttaatatcccaagcggtttatatg

SEQ ID NO: 2193 - protein, 177 aa, Zea mays subsp. mays
  peptide (1)..(177): Ceres Seq. ID no. 12373913
MGSEGPSPVTVHVTGFKRFHGVAENPTERIVRGLQPFMETRGLPKGLVLGSCTVLEAAGQGALGPLYELLESTVSGRERQERVILLHFGANSGSHRFALENQAVNEATFRCPDELGWKPQRTPIISSDGSILHARQVYFNSYYLDKSLRISKHPTWKTSISYYAAYLLTYCPTYPPF

SEQ ID NO: 2194 - protein, 140 aa, Zea mays subsp. mays
  peptide (1)..(140): Ceres Seq. ID no. 12373914
METRGLPKGLVLGSCTVLEAAGQGALGPLYELLESTVSGRERQERVILLHFGANSGSHRFALENQAVNEATFRCPDELGWKPQRTPIISSDGSILHARQVYFNSYYLDKSLRISKHPTWKTSISYYAAYLLTYCPTYPPF

SEQ ID NO: 2195 - protein, 130 aa, Zea mays subsp. mays
  peptide (1)..(130): Ceres Seq. ID no. 12373915
LLPSVRFSLSPSLPHPARPPANLLQCTEANSCRTGGGGGAVSTIIPRAPRPAPPPPAHSPEVSNPFPPAAVCLIWVYSSSPPRGLVYGIPGSIWTWAPPLFTVTVCLLLYRRNPSVNHAAARGLSMMDDR

SEQ ID NO: 2196 - DNA, 1469 bp, Zea mays subsp. mays
  misc_feature (1)..(1469): Ceres Seq. ID no. 12405815
  misc_feature (1)..(1469): Ortholog of  Ceres SEQ ID NO 14308430 as cited in SEQ ID NO 55350
  misc_feature (1)..(1469): Ortholog of  Ceres SEQ ID NO 15177799 as cited in SEQ ID NO 59221
  misc_feature (1)..(1469): Ortholog of  Ceres SEQ ID NO 13662846 as cited in SEQ ID NO 65519
aggcgcgcgtgccgcctctctcgctcgctcctccggttaatcccccatcgccaggagcccaggactcgcagccagcccttcacattattcgcgcgcgcgcgaacggccgtagcgtgtgggtggcgtcgccgtgcggtctcttggtgccggtgcgggccgcgtgacggtgtgtgagtgtgtgacgcccacgcggaggaggtcgttctgttggttggttggtccgcggccatgatggcggtacgcggccggagaggcggtctccgtagcgctcctcttctccctcgttttcttctggcgcccgcttcctgctcgacctcctcgtctacaagccattggcagtctaccttttcaacactaaagcttctaagttgatgagtgatgaggccaggcaagcaaagattgtcaaattctcggagtccatttggaaacttacatactatgcttctgttcaagcatgggtcctcatgataataaagcaagaaccatggtcgttggatatggtgcagtactttgatggctggccaaatcaacccatcgtgtcctcgttgatgcttttctatatgtgccagtgtggattttatatctacagcattggtgctcttgttgcttgggaaacccgcagaaaagattttgctgtaatgatgtctcatcatgtaataacatctactcttattggagtttcatatctgacaggattttttcgaattgggaccatcgttcttgctcttcatgatacaagtgatgtgtttcttgagactgccaaattgtgcaagtacacagaaaaggagttgggggctagcttgtttttcggtctcttcgctatctcctggcttctattgcgtttgatttacttcccgttttggataatcaaagcctctagctatcattccatcacattctggaggaagctggatgaattccctacagctttgtactatatcttcaatacaatgcttctcacattgcttgtattccatatgtactggtggaaactcatatgtttgatgataatgagacaattgaataataaaggacaggttacagatgatgttcgatctgattctgaggatgacgagtaatgggggagattcattctttgacatctgcaatgtgtcatttcttcgccaatacttatctacgcctgcttccagaattgattgttttgatcgtggcaagtctcgggcatggataggaaagtttatcctctgtatattgccttgtgatatcaaacatggctagaacgagaatggagcaggtcctatacattacgggtatagctagcaagcttacttgaaggttccttcaaaaaattttggttcaccttttctgatatatggggaaagatatgagagggcgtacagcttttttcctgaaacttacagaacccctctgtaccatgttcagtatacttcactcgtgagtagatttagttctaattgacggtaataaactgattctttttgactggg

SEQ ID NO: 2197 - protein, 235 aa, Zea mays subsp. mays; identical to SEQ ID NO: 1985
  peptide (1)..(235): Ceres Seq. ID no. 12405816

SEQ ID NO: 2198 - protein, 204 aa, Zea mays subsp. mays; identical to SEQ ID NO: 1986
  peptide (1)..(204): Ceres Seq. ID no. 12405817

SEQ ID NO: 2199 - protein, 193 aa, Zea mays subsp. mays
  peptide (1)..(193): Ceres Seq. ID no. 12405818
MVQYFDGWPNQPIVSSLMLFYMCQCGFYIYSIGALVAWETRRKDFAVMMSHHVITSTLIGVSYLTGFFRIGTIVLALHDTSDVFLETAKLCKYTEKELGASLFFGLFAISWLLLRLIYFPFWIIKASSYHSITFWRKLDEFPTALYYIFNTMLLTLLVFHMYWWKLICLMIMRQLNNKGQVTDDVRSDSEDDE

SEQ ID NO: 2200 - DNA, 1136 bp, Zea mays subsp. mays
  misc_feature (1)..(1136): Ceres Seq. ID no. 12355990
  misc_feature (1)..(1136): Ortholog of  Ceres SEQ ID NO 12598184 as cited in SEQ ID NO 64590
  misc_feature (1)..(1136): Ortholog of  Ceres SEQ ID NO 15175549 as cited in SEQ ID NO 0
gcaccttgctttgctttgctgatcgctgattttgcccgacctaccctacgctagtactttgaagtagtaggagctagcgagatctccatatatataaagcgaccttctttgcactcagctcgtagatccacacctgcagctgccacagcgggtggtgcttagcttaggctagcctagctgcgcctgcgcatgctcgtgaccaatggcgtccagcaaggtgccactgttcctcgtcctcaacctcctgctcttcgcggcggccaacgcctgcccttactgcccgggcaacaatggccacggtagcagcgggcaccatggcggcagtgggcatggcggcggtggcaccggcggttccggtggcggcagcgggccaggtgggggcagcagcggcggagggtacggtccgatcggtggtggtggtggcagcggcggcggaggagggtacggtccgatcggtgatggtggcagcggcggtgggatcggacccatcggaggcggcagcggggggatcggacccataggaggtggcagcggtggtgggtacggccccatcggtggcggtggcggtggaggtgggagcggtggcggtggcggtggcaacgatggcacgagcggctggtacggccattgcccgacaaacgcgctgaagctcggcgtgtgcgccaacgtgctggatctgatcaaggccaaggtcggcgtgccggtgaacgagccgtgctgcccgctgctgaacgggctcgtggagctcgaagccgccgtgtgcctctgcacggccatcaaggccaacgtgctggggctcaacctcaacatccccgtcaacctcagcctcgtcctcaacttctgcggcaagggcgtccccacgggcttcaagtgcctttaaccatgcatgcacatcatgtgtgcgtgcgtgccgtacgtacgtagtatccaagaccacgcgatgcgtgagtatgacgaagaatacgcgcgtgcgccatgcttgccggccggggatacggtgtttgtggtaatgctgttagtttcgtttcttcagtgtagtatgtagccagggcatgcatgtgtccaagtccaagttcgactttgggttgcttgtacttctccatttcataattgaaatcatatttcagatttgagtc

SEQ ID NO: 2201 - protein, 225 aa, Zea mays subsp. mays
  peptide (1)..(225): Ceres Seq. ID no. 12355991
MASSKVPLFLVLNLLLFAAANACPYCPGNNGHGSSGHHGGSGHGGGGTGGSGGGSGPGGGSSGGGYGPIGGGGGSGGGGGYGPIGDGGSGGGIGPIGGGSGGIGPIGGGSGGGYGPIGGGGGGGGSGGGGGGNDGTSGWYGHCPTNALKLGVCANVLDLIKAKVGVPVNEPCCPLLNGLVELEAAVCLCTAIKANVLGLNLNIPVNLSLVLNFCGKGVPTGFKCL

SEQ ID NO: 2202 - DNA, 1800 bp, Zea mays subsp. mays
  misc_feature (1)..(1800): Ceres Seq. ID no. 12351993
  misc_feature (1)..(1800): Ortholog of  Ceres SEQ ID NO 13599324 as cited in SEQ ID NO 0
atctagacggcgccacacgactgacggcttcatccgattggtgtggcctatttatctcccagtcccccactcgagctctccaccagctttccccttctctccggtccgggaatcggaagctcagggcagaagaatcaacctgaacaagaagagactggacaaggaagctttgactgctgcgaaattggcgaagaaggagagccaccttcgaaggtctgtgggtgctgaccagtatctcagtgcctcaactgatgacatagtccctttggacaactacctggacacccagtactttggacagatcagcatcggcacgccaccacagaacttcacagtgatattcgacactggaagctccaacttgtgggttccctcatccaagtgctacttttcgatagcgtgctacttacaccacagatacaagtcaaccaagtcgaagacttacacaaagaatggagaatcttgtacgataacatatggttctgggcaaatcgctggcttcttcagtgaggacaatgtgttggttggtaaccttgttgtgcaaaatcagaaatttattgagacaactcgagaaaccagccctactttcatcattgggaagtttgatggaattcttggtctcggatttcctgaaatttctgtaggaggagcccctccaatttggcagagcatgaaacagcagaaactggtcgcaaaggatgtcttctctttctggcttaatcgtgaccctgatgcatctgctggaggcgagcttgtctttggtggtgttgacccaaaacactacaaaggggaccatacatatgttcctgttacacgcaaaggctactggcagtttgacatgggagatcttattattggtggccactcaactggtttctgtgctggtggctgtgctgctattgtggactcagggacttcattgcttgctggtccaactaccatagtggctcaagtcaatcatgcaattggggctgagggaatcatcagtacagaatgcaaagaagtggtgagcgagtatggagagatgatccttgagttgctcatatcgcagacaagcccacagaaagtgtgcactcagattggtctctgtgtatttgatggtgcccattctgtcagcaatccaattgaatctgttgttgagaaacagaagcgtggttctgatcttttctgtactgcttgtgagatggctgttgtctggatacagaatcagctccgtgaaaacaagacaaaagaactcattttgaattatgctaatcagctctgtgagcgtctccctagccccaatggcgagtcaactgttgattgccatcagatctcaaagatgccaaatcttgcattcaccatagcaaacaagactttcaccttaacaccagagcagtacatagtgaagctggagcaagcaggacaaactatctgcatcagtgggtttatggcatttgacgtaccgcctcctcgtggtcctctctggatacttggtgatgtttttatgggtgcctaccacactgtttttgacttcggcgagaacaggattgggtttgccaaatctgcatgaggactggagttctgcgctttagtagcatgtccagtttgttatcccagtattgtacatatatatgttgccaactggtgtaatccgcagtgtttaatagtatatattcatgcagaaatctagaagattgtggcatgatatgtgtttgcaaatggagctatgctatgtatggagctccaggacctagagttttatgtaaagggagacgatgaggattagggcttttaacctattctcatcacgttattgtc

SEQ ID NO: 2203 - protein, 516 aa, Zea mays subsp. mays
  peptide (1)..(516): Ceres Seq. ID no. 12351994
SRRRHTTDGFIRLVWPIYLPVPHSSSPPAFPFSPVRESEAQGRRINLNKKRLDKEALTAAKLAKKESHLRRSVGADQYLSASTDDIVPLDNYLDTQYFGQISIGTPPQNFTVIFDTGSSNLWVPSSKCYFSIACYLHHRYKSTKSKTYTKNGESCTITYGSGQIAGFFSEDNVLVGNLVVQNQKFIETTRETSPTFIIGKFDGILGLGFPEISVGGAPPIWQSMKQQKLVAKDVFSFWLNRDPDASAGGELVFGGVDPKHYKGDHTYVPVTRKGYWQFDMGDLIIGGHSTGFCAGGCAAIVDSGTSLLAGPTTIVAQVNHAIGAEGIISTECKEVVSEYGEMILELLISQTSPQKVCTQIGLCVFDGAHSVSNPIESVVEKQKRGSDLFCTACEMAVVWIQNQLRENKTKELILNYANQLCERLPSPNGESTVDCHQISKMPNLAFTIANKTFTLTPEQYIVKLEQAGQTICISGFMAFDVPPPRGPLWILGDVFMGAYHTVFDFGENRIGFAKSA

SEQ ID NO: 2204 - protein, 293 aa, Zea mays subsp. mays
  peptide (1)..(293): Ceres Seq. ID no. 12351995
MKQQKLVAKDVFSFWLNRDPDASAGGELVFGGVDPKHYKGDHTYVPVTRKGYWQFDMGDLIIGGHSTGFCAGGCAAIVDSGTSLLAGPTTIVAQVNHAIGAEGIISTECKEVVSEYGEMILELLISQTSPQKVCTQIGLCVFDGAHSVSNPIESVVEKQKRGSDLFCTACEMAVVWIQNQLRENKTKELILNYANQLCERLPSPNGESTVDCHQISKMPNLAFTIANKTFTLTPEQYIVKLEQAGQTICISGFMAFDVPPPRGPLWILGDVFMGAYHTVFDFGENRIGFAKSA

SEQ ID NO: 2205 - DNA, 1408 bp, Zea mays subsp. mays
  misc_feature (1)..(1408): Ceres Seq. ID no. 12358591
  misc_feature (1)..(1408): Ortholog of  Ceres SEQ ID NO 15175597 as cited in SEQ ID NO 58317
gcttttggattctggtttctctcgtctttctcctccctctcctgacttttcttctagacatctcgcgggtcttatcgactccaacaagaacacactacacaccagccagcgagatagcgaacgctaggaacccagtggccatctttggagcggccatgacgctggatcagaaccatgccatgccgatgcagcccccggccctgcagcccggaagagcatatggagcagagggcagtgctgtggtgcatggttccatcagaacagtaggaagaagcgacctcgcagatcacgagatgggcctacgtcagtggcagctgtcatccagcggtgggctgagcgcaacaagcatttggagtatgaggaatctgaggaggcaaagcgaccaagaaaagcacctggcaaagggttcaaagaagggctgtatgaagggaaaaggggggcctgacaatactcaatgtggataccgtggagtgaggcagcgtacttgggggaagtgggttgctgaaataagagagccaaatcgtgtcgacagactctggctgggtaccttcccaaccgcggaggatgcagctagggcctatgatgaggcagccagagcgatgtatggagacttggcacggactaacttccccggacaggatgcaacaacctctgcccaagctgctctatcatcgacctctgcccaggctgctccaacagctgttgaagctcttcagactggcacgtcatgcgagtcgacaacgacatcaaatcactcggacatcgcatccacctcacacaagcttgaagcctctgacatctcgagctacctaaaggaaaaatgtccagctggatcatgtggtatccaagacggcacacccattgtagctgacaaggaggtctttgggccgttggagcctatcacaaatcttccagatggtggtgatggttttgatatcggtgagatgctgaggatgatggaaagcgatccacataatgcaggtggagccgacgctggcatgggacagccctggtatcttgatgagctggattcgagtgtcttagagagcatgctccagccggagccggagccagagccagagccattcctgatgtctgaagaaccggacatgtttcttgctggcttcgaaagcgctggtttcgtcgagggtctggagcggctaaactgaatttctgatgtttgaccgttgatcctcatcccacttcatgtctgagcttgtgaattcggaggcaaacattggcagaacttataagctctagcaattctaggctttacattcctctgtgatagttctctatgcatgggaactgggtttgcttcacaatttttgtaagaccagaagtgatgtaaatagttcccaccttgtggaaggacaagaaaaaaataaataaaaagagtgcttgcttt

SEQ ID NO: 2206 - protein, 388 aa, Zea mays subsp. mays
  peptide (1)..(388): Ceres Seq. ID no. 12358592
FWILVSLVFLLPLLTFLLDISRVLSTPTRTHYTPASEIANARNPVAIFGAAMTLDQNHAMPMQPPALQPGRAYGAEGSAVVHGSIRTVGRSDLADHEMGLRQWQLSSSGGLSATSIWSMRNLRRQSDQEKHLAKGSKKGCMKGKGGPDNTQCGYRGVRQRTWGKWVAEIREPNRVDRLWLGTFPTAEDAARAYDEAARAMYGDLARTNFPGQDATTSAQAALSSTSAQAAPTAVEALQTGTSCESTTTSNHSDIASTSHKLEASDISSYLKEKCPAGSCGIQDGTPIVADKEVFGPLEPITNLPDGGDGFDIGEMLRMMESDPHNAGGADAGMGQPWYLDELDSSVLESMLQPEPEPEPEPFLMSEEPDMFLAGFESAGFVEGLERLN

SEQ ID NO: 2207 - protein, 337 aa, Zea mays subsp. mays
  peptide (1)..(337): Ceres Seq. ID no. 12358593
MTLDQNHAMPMQPPALQPGRAYGAEGSAVVHGSIRTVGRSDLADHEMGLRQWQLSSSGGLSATSIWSMRNLRRQSDQEKHLAKGSKKGCMKGKGGPDNTQCGYRGVRQRTWGKWVAEIREPNRVDRLWLGTFPTAEDAARAYDEAARAMYGDLARTNFPGQDATTSAQAALSSTSAQAAPTAVEALQTGTSCESTTTSNHSDIASTSHKLEASDISSYLKEKCPAGSCGIQDGTPIVADKEVFGPLEPITNLPDGGDGFDIGEMLRMMESDPHNAGGADAGMGQPWYLDELDSSVLESMLQPEPEPEPEPFLMSEEPDMFLAGFESAGFVEGLERLN

SEQ ID NO: 2208 - protein, 329 aa, Zea mays subsp. mays
  peptide (1)..(329): Ceres Seq. ID no. 12358594
MPMQPPALQPGRAYGAEGSAVVHGSIRTVGRSDLADHEMGLRQWQLSSSGGLSATSIWSMRNLRRQSDQEKHLAKGSKKGCMKGKGGPDNTQCGYRGVRQRTWGKWVAEIREPNRVDRLWLGTFPTAEDAARAYDEAARAMYGDLARTNFPGQDATTSAQAALSSTSAQAAPTAVEALQTGTSCESTTTSNHSDIASTSHKLEASDISSYLKEKCPAGSCGIQDGTPIVADKEVFGPLEPITNLPDGGDGFDIGEMLRMMESDPHNAGGADAGMGQPWYLDELDSSVLESMLQPEPEPEPEPFLMSEEPDMFLAGFESAGFVEGLERLN

SEQ ID NO: 2209 - DNA, 1133 bp, Zea mays subsp. mays
  misc_feature (1)..(1133): Ceres Seq. ID no. 12384197
  misc_feature (1)..(1133): Ortholog of  Ceres SEQ ID NO 12627215 as cited in SEQ ID NO 60976
  misc_feature (1)..(1133): Ortholog of  Ceres SEQ ID NO 13654980 as cited in SEQ ID NO 63094
  misc_feature (1)..(1133): Ortholog of  Ceres SEQ ID NO 15178542 as cited in SEQ ID NO 65410
  misc_feature (1)..(1133): Ortholog of  Ceres SEQ ID NO 12589584 as cited in SEQ ID NO 0
  misc_feature (1)..(1133): Ortholog of  Ceres SEQ ID NO 12635657 as cited in SEQ ID NO 0
  misc_feature (1)..(1133): Ortholog of  Ceres SEQ ID NO 12635879 as cited in SEQ ID NO 0
  misc_feature (1)..(1133): Ortholog of  Ceres SEQ ID NO 13599649 as cited in SEQ ID NO 0
  misc_feature (1)..(1133): Ortholog of  Ceres SEQ ID NO 14309404 as cited in SEQ ID NO 0
atctagtataatccgtccgcaaccgttctctgccttctccatcctaaaccctcctagtcctctccatccccatcccctccaatggcggcgactgccacgtccttcgccactctcgccgtcgcgcgctcggcagggcagcggttcctccttgcctccaaggccgccccctcgccgctcctctccctccgcggcgcccgcctcccctcgcagggcgtctccttatctgggggcctcgcggcgtcgccctctcatagccgcgcgcgcttcgccacatcagccagcgccgaacccaaggaagcagaacttcagtctaaaatcacaaacaaggtgtactttgacataagcattgggaaccctgtgggcaagaatgttgggaggatcgtcatcggcttgtacggggatgatgttccacagacaacagagaacttccgtgctctttgcactggagagaaagggtttggatacaagggatccagtttccatcgtgtcatcagcgactttatgattcagggtggagattttgacaagggcaatggtaccggtgggaagagcatatatggacgcaccttcaaagatgagaacttcaaattggttcacactggacctggagtggtcagcatggctaatgctgggccgaacaccaatggcagccagttctttatttgcactgtcaagacaccttggttggacggaaggcatgtcgtgtttggccaggtcctggaagggatggatgtcgtaagtctgatcgagtcgcaggagaccgacagaggtgaccgcccgaagaagaaagtagtcatcagcgagtgtggggagcttccagtggtctaagtgttactcatctgttgtcggtcttacctaacctcggatggatggcgatatttcccccacctgaacttgtcgtgctaccctcccccccccccccccacccnnancctgntagttatagagaatatttcgaattgaagtaaggtcccaaatctgagggcatactgttgcttctctgctggaataaatgtgctcctttcccctgccttgttaagggaaagggttttgttcacgatgttaccttgtaaccttgtacttatgtttcatacttggaatgaaggttcatggaacaaaaatattctgctgcg

SEQ ID NO: 2210 - protein, 248 aa, Zea mays subsp. mays
  peptide (1)..(248): Ceres Seq. ID no. 12384198
MAATATSFATLAVARSAGQRFLLASKAAPSPLLSLRGARLPSQGVSLSGGLAASPSHSRARFATSASAEPKEAELQSKITNKVYFDISIGNPVGKNVGRIVIGLYGDDVPQTTENFRALCTGEKGFGYKGSSFHRVISDFMIQGGDFDKGNGTGGKSIYGRTFKDENFKLVHTGPGVVSMANAGPNTNGSQFFICTVKTPWLDGRHVVFGQVLEGMDVVSLIESQETDRGDRPKKKVVISECGELPVV

SEQ ID NO: 2211 - DNA, 1978 bp, Zea mays subsp. mays
  misc_feature (1)..(1978): Ceres Seq. ID no. 12556346
  misc_feature (1)..(1978): Ortholog of  Ceres SEQ ID NO 15171626 as cited in SEQ ID NO 57201
ccatcccaagaagagccgccctacctattccttctcccagccgtcgagctgcccaacccagagcaccagcagccctcaccttcttcctctcggccggtccttcaaacgagcccgctcgtcttggagccgccgccggtctcgttctggacgaacgttcaaggagattgcatttgtggatgctctaatggagtcgaaaggtggcaagaagtctagtagtagtagtagtaatttcatgtacgaagctccccttggctacaagatcgaggacgttcgcccagccggaggaatcaagaagttccagactgctgcttattccaactgcgtccgccagccatcctgatatcgcctcacatgcaattcgcggtagagtaggattttaattcagttttcctcttgtgtcggtagttttccgttggctctggctgccttcctctgcttctgagattccaacttgtcttgcccatctctccttttcctctctcatcctctctttcttgcaacacgtcatccagtggcgatgtcttcagcagattcttgtgtctcttctcctgcctcccctattggctttgagggctatgagaagcgcctcgagatcacgttctctgacgcgcctgtctttgaggacccttgtggtcgtggcctgcgcgccctctcccgtgagcagatcgactcgtttctggatctcgcacggtgcaccatagtgtcacagctctccaacgagagcttcgactcatatgttctgtccgagtccagcctctttgtgtatccccacaaggttgttctgaagacctgtgggacgacgaagctgctgctcgccattcctcgcatccttgagcttgctgcagggctgtcactgcctcttctttcagcgaagtactctcgtgggaccttcatcttccccggcgcgcagcccgcgccacaccgcagcttctcggaggaggtatctgtgctgaacgctttctttggtaacctcaagtccggtggcaatgcctacctgatcggtgaaccgttcaagcccaacaagaagtggcatgtctactacgccacagaggagcctgagcgtcctatggtgacgcttgagatgtgcatgacagagcttgacgttaagaaagctgctgtgttcttcaagaactccactggtggcagctgcacttcagctaaagagatgacgaagctctcggggattcatgagatcattcccgagatggagatctgtgactttgagtttgacccctgtgggtactcgatgaatggcgtcttcgggcctgcagcctccaccatccacgtgacacccgaggaaggtttcagctacgcaagctacgaagctatgaacttcgaccccagctcactggtctacagcgatgtgatcaggagggtcctggcaggcttctctccttcggacttctcggtcgcagttaccatctttggtggccgtgggttcgccaaatcatgggcgacgggtgcagacatcgattcctacatgtgcggtgatcctgtagagcaagagcttcctggtggcggtctgctgatgtaccagagctttactgctgttccctctggctctgtatcgccgaggtcgaccttgcagacggatggctggagcagcgatggaatggagatggcctcaaatgacgagatgtgtattggctgctggaatgcggtgaagaaggtggtgaagaaagatttggatgcttaaagatttggataacttaggtggttcttcacctaagttatgaagaagtctgagacctctgtctctctgttcttttggtttcagttaagcagttagctgggctaccggcaatttgtttgcttaatatttttcctgttcaataagtactctggatggcttgctgcgtctgccatagtgagctgcatattgttgtttagtcatattgtttctgctgccgatgcccttgtggggagaatgatcttgtaacagacttgcctattcccgcaatatattggaaattttggc

SEQ ID NO: 2212 - protein, 392 aa, Zea mays subsp. mays
  peptide (1)..(392): Ceres Seq. ID no. 12556347
MSSADSCVSSPASPIGFEGYEKRLEITFSDAPVFEDPCGRGLRALSREQIDSFLDLARCTIVSQLSNESFDSYVLSESSLFVYPHKVVLKTCGTTKLLLAIPRILELAAGLSLPLLSAKYSRGTFIFPGAQPAPHRSFSEEVSVLNAFFGNLKSGGNAYLIGEPFKPNKKWHVYYATEEPERPMVTLEMCMTELDVKKAAVFFKNSTGGSCTSAKEMTKLSGIHEIIPEMEICDFEFDPCGYSMNGVFGPAASTIHVTPEEGFSYASYEAMNFDPSSLVYSDVIRRVLAGFSPSDFSVAVTIFGGRGFAKSWATGADIDSYMCGDPVEQELPGGGLLMYQSFTAVPSGSVSPRSTLQTDGWSSDGMEMASNDEMCIGCWNAVKKVVKKDLDA

SEQ ID NO: 2213 - protein, 209 aa, Zea mays subsp. mays
  peptide (1)..(209): Ceres Seq. ID no. 12556348
MVTLEMCMTELDVKKAAVFFKNSTGGSCTSAKEMTKLSGIHEIIPEMEICDFEFDPCGYSMNGVFGPAASTIHVTPEEGFSYASYEAMNFDPSSLVYSDVIRRVLAGFSPSDFSVAVTIFGGRGFAKSWATGADIDSYMCGDPVEQELPGGGLLMYQSFTAVPSGSVSPRSTLQTDGWSSDGMEMASNDEMCIGCWNAVKKVVKKDLDA

SEQ ID NO: 2214 - protein, 204 aa, Zea mays subsp. mays
  peptide (1)..(204): Ceres Seq. ID no. 12556349
MCMTELDVKKAAVFFKNSTGGSCTSAKEMTKLSGIHEIIPEMEICDFEFDPCGYSMNGVFGPAASTIHVTPEEGFSYASYEAMNFDPSSLVYSDVIRRVLAGFSPSDFSVAVTIFGGRGFAKSWATGADIDSYMCGDPVEQELPGGGLLMYQSFTAVPSGSVSPRSTLQTDGWSSDGMEMASNDEMCIGCWNAVKKVVKKDLDA

SEQ ID NO: 2215 - DNA, 852 bp, Zea mays subsp. mays
  misc_feature (1)..(852): Ceres Seq. ID no. 12407882
  misc_feature (1)..(852): Ortholog of  Ceres SEQ ID NO 13504447 as cited in SEQ ID NO 57609
aaaacacgcgaatcgtaccggtacgaacactgagcacgcacgcacgcaaactcaaaggagtgtgaccacggaactgaagccatggcggttacagttgaaaagggcgctatgggcgagccggcgctgctgctggagcgcagccgggcgatcacccttcagggccgtgaccggaagggccgtgccgtcgtcaggatcgtcggcaactactttccagcgcgcgcgctgggcggccgggcggaggaggcgctgcggtcgtacctgcgggagcgcgtcctcccggagatcggggaccgcgagttcgtggtcgtgtacatgcactcccgcgtggatcgcggccacaacttccccggcgtcggtgcgatccgcggcgcgtacgagacgctgccggccgcggccaaggagaggctgcgcgccgtctacttcgtgcacccggccctccagtccaggatcttcttcgccaccttcgggcgcttcctcttcagctcagggttgtatgagaagctgcgatacatgagccggcttgagtacgtttgggcccacatagacaaggagcagctggaggtccccgaatgcgtgcgcgagcacgacgacgagctggagcgccgcccgctgatggactacggcatcgaggcgaccgagacccgctgcatgtatgacgccgcgtccatggacacctcggcgtccctgcactcgctccgctgcgtctactagtcgcctggacagtggcatcccgattcccgccgncggtaacggcgtgctttctgtgttctggttggtaggaggttagctgcatggcttcatagcgcttcggtactgtagtttagctgtgtatttataatggataaagtttgg

SEQ ID NO: 2216 - protein, 209 aa, Zea mays subsp. mays
  peptide (1)..(209): Ceres Seq. ID no. 12407883
MAVTVEKGAMGEPALLLERSRAITLQGRDRKGRAVVRIVGNYFPARALGGRAEEALRSYLRERVLPEIGDREFVVVYMHSRVDRGHNFPGVGAIRGAYETLPAAAKERLRAVYFVHPALQSRIFFATFGRFLFSSGLYEKLRYMSRLEYVWAHIDKEQLEVPECVREHDDELERRPLMDYGIEATETRCMYDAASMDTSASLHSLRCVY

SEQ ID NO: 2217 - protein, 200 aa, Zea mays subsp. mays
  peptide (1)..(200): Ceres Seq. ID no. 12407884
MGEPALLLERSRAITLQGRDRKGRAVVRIVGNYFPARALGGRAEEALRSYLRERVLPEIGDREFVVVYMHSRVDRGHNFPGVGAIRGAYETLPAAAKERLRAVYFVHPALQSRIFFATFGRFLFSSGLYEKLRYMSRLEYVWAHIDKEQLEVPECVREHDDELERRPLMDYGIEATETRCMYDAASMDTSASLHSLRCVY

SEQ ID NO: 2218 - protein, 170 aa, Zea mays subsp. mays
  peptide (1)..(170): Ceres Seq. ID no. 12407885
KHANRTGTNTEHARTQTQRSVTTELKPWRLQLKRALWASRRCCWSAAGRSPFRAVTGRAVPSSGSSATTFQRARWAAGRRRRCGRTCGSASSRRSGTASSWSCTCTPAWIAATTSPASVRSAARTRRCRPRPRRGCAPSTSCTRPSSPGSSSPPSGASSSAQGCMRSCDT

SEQ ID NO: 2219 - DNA, 1338 bp, Zea mays subsp. mays
  misc_feature (1)..(1338): Ceres Seq. ID no. 12352000
  misc_feature (1)..(1338): Ortholog of  Ceres SEQ ID NO 14313599 as cited in SEQ ID NO 54989
  misc_feature (1)..(1338): Ortholog of  Ceres SEQ ID NO 15176204 as cited in SEQ ID NO 55608
  misc_feature (1)..(1338): Ortholog of  Ceres SEQ ID NO 15225111 as cited in SEQ ID NO 58444
  misc_feature (1)..(1338): Ortholog of  Ceres SEQ ID NO 14313064 as cited in SEQ ID NO 59543
  misc_feature (1)..(1338): Ortholog of  Ceres SEQ ID NO 12611159 as cited in SEQ ID NO 59821
  misc_feature (1)..(1338): Ortholog of  Ceres SEQ ID NO 13584238 as cited in SEQ ID NO 64216
  misc_feature (1)..(1338): Ortholog of  Ceres SEQ ID NO 13661001 as cited in SEQ ID NO 67531
  misc_feature (1)..(1338): Ortholog of  Ceres SEQ ID NO 15178920 as cited in SEQ ID NO 0
atcattcattccctcacccccttcccttagaagctgcaggtgcagtgcatgcaaggagacaggccacgatactgtctgagatggaaggggccatgacgacgagaagcaagcatcgtcgtcatgaggaggaccaggagatgacgatggtggagctgaggagaggcccctggacgctcgaggaagacaacctcctcatgaactacattgcttgccacggcgagggccgctggaatctcctggcccgctgctccgggctgaagaggaccggcaagagctgccggctgaggtggctcaactacctcaagccggacatcaagcgcggcaacctggcgccggaggagcagctcctcatcctggagctccactccaagtgggggaaccggtggtccaggatagcncagcacctgccggggcggaccgacaacgagatcaagaactactggcggacgcgcctgctcgagaagacgatggcggccgccgcggcatccacgtccggcgaagtgctgctgccgccgctaccgccgccgccgcaactgcacccctcgcgcgtcgccggcttattggcctcttcctcctcgtcgccagtccagcgggacaccagcgacagcgactacctgccgcagcggtaccaccaccaccccgtcgacccgagcccgagcgcgtcgtcgacggtttcctcgtcggccgcgctcgcgccggtgccctgcttctccgaactgagctgggtcgaccagtacgggtacggcccttattacagttacggcgccaacctcgacgacggcgccggcgtgttcgacgactcggcagcgctggaggaaggcctcggcctggacgcgctggacctgggtccggccgacgacagcgacgtcgcccactcggacgcgacgctgctggactacctcaactccgcgtgcgccggcggcggcaccatgatgatggctgtgacgggcggcggcggcggcgtccaaagcagcggctgcggcgccacgggaggtgccgacgccgactaccggccgtcgccgtgcacgtggcggacggacgagctcggcgatcctcgtcagcatcaatggggaggaggaatctagaagcaatcaaagagagcttgcttctcggcacgtctctctctctctctctccctctccctctccctcccaaagcgacgatcgatcgatcgagatgtcacactagttaattagtggatcggagctagatagcaggtagcaagatgcgtgagtggcgataaaaaaacattaggggccggggccgggcatattctgctgttaattcgaccgatcattcgttcgatcgtgtagtagagagatgtgtggtttgatgtcg

SEQ ID NO: 2220 - protein, 360 aa, Zea mays subsp. mays
  peptide (1)..(360): Ceres Seq. ID no. 12352001
  misc_feature (132)..(132): Xaa is any aa, unknown or other
HSFPHPLPLEAAGAVHARRQATILSEMEGAMTTRSKHRRHEEDQEMTMVELRRGPWTLEEDNLLMNYIACHGEGRWNLLARCSGLKRTGKSCRLRWLNYLKPDIKRGNLAPEEQLLILELHSKWGNRWSRIXQHLPGRTDNEIKNYWRTRLLEKTMAAAAASTSGEVLLPPLPPPPQLHPSRVAGLLASSSSSPVQRDTSDSDYLPQRYHHHPVDPSPSASSTVSSSAALAPVPCFSELSWVDQYGYGPYYSYGANLDDGAGVFDDSAALEEGLGLDALDLGPADDSDVAHSDATLLDYLNSACAGGGTMMMAVTGGGGGVQSSGCGATGGADADYRPSPCTWRTDELGDPRQHQWGGGI

SEQ ID NO: 2221 - protein, 334 aa, Zea mays subsp. mays
  peptide (1)..(334): Ceres Seq. ID no. 12352002
  misc_feature (106)..(106): Xaa is any aa, unknown or other
MEGAMTTRSKHRRHEEDQEMTMVELRRGPWTLEEDNLLMNYIACHGEGRWNLLARCSGLKRTGKSCRLRWLNYLKPDIKRGNLAPEEQLLILELHSKWGNRWSRIXQHLPGRTDNEIKNYWRTRLLEKTMAAAAASTSGEVLLPPLPPPPQLHPSRVAGLLASSSSSPVQRDTSDSDYLPQRYHHHPVDPSPSASSTVSSSAALAPVPCFSELSWVDQYGYGPYYSYGANLDDGAGVFDDSAALEEGLGLDALDLGPADDSDVAHSDATLLDYLNSACAGGGTMMMAVTGGGGGVQSSGCGATGGADADYRPSPCTWRTDELGDPRQHQWGGGI

SEQ ID NO: 2222 - protein, 330 aa, Zea mays subsp. mays
  peptide (1)..(330): Ceres Seq. ID no. 12352003
  misc_feature (102)..(102): Xaa is any aa, unknown or other
MTTRSKHRRHEEDQEMTMVELRRGPWTLEEDNLLMNYIACHGEGRWNLLARCSGLKRTGKSCRLRWLNYLKPDIKRGNLAPEEQLLILELHSKWGNRWSRIXQHLPGRTDNEIKNYWRTRLLEKTMAAAAASTSGEVLLPPLPPPPQLHPSRVAGLLASSSSSPVQRDTSDSDYLPQRYHHHPVDPSPSASSTVSSSAALAPVPCFSELSWVDQYGYGPYYSYGANLDDGAGVFDDSAALEEGLGLDALDLGPADDSDVAHSDATLLDYLNSACAGGGTMMMAVTGGGGGVQSSGCGATGGADADYRPSPCTWRTDELGDPRQHQWGGGI

SEQ ID NO: 2223 - DNA, 1608 bp, Zea mays subsp. mays
  misc_feature (1)..(1608): Ceres Seq. ID no. 12352004
  misc_feature (1)..(1608): Ortholog of  Ceres SEQ ID NO 13662164 as cited in SEQ ID NO 67158
aacaaaatctctccttagtttccccaacctgcttctgtttaccgaattcctaaatccaatccccttgccaagctctctctttgctgcgggaggtcgaggccggagaggtattccgggatgggatcaagaaaggggtggttccccgtggccctcctgctgttggccgcctctgccctctggccgccggtcgccgccgccgccgccggaggcggcgaggccgaacacgccgttcagcagcatagcgagcgcatctcagggagtgctggtgatgtgttagaagataatcctgtgggtaggttgaaggtcttcatttatgacttaccaaggaagtacaacaagaagatggtcaccaaggattcacggtgcctcagtcacatgtttgccgctgaaattttcatgcatcgtttcttgctctcgagtgctgtccggacactaaatcccaaggaagctgattggttctatacaccagtttacactacttgcgatttaactaacgctggactgcccttgccgtttaagtcaccacgggtgatgaggagcgcgatccaatatatttcaaacaaatggcccttctggaataggactgatggagcagatcatttcttcgttgttccgcatgattttgcagcatgcttccactatcaggaagaaaaagctatcgagcgtggaattcttccattgctgcgacgtgctacattggtccaaacctttggacaggagaatcatgtttgcctgaaggagggttccatcattattccaccctatgctcctccgcagaaaatgcaagctcacttgatttccccagacactccacgctcaatcttcgtttacttccggggacttttttatgacacggggaatgaccccgagggcggatactatgcaagaggtgcgcgagcttcgctatgggagaacttcaagagcaaccctctgtttgacatttccacagaccaccctgccacttactatgaagacatgcagcgcgctgtcttctgcctgtgcccattgggctgggcaccgtggagccctaggttggttgaggctgtggtctttggctgcattccagtcatcatagctgatgacatcgtgcttccatttgcagacgcgatcccatgggaggaaatcggcgtctttgtcgaggagaaggatgtcccaaagcttgacacgatcctcacgtcgatgcctatagatgacatcttaaggaagcaaaggttactcgcaaatccatcgatgaagcaggcaatgttgttcccacagccagcgcaaccaagggacgcgttccaccaaatcttgaacggccttgctcggaagctcccgcacccagagggtacgttcttacaacctggcgatcagcgcctcaactggaccgctggtcctgtgggagatctgaagccgtggtagagaagaatagctatcttcttctttgataatccaagctttgccacgagcaccccttaggactaatgcacgcttcatgagatgttatgtaatcaatatgctgtgcgtgctttaggtgcaaaatacaccttggccgtgcttagtccttatgaacgccatgtaacttattgatttcccatggaaatgaaatggtatatttatcttgctgtc

SEQ ID NO: 2224 - protein, 427 aa, Zea mays subsp. mays
  peptide (1)..(427): Ceres Seq. ID no. 12352005
MGSRKGWFPVALLLLAASALWPPVAAAAAGGGEAEHAVQQHSERISGSAGDVLEDNPVGRLKVFIYDLPRKYNKKMVTKDSRCLSHMFAAEIFMHRFLLSSAVRTLNPKEADWFYTPVYTTCDLTNAGLPLPFKSPRVMRSAIQYISNKWPFWNRTDGADHFFVVPHDFAACFHYQEEKAIERGILPLLRRATLVQTFGQENHVCLKEGSIIIPPYAPPQKMQAHLISPDTPRSIFVYFRGLFYDTGNDPEGGYYARGARASLWENFKSNPLFDISTDHPATYYEDMQRAVFCLCPLGWAPWSPRLVEAVVFGCIPVIIADDIVLPFADAIPWEEIGVFVEEKDVPKLDTILTSMPIDDILRKQRLLANPSMKQAMLFPQPAQPRDAFHQILNGLARKLPHPEGTFLQPGDQRLNWTAGPVGDLKPW

SEQ ID NO: 2225 - protein, 352 aa, Zea mays subsp. mays
  peptide (1)..(352): Ceres Seq. ID no. 12352006
MVTKDSRCLSHMFAAEIFMHRFLLSSAVRTLNPKEADWFYTPVYTTCDLTNAGLPLPFKSPRVMRSAIQYISNKWPFWNRTDGADHFFVVPHDFAACFHYQEEKAIERGILPLLRRATLVQTFGQENHVCLKEGSIIIPPYAPPQKMQAHLISPDTPRSIFVYFRGLFYDTGNDPEGGYYARGARASLWENFKSNPLFDISTDHPATYYEDMQRAVFCLCPLGWAPWSPRLVEAVVFGCIPVIIADDIVLPFADAIPWEEIGVFVEEKDVPKLDTILTSMPIDDILRKQRLLANPSMKQAMLFPQPAQPRDAFHQILNGLARKLPHPEGTFLQPGDQRLNWTAGPVGDLKPW

SEQ ID NO: 2226 - protein, 341 aa, Zea mays subsp. mays
  peptide (1)..(341): Ceres Seq. ID no. 12352007
MFAAEIFMHRFLLSSAVRTLNPKEADWFYTPVYTTCDLTNAGLPLPFKSPRVMRSAIQYISNKWPFWNRTDGADHFFVVPHDFAACFHYQEEKAIERGILPLLRRATLVQTFGQENHVCLKEGSIIIPPYAPPQKMQAHLISPDTPRSIFVYFRGLFYDTGNDPEGGYYARGARASLWENFKSNPLFDISTDHPATYYEDMQRAVFCLCPLGWAPWSPRLVEAVVFGCIPVIIADDIVLPFADAIPWEEIGVFVEEKDVPKLDTILTSMPIDDILRKQRLLANPSMKQAMLFPQPAQPRDAFHQILNGLARKLPHPEGTFLQPGDQRLNWTAGPVGDLKPW

SEQ ID NO: 2227 - DNA, 1446 bp, Zea mays subsp. mays
  misc_feature (1)..(1446): Ceres Seq. ID no. 12366876
  misc_feature (1)..(1446): Ortholog of  Ceres SEQ ID NO 14315461 as cited in SEQ ID NO 57150
gcacgagaccattacctagaacatcctaatcgaaaaaaaaaagcttcccttccttccctggaacggcaacgagacgtgggagctgggacgggcaagtagtagaaaccttctctccttccccagccaggacgccatacagaatccgacgcgatccagaagaagccaaggcctcttcagatcctcccgcctccctctgcgaggttcccagaccgagccatcgccggcgctaggctcggggatcttgtcgggtcccgtcccgtcctaccacttcgccggcgctgcgtcgccgtcactcgtcagtcaggactcaggatccccaagatggcttcttcaaacggtgaggctgagcaacaatggatagagaatatcaagtcaggaggaacagttccctgtctaccacctgaaaactgtcctaatggctgggctactcctcccggtgattcatttatggtcagaggcccagaatatcttacaaacaaggtaaaaataccaggtggagagtatcttctgaagcctctcggctttgattggatcaaaggaccagcaaaaatctgtgagatcctgaaagacagtaaccatcgagttagaaaagctatcgacgaggaggtttcacgtggtaaccggccttttgtctgggcattcaacttgcaactgcccaaggacaacttcagtgcaatattctacttcgtgtcgctggaggctatacctgaaggctcgcttatggaccagttcttgaaaggagatgatgccttccgaaactccaggcttaagttaatagcgaatattgtcaaggggccctggattgtccggacggctgtgggtgaacaggccatctgtatactggggagagccctctcatgcaagtatgttcaaggatcaaacttcatcgaagttgatgtggatatcgggtcttctatagttgcaaatgcgatcgttcatttggcatttggctatatcacaacgctaactgtagatttggcctttctcattgagagtcaaaccgagtcggagctccctgagagacttcttggagcagtaaggttttctgagttaaatccaggatcagctggtttgtttgaaaggcggtctgaagagcatcaggaaagcactcagtctcggcctgtaggattttggcagggtttctctcaactgttgaacaaccaaggcaatacaagggagccatcccctaatttacagaatactaatggaactttgcgcaaagaagaagcaaatgaggatgccaaatgattcagacccctaccattgtttcggggacaatttatcagtagatcacggcgttacaatttaccagatagtcccagggctttgtttctttgccctcacatctgctgtaaaaattataactttggccacagacaaactgcataactttgtacataaactgaatgcttcctaaatatttgttcccttatatagttatatgtg

SEQ ID NO: 2228 - protein, 308 aa, Zea mays subsp. mays
  peptide (1)..(308): Ceres Seq. ID no. 12366877
MASSNGEAEQQWIENIKSGGTVPCLPPENCPNGWATPPGDSFMVRGPEYLTNKVKIPGGEYLLKPLGFDWIKGPAKICEILKDSNHRVRKAIDEEVSRGNRPFVWAFNLQLPKDNFSAIFYFVSLEAIPEGSLMDQFLKGDDAFRNSRLKLIANIVKGPWIVRTAVGEQAICILGRALSCKYVQGSNFIEVDVDIGSSIVANAIVHLAFGYITTLTVDLAFLIESQTESELPERLLGAVRFSELNPGSAGLFERRSEEHQESTQSRPVGFWQGFSQLLNNQGNTREPSPNLQNTNGTLRKEEANEDAK

SEQ ID NO: 2229 - protein, 266 aa, Zea mays subsp. mays
  peptide (1)..(266): Ceres Seq. ID no. 12366878
MVRGPEYLTNKVKIPGGEYLLKPLGFDWIKGPAKICEILKDSNHRVRKAIDEEVSRGNRPFVWAFNLQLPKDNFSAIFYFVSLEAIPEGSLMDQFLKGDDAFRNSRLKLIANIVKGPWIVRTAVGEQAICILGRALSCKYVQGSNFIEVDVDIGSSIVANAIVHLAFGYITTLTVDLAFLIESQTESELPERLLGAVRFSELNPGSAGLFERRSEEHQESTQSRPVGFWQGFSQLLNNQGNTREPSPNLQNTNGTLRKEEANEDAK

SEQ ID NO: 2230 - protein, 175 aa, Zea mays subsp. mays
  peptide (1)..(175): Ceres Seq. ID no. 12366879
MDQFLKGDDAFRNSRLKLIANIVKGPWIVRTAVGEQAICILGRALSCKYVQGSNFIEVDVDIGSSIVANAIVHLAFGYITTLTVDLAFLIESQTESELPERLLGAVRFSELNPGSAGLFERRSEEHQESTQSRPVGFWQGFSQLLNNQGNTREPSPNLQNTNGTLRKEEANEDAK

SEQ ID NO: 2231 - DNA, 1226 bp, Zea mays subsp. mays
  misc_feature (1)..(1226): Ceres Seq. ID no. 12352008
  misc_feature (1)..(1226): Ortholog of  Ceres SEQ ID NO 12613953 as cited in SEQ ID NO 68388
aatttccctcgccatcctacgcctcgcgccgccgccacagcaacccttgcagccccaatcccccacggcgaccatggccggcgcgcaggagtccctctccctggtgggcacgatgcgcggccataacggcgaggtgacggcgatcgcgaccccgatcgacaactcgcctttcatcgtctcctcctcccgggacaagtccgtgctggtgtgggacctgaccaacccggtccactccaccccggaatccggcgtcaccgccgactacggcgtccccttccgccgcctcaccggccactcccacttcgtccaggacgtcgtccttagttccgacggccagttcgcactctctggctcctgggacggcgagctccgcctttgggacctctccaccggcctcaccacccgccgcttcgtcggccacgagaaggacgtcatctccgtcgccttctccgtcgacaaccgccagatcgtctccgcgtcccgcgacaagaccatcaagctctggaacactctcggcgagtgcaagtacaccatcggcggcgacctcggcggcggcgagggccacaacgggtgggtctcctgcgttaggttctccccaaacaccttccagcccaccattgtctccggatcctgggaccgcaccgtcaaggtctggaaccttaccaactgcaagctgcgctgcactctggatgggcacggtggctatgttaacgccgtcgctgtgagccccgacgggtcgctgtgcgcctccggcgggaaggacggtgttactctgctgtgggatttggctgaggggaagaggctgtactcgctggacgcgggctccatcatccactctctctgcttctcacccaaccgctactggctctgcgctgcgacgcaggactctgtcaagatctgggacctcgagtcgaagcacgttgtgcaggacctcaagcccgacatccaggtctccaagaaccagatcctgtactgtacaagcttgagctggagtgcggacggaagcaccctctacactggctacaccgatgggtctatcagggtttggaagatctccgggtacggctacgcaggctagatgttgaaatcagcttggtctaggcagtctttcgggggaaaacattgtaatgtttgtcaagtttttgatgtcgtgagctatattgtctcttcgctactttccggtcgcccaaccattttaatcttactatggaagaatcttgttttgc

SEQ ID NO: 2232 - protein, 358 aa, Zea mays subsp. mays
  peptide (1)..(358): Ceres Seq. ID no. 12352009
ISLAILRLAPPPQQPLQPQSPTATMAGAQESLSLVGTMRGHNGEVTAIATPIDNSPFIVSSSRDKSVLVWDLTNPVHSTPESGVTADYGVPFRRLTGHSHFVQDVVLSSDGQFALSGSWDGELRLWDLSTGLTTRRFVGHEKDVISVAFSVDNRQIVSASRDKTIKLWNTLGECKYTIGGDLGGGEGHNGWVSCVRFSPNTFQPTIVSGSWDRTVKVWNLTNCKLRCTLDGHGGYVNAVAVSPDGSLCASGGKDGVTLLWDLAEGKRLYSLDAGSIIHSLCFSPNRYWLCAATQDSVKIWDLESKHVVQDLKPDIQVSKNQILYCTSLSWSADGSTLYTGYTDGSIRVWKISGYGYAG

SEQ ID NO: 2233 - protein, 334 aa, Zea mays subsp. mays
  peptide (1)..(334): Ceres Seq. ID no. 12352010
MAGAQESLSLVGTMRGHNGEVTAIATPIDNSPFIVSSSRDKSVLVWDLTNPVHSTPESGVTADYGVPFRRLTGHSHFVQDVVLSSDGQFALSGSWDGELRLWDLSTGLTTRRFVGHEKDVISVAFSVDNRQIVSASRDKTIKLWNTLGECKYTIGGDLGGGEGHNGWVSCVRFSPNTFQPTIVSGSWDRTVKVWNLTNCKLRCTLDGHGGYVNAVAVSPDGSLCASGGKDGVTLLWDLAEGKRLYSLDAGSIIHSLCFSPNRYWLCAATQDSVKIWDLESKHVVQDLKPDIQVSKNQILYCTSLSWSADGSTLYTGYTDGSIRVWKISGYGYAG

SEQ ID NO: 2234 - protein, 321 aa, Zea mays subsp. mays
  peptide (1)..(321): Ceres Seq. ID no. 12352011
MRGHNGEVTAIATPIDNSPFIVSSSRDKSVLVWDLTNPVHSTPESGVTADYGVPFRRLTGHSHFVQDVVLSSDGQFALSGSWDGELRLWDLSTGLTTRRFVGHEKDVISVAFSVDNRQIVSASRDKTIKLWNTLGECKYTIGGDLGGGEGHNGWVSCVRFSPNTFQPTIVSGSWDRTVKVWNLTNCKLRCTLDGHGGYVNAVAVSPDGSLCASGGKDGVTLLWDLAEGKRLYSLDAGSIIHSLCFSPNRYWLCAATQDSVKIWDLESKHVVQDLKPDIQVSKNQILYCTSLSWSADGSTLYTGYTDGSIRVWKISGYGYAG

SEQ ID NO: 2235 - DNA, 1338 bp, Zea mays subsp. mays
  misc_feature (1)..(1338): Ceres Seq. ID no. 12352016
  misc_feature (1)..(1338): Ortholog of  Ceres SEQ ID NO 12635907 as cited in SEQ ID NO 525
  misc_feature (1)..(1338): Ortholog of  Ceres SEQ ID NO 13503463 as cited in SEQ ID NO 65057
tcaagcttaataaaaggttgctccgctcagctgccctctgcgcctcataaccgaaaaaacccaaagtcacgtttcctcctcaacaaaaaccctcgcaaaaatctgggatctatctagaagcaccactcaacaaaccctaggttgcctgatcggctgatcgctccatggcgatcatctccgacttcaaggacgacgaggcaccggagcagcagctggcggcccggcccacggcgtcgaggaggccctcgtggcggcgttggagaggagcggcggcgcgctccccttcctacaggcggctatcgatgtcgcccaccgcaggtccggcctgttccgcgacccttcggcggtgagcaaggtcaccgcgatggcggcggcagccagggcgcagatcgaagccgaggagagggtgaccagagaggcggaggccaagaggaaggcggaggaggacgagaggaaggcggaagccgaggcgcagagggctgccaaggaggcggtaatggcgacggcagaggagaagccagagagcacggtggagaaggacatcatggaggtggataagaaggaggaagccaacgtgagacaaccaaatgctggcaatggtcttgacttggagaagtactcgtggactcaacagttgccagaggttaacatcaccattcctgttcctcaaggaacaaaatcaagatttgtggtatttgatttaaagaagaaccatctgaaggttggtctgaagggccagccacctatcattgatggtgagctctataagccagttaaggttgatgactgcttctggagcatagaggatgggagaaccctgtccatattgcttacaaagcatgaccaaatggaatggtggaagtctgttataaagggtgatcctgaagttgatacccaaaaggtggaacctgagaacagtaaactctctgatttggatcctgagactagacaaactgtggaaaagatgatgtttgaccagcgctagaagcagatgggccttccaacaagtgatgaaatgcaaaagcaagaaattctcaagaagttcatgtctgagcacccggagatggacttctctagagcgaaattagattgaggatgtgtttgaccatttgtctgaatgcgttattagtatgaaacattttttgatcagtttgcatgtaatgcgtcagaaatatctggagatagacttctctagagcgaaaatagcttgaggatgtgttcggccagttatttctaccagtgtgcattaggttgtctgagtgcgttattagtatgaaacaaaaattttgatcagttcacgtgtaatcgtcagaaatatccggagatggacttctctag

SEQ ID NO: 2236 - protein, 206 aa, Zea mays subsp. mays
  peptide (1)..(206): Ceres Seq. ID no. 12352017
MAAAARAQIEAEERVTREAEAKRKAEEDERKAEAEAQRAAKEAVMATAEEKPESTVEKDIMEVDKKEEANVRQPNAGNGLDLEKYSWTQQLPEVNITIPVPQGTKSRFVVFDLKKNHLKVGLKGQPPIIDGELYKPVKVDDCFWSIEDGRTLSILLTKHDQMEWWKSVIKGDPEVDTQKVEPENSKLSDLDPETRQTVEKMMFDQR

SEQ ID NO: 2237 - protein, 162 aa, Zea mays subsp. mays
  peptide (1)..(162): Ceres Seq. ID no. 12352018
MATAEEKPESTVEKDIMEVDKKEEANVRQPNAGNGLDLEKYSWTQQLPEVNITIPVPQGTKSRFVVFDLKKNHLKVGLKGQPPIIDGELYKPVKVDDCFWSIEDGRTLSILLTKHDQMEWWKSVIKGDPEVDTQKVEPENSKLSDLDPETRQTVEKMMFDQR

SEQ ID NO: 2238 - protein, 146 aa, Zea mays subsp. mays
  peptide (1)..(146): Ceres Seq. ID no. 12352019
MEVDKKEEANVRQPNAGNGLDLEKYSWTQQLPEVNITIPVPQGTKSRFVVFDLKKNHLKVGLKGQPPIIDGELYKPVKVDDCFWSIEDGRTLSILLTKHDQMEWWKSVIKGDPEVDTQKVEPENSKLSDLDPETRQTVEKMMFDQR

SEQ ID NO: 2239 - DNA, 1421 bp, Zea mays subsp. mays
  misc_feature (1)..(1421): Ceres Seq. ID no. 12410851
  misc_feature (1)..(1421): Ortholog of  Ceres SEQ ID NO 14313060 as cited in SEQ ID NO 59447
  misc_feature (1)..(1421): Ortholog of  Ceres SEQ ID NO 12624676 as cited in SEQ ID NO 61197
atcgctgcgatttcttgtggcccggcggctccagccccacggctgccgagcggataacgaacgactggcggcggctcgcgtcggccttcctcctctccttctctctcctcgcatcgcagtcgcagcaggcaacaaaccaaatcgcttaccgcccccgaagcgtctcggttcgcatagcagagctgctcttgcaacaagccaaacaacccagtggctgctagccgagacaggggatagattgagagaggcgcgcagatggcgacgccgtcgtcgtcgctttgctccagcttcgcctccctgcggaccgcctccatcggccacccccgtggcatcgcctcctccacgcccaggaaggcattccatgtgagggcatcagctcgggttgacaagttctcaaagagtgacatcatcgtgtccccttcgattctgtctgcaaactttgcgaagcttggtgatcaggtaaaagctgtggaggtggcaggatgcgactggattcatgttgatgtcatggatgggcgctttgtgccaaacatcacaattggacccttggttgttgatgctctgcgtccagtgactgatcttccgttggatgtacatctgatgattgtggaacctgagcagcgagtccctgattttatcaaggcaggtgctgatattgttagtgtccactgtgaacagacatcgaccatccatttgcaccgaacagtcaatcagattaaaagtctaggagcaaaggcaggagttgttttgaatccagcgactccactcactgcaattgattacgttcttgatttgttgacctggtgctgattatgtctgtgaatcctgggtttggtggccagagctttatcgagagtcaagtaaagaaaattgcagaactgagaaggttatgtgcagagaagggagtgaacccctggattgaggttgatggtggtgttggtccgaaaaatgcctacaaggttattgaagctggcgcaaatgccattgtcgcaggttctgcagtttttggggctccagactacgctgaagctatcaaaggaataaagaccagccaaagacctctagctgtagccgcataaagagctggacgtgtaatcatttactctgtgcaagtttaccagtgatgcgatctgtatagatgtgtgtcttgtccagctatacgtataccggagatgaaaggagacggaggcagtgaagaaatatccttttttttcttctcatttttcacgaggatgccgtgcactgctcccagaatgctgtgtccaatttacaaacgcacaggtggcacatgaactagcagagtagctttctcttgaaaggaaactgtatttggggtcgatgaaccctctggtgttattcttcagactggtaaacgatgtaacatgtttgataatcaataaagtgcgtcgtatggctttcct

SEQ ID NO: 2240 - protein, 184 aa, Zea mays subsp. mays
  peptide (1)..(184): Ceres Seq. ID no. 12410852
MATPSSSLCSSFASLRTASIGHPRGIASSTPRKAFHVRASARVDKFSKSDIIVSPSILSANFAKLGDQVKAVEVAGCDWIHVDVMDGRFVPNITIGPLVVDALRPVTDLPLDVHLMIVEPEQRVPDFIKAGADIVSVHCEQTSTIHLHRTVNQIKSLGAKAGVVLNPATPLTAIDYVLDLLTWC

SEQ ID NO: 2241 - protein, 121 aa, Zea mays subsp. mays
  peptide (1)..(121): Ceres Seq. ID no. 12410853
SLRFLVARRLQPHGCRADNERLAAARVGLPPLLLSPRIAVAAGNKPNRLPPPKRLGSHSRAALATSQTTQWLLAETGDRLREARRWRRRRRRFAPASPPCGPPPSATPVASPPPRPGRHSM

SEQ ID NO: 2242 - protein, 100 aa, Zea mays subsp. mays
  peptide (1)..(100): Ceres Seq. ID no. 12410854
MDGRFVPNITIGPLVVDALRPVTDLPLDVHLMIVEPEQRVPDFIKAGADIVSVHCEQTSTIHLHRTVNQIKSLGAKAGVVLNPATPLTAIDYVLDLLTWC

SEQ ID NO: 2243 - DNA, 1520 bp, Zea mays subsp. mays
  misc_feature (1)..(1520): Ceres Seq. ID no. 12405811
  misc_feature (1)..(1520): Ortholog of  Ceres SEQ ID NO 15170517 as cited in SEQ ID NO 52861
  misc_feature (1)..(1520): Ortholog of  Ceres SEQ ID NO 15177225 as cited in SEQ ID NO 58078
actccactctccagtctccaccttttgctgtcgccttcctccccttgccttccctgtgccctcccctccctcgcgccgcaaaaaacgccgcagggaggaagagagagagagagggccaggctgagcttactggcggcgagctggagaagaaggaaggagcatggccatgccggcggcgctgcttctcttcctcctagtcctctccgccttcgaggccggggagcttccacgctgctcggctgctgctgcaggtaaaccggcagtcctcgtccatgatgacttgagtccggttcaagacaccagccccatcgcaacagtcccctccacgaacccgtcgcccgccatcatcaccgtgccttccacgaatcccaccatcaccatcccttccttgaaccctctgcctacacccatcacagccccctcaacaaacatcccttctccttccaccatgctgccgccggttccggtcatatatccgctgccaacgccgtctatgtcctccccaccagctgtgccggtcaccaatcctgctgtcaccacgccttccacgtcccctccgtcgacaccaacaccattcaacaacccaccattgttgaacccaacgccgacccctgctcctacagtcacggccccagctgcttctggccggcaggtctggtgtgtggccaaggctgctggctcaagtgaagccgcgctccagaacgcgttggactatgcgtgcggcattggaggagtagattgttcggcgattcagccgtcagggagctgctactatccaaataccatccaagcccatgcatcctacgcgttcaacacttattaccagagaaaccctgtttcttccagctgcgactttggggggacggcaatgctcgtcactgctaatccaagctctgggagctgtgtctttgcatcatcattgccatcgtcgtcaagctctactgttggatatgatcccgcgtccacggctactccattgtcaccgtcgtctggttccgactcgggagcacccgtgctgaatgccagtggggcaggttcttctgaatcatcagattttggctttgacatcccaggagctgtcaatttcggcagcggttggaggtcagtctcaccacccaactggccctgggcagccctggtctggattctagtagcattgtgtgtgcacaaagaagggatggtctgaacctgtgagagcatctgcagtattttggagacagattgcaaagtagccaggtggtgtagagaccagtagagagctacaaagctagagaatcgggccttagcatggctaagtttgtcgatgtatgtgtgaagtatggtgctccagttcgtagtaggaactgatgtagtcctgatggatggacttggactcaccctgatcagtcactcaggtactctgaagtgtagatgtaggcatgtagctgctgctagtagtagtagtaatgcaagtactgctttgcctcgtatgggtgagtgagttgaacaactaatggaatgcaaatgtgctgttttgtttt

SEQ ID NO: 2244 - protein, 341 aa, Zea mays subsp. mays
  peptide (1)..(341): Ceres Seq. ID no. 12405812
MAMPAALLLFLLVLSAFEAGELPRCSAAAAGKPAVLVHDDLSPVQDTSPIATVPSTNPSPAIITVPSTNPTITIPSLNPLPTPITAPSTNIPSPSTMLPPVPVIYPLPTPSMSSPPAVPVTNPAVTTPSTSPPSTPTPFNNPPLLNPTPTPAPTVTAPAASGRQVWCVAKAAGSSEAALQNALDYACGIGGVDCSAIQPSGSCYYPNTIQAHASYAFNTYYQRNPVSSSCDFGGTAMLVTANPSSGSCVFASSLPSSSSSTVGYDPASTATPLSPSSGSDSGAPVLNASGAGSSESSDFGFDIPGAVNFGSGWRSVSPPNWPWAALVWILVALCVHKEGMV

SEQ ID NO: 2245 - protein, 339 aa, Zea mays subsp. mays
  peptide (1)..(339): Ceres Seq. ID no. 12405813
MPAALLLFLLVLSAFEAGELPRCSAAAAGKPAVLVHDDLSPVQDTSPIATVPSTNPSPAIITVPSTNPTITIPSLNPLPTPITAPSTNIPSPSTMLPPVPVIYPLPTPSMSSPPAVPVTNPAVTTPSTSPPSTPTPFNNPPLLNPTPTPAPTVTAPAASGRQVWCVAKAAGSSEAALQNALDYACGIGGVDCSAIQPSGSCYYPNTIQAHASYAFNTYYQRNPVSSSCDFGGTAMLVTANPSSGSCVFASSLPSSSSSTVGYDPASTATPLSPSSGSDSGAPVLNASGAGSSESSDFGFDIPGAVNFGSGWRSVSPPNWPWAALVWILVALCVHKEGMV

SEQ ID NO: 2246 - protein, 245 aa, Zea mays subsp. mays
  peptide (1)..(245): Ceres Seq. ID no. 12405814
MLPPVPVIYPLPTPSMSSPPAVPVTNPAVTTPSTSPPSTPTPFNNPPLLNPTPTPAPTVTAPAASGRQVWCVAKAAGSSEAALQNALDYACGIGGVDCSAIQPSGSCYYPNTIQAHASYAFNTYYQRNPVSSSCDFGGTAMLVTANPSSGSCVFASSLPSSSSSTVGYDPASTATPLSPSSGSDSGAPVLNASGAGSSESSDFGFDIPGAVNFGSGWRSVSPPNWPWAALVWILVALCVHKEGMV

SEQ ID NO: 2247 - DNA, 1343 bp, Zea mays subsp. mays
  misc_feature (1)..(1343): Ceres Seq. ID no. 12413475
  misc_feature (1)..(1343): Ortholog of  Ceres SEQ ID NO 13597805 as cited in SEQ ID NO 64186
aaacccaaacctgattaatgcctcgcctccattccgtactctcctgctgaagcttttttctctgaaactagtatatcccccatctgtttggtcccgacgattttccgctttgggagcaccaccaagctcttccagcttgcagggctggagtctttgccagggacagcaatggtgccgacgcatggcgatacagccggaccgagctccagccaggatgacccggcagccagcgtgaagaagcgcaacagcaacaggcctcagtatcatccgtttactcagcaacagcttccagcttgcaagcctatacttgcgcctcagacggtcatccctgtactcctgtttgtgggcgtagtttttatcgtgattggccttggctgcattgcagcctcaaacagggtggttgaagtggtctatgagtatgagacttcatgcataccaagacacatgcttggcaacaaagtcgcctatatccaaaacccatctatagataagacatgcacatggattctcaaggttcctagggatatgaagcacccaatctacgtatattaccagcttgacaagttctaccagaaccacaggaggtacgtgaagagccgcagcgacaagcagctgagagatcccaaggaggccaacagcacgcagcagtactgcaagcccgaagctaccaccgagcacgggagcgccgtcgtcccctgcgggctcgtggcctggagcctgttcaacgacacctacagcttcgcccggggcaacaacagggcgctgagggtccacaagcgaggcatctcgtggaggagcgagagggaacacatcttcgggaagcaggtgttcccgaggaatttccagaaaggagctctgatcggaggaggcacgcttgatccaagaatacctctgagtgagcaagaagacctgatcgtgtggatgcggaccgcggctctgccgacgttccggaagctgtacggcaggatcgaggcggacctccgcgccggcgagctggtcacggtgacgacgcagaataactacaacacctacagcttcggcgggaagaaggcgctggtgctgtccacggccggcgtgctgggaggcaggaacggcttcctcggccgcgggtacgccgtcgtcggcctggcctgcctgctgctggcgctgctcctcaccatgctctgcctcgtcttcccactgaaagaggaacaccttgcgctgcagtaccctttgctccggcctgccacggtgaccatgcatgcctagctagatcagtagacggtgtacagattgaaacagtttcttctttttcatttttgatgtatactcagattgaaacagtttgttctttttcttcttgg

SEQ ID NO: 2248 - protein, 359 aa, Zea mays subsp. mays
  peptide (1)..(359): Ceres Seq. ID no. 12413476
MVPTHGDTAGPSSSQDDPAASVKKRNSNRPQYHPFTQQQLPACKPILAPQTVIPVLLFVGVVFIVIGLGCIAASNRVVEVVYEYETSCIPRHMLGNKVAYIQNPSIDKTCTWILKVPRDMKHPIYVYYQLDKFYQNHRRYVKSRSDKQLRDPKEANSTQQYCKPEATTEHGSAVVPCGLVAWSLFNDTYSFARGNNRALRVHKRGISWRSEREHIFGKQVFPRNFQKGALIGGGTLDPRIPLSEQEDLIVWMRTAALPTFRKLYGRIEADLRAGELVTVTTQNNYNTYSFGGKKALVLSTAGVLGGRNGFLGRGYAVVGLACLLLALLLTMLCLVFPLKEEHLALQYPLLRPATVTMHA

SEQ ID NO: 2249 - protein, 267 aa, Zea mays subsp. mays
  peptide (1)..(267): Ceres Seq. ID no. 12413477
MLGNKVAYIQNPSIDKTCTWILKVPRDMKHPIYVYYQLDKFYQNHRRYVKSRSDKQLRDPKEANSTQQYCKPEATTEHGSAVVPCGLVAWSLFNDTYSFARGNNRALRVHKRGISWRSEREHIFGKQVFPRNFQKGALIGGGTLDPRIPLSEQEDLIVWMRTAALPTFRKLYGRIEADLRAGELVTVTTQNNYNTYSFGGKKALVLSTAGVLGGRNGFLGRGYAVVGLACLLLALLLTMLCLVFPLKEEHLALQYPLLRPATVTMHA

SEQ ID NO: 2250 - protein, 240 aa, Zea mays subsp. mays
  peptide (1)..(240): Ceres Seq. ID no. 12413478
MKHPIYVYYQLDKFYQNHRRYVKSRSDKQLRDPKEANSTQQYCKPEATTEHGSAVVPCGLVAWSLFNDTYSFARGNNRALRVHKRGISWRSEREHIFGKQVFPRNFQKGALIGGGTLDPRIPLSEQEDLIVWMRTAALPTFRKLYGRIEADLRAGELVTVTTQNNYNTYSFGGKKALVLSTAGVLGGRNGFLGRGYAVVGLACLLLALLLTMLCLVFPLKEEHLALQYPLLRPATVTMHA

SEQ ID NO: 2251 - DNA, 1027 bp, Zea mays subsp. mays
  misc_feature (1)..(1027): Ceres Seq. ID no. 12407402
  misc_feature (1)..(1027): Ortholog of  Ceres SEQ ID NO 15176081 as cited in SEQ ID NO 65838
  misc_feature (1)..(1027): Ortholog of  Ceres SEQ ID NO 13660287 as cited in SEQ ID NO 67316
aatgcaggccttctccggcctcggcaccttcttcaagctctccgccgcgtccgccgtcatgctgtgcctcgagacatggtactaccagatcatcgtgctcatcgccggcctgctcaagaacccggagatctcgctcgactccctctccatatgcatgaccgtgaacgcatgggtgtttatgatctccgtgggcttcaacgccgcggcgagcgtgcgggtcgggaacgagctcggcgcgggcaacccgagggcggcgtcgttctcggtgctggtggtgacgtcgctgtcgttcgccgtgtcggcggtgtgcgccgtcgccgtgctctgcctccgcgaccagctgagctacctgttcacgggcggcgaggccgtggctcgcgccgtgtccgacctctgcccgctcctcgccctcacgctcgtcctcaacggcgtgcagccagtgctctcaggcgtcgccgtgggctgcgggtggcaggccttcgtggcgtacgtgaacgtcggctgctactacgtcgtcggcgtgccgctcggcgtcttcctcggcttctacctcgacctcggcgccaagggcatttggagcggcatggtcatcgggggaaccatgatgcagacgctcatcctgctctgggtcaccttcagaacagactggaccaaggaggtggagaacgccagggcgaggctggacaagtgggacgacaagaagcagcccctcctagcctagaagaagactgattgaaggtcactgtagcgcgcgctgatgcacctttttttggcgatgattgagagaccacaccaggcgcgcgtcggaggggatgcaacgcaacgcaacgcaatcatttgggttttgaagctatttaatattatcgcattatagagtgtgcgcgtgcagtttcgagtgattaaagttttgttacgctttcttcggtgtcagctccaacttagggcgactagatgcgaccatcacaccagggtttggaccgtggtgggtggattctattcgtttttttttaagcacaaatatgtctag

SEQ ID NO: 2252 - protein, 243 aa, Zea mays subsp. mays
  peptide (1)..(243): Ceres Seq. ID no. 12407403
NAGLLRPRHLLQALRRVRRHAVPRDMVLPDHRAHRRPAQEPGDLARLPLHMHDRERMGVYDLRGLQRRGERAGRERARRGQPEGGVVLGAGGDVAVVRRVGGVRRRRALPPRPAELPVHGRRGRGSRRVRPLPAPRPHARPQRRAASALRRRRGLRVAGLRGVRERRLLLRRRRAARRLPRLLPRPRRQGHLERHGHRGNHDADAHPALGHLQNRLDQGGGERQGEAGQVGRQEAAPPSLEED

SEQ ID NO: 2253 - protein, 239 aa, Zea mays subsp. mays
  peptide (1)..(239): Ceres Seq. ID no. 12407404
MQAFSGLGTFFKLSAASAVMLCLETWYYQIIVLIAGLLKNPEISLDSLSICMTVNAWVFMISVGFNAAASVRVGNELGAGNPRAASFSVLVVTSLSFAVSAVCAVAVLCLRDQLSYLFTGGEAVARAVSDLCPLLALTLVLNGVQPVLSGVAVGCGWQAFVAYVNVGCYYVVGVPLGVFLGFYLDLGAKGIWSGMVIGGTMMQTLILLWVTFRTDWTKEVENARARLDKWDDKKQPLLA

SEQ ID NO: 2254 - protein, 220 aa, Zea mays subsp. mays
  peptide (1)..(220): Ceres Seq. ID no. 12407405
MLCLETWYYQIIVLIAGLLKNPEISLDSLSICMTVNAWVFMISVGFNAAASVRVGNELGAGNPRAASFSVLVVTSLSFAVSAVCAVAVLCLRDQLSYLFTGGEAVARAVSDLCPLLALTLVLNGVQPVLSGVAVGCGWQAFVAYVNVGCYYVVGVPLGVFLGFYLDLGAKGIWSGMVIGGTMMQTLILLWVTFRTDWTKEVENARARLDKWDDKKQPLLA

SEQ ID NO: 2255 - DNA, 1763 bp, Zea mays subsp. mays
  misc_feature (1)..(1763): Ceres Seq. ID no. 12410839
  misc_feature (1)..(1763): Ortholog of  Ceres SEQ ID NO 14303423 as cited in SEQ ID NO 54243
  misc_feature (1)..(1763): Ortholog of  Ceres SEQ ID NO 12611314 as cited in SEQ ID NO 56535
  misc_feature (1)..(1763): Ortholog of  Ceres SEQ ID NO 15178046 as cited in SEQ ID NO 60380
  misc_feature (1)..(1763): Ortholog of  Ceres SEQ ID NO 14312016 as cited in SEQ ID NO 60412
  misc_feature (1)..(1763): Ortholog of  Ceres SEQ ID NO 13661438 as cited in SEQ ID NO 61414
ctgcctgcccacgcgctccgctcctcgccccctcctcttcccacgccgccgccgtacccacgggcagggggcacggctggtggctcatcgctcggcccgctccccctccgtcgcaaccggaacataccagcaccggcgctgcggtattattcagctccgtccgccggccggcgcggacggacgccaggcttccttcctgtctgcataacaaagccgccgccattatgatctccacatatgatgcttagcatttgtcgctcgcagctgtattgctcctctagctgcatccttgtactagagcatggcgaagctcgcatctattgctcgcagtatgcttagattcccaaacggaagcatgaggcttgttatggtaacggttattggagcagtccttggctttttcattgggatttcattcccttcggtcagcataacaaagcttcactttccagatagctttatttcgtacattgaagacaaagacgctggactcacgacccaagctatactcaatcatgcttggacttctgccagaaacgcaaggggaaatggtaccgaaccgacttcaaacagtaccttaaagatttatgtcccaacgaaccccaagggtgcagaggggctagcaccaggtatcgttgtatcagagtctgacttccatttgcgcaggttatggggagacccaagtgaggacctgcctttcaaaccaaagtaccttgttacctttactgttggagttgagcagaaagcaaatataaacagagctgtgaagaagttttctgacaattttgctattctgttattccactatgatggccgggtgagtgagtgggatgaatttgagtggtcccagcgagctatccatattagtgtcaggaaacaaactaaatggtggtatgccaagagattcctgcatcctgatattgtggcagcttatgagtacatattcatttgggatgaggaccttggggttgaacattttaatgcagaggagtacatcaaacttgttaagaagcataacttggacatctctcaacctggattagagcctgatcgggggttaacatggcagatgaccaaaagaagaggtgacagtgaggttcacaaggacacagaggagaggcctggctggtgctctgaccctcatcttccaccgtgtgctgcttttgttgaaataatggctccagtcttctcaagagatgcatggagatgtgtgtggcatatgattcagaacgacttggttcatggttggggcttggattttgcgctcaggaaatgtgtggagcctgctcatgaaaagattggagttgtcgattcgcagtggatcgttcaccaagtggttccttctctggggaaccaggggcagtcagaaaacggaagggcgccatgggaaggggtgagggcgcggtgcaggaaggaatggggcatgttccagaccaggatggcggaggcggagaaggcgtattacaagatgatgggcatcacccctccaaactccacgcgtgtctagccgcgcctctcttcttggttttccatccccgccaccctgacctttgtggtggcgggtgagctgatgatactatactatagcactacttgattatagggagttagagatggtgggtgtagctgcttttgatggagaggtccttctgtaagtaaatgcgaggcgaaactgtgatgagaaaacatgtacacgaggatgattacctgatgatgatgatgatgatctatctattataaaaaacatatataccgttaccgag

SEQ ID NO: 2256 - protein, 401 aa, Zea mays subsp. mays
  peptide (1)..(401): Ceres Seq. ID no. 12410840
MAKLASIARSMLRFPNGSMRLVMVTVIGAVLGFFIGISFPSVSITKLHFPDSFISYIEDKDAGLTTQAILNHAWTSARNARGNGTEPTSNSTLKIYVPTNPKGAEGLAPGIVVSESDFHLRRLWGDPSEDLPFKPKYLVTFTVGVEQKANINRAVKKFSDNFAILLFHYDGRVSEWDEFEWSQRAIHISVRKQTKWWYAKRFLHPDIVAAYEYIFIWDEDLGVEHFNAEEYIKLVKKHNLDISQPGLEPDRGLTWQMTKRRGDSEVHKDTEERPGWCSDPHLPPCAAFVEIMAPVFSRDAWRCVWHMIQNDLVHGWGLDFALRKCVEPAHEKIGVVDSQWIVHQVVPSLGNQGQSENGRAPWEGVRARCRKEWGMFQTRMAEAEKAYYKMMGITPPNSTRV

SEQ ID NO: 2257 - protein, 391 aa, Zea mays subsp. mays
  peptide (1)..(391): Ceres Seq. ID no. 12410841
MLRFPNGSMRLVMVTVIGAVLGFFIGISFPSVSITKLHFPDSFISYIEDKDAGLTTQAILNHAWTSARNARGNGTEPTSNSTLKIYVPTNPKGAEGLAPGIVVSESDFHLRRLWGDPSEDLPFKPKYLVTFTVGVEQKANINRAVKKFSDNFAILLFHYDGRVSEWDEFEWSQRAIHISVRKQTKWWYAKRFLHPDIVAAYEYIFIWDEDLGVEHFNAEEYIKLVKKHNLDISQPGLEPDRGLTWQMTKRRGDSEVHKDTEERPGWCSDPHLPPCAAFVEIMAPVFSRDAWRCVWHMIQNDLVHGWGLDFALRKCVEPAHEKIGVVDSQWIVHQVVPSLGNQGQSENGRAPWEGVRARCRKEWGMFQTRMAEAEKAYYKMMGITPPNSTRV

SEQ ID NO: 2258 - protein, 383 aa, Zea mays subsp. mays
  peptide (1)..(383): Ceres Seq. ID no. 12410842
MRLVMVTVIGAVLGFFIGISFPSVSITKLHFPDSFISYIEDKDAGLTTQAILNHAWTSARNARGNGTEPTSNSTLKIYVPTNPKGAEGLAPGIVVSESDFHLRRLWGDPSEDLPFKPKYLVTFTVGVEQKANINRAVKKFSDNFAILLFHYDGRVSEWDEFEWSQRAIHISVRKQTKWWYAKRFLHPDIVAAYEYIFIWDEDLGVEHFNAEEYIKLVKKHNLDISQPGLEPDRGLTWQMTKRRGDSEVHKDTEERPGWCSDPHLPPCAAFVEIMAPVFSRDAWRCVWHMIQNDLVHGWGLDFALRKCVEPAHEKIGVVDSQWIVHQVVPSLGNQGQSENGRAPWEGVRARCRKEWGMFQTRMAEAEKAYYKMMGITPPNSTRV

SEQ ID NO: 2259 - DNA, 1361 bp, Zea mays subsp. mays
  misc_feature (1)..(1361): Ceres Seq. ID no. 12407837
  misc_feature (1)..(1361): Ortholog of  Ceres SEQ ID NO 15176709 as cited in SEQ ID NO 1148
  misc_feature (1)..(1361): Ortholog of  Ceres SEQ ID NO 13658922 as cited in SEQ ID NO 66316
gaaaaaaccgccgccatcgtgtgatggccgccacgcccgacgagcggaagcaggagaggccgatgaggcccgcgacgtcgccggcgagcgtggtggcggacttcgccatgggaggcgcggccgccgtggtggcaaagacgggggccgcgccggtcgagcgcgtcaagctgctgctccagaaccaggccgagatgctgcgccgcggcaccctcacgcgcccctacaggggcatcgccgacgccttcacccgcatcctccgcgaggagggccccgccgcgctttggcgtggcaaccaggccaacgtcatccgctacttccccacccaggcttttaactttgcattcaggggctatttcaaaagcttttttggctatgacagggagaaagacggaaagtggaagtggttagctggaaatgtagcctctggcagtgctgccggagctacaacatcattgctgctataccatctagattatgcaagaacaaggctagctactgatgcaattgaatcacggggaaccaagcgccagttcagggggttgctggatgtttacaagaagacacttacaaccgatggcatgtctggactataccgaggtttcagtgtgtctattacgggaatctccttataccggggtttatattttggtatctatgatagcatgaagcctctagttctagtaggcccattggaggggaatttcttcgccagttttgtgttgggctggacaataactacgttctctggggcttgtgcctatccattcgacacggtccgtcgtagaatgatgttaacttcaggagaaccatttaaatacaagaacggtttccatgcagtaaaactgatagtttcaaccgaagggttcttcacattattcagaggtgttggtgcaaatattctctcagggctggcaggggctggagttctttctgggtatgatcaactccaacggttggcaagccggcatgatcaaaattttgagcacaatatgaaaggggcattgaaatgatgtgcatatgatatgaatagattcagatccttggttgaagtccagatcattcaaatgggatgctcaagcaagaactcctgagcctgaagaacttcgcaaaaaatattgggggaagaaaaaggaaaagttttcctggagatgaatttcacaaggagatggaatcattgcaacaaaagataactcttgtaaacagagagtgctgaatatatattttaatgtgtagatctaatccttcaagtatgagcacatgtacatgttggtgtttcttcgattgttagaggccaatagtatcctatcaatgtgaaatgtaaatccaaatccttcagtaggtcatgaccaagctatttttct

SEQ ID NO: 2260 - protein, 335 aa, Zea mays subsp. mays
  peptide (1)..(335): Ceres Seq. ID no. 12407838
KNRRHRVMAATPDERKQERPMRPATSPASVVADFAMGGAAAVVAKTGAAPVERVKLLLQNQAEMLRRGTLTRPYRGIADAFTRILREEGPAALWRGNQANVIRYFPTQAFNFAFRGYFKSFFGYDREKDGKWKWLAGNVASGSAAGATTSLLLYHLDYARTRLATDAIESRGTKRQFRGLLDVYKKTLTTDGMSGLYRGFSVSITGISLYRGLYFGIYDSMKPLVLVGPLEGNFFASFVLGWTITTFSGACAYPFDTVRRRMMLTSGEPFKYKNGFHAVKLIVSTEGFFTLFRGVGANILSGLAGAGVLSGYDQLQRLASRHDQNFEHNMKGALK

SEQ ID NO: 2261 - protein, 328 aa, Zea mays subsp. mays
  peptide (1)..(328): Ceres Seq. ID no. 12407839
MAATPDERKQERPMRPATSPASVVADFAMGGAAAVVAKTGAAPVERVKLLLQNQAEMLRRGTLTRPYRGIADAFTRILREEGPAALWRGNQANVIRYFPTQAFNFAFRGYFKSFFGYDREKDGKWKWLAGNVASGSAAGATTSLLLYHLDYARTRLATDAIESRGTKRQFRGLLDVYKKTLTTDGMSGLYRGFSVSITGISLYRGLYFGIYDSMKPLVLVGPLEGNFFASFVLGWTITTFSGACAYPFDTVRRRMMLTSGEPFKYKNGFHAVKLIVSTEGFFTLFRGVGANILSGLAGAGVLSGYDQLQRLASRHDQNFEHNMKGALK

SEQ ID NO: 2262 - protein, 315 aa, Zea mays subsp. mays
  peptide (1)..(315): Ceres Seq. ID no. 12407840
MRPATSPASVVADFAMGGAAAVVAKTGAAPVERVKLLLQNQAEMLRRGTLTRPYRGIADAFTRILREEGPAALWRGNQANVIRYFPTQAFNFAFRGYFKSFFGYDREKDGKWKWLAGNVASGSAAGATTSLLLYHLDYARTRLATDAIESRGTKRQFRGLLDVYKKTLTTDGMSGLYRGFSVSITGISLYRGLYFGIYDSMKPLVLVGPLEGNFFASFVLGWTITTFSGACAYPFDTVRRRMMLTSGEPFKYKNGFHAVKLIVSTEGFFTLFRGVGANILSGLAGAGVLSGYDQLQRLASRHDQNFEHNMKGALK

SEQ ID NO: 2263 - DNA, 1336 bp, Zea mays subsp. mays
  misc_feature (1)..(1336): Ceres Seq. ID no. 12407834
  misc_feature (1)..(1336): Ortholog of  Ceres SEQ ID NO 13594740 as cited in SEQ ID NO 51721
  misc_feature (1)..(1336): Ortholog of  Ceres SEQ ID NO 14316497 as cited in SEQ ID NO 58285
  misc_feature (1)..(1336): Ortholog of  Ceres SEQ ID NO 13595944 as cited in SEQ ID NO 68153
atctcgatcgtgctccattccatccacgtatgtagctagagctgccaatcggagatacgtacatggcccgtgtcgcgtcgctgctgctcaccgtcatcgtggctgcggcggcgtcgctgctgctgctgcttgcgccgtcggcggcggagctgacgcgggtggagcacccgcccaagaacgagggctcgctcgccatccttgcagttggcgactgggggcgccgggggcagttcaaccagaccctcgtggcccagcagatgggagtggtgggggagaagttggacatcgacttcgtcatctccacgggcgacaacatctacgacgacggcatcgccaacaccagcgaccccctcttcaaggagtgcttcaccaacatctacaccgcgcagagcctccagacgccttggtacatcgtcctcggcaaccatgactacacgggcaacgcgctggcgcagcaagaccccgccatccgcgaagtcgacagccggtacctcaacctcgccaagtccttcatcgtcaactcaggaatcgcggatttcttcctcctggacacgtcgccgttctacctcaagtactggaacagcagcaagtacgactggagagacgtcgctcctcgcgacacctacatccaaaacctcctcgatgatttggacgacgccctggtccaatccgaggcgccctggaagattgtcgtcggccaccaccccatcagcagcggctgcgagcatgggaacaccactgagctccaggagctcctcagaccaatcctcgaggcgcgcggggtcgacatgtacgtgaacggccacgaccactgcttgcagcacatcagcagcagaaacagcccggttcagttcatgacgagcggcggcgggtccaaggcatgggcgggcaagttcaagaccacgtccgacaagatagagttcatctacgacggccagggattcatgtccatgcaactgagcagcacggaggcgcacctcgtcttctacgacgtcgccggcaatgtcctgcacagctatgacagcaccaaaaacgaagaagaggacgatggctggccagctggacaacaagcagctgtgaggggatcaattgatcgaggcaacttataatatgtgtgtgggccggaagcaattcgtttgtgtatcttatgatgtgtgtatgtgctatgtttaaaatgtgcattattgtgtgcacaagagaggattattgttgtatcttctagctagttgggtcacttgaggggctcagggctagaaaccaatttaaaatcacaatcattggatagtagctggactctcataatataaactatacatataatatatagttactagcc

SEQ ID NO: 2264 - protein, 348 aa, Zea mays subsp. mays
  peptide (1)..(348): Ceres Seq. ID no. 12407835
MARVASLLLTVIVAAAASLLLLLAPSAAELTRVEHPPKNEGSLAILAVGDWGRRGQFNQTLVAQQMGVVGEKLDIDFVISTGDNIYDDGIANTSDPLFKECFTNIYTAQSLQTPWYIVLGNHDYTGNALAQQDPAIREVDSRYLNLAKSFIVNSGIADFFLLDTSPFYLKYWNSSKYDWRDVAPRDTYIQNLLDDLDDALVQSEAPWKIVVGHHPISSGCEHGNTTELQELLRPILEARGVDMYVNGHDHCLQHISSRNSPVQFMTSGGGSKAWAGKFKTTSDKIEFIYDGQGFMSMQLSSTEAHLVFYDVAGNVLHSYDSTKNEEEDDGWPAGQQAAVRGSIDRGNL

SEQ ID NO: 2265 - protein, 283 aa, Zea mays subsp. mays
  peptide (1)..(283): Ceres Seq. ID no. 12407836
MGVVGEKLDIDFVISTGDNIYDDGIANTSDPLFKECFTNIYTAQSLQTPWYIVLGNHDYTGNALAQQDPAIREVDSRYLNLAKSFIVNSGIADFFLLDTSPFYLKYWNSSKYDWRDVAPRDTYIQNLLDDLDDALVQSEAPWKIVVGHHPISSGCEHGNTTELQELLRPILEARGVDMYVNGHDHCLQHISSRNSPVQFMTSGGGSKAWAGKFKTTSDKIEFIYDGQGFMSMQLSSTEAHLVFYDVAGNVLHSYDSTKNEEEDDGWPAGQQAAVRGSIDRGNL

SEQ ID NO: 2266 - DNA, 1514 bp, Zea mays subsp. mays
  misc_feature (1)..(1514): Ceres Seq. ID no. 12408075
  misc_feature (1)..(1514): Ortholog of  Ceres SEQ ID NO 15168355 as cited in SEQ ID NO 57246
aattttcctcgcgccgctgtcccttcgtttccccagacagtgcagaccgaaccgaacaggcgaacagacattggttttccccgccgcgcagcgcgcacacgcctgcctgccatttctaaatccggggccggtcatcctctcttgtttccgtggcaaccgcgcctctcctccttccttgcagcgtgcccctgcggggggctgcgcgtggatctgatctcgtcaattgtcgtgctatgtttttctccagcggcacgaagtgaagaacacgtttttgtgacgccatggctgtggaaagagatatatttggaatttctgggccaacgtatctgaaatcaatcgattggaactgtgagcataatcggagatctgtggctgcaagcttagttcaggctgtatatgtgttggagagagaccggcaactgaatcatcaatcttttgaagccttggcacctgcttggtgggaattcctccattttgagctgattcgcaagctgattgatgatgctgatatgtccatatttggtgcaatatttgaattcaaccctccaaaggaggaagcttctggtgcaaatgctccaagatttgtcatcgcattcagaggcaccataacagagaaggatactatctctagggacctttccctggacctgcaccttgttcaaaatggtctccacaggacctcgagatttaatatagcaatgcaagctgttcaaaacgtagcctcggttttccctggatccacgatttggctagcagggcattcactaggcgctggcctggccatccttacgggaagaaacatggttaagaagggtgtgcttttagaaagctttctcttcaacccaccgttcgttgctgctccagttgaaaggatcagggacgaaagggtaaagcacggatttcgtattgcaagaagcgtgattactgctggattgactattgccatgaaagctaaaactgagggtagcagtcagagatccgtcgctgaagaatctttcagcattttgtcatcatggacgccgtacctgttcgttaatccaggagaccacatttactcagagtacattgggtacttccagcaccggaagaacatggaggatcttggtgccggatttatcgagaagcttgcgacacagaattccatcggagacctgttcttcaaggcactagggtgggagtcagaaccgctgcaccttcttccgtctgccgatctaatcgtcaacgtgagcccttcgtctgatttcaagtacgctcacggcatcagccagtggtggcaacctgagctgaatttgcagtgcagtaaatataggtactcatagttgtacgtcgctagaaatgatgtctcagaaacttagttatcctctctatcccttcagtttattcatgtggttcattctgtttgttgtagtgttggtttcccagctgtggtagactatttcagacatattgactgcattttcctgacctgcaaaatctgttgattgtgtggagtaaagttgtgacatccatcgttc

SEQ ID NO: 2267 - protein, 345 aa, Zea mays subsp. mays
  peptide (1)..(345): Ceres Seq. ID no. 12408076
MAVERDIFGISGPTYLKSIDWNCEHNRRSVAASLVQAVYVLERDRQLNHQSFEALAPAWWEFLHFELIRKLIDDADMSIFGAIFEFNPPKEEASGANAPRFVIAFRGTITEKDTISRDLSLDLHLVQNGLHRTSRFNIAMQAVQNVASVFPGSTIWLAGHSLGAGLAILTGRNMVKKGVLLESFLFNPPFVAAPVERIRDERVKHGFRIARSVITAGLTIAMKAKTEGSSQRSVAEESFSILSSWTPYLFVNPGDHIYSEYIGYFQHRKNMEDLGAGFIEKLATQNSIGDLFFKALGWESEPLHLLPSADLIVNVSPSSDFKYAHGISQWWQPELNLQCSKYRYS

SEQ ID NO: 2268 - protein, 269 aa, Zea mays subsp. mays
  peptide (1)..(269): Ceres Seq. ID no. 12408077
MSIFGAIFEFNPPKEEASGANAPRFVIAFRGTITEKDTISRDLSLDLHLVQNGLHRTSRFNIAMQAVQNVASVFPGSTIWLAGHSLGAGLAILTGRNMVKKGVLLESFLFNPPFVAAPVERIRDERVKHGFRIARSVITAGLTIAMKAKTEGSSQRSVAEESFSILSSWTPYLFVNPGDHIYSEYIGYFQHRKNMEDLGAGFIEKLATQNSIGDLFFKALGWESEPLHLLPSADLIVNVSPSSDFKYAHGISQWWQPELNLQCSKYRYS

SEQ ID NO: 2269 - protein, 206 aa, Zea mays subsp. mays
  peptide (1)..(206): Ceres Seq. ID no. 12408078
MQAVQNVASVFPGSTIWLAGHSLGAGLAILTGRNMVKKGVLLESFLFNPPFVAAPVERIRDERVKHGFRIARSVITAGLTIAMKAKTEGSSQRSVAEESFSILSSWTPYLFVNPGDHIYSEYIGYFQHRKNMEDLGAGFIEKLATQNSIGDLFFKALGWESEPLHLLPSADLIVNVSPSSDFKYAHGISQWWQPELNLQCSKYRYS

SEQ ID NO: 2270 - DNA, 1015 bp, Zea mays subsp. mays
  misc_feature (1)..(1015): Ceres Seq. ID no. 12345896
  misc_feature (1)..(1015): Ortholog of  Ceres SEQ ID NO 13585560 as cited in SEQ ID NO 64470
aaacctcctgccctagtctcctctctgtctcacagcacagcccctgctttccccccaccgtcccacggccgccacgccgccacgcttcttcttccctttcccgtccaacctccaaccctgccggctgccgcggcggcggattaacacaataccttggcgagagacgtaatagtttctgaactcaccgcgctacgcccgatgtcggagacggcggcgccgatcggcctgtcatgggctcccaagcttccttcctttgcaacgaccagcggcggcagcaagatcgaccacgcgccggatccgagcaccgcgcagggctcgctctggaagcgcacgagcgagctcgtggacgggctgttcgtgcccccgagggaccctaggcagctgaataagctggctaggaagaacgtcaaggacaccgccggcaagggctggttcgacatgcccgcgccgaccatcactcccgagttgaagaaggatctcgagattttgcagctgaggcatgtaattgacccaaaaaggcacttcaagcgggcaggaaagtccaaggcccttcccaagtacttccaagttggtacggttgttgagcctgcatctgagttctactcaagtaggctgaaaaatagggaacgcaaggcaacattggtggacgagctgctatcagatcaatctcttaagagctacaggatgcgcaaggtacgggaaattcaggagatccgtacaccaggaggcaaccaaaagtggaagaacaagggcaagaaaacactgaagagggcgaaggataggagaaaatgagactggtgcgcccagctttgtgctccagttgtgagggaaccaaggaacgccttcaagtcgctctagtgcttttctctcaactttgcagtatagattctggttccagtgtagtgttgtggacttcatgatgaattgatttgtatttctataaattttataatattgctgtaacagcggaattcagaaatatgagttggtagactctttcaagttagctagcttc

SEQ ID NO: 2271 - protein, 197 aa, Zea mays subsp. mays
  peptide (1)..(197): Ceres Seq. ID no. 12345897
MSETAAPIGLSWAPKLPSFATTSGGSKIDHAPDPSTAQGSLWKRTSELVDGLFVPPRDPRQLNKLARKNVKDTAGKGWFDMPAPTITPELKKDLEILQLRHVIDPKRHFKRAGKSKALPKYFQVGTVVEPASEFYSSRLKNRERKATLVDELLSDQSLKSYRMRKVREIQEIRTPGGNQKWKNKGKKTLKRAKDRRK

SEQ ID NO: 2272 - protein, 117 aa, Zea mays subsp. mays
  peptide (1)..(117): Ceres Seq. ID no. 12345898
MPAPTITPELKKDLEILQLRHVIDPKRHFKRAGKSKALPKYFQVGTVVEPASEFYSSRLKNRERKATLVDELLSDQSLKSYRMRKVREIQEIRTPGGNQKWKNKGKKTLKRAKDRRK

SEQ ID NO: 2273 - DNA, 1304 bp, Zea mays subsp. mays
  misc_feature (1)..(1304): Ceres Seq. ID no. 12347730
  misc_feature (1)..(1304): Ortholog of  Ceres SEQ ID NO 14314434 as cited in SEQ ID NO 52401
  misc_feature (1)..(1304): Ortholog of  Ceres SEQ ID NO 14303939 as cited in SEQ ID NO 54286
  misc_feature (1)..(1304): Ortholog of  Ceres SEQ ID NO 14307760 as cited in SEQ ID NO 54741
  misc_feature (1)..(1304): Ortholog of  Ceres SEQ ID NO 14313391 as cited in SEQ ID NO 58556
  misc_feature (1)..(1304): Ortholog of  Ceres SEQ ID NO 14307540 as cited in SEQ ID NO 59670
  misc_feature (1)..(1304): Ortholog of  Ceres SEQ ID NO 15179003 as cited in SEQ ID NO 0
  misc_feature (1)..(1304): Ortholog of  Ceres SEQ ID NO 15179235 as cited in SEQ ID NO 0
cctaatcaaaaaaaaatccgcgccatggtcccccatcccgtccctcccctagtcccctccgacctcttctaaaaatcctggtggctggctctcgttgtcctcaagcagtcaagctcctcctcctcctccccccagtccctcccaggctcccaccccgccttgctcgcagcctccccaaaaccctagccctagccctagccctagccctagctctcccacacccgcactgggagatggacggcggcggcacgcaccgcacgccggaagacgtgttccgggatttccgcgcgcggcgggctggtatgatcaaagcgctcaccaccgacgtggagaagttctaccagcagtgtgacccagagaaagagaatctgtgtttgtatggtcttcccaatgaaacatgggaagtgaacctgcctgcagaggaggttcctcctgaacttccagagccagctctgggaattaattttgctcgtgacgggatggatgaaaaagattggctgtcactagtcgcggtgcacagtgatgcttggttgctggctgtggccttttacttcggtgcaagatttggttttgacaaagaatccaggaagcgcctttttgtcatgattaataacctccctacaatatatgaagttgtcacgggaactgccaagaagcaaaccaaggagaaaactcccaaaagcagcagcaagagcaataaagctggcccaaaaccgccacgccagccagaacccaactcaaggggttcgaagatgccacctccgaaggatgaggatgacagcggaggcgaggaagaggaggaagaggaagatcacgaaaacacgctgtgtggttcttgtggtgacaactacggacaggatgagttctggatatgctgtgatgcgtgcgagacttggttccatggcaagtgtgtcaagatcactcctgccaaggccgaacacatcaagcactacaagtgtccgaactgcagcggtagtggcaagagagcccgagcatgatgatgctggctggatatatccatctctcatgcctgacttgatgtaaaacgcccacatggggaccgaatgcccgatggctgttgctttcagtgtaggaccagctgtgtaggttcttgatgtgctgtttgctgtagtatgtcaaagacgttctagatctattgttagtaactagcaactaattgtagtagcctgtatttcttcaatcttctcccagggcgcctgtgctgaactcaaaactgttttagatctaagttgtgcattatgtatcactcatgttagtttgttaaaaagtgtgttagcattcgc

SEQ ID NO: 2274 - protein, 254 aa, Zea mays subsp. mays
  peptide (1)..(254): Ceres Seq. ID no. 12347731
MDGGGTHRTPEDVFRDFRARRAGMIKALTTDVEKFYQQCDPEKENLCLYGLPNETWEVNLPAEEVPPELPEPALGINFARDGMDEKDWLSLVAVHSDAWLLAVAFYFGARFGFDKESRKRLFVMINNLPTIYEVVTGTAKKQTKEKTPKSSSKSNKAGPKPPRQPEPNSRGSKMPPPKDEDDSGGEEEEEEEDHENTLCGSCGDNYGQDEFWICCDACETWFHGKCVKITPAKAEHIKHYKCPNCSGSGKRARA

SEQ ID NO: 2275 - protein, 231 aa, Zea mays subsp. mays
  peptide (1)..(231): Ceres Seq. ID no. 12347732
MIKALTTDVEKFYQQCDPEKENLCLYGLPNETWEVNLPAEEVPPELPEPALGINFARDGMDEKDWLSLVAVHSDAWLLAVAFYFGARFGFDKESRKRLFVMINNLPTIYEVVTGTAKKQTKEKTPKSSSKSNKAGPKPPRQPEPNSRGSKMPPPKDEDDSGGEEEEEEEDHENTLCGSCGDNYGQDEFWICCDACETWFHGKCVKITPAKAEHIKHYKCPNCSGSGKRARA

SEQ ID NO: 2276 - protein, 172 aa, Zea mays subsp. mays
  peptide (1)..(172): Ceres Seq. ID no. 12347733
MDEKDWLSLVAVHSDAWLLAVAFYFGARFGFDKESRKRLFVMINNLPTIYEVVTGTAKKQTKEKTPKSSSKSNKAGPKPPRQPEPNSRGSKMPPPKDEDDSGGEEEEEEEDHENTLCGSCGDNYGQDEFWICCDACETWFHGKCVKITPAKAEHIKHYKCPNCSGSGKRARA

SEQ ID NO: 2277 - DNA, 1020 bp, Zea mays subsp. mays
  misc_feature (1)..(1020): Ceres Seq. ID no. 12355909
  misc_feature (1)..(1020): Ortholog of  Ceres SEQ ID NO 14301996 as cited in SEQ ID NO 56657
cccgcactctctctcaactcattggcagcagcaaccgcagccgcgagggccaagcaggggggacaaggaaaagggccgacgaagaggaaaaaggaagaacgcgtcgcggagccatggggcttggccttggcgtgcgggcggcgcccttcacgtacgcggcgcacgcactggccgtcgcggcggcggccatggttctcgtctggtccatccagttccgcggcgggctcgccatcgagtccaccaacaagaacctcatcttcaacgttcaccctgttcttatgcttatcggttatgttattatcggcggtgaagctataatggtgtacagggtacttccaacatcgaatcatgacacaactaagctgatccatctaattctccacgggattgcacttgtccttggtgcggttggaatatactttgctttcaaaaatcacaatgagagtgggattgccaatctttacagcctgcactcttggattgggataggaacaattactttgtatggtattcagtggataattggattcgtcacgttcttcttccctggtgctgcgccaaacgtgaagaagggtgttcttccttggcacgtactctttgggctctttgtctacatcttagcactggctaatgcagaactcggctttcttgagaagctcactttcctcgagagctcaggtctcgacaaatatggcacagaggcattcttagtgaacttcacagcattggttgtcgtgttatttggtgcctctgttgtggtggctgctatagctccagttcgccttgaagaaccacagggttatgatccaattccagaaaactagtgcaaatgaaatgtacagcgtatgcagttgccaagattggctgttaccacatggagataagatattcatgtctctttattgacggagaagaaggtgatggaattatcacaataaagatgtagacataaatgtgtgtgtatatacattctgtgacacttcaaaatttcagtatatgcaaaactgaatatcctgcttc

SEQ ID NO: 2278 - protein, 273 aa, Zea mays subsp. mays
  peptide (1)..(273): Ceres Seq. ID no. 12355910
RTLSQLIGSSNRSREGQAGGTRKRADEEEKGRTRRGAMGLGLGVRAAPFTYAAHALAVAAAAMVLVWSIQFRGGLAIESTNKNLIFNVHPVLMLIGYVIIGGEAIMVYRVLPTSNHDTTKLIHLILHGIALVLGAVGIYFAFKNHNESGIANLYSLHSWIGIGTITLYGIQWIIGFVTFFFPGAAPNVKKGVLPWHVLFGLFVYILALANAELGFLEKLTFLESSGLDKYGTEAFLVNFTALVVVLFGASVVVAAIAPVRLEEPQGYDPIPEN

SEQ ID NO: 2279 - protein, 236 aa, Zea mays subsp. mays
  peptide (1)..(236): Ceres Seq. ID no. 12355911
MGLGLGVRAAPFTYAAHALAVAAAAMVLVWSIQFRGGLAIESTNKNLIFNVHPVLMLIGYVIIGGEAIMVYRVLPTSNHDTTKLIHLILHGIALVLGAVGIYFAFKNHNESGIANLYSLHSWIGIGTITLYGIQWIIGFVTFFFPGAAPNVKKGVLPWHVLFGLFVYILALANAELGFLEKLTFLESSGLDKYGTEAFLVNFTALVVVLFGASVVVAAIAPVRLEEPQGYDPIPEN

SEQ ID NO: 2280 - protein, 211 aa, Zea mays subsp. mays
  peptide (1)..(211): Ceres Seq. ID no. 12355912
MVLVWSIQFRGGLAIESTNKNLIFNVHPVLMLIGYVIIGGEAIMVYRVLPTSNHDTTKLIHLILHGIALVLGAVGIYFAFKNHNESGIANLYSLHSWIGIGTITLYGIQWIIGFVTFFFPGAAPNVKKGVLPWHVLFGLFVYILALANAELGFLEKLTFLESSGLDKYGTEAFLVNFTALVVVLFGASVVVAAIAPVRLEEPQGYDPIPEN

SEQ ID NO: 2281 - DNA, 1155 bp, Zea mays subsp. mays
  misc_feature (1)..(1155): Ceres Seq. ID no. 12353616
  misc_feature (1)..(1155): Ortholog of  Ceres SEQ ID NO 15171359 as cited in SEQ ID NO 57279
  misc_feature (1)..(1155): Ortholog of  Ceres SEQ ID NO 15168502 as cited in SEQ ID NO 60095
  misc_feature (1)..(1155): Ortholog of  Ceres SEQ ID NO 14314084 as cited in SEQ ID NO 63256
  misc_feature (1)..(1155): Ortholog of  Ceres SEQ ID NO 15169466 as cited in SEQ ID NO 66135
cacgggcgcctgcctctacgaggtggcctacggcgacggctcctacaccgtgggcgacttcgccaccgagacgctcacgctgggggactccaccccggtcggcaacgtcgccatcgggtgcggccacgacaacgagggcctcttcgtcggcgccgcggggctgctggcgctgggcggcgggccgctctccttcccgtcccagatctccgcgtccaccttctcctactgcctcgtggaccgcgactccccggccgcgtccacgctccagttcggcgacggcgccgccgaggcgggcaccgtgacggcgcctctcgtgcgcagcccgcgcacgagcaccttctactacgtggcgctgtcgggcatctcggtgggcgggcagccgctgtccatcccggcatccgccttcgccatggacgccacgtcgggctcgggcggcgtcatcgtggactccggcaccgccgtgacgcggctccagtccgccgcctacgcggcgctccgcgacgccttcgtccagggcgcgccgtcgcttccccggacctccggggtgtcgctgttcgacacgtgctacgacctgtcggaccggacgagcgtggaggtgcccgcggtgtcgctgcggttcgagggcggcggcgcgctgcggctgccggcgaagaactacctgatccccgtggacggagccggcacctactgcctggccttcgcgccgacgaacgcggccgtgtccatcatcgggaacgtgcagcagcagggcacccgcgtcagcttcgacaccgccaggggcgccgtcggcttcacccccaacaagtgctagcctagcctagcctaagcctgccttctggccctgttagccacggttgtcagtagtaatgacaagccggtgtttaattagcgggagaatgattagatggggggtaattaagcggtgggccctgccgggtctggggaggagcgaaaggcaaaggcgaggacagatgatgccattgccatgccagcctgtgtccggccgatgggtccagctccagcagtgtttctctctttctctcgagtatgcgtgcgtggagccttgtcatgacgaattagatcgtgggggctcccaagttaagagtatttatttttattttatttgctatgtcaagaaaatggaagtttccatcc

SEQ ID NO: 2282 - protein, 271 aa, Zea mays subsp. mays
  peptide (1)..(271): Ceres Seq. ID no. 12353617
HGRLPLRGGLRRRLLHRGRLRHRDAHAGGLHPGRQRRHRVRPRQRGPLRRRRGAAGAGRRAALLPVPDLRVHLLLLPRGPRLPGRVHAPVRRRRRRGGHRDGASRAQPAHEHLLLRGAVGHLGGRAAAVHPGIRLRHGRHVGLGRRHRGLRHRRDAAPVRRLRGAPRRLRPGRAVASPDLRGVAVRHVLRPVGPDERGGARGVAAVRGRRRAAAAGEELPDPRGRSRHLLPGLRADERGRVHHRERAAAGHPRQLRHRQGRRRLHPQQVLA

SEQ ID NO: 2283 - protein, 269 aa, Zea mays subsp. mays
  peptide (1)..(269): Ceres Seq. ID no. 12353618
TGACLYEVAYGDGSYTVGDFATETLTLGDSTPVGNVAIGCGHDNEGLFVGAAGLLALGGGPLSFPSQISASTFSYCLVDRDSPAASTLQFGDGAAEAGTVTAPLVRSPRTSTFYYVALSGISVGGQPLSIPASAFAMDATSGSGGVIVDSGTAVTRLQSAAYAALRDAFVQGAPSLPRTSGVSLFDTCYDLSDRTSVEVPAVSLRFEGGGALRLPAKNYLIPVDGAGTYCLAFAPTNAAVSIIGNVQQQGTRVSFDTARGAVGFTPNKC

SEQ ID NO: 2284 - DNA, 1821 bp, Zea mays subsp. mays
  misc_feature (1)..(1821): Ceres Seq. ID no. 12443245
  misc_feature (1)..(1821): Ortholog of  Ceres SEQ ID NO 15179641 as cited in SEQ ID NO 56414
  misc_feature (1)..(1821): Ortholog of  Ceres SEQ ID NO 15176851 as cited in SEQ ID NO 61348
  misc_feature (1)..(1821): Ortholog of  Ceres SEQ ID NO 14316049 as cited in SEQ ID NO 67036
  misc_feature (1)..(1821): Ortholog of  Ceres SEQ ID NO 14313252 as cited in SEQ ID NO 67134
gcacgagaccattacctagaacatcctaatcgaaaacttttaatttcatttcctctcttttgacgacggaaacgaggcacgatcacacgctgaacgcttccgccccgccgccaccttccccgctctcctccctccgctcgcctccgcttccgttccgcgccctgcccccggaaggcaagcaaagccctcgctacttgcggagcgtcgttggtcaaaccctagcacacgtacgagcaggccagccccgcccgctcccattcccaggccctcatccatggcggcgctctccgtgcccctccacgccgccgccggatcccgcgccgccgcggccgaccccgtcaaggttccgtgcgtgaggagcactggttcagcccatttcggccgcgccttcccctccgtcgcggtctcctctttggctgcgaggcacatcgagccgatgagagcgatagctacacaggcgccccctgccgtgccacaatatttgagtggcgagaagacaaagatcggcatcaacggctttgggcggattggcaggttggtcctgcgaattgcaactagcagagacgatattgaagttgtggctgtgaatgaccctttcgttgatgctaagtacatggcctatatgttcaagtatgactctactcatggcccgtttaaaggttctatttgtgttgtggatgattcaaccctggagatcaatgggaagaaggtcacaattacaagcaaaagagatcctgcagagattccatggggtaactttggggctgaatatgttgttgaatcttctggtgtctttacaacgactgataaagcatcagcacacttaaagggtggtgctaagaaagtggtgatatctgcaccatcagcagatgctcccatgtttgtagttggagttaatgagaatagctatgattcgaagatgaatgttgtttctaatgcaagttgcaccaccaactgccttgctccacttgccaaggttgtacatgaggaatttggcatcgtggagggccttatgacaactgttcatgccacaacagccacccagaagaccgttgatggtccttcaatgaaggattggagaggaggacgtggtgctggccaaaacataattcctagctccactggtgcagcaaaggctgttggaaaagttctgcctgagctgaatggaaagctcactggcatggccttccgagttccaacaccaaatgtctctgttgtggacttgacatgccggattgagaaaaacgcctcctatgatgatgtgaaagcagccatcaaggcggcatcagagggtgcactcaaaggtattcttggctacacagacgaggacgttgtttccaatgattttgttggtgattctaggtcaagcatctttgatgccaaggctggtatcggactgagctcttctttcatgaagcttgtgtcttggtatgacaacgagtggggctacagcaaccgggttctggatctgatcgcccacatggctctcgtcagtgccgccgccaagctctgatgtccgtactcgtttctccagtagtagcttagaaaaaaagactgcaattttgacggccattttctgttagctgttgtttggaataagatcaaatgctggaacacttcgaactcgcgcgagactggactcagatccatggcctgtattttagttgtagaagtgggcaaatttgcaccgtagtaccctggcatggttatatgcggaattgttgattgatgagtcgttgtacggtttgtcgacttgatgatatgttgatgtgggagcccctgaatgaggcggtattaatggaaatataggatggcaatggc

SEQ ID NO: 2285 - protein, 412 aa, Zea mays subsp. mays
  peptide (1)..(412): Ceres Seq. ID no. 12443246
MAALSVPLHAAAGSRAAAADPVKVPCVRSTGSAHFGRAFPSVAVSSLAARHIEPMRAIATQAPPAVPQYLSGEKTKIGINGFGRIGRLVLRIATSRDDIEVVAVNDPFVDAKYMAYMFKYDSTHGPFKGSICVVDDSTLEINGKKVTITSKRDPAEIPWGNFGAEYVVESSGVFTTTDKASAHLKGGAKKVVISAPSADAPMFVVGVNENSYDSKMNVVSNASCTTNCLAPLAKVVHEEFGIVEGLMTTVHATTATQKTVDGPSMKDWRGGRGAGQNIIPSSTGAAKAVGKVLPELNGKLTGMAFRVPTPNVSVVDLTCRIEKNASYDDVKAAIKAASEGALKGILGYTDEDVVSNDFVGDSRSSIFDAKAGIGLSSSFMKLVSWYDNEWGYSNRVLDLIAHMALVSAAAKL

SEQ ID NO: 2286 - protein, 358 aa, Zea mays subsp. mays
  peptide (1)..(358): Ceres Seq. ID no. 12443247
MRAIATQAPPAVPQYLSGEKTKIGINGFGRIGRLVLRIATSRDDIEVVAVNDPFVDAKYMAYMFKYDSTHGPFKGSICVVDDSTLEINGKKVTITSKRDPAEIPWGNFGAEYVVESSGVFTTTDKASAHLKGGAKKVVISAPSADAPMFVVGVNENSYDSKMNVVSNASCTTNCLAPLAKVVHEEFGIVEGLMTTVHATTATQKTVDGPSMKDWRGGRGAGQNIIPSSTGAAKAVGKVLPELNGKLTGMAFRVPTPNVSVVDLTCRIEKNASYDDVKAAIKAASEGALKGILGYTDEDVVSNDFVGDSRSSIFDAKAGIGLSSSFMKLVSWYDNEWGYSNRVLDLIAHMALVSAAAKL

SEQ ID NO: 2287 - protein, 299 aa, Zea mays subsp. mays
  peptide (1)..(299): Ceres Seq. ID no. 12443248
MAYMFKYDSTHGPFKGSICVVDDSTLEINGKKVTITSKRDPAEIPWGNFGAEYVVESSGVFTTTDKASAHLKGGAKKVVISAPSADAPMFVVGVNENSYDSKMNVVSNASCTTNCLAPLAKVVHEEFGIVEGLMTTVHATTATQKTVDGPSMKDWRGGRGAGQNIIPSSTGAAKAVGKVLPELNGKLTGMAFRVPTPNVSVVDLTCRIEKNASYDDVKAAIKAASEGALKGILGYTDEDVVSNDFVGDSRSSIFDAKAGIGLSSSFMKLVSWYDNEWGYSNRVLDLIAHMALVSAAAKL

SEQ ID NO: 2288 - DNA, 1476 bp, Zea mays subsp. mays
  misc_feature (1)..(1476): Ceres Seq. ID no. 12410810
  misc_feature (1)..(1476): Ortholog of  Ceres SEQ ID NO 14311934 as cited in SEQ ID NO 51605
  misc_feature (1)..(1476): Ortholog of  Ceres SEQ ID NO 13598313 as cited in SEQ ID NO 68293
atctcttctcctcacaaggcttcctcccaccacctccagtcctccaccggaccaccacctccaccactccctctctcacgacacgcgcaaaccgcttgaaccctagctggcggcgggaggcggaggtggctccgggatgacgcggcggtgctcgcactgcagccacaacgggcacaactcgcggacgtgccccaaccgcggggtcaagatcttcggggtgcacctcaccgatggctcggccatccgcaagagcgcgagcatggggaacctctccctcctctccgcgggatccaccagcggcggcgcttcccccgccgacgggcccgacctcgccgacggcggcgggggctacgcctccgacgacttcgtccaggggtcgtcctccgccagccgcgatcgcaagaaaggtgttccttggactgaagaagaacaccggaggtttttgctgggattacaaaagctcgggaaaggggattggcgaggaatttctcgtaattttgtggtctcaagaacacctactcaagtagcaagtcatgctcaaaagtattttatacgccaatcaaatatgagcagaaggaagagaaggtctagccttttcgacatggttcctgatgagtccatggaccttccaccccttcctggaagtcaagaaccagagatctcacagttaaatcaaccgccactgccgcctcctgtggaggaggaggtggaatcgatggagtcagatacttctgctgtcgcagagagttctggagcttctgctctcatgcccgagagtttacagcctacctatccgatgattgttccagcttatttctcgccgttcttgcaattctcagttcctttctggccaaatcaggaagatggaggcgatcttccccaagaaacacacgagattgtcaagcctgttgcagttcattcccagaatccaattaatgttgatgaactcgtgggcatgtcaaagctaagcatatgggagcatggtcaggagacagtgtctacttctctgtcgctaaatctgctagggggtcaaaataggcagtcggctttccatgcaaaccctcaaacaagagctcaagcctgatcatcccctaccagcacagaaactgtattttagatggaatcctgggcaaaataagctttgctctttttttcttcttctaaatttaagatcaccgagtcacaaggtcactggttggaagtagcttctccgtatttgcggggaaagcctgccctggtttctctccatcatcagagccttcaatattgtcttttttatatatttaagattgaccgtgctctgtagcttgtatcatgtgctgtaagttatgctatgtatgaatgtacctgtagtttgtatggcacgcatggtatgacactcttatgttagcaaagtcattaatgttagtgctgatctttatggttgtaatgttataaacttctaaaaaaaagtataagccagttcttttcaactgc

SEQ ID NO: 2289 - protein, 315 aa, Zea mays subsp. mays
  peptide (1)..(315): Ceres Seq. ID no. 12410811
MTRRCSHCSHNGHNSRTCPNRGVKIFGVHLTDGSAIRKSASMGNLSLLSAGSTSGGASPADGPDLADGGGGYASDDFVQGSSSASRDRKKGVPWTEEEHRRFLLGLQKLGKGDWRGISRNFVVSRTPTQVASHAQKYFIRQSNMSRRKRRSSLFDMVPDESMDLPPLPGSQEPEISQLNQPPLPPPVEEEVESMESDTSAVAESSGASALMPESLQPTYPMIVPAYFSPFLQFSVPFWPNQEDGGDLPQETHEIVKPVAVHSQNPINVDELVGMSKLSIWEHGQETVSTSLSLNLLGGQNRQSAFHANPQTRAQA

SEQ ID NO: 2290 - protein, 274 aa, Zea mays subsp. mays
  peptide (1)..(274): Ceres Seq. ID no. 12410812
MGNLSLLSAGSTSGGASPADGPDLADGGGGYASDDFVQGSSSASRDRKKGVPWTEEEHRRFLLGLQKLGKGDWRGISRNFVVSRTPTQVASHAQKYFIRQSNMSRRKRRSSLFDMVPDESMDLPPLPGSQEPEISQLNQPPLPPPVEEEVESMESDTSAVAESSGASALMPESLQPTYPMIVPAYFSPFLQFSVPFWPNQEDGGDLPQETHEIVKPVAVHSQNPINVDELVGMSKLSIWEHGQETVSTSLSLNLLGGQNRQSAFHANPQTRAQA

SEQ ID NO: 2291 - protein, 172 aa, Zea mays subsp. mays
  peptide (1)..(172): Ceres Seq. ID no. 12410813
MSRRKRRSSLFDMVPDESMDLPPLPGSQEPEISQLNQPPLPPPVEEEVESMESDTSAVAESSGASALMPESLQPTYPMIVPAYFSPFLQFSVPFWPNQEDGGDLPQETHEIVKPVAVHSQNPINVDELVGMSKLSIWEHGQETVSTSLSLNLLGGQNRQSAFHANPQTRAQA

SEQ ID NO: 2292 - DNA, 1445 bp, Zea mays subsp. mays
  misc_feature (1)..(1445): Ceres Seq. ID no. 12373364
  misc_feature (1)..(1445): Ortholog of  Ceres SEQ ID NO 15169607 as cited in SEQ ID NO 69301
atacatcccttgcctctttctcctcccccgcatctgcttctttctctccacgccaacccgacaccgcgcggtcggctcggctcggccatccccgccagctcccgctcgagatcccagcgccatgacgatcggcgtcgctctcttgctcgacctcacctcccgcctgccccgcgccggggcatccgccgcctccgcagccgtccgctcccaccccggtctctctaccaccgccttcgccgcgactgccgcggccgcgttgtcgtcctccggggtgccgctctccgcgcgccacctcttcggttttcatgggtttactgttgctcattgtgatgctggcacacctgcctggatggaatgatggttctgatgatcttgttaatgagattaataccaagattattgattccttgcaatatgcaagaaaagactacttccagaacacaacaaaggaatacccttcagagctgaagccactcttttctgcctttgggttgaaaaattttactatcacaaccctaaggtctttcctattatattatttgccactcatacaacctaaacctcacactggttctgatgatgaggatgatgatctgcttcatgacactcaagagaaaaccatggatctggttactcccttctacaattcagtaaagcaaatcgtgcgggagacttctattgtaacgaccagacgagtatttgaaaggattgtagttcgtcatgtttcacaaagaacagcatggaaacttctcaaagatgcttcaaaatcatcaaaaaggaaagctgcaagggggatgccaactccacagtacacatactgtgttgccagaacaactttccgagcacatgcactgggaataaccgctgcttgggtagtgcaatccataattgaagtatacagatgtttcatccgtaagcctagtgaggactgtgaagcactatcaagcgacggcaatgcacagtttgacgatatgaataaattcagattgtttgggaggaagatttatgggattaccatcaaaagttgtttctctttggttttggcctcagctggagcaggcattggtgccctcgtgcatccagtgcatggacaatggttgggttgtgccttgggagatattgcaggtccaattatcgctataattgtttttgagaagatgcagctaccactatgagaaactggatttttggcgaccactggttttgggtcccttgtgcaagtcatggccttcagtcttctgtgtggttggagatccctgatctaacttgaaagttcacagttgatgaataacagctttcacctcagtgctcgtagttttgtagctccctttacagatgccttcgggtcttgtgggacatgagcatgtacttttgcagttttgctaaattttgtactctcagatttgaagaatccaaacaagaaatttaattttactagatttgag

SEQ ID NO: 2293 - protein, 289 aa, Zea mays subsp. mays
  peptide (1)..(289): Ceres Seq. ID no. 12373365
MGLLLLIVMLAHLPGWNDGSDDLVNEINTKIIDSLQYARKDYFQNTTKEYPSELKPLFSAFGLKNFTITTLRSFLLYYLPLIQPKPHTGSDDEDDDLLHDTQEKTMDLVTPFYNSVKQIVRETSIVTTRRVFERIVVRHVSQRTAWKLLKDASKSSKRKAARGMPTPQYTYCVARTTFRAHALGITAAWVVQSIIEVYRCFIRKPSEDCEALSSDGNAQFDDMNKFRLFGRKIYGITIKSCFSLVLASAGAGIGALVHPVHGQWLGCALGDIAGPIIAIIVFEKMQLPL

SEQ ID NO: 2294 - protein, 281 aa, Zea mays subsp. mays
  peptide (1)..(281): Ceres Seq. ID no. 12373366
MLAHLPGWNDGSDDLVNEINTKIIDSLQYARKDYFQNTTKEYPSELKPLFSAFGLKNFTITTLRSFLLYYLPLIQPKPHTGSDDEDDDLLHDTQEKTMDLVTPFYNSVKQIVRETSIVTTRRVFERIVVRHVSQRTAWKLLKDASKSSKRKAARGMPTPQYTYCVARTTFRAHALGITAAWVVQSIIEVYRCFIRKPSEDCEALSSDGNAQFDDMNKFRLFGRKIYGITIKSCFSLVLASAGAGIGALVHPVHGQWLGCALGDIAGPIIAIIVFEKMQLPL

SEQ ID NO: 2295 - protein, 184 aa, Zea mays subsp. mays
  peptide (1)..(184): Ceres Seq. ID no. 12373367
MDLVTPFYNSVKQIVRETSIVTTRRVFERIVVRHVSQRTAWKLLKDASKSSKRKAARGMPTPQYTYCVARTTFRAHALGITAAWVVQSIIEVYRCFIRKPSEDCEALSSDGNAQFDDMNKFRLFGRKIYGITIKSCFSLVLASAGAGIGALVHPVHGQWLGCALGDIAGPIIAIIVFEKMQLPL

SEQ ID NO: 2296 - DNA, 1149 bp, Zea mays subsp. mays
  misc_feature (1)..(1149): Ceres Seq. ID no. 12341590
  misc_feature (1)..(1149): Ortholog of  Ceres SEQ ID NO 15172792 as cited in SEQ ID NO 52134
  misc_feature (1)..(1149): Ortholog of  Ceres SEQ ID NO 13502622 as cited in SEQ ID NO 56443
  misc_feature (1)..(1149): Ortholog of  Ceres SEQ ID NO 12624901 as cited in SEQ ID NO 62597
cccgttcccatcagatcggatcgatcactcgacgagacatctcgcctcctcggccaatcggcatggcggcgctgctgctccgtagactcgccggaacccaccgcggccgcgtcccgctgggggccgccgccgccgccgcctgcggtggagcgacgctcttctacgcgtcgtcttcccccaccgttgcgcacttggaggagacgggcaaagccgctgagcaagttgcacttaaccctgataagtggctagagttcaagctccaagagaaggcaacagtcagtcacaactcacagttattcaggttttcatttgatccatcaactaaactgggacttgatgttgcctcgtgcctcatcacaagggcacctataggcgaggaagctgagggaagaaggaaatatgtgattcgcccgtacacacctatctctgatccagactctaaagggtattttgacctattgatcaaggtttatcctgatggaaaaatgagtcagtattttgcaagtttgaagccaggagatgttgttgaagtcaaagggcccattgaaaagctcagatacaacccgaacatgaaaaaacaaattgggatgatcgctggtggttctggtataacaccaatgctgcaggttgtcagggctatcctcaaaaaccctaatgacaacactcaggtctccttaatttacgccaatgtgtcaccagatgatatcttgctcaaaagagaactggatagacttgccagtagctatcctaacttcaaggtattttatacagttgataaaccgtcaactgactggaggggtggtgttggttttgtatcaaaggacatggttttgaaaggtttgccaggcccagcggaggactctctgattcttgtttgtggtccaccaggaatgatgaatcacatatctggagacaaggccaaggatagatcacagggcgagctctctggcgttctgaaagacttaggatacaccgcagagatggtatacaaattctgagaagacagtagtagactctgctgacgcacacacattcttgctgccctgcagtcaataaaccacacctgaactttttgttgttgttgcagcatctggctctgaactggaaacagttttgacttgtttccctatgtaataataatgctcatcc

SEQ ID NO: 2297 - protein, 331 aa, Zea mays subsp. mays
  peptide (1)..(331): Ceres Seq. ID no. 12341591
RSHQIGSITRRDISPPRPIGMAALLLRRLAGTHRGRVPLGAAAAAACGGATLFYASSSPTVAHLEETGKAAEQVALNPDKWLEFKLQEKATVSHNSQLFRFSFDPSTKLGLDVASCLITRAPIGEEAEGRRKYVIRPYTPISDPDSKGYFDLLIKVYPDGKMSQYFASLKPGDVVEVKGPIEKLRYNPNMKKQIGMIAGGSGITPMLQVVRAILKNPNDNTQVSLIYANVSPDDILLKRELDRLASSYPNFKVFYTVDKPSTDWRGGVGFVSKDMVLKGLPGPAEDSLILVCGPPGMMNHISGDKAKDRSQGELSGVLKDLGYTAEMVYKF

SEQ ID NO: 2298 - protein, 311 aa, Zea mays subsp. mays
  peptide (1)..(311): Ceres Seq. ID no. 12341592
MAALLLRRLAGTHRGRVPLGAAAAAACGGATLFYASSSPTVAHLEETGKAAEQVALNPDKWLEFKLQEKATVSHNSQLFRFSFDPSTKLGLDVASCLITRAPIGEEAEGRRKYVIRPYTPISDPDSKGYFDLLIKVYPDGKMSQYFASLKPGDVVEVKGPIEKLRYNPNMKKQIGMIAGGSGITPMLQVVRAILKNPNDNTQVSLIYANVSPDDILLKRELDRLASSYPNFKVFYTVDKPSTDWRGGVGFVSKDMVLKGLPGPAEDSLILVCGPPGMMNHISGDKAKDRSQGELSGVLKDLGYTAEMVYKF

SEQ ID NO: 2299 - protein, 170 aa, Zea mays subsp. mays
  peptide (1)..(170): Ceres Seq. ID no. 12341593
MSQYFASLKPGDVVEVKGPIEKLRYNPNMKKQIGMIAGGSGITPMLQVVRAILKNPNDNTQVSLIYANVSPDDILLKRELDRLASSYPNFKVFYTVDKPSTDWRGGVGFVSKDMVLKGLPGPAEDSLILVCGPPGMMNHISGDKAKDRSQGELSGVLKDLGYTAEMVYKF

SEQ ID NO: 2300 - DNA, 1323 bp, Zea mays subsp. mays
  misc_feature (1)..(1323): Ceres Seq. ID no. 12410806
  misc_feature (1)..(1323): Ortholog of  Ceres SEQ ID NO 14311912 as cited in SEQ ID NO 51609
  misc_feature (1)..(1323): Ortholog of  Ceres SEQ ID NO 14307377 as cited in SEQ ID NO 54487
  misc_feature (1)..(1323): Ortholog of  Ceres SEQ ID NO 14312933 as cited in SEQ ID NO 58936
gcctctcttgtcatcatcggcctgccgcctgcccgcctgctcctcctgccccattaacgccgccggctgccgtgccgccgcgtcctgctccccgccaccgcgttcctcgcccgaagcaccgccgcggcctcgcgccaccgcccagaaaccatctccgggcctcgttcgaccgaagcgccttgtgtcatatctccgcgacctagccgccgcccgccgcngacgctgccgtcgtcgtcatcctcgctggcggtgctgtacctgcgtgccagcgcagatccatccgagctcggattgatttcttcctttgctgtactgtcataaccgaactaaaacagtttcagaggaagcatcgcgattgccatggaagctgggagaatggatcagccatttatggctgctatcaatagccagcctttcgtggaggatattgagccagtgaagaaagccagtggggacatgcctgcgacaacaggaagcggatgcttcgaatgcaacatctgccttgattttgcatcagaaccagtggttactttctgtggtcatctctactgctggccttgtatctacgagtggctgcgccctggggtggagtcagctgccagcgacaacagcagttcggcaaggcggcaatgtcctgtatgcaaggcaacactctcaacggacacccttgtgccactatacggccgtggaggcaactcaaagaagtcacttgatggcatggccatcccgcgccgccccatggtacaccgggagactgttgaggagcaacagaatgcacagagcaatgtcaatgaccagcactaccaccagagcatggaagacaactctcagcgccagccattgctgcaagcgcaccaccatcccattcccactgggtttgacttcatctaccctccagcaccagtagggcgtggcttgatccactcaactgccggaggggtgctcggagggatggcagagattgtgcttcccttggcgctccgtggccagatgccagcgagcttgtactacacgaatccataccatgctgcgacgcagaacgtgaaccccaggctgaggcggcatcagatggaaatcgagaggtccctgcaccagatctggttcttcctctgtgtgtttgtggtgctgtgcctgctcttgttctgagacaagactattctatacacctctttgtagatattgaaagtgggagggggatactaatggatgatgcgtatagtaaacagggtaatggtctgtgtcgacaggcatgtgcttaagcatgctgatgtagagttgtaatatgatgagacacggaggtgaaatgcatatttcattcttccc

SEQ ID NO: 2301 - protein, 261 aa, Zea mays subsp. mays
  peptide (1)..(261): Ceres Seq. ID no. 12410807
MEAGRMDQPFMAAINSQPFVEDIEPVKKASGDMPATTGSGCFECNICLDFASEPVVTFCGHLYCWPCIYEWLRPGVESAASDNSSSARRQCPVCKATLSTDTLVPLYGRGGNSKKSLDGMAIPRRPMVHRETVEEQQNAQSNVNDQHYHQSMEDNSQRQPLLQAHHHPIPTGFDFIYPPAPVGRGLIHSTAGGVLGGMAEIVLPLALRGQMPASLYYTNPYHAATQNVNPRLRRHQMEIERSLHQIWFFLCVFVVLCLLLF

SEQ ID NO: 2302 - protein, 256 aa, Zea mays subsp. mays
  peptide (1)..(256): Ceres Seq. ID no. 12410808
MDQPFMAAINSQPFVEDIEPVKKASGDMPATTGSGCFECNICLDFASEPVVTFCGHLYCWPCIYEWLRPGVESAASDNSSSARRQCPVCKATLSTDTLVPLYGRGGNSKKSLDGMAIPRRPMVHRETVEEQQNAQSNVNDQHYHQSMEDNSQRQPLLQAHHHPIPTGFDFIYPPAPVGRGLIHSTAGGVLGGMAEIVLPLALRGQMPASLYYTNPYHAATQNVNPRLRRHQMEIERSLHQIWFFLCVFVVLCLLLF

SEQ ID NO: 2303 - protein, 251 aa, Zea mays subsp. mays
  peptide (1)..(251): Ceres Seq. ID no. 12410809
MAAINSQPFVEDIEPVKKASGDMPATTGSGCFECNICLDFASEPVVTFCGHLYCWPCIYEWLRPGVESAASDNSSSARRQCPVCKATLSTDTLVPLYGRGGNSKKSLDGMAIPRRPMVHRETVEEQQNAQSNVNDQHYHQSMEDNSQRQPLLQAHHHPIPTGFDFIYPPAPVGRGLIHSTAGGVLGGMAEIVLPLALRGQMPASLYYTNPYHAATQNVNPRLRRHQMEIERSLHQIWFFLCVFVVLCLLLF

SEQ ID NO: 2304 - DNA, 1361 bp, Zea mays subsp. mays
  misc_feature (1)..(1361): Ceres Seq. ID no. 13636326
  misc_feature (1)..(1361): Ortholog of  Ceres SEQ ID NO 14308880 as cited in SEQ ID NO 58793
  misc_feature (1)..(1361): Ortholog of  Ceres SEQ ID NO 13654557 as cited in SEQ ID NO 68444
attcgcaccaccgccgcgccgcccaaatcacagccaccgccgccatggccgcctccagccgccctctcgtctccgtgaaagccctggagggcgacatggtcacggacgcccccggcatcgccttaccgcccgtcttcggggcaccgatccgcccggacgtggtccgcttcacccacaagctgctgtcctgcaacaagcgccagccttacgcagtctcccgccgcgctggccaccagacgtcggccgagtcctggggtacgggccgcgctgtgtcccgtatcccccgtgtccccggcggcggcacccaccgcgccggccagggagcattcggcaacatgtgccgcggcggacgcatgttcgcgcccaccaagatctggcgcaagtggcaccgccgcgtcaacgtcaacctccgccgcgtcgccgtcgcctcggcgctcgccgccaccgccgtcccggccctcgtccaggcgcgcggccaccgcatcgagaccgttcccgagatgcccctggttatctccgactcggcagagtccatcgagaagacctcccaggcgctcaagatcctgaagcaggtcggcgcctacgccgacgccgagaaggccaaggactccgtcggcatccgccccggcaagggtaagatgcgcaaccgccgctacattaaccgcaagggcccgctcgtcgtctacggcacagaaggctccaaggtcgtcaaggccttccgcaacctccccggcgtggacgtcgccaacgtcgagcgcctcaacctgctcgacctcgcccccggtggccacctcgggcgctttgtgatctggaccgagagcgcgttcaagaagctcgaggaggtgtatgggagcttcgacgcgccgtcgcagaagaagaagggctttgttctgccgaggcccaagatggccaacgctgacctgggcaggattatcaactctaacgaggtgcagtctgtggttaagccactcaacaaggaggtgaagcgcagggagaagaggaagaacccgctcaagaacatggctgctgtgctcaagctgaacccctacctcggcactgcccggaagatggccacccttgctgaggctgcccgagtcaaggcccggaaggagaagcttgattccaagaggaccaagcttacctcggaggagactgccaaggtcaaggctgccggcaaggcgtggtacaagaccatgatctcggacagtgactacaccgagtttgagaacttcaccaagtggctcggagtgacgcagtgaagcggcctttgagacctagttaagttttgattagttgtgtcgctgaactttgtattgagacgaaatagtattttatcaatctgtcttatcctgcatcttcrc

SEQ ID NO: 2305 - protein, 418 aa, Zea mays subsp. mays
  peptide (1)..(418): Ceres Seq. ID no. 15219393
SHHRRAAQITATAAMAASSRPLVSVKALEGDMVTDAPGIALPPVFGAPIRPDVVRFTHKLLSCNKRQPYAVSRRAGHQTSAESWGTGRAVSRIPRVPGGGTHRAGQGAFGNMCRGGRMFAPTKIWRKWHRRVNVNLRRVAVASALAATAVPALVQARGHRIETVPEMPLVISDSAESIEKTSQALKILKQVGAYADAEKAKDSVGIRPGKGKMRNRRYINRKGPLVVYGTEGSKVVKAFRNLPGVDVANVERLNLLDLAPGGHLGRFVIWTESAFKKLEEVYGSFDAPSQKKKGFVLPRPKMANADLGRIINSNEVQSVVKPLNKEVKRREKRKNPLKNMAAVLKLNPYLGTARKMATLAEAARVKARKEKLDSKRTKLTSEETAKVKAAGKAWYKTMISDSDYTEFENFTKWLGVTQ

SEQ ID NO: 2306 - protein, 404 aa, Zea mays subsp. mays
  peptide (1)..(404): Ceres Seq. ID no. 15219394
MAASSRPLVSVKALEGDMVTDAPGIALPPVFGAPIRPDVVRFTHKLLSCNKRQPYAVSRRAGHQTSAESWGTGRAVSRIPRVPGGGTHRAGQGAFGNMCRGGRMFAPTKIWRKWHRRVNVNLRRVAVASALAATAVPALVQARGHRIETVPEMPLVISDSAESIEKTSQALKILKQVGAYADAEKAKDSVGIRPGKGKMRNRRYINRKGPLVVYGTEGSKVVKAFRNLPGVDVANVERLNLLDLAPGGHLGRFVIWTESAFKKLEEVYGSFDAPSQKKKGFVLPRPKMANADLGRIINSNEVQSVVKPLNKEVKRREKRKNPLKNMAAVLKLNPYLGTARKMATLAEAARVKARKEKLDSKRTKLTSEETAKVKAAGKAWYKTMISDSDYTEFENFTKWLGVTQ

SEQ ID NO: 2307 - protein, 387 aa, Zea mays subsp. mays
  peptide (1)..(387): Ceres Seq. ID no. 15219395
MVTDAPGIALPPVFGAPIRPDVVRFTHKLLSCNKRQPYAVSRRAGHQTSAESWGTGRAVSRIPRVPGGGTHRAGQGAFGNMCRGGRMFAPTKIWRKWHRRVNVNLRRVAVASALAATAVPALVQARGHRIETVPEMPLVISDSAESIEKTSQALKILKQVGAYADAEKAKDSVGIRPGKGKMRNRRYINRKGPLVVYGTEGSKVVKAFRNLPGVDVANVERLNLLDLAPGGHLGRFVIWTESAFKKLEEVYGSFDAPSQKKKGFVLPRPKMANADLGRIINSNEVQSVVKPLNKEVKRREKRKNPLKNMAAVLKLNPYLGTARKMATLAEAARVKARKEKLDSKRTKLTSEETAKVKAAGKAWYKTMISDSDYTEFENFTKWLGVTQ

SEQ ID NO: 2308 - DNA, 1618 bp, Zea mays subsp. mays
  misc_feature (1)..(1618): Ceres Seq. ID no. 12410796
  misc_feature (1)..(1618): Ortholog of  Ceres SEQ ID NO 14315257 as cited in SEQ ID NO 52552
  misc_feature (1)..(1618): Ortholog of  Ceres SEQ ID NO 14314636 as cited in SEQ ID NO 56924
  misc_feature (1)..(1618): Ortholog of  Ceres SEQ ID NO 14314755 as cited in SEQ ID NO 59919
  misc_feature (1)..(1618): Ortholog of  Ceres SEQ ID NO 15171614 as cited in SEQ ID NO 60106
  misc_feature (1)..(1618): Ortholog of  Ceres SEQ ID NO 15168421 as cited in SEQ ID NO 60131
  misc_feature (1)..(1618): Ortholog of  Ceres SEQ ID NO 13597574 as cited in SEQ ID NO 64677
  misc_feature (1)..(1618): Ortholog of  Ceres SEQ ID NO 13597843 as cited in SEQ ID NO 64850
  misc_feature (1)..(1618): Ortholog of  Ceres SEQ ID NO 13597678 as cited in SEQ ID NO 65375
  misc_feature (1)..(1618): Ortholog of  Ceres SEQ ID NO 15176787 as cited in SEQ ID NO 66468
  misc_feature (1)..(1618): Ortholog of  Ceres SEQ ID NO 13596180 as cited in SEQ ID NO 67941
  misc_feature (1)..(1618): Ortholog of  Ceres SEQ ID NO 13591190 as cited in SEQ ID NO 68044
  misc_feature (1)..(1618): Ortholog of  Ceres SEQ ID NO 13595961 as cited in SEQ ID NO 68223
  misc_feature (1)..(1618): Ortholog of  Ceres SEQ ID NO 14313563 as cited in SEQ ID NO 68700
ctcatcgctgacgctgatggcggagcccagtcctcacccgaccgtggtgctgcacgcttgcctcggcgtgggccacctgatccccatggtggagctcgccaagctcctcctccgccgcgacctggctgtcataatcgccgtcccgaccccgccgtcgtccactgccgacttcttcgcctcctccgcatccgccgtcgccacgctcgaggccgccaaccccgccgtatccttccaccacctcccgccgccggactaccctgtcccggacccggaccccttcctccggatgctggacgcgctccgcctcacagtcccctccctcaccgccttcctccgctcccttccctccgtcgccggggctcgtgctcgacctcttctgcggcgacgcgctcgacgcggccgcatccgccggcatcccggcctacttctactacacctcctgcgctggcgacctcgccgcgttcctccaccttccccactacttcgccacgacggagggcgggcccagcttcaaagacatgggcaaggcgctcctccacttccccggcgtcccgccgatcccggcttcggacatgcctcacaccgtgctcgaccgcgcggcccggacctgcgcctcgcggatcgtgcactacggccgcgtgccccgaggctcggggcttgctgatcaacacctacgagtggctggaggcgcgggccgtcagggcactcagggacggcgtctgcgtccctggtcgccccacgccgccggtttaccccatcggcccgattatcgtcaggggccaggaggcggcggagaaaggggagcggcacgcgtgcctgtcgtggctggacgcacagccggaacggagcgtggtgttcctctgcttcggcagcctgggcgccgtctccgcggcgcaggtgaaggagatcgctcgcgggctggagagctccgggcatcggttcctgtgggtcgtgcggagcccgccggaggacccgaccaagttcttcctcgcgcgtcctgagccggacctggactcgctgctcccggaggggtttctggagcgcacgagtgacagggggatggtggtgaagatgtgggcgccgcaggtggaggtgctgcggcacgcagccacgggcgcgttcatgacccactgcgggtggaactcggtgctggaggcggcgtcggccggcgtccccatgctgtgctggccgatgtacgccgagcagagggtgaacaaggtgttcgtagtggacgagatcaaggccggggtggtgatggacggctacgacgaggagctggtgagcgcggcggaggtggagaagaaggtgaggctggtgatggagtctgaggaaggggagaagctcagggagaggctggcgttggcaaaggagaaggcggcagaggcgctggctgatggcgggccgtcgcggatggcgtttgaggagttcttgaaggatatcatgctcgccaaatgatcatgcactaaagtgagcatcatggctgatcctgttacctgatctgttctaatgttagcttggactatgatctatgtgagatatttccgggtttgttcggttgatttctcccaaagagattcgagggagcatgagtttgacaaataaatatatgctgggtgat

SEQ ID NO: 2309 - protein, 484 aa, Zea mays subsp. mays
  peptide (1)..(484): Ceres Seq. ID no. 12410797
LIADADGGAQSSPDRGAARLPRRGPPDPHGGARQAPPPPRPGCHNRRPDPAVVHCRLLRLLRIRRRHARGRQPRRILPPPPAAGLPCPGPGPLPPDAGRAPPHSPLPHRLPPLPSLRRRGSCSTSSAATRSTRPHPPASRPTSTTPPALATSPRSSTFPTTSPRRRAGPASKTWARRSSTSPASRRSRLRTCLTPCSTARPGPAPRGSCTTAACPEARGLLINTYEWLEARAVRALRDGVCVPGRPTPPVYPIGPIIVRGQEAAEKGERHACLSWLDAQPERSVVFLCFGSLGAVSAAQVKEIARGLESSGHRFLWVVRSPPEDPTKFFLARPEPDLDSLLPEGFLERTSDRGMVVKMWAPQVEVLRHAATGAFMTHCGWNSVLEAASAGVPMLCWPMYAEQRVNKVFVVDEIKAGVVMDGYDEELVSAAEVEKKVRLVMESEEGEKLRERLALAKEKAAEALADGGPSRMAFEEFLKDIMLAK

SEQ ID NO: 2310 - DNA, 1582 bp, Zea mays subsp. mays
  misc_feature (1)..(1582): Ceres Seq. ID no. 12367584
  misc_feature (1)..(1582): Ortholog of  Ceres SEQ ID NO 13596277 as cited in SEQ ID NO 67896
ctttttctctctccccgtctgcctccccctccacaccaggccacgccacacacaggatagcgagcgggagcgacggcggcggcggaggagctagggttttgatccggcctcgccggctaggctgcgccgccccgacgccgaagccatggacagggagcttctagagacgtttgacgcggccaagaaggcggccgacgcggcggcaggggacggcaactcgccggaggctggccgctgcctcgacgcgctgcggcggctgcgcgacattcgcgtcaacaccgacatcctcgtctcgacgcaggttggcaaacgccttcgaccccttactaagcatcctcactcaggcattcaagcagttgctgccgacctttttgggtactggaaaaaggttgtccttgaagagtcaggaaagaaaaatggcggctcagagaatgaaagatcaagtgactcttcaggaaaggttgagaaggcgaggtccgtgaagattgaaaagaactctgcatcagcaagcatgaagcttgagaaaagagatgtggatgttaggggtcagaagcctaacaatgccaaagttgagaagactactagtaatggttccaaagctcaatctgtgaaggtggaaagggtatccaaagaagtcataaggactcctgacgcgaagaggccagcatccgtccccaatggccacccaaagcttacatctcttgtcaaatgcaatgatcctacccgagataaaatccgggaactacttgcctgaagcctttgtaagggtttccagagagactagtgatgatgacagagacgaagtgagaaacatcttggatgaagtcgaggcacgcgacccatacagggttgccgtgacagtagagctctgcactattcgagaggcttggaccttcccactgggactcacagggcgaaatacaggtcaatcatgttcaacctgagggctgaaagcaataccgatttccggaggagggtcctcatcggtctagtggcgccggagaggcttccagacgtatcccccgatgagatggctagcgacgcaaggaagcaagagaacatgcagatcaaggagaaggctctgttcgactgcgagcgtggagcggcaccaaaggcgacgacggaccagttcaagtgtgccagatgtgggcagcggaagacgacctactaccagctgcagactcggagtgctgatgaaccgatgacgacgttcgtcacatgcgtgaactgcaacaatcactggaagttctgctgagtggcagccttggtaaagtgtttacttagttgtgctgagcacactatcctgctgtgatgtgtgtgctctgttagttgtgactggaagttcgacagggcaggctgaacaactcaccttttttccccttttttaccccccgtaaactaggagcagttatcctcttcctctgtcaggcagcctcctgattcattcagattgtactagtcgaacgcgtgaatgttgttgacttgatcgcatcgtcaccagctgtgaattttcttgggtggagttagaatagaatggtgccaagctcagacgatgctgatggattagtggtgctgtgtgctc

SEQ ID NO: 2311 - protein, 202 aa, Zea mays subsp. mays
  peptide (1)..(202): Ceres Seq. ID no. 12367585
MDRELLETFDAAKKAADAAAGDGNSPEAGRCLDALRRLRDIRVNTDILVSTQVGKRLRPLTKHPHSGIQAVAADLFGYWKKVVLEESGKKNGGSENERSSDSSGKVEKARSVKIEKNSASASMKLEKRDVDVRGQKPNNAKVEKTTSNGSKAQSVKVERVSKEVIRTPDAKRPASVPNGHPKLTSLVKCNDPTRDKIRELLA

SEQ ID NO: 2312 - protein, 107 aa, Zea mays subsp. mays
  peptide (1)..(107): Ceres Seq. ID no. 12367586
MFNLRAESNTDFRRRVLIGLVAPERLPDVSPDEMASDARKQENMQIKEKALFDCERGAAPKATTDQFKCARCGQRKTTYYQLQTRSADEPMTTFVTCVNCNNHWKFC

SEQ ID NO: 2313 - DNA, 1816 bp, Zea mays subsp. mays
  misc_feature (1)..(1816): Ceres Seq. ID no. 12352030
  misc_feature (1)..(1816): Ortholog of  Ceres SEQ ID NO 14310736 as cited in SEQ ID NO 52901
  misc_feature (1)..(1816): Ortholog of  Ceres SEQ ID NO 13594345 as cited in SEQ ID NO 58043
  misc_feature (1)..(1816): Ortholog of  Ceres SEQ ID NO 13662880 as cited in SEQ ID NO 65422
aaaatcaccaattctagcaaggcagctcagcagcttttgtagcgagcttcttggagccttgaaatgagtagtagtggtagcctagccaccacgagtagcaagtaggcactataggcactaggaagtagctaaagcagtcataaccatgggttcgctgccgccggtgtacgggcagagacgccccccacacgttgtgatgatcccgtacccggcgcagggccacatcacgccgatgctgcagtttgccaagctcctccatactcgcggcttccacgtcaccttcgtcaacaacgagttcaatcatcgacgccacctgcgtgcgcgagggcccaacgcgctcgacggcacggatgggtttcgcttcgccgccatcgacgacggtctcccgctctttgaagcggacgccacccaggacatccccgcgctctgccactccaccttgaccacctgcctgccccggtttaaggatctcatcgccaggattaacgccgaggctgaggccgagggacaacccaccgtgacatgcgtcgtcggcgacagcaccatgaccttcgcgctccgcgccgcgcgagagctcggcctccgctgcgctacactctggaccgccagcgcctgcggcttcatcggctacttccactaccgccacctcgtcgagcgtggtatggtccccctcaagaacgaggagcagctcacggacgggtacctagacaccatcgtcgactggatcccgggcgcgcccaaggacctgcggctccgggacttcccgagcttcgtgcgcaccacggatccgaacgacgtcatgctcaacttcttcatccacgagacggagggcatgtcgcangcgtcggcggtggtcatcaacaccttcgacgagctcgacgcgacgctgctcgctgccatggcgaagctcctgccgcccatctacaccgtgggcccgctccagctgacggtgcggaacaacgtgcaggcgaacagtcctgtcgctgctattgggtccaacctgtggaaggagcaggaggcgccgctccggtggctcaacggccgtgcgccgcgctccgttgtgtatgtcaacttcgggagcatcacggtgatgtccaacgagcagctggtcgagttcgcgtgggggctggccaacaccggctactacttcctatggaacgtacgcccggacctcgtcaagagtggcgactccgccgggctgccgccagagttctcagctgcgacagagggacgaagcatgctgtctacgtggtgcccgcaggcagctgtgctggagcatgatgccgtgggggtgttcctgacgcactccgggtggaactccacgctggagagtattgcggcggcgttcccatgctgtgctggcccttcttcgccgagcagcagaccaactgccgatacaagtgcaccgagtggggcatcggaaaagagatcggtgacgatgtacagcggggcgaggtagagtcgctcatacgggaggccatggagggggagaaagggcaaggagatgctccggcgcgtgactgaactcagggacagcgccgtggccgctgcagggcctgacggacggtctatgcgcaacgtagacaggctcatcgaagaggtgctcctagcctagattgagcactggtgagcatcctagcagtcatgtgtcttcgcgtctggcactccaatcgattcaaatcctttgtgttttgatgtcaagcgtttaccttcggtacccataaaagtattttctcgtacaaggtggtgattacacgcaaagcacattgttataagttcagtttgtaagatctatgggtaaaaccaagcgttttgt

SEQ ID NO: 2314 - protein, 437 aa, Zea mays subsp. mays
  peptide (1)..(437): Ceres Seq. ID no. 12352031
  misc_feature (232)..(232): Xaa is any aa, unknown or other
MGSLPPVYGQRRPPHVVMIPYPAQGHITPMLQFAKLLHTRGFHVTFVNNEFNHRRHLRARGPNALDGTDGFRFAAIDDGLPLFEADATQDIPALCHSTLTTCLPRFKDLIARINAEAEAEGQPTVTCVVGDSTMTFALRAARELGLRCATLWTASACGFIGYFHYRHLVERGMVPLKNEEQLTDGYLDTIVDWIPGAPKDLRLRDFPSFVRTTDPNDVMLNFFIHETEGMSXASAVVINTFDELDATLLAAMAKLLPPIYTVGPLQLTVRNNVQANSPVAAIGSNLWKEQEAPLRWLNGRAPRSVVYVNFGSITVMSNEQLVEFAWGLANTGYYFLWNVRPDLVKSGDSAGLPPEFSAATEGRSMLSTWCPQAAVLEHDAVGVFLTHSGWNSTLESIAAAFPCCAGPSSPSSRPTADTSAPSGASEKRSVTMYSGAR

SEQ ID NO: 2315 - protein, 420 aa, Zea mays subsp. mays
  peptide (1)..(420): Ceres Seq. ID no. 12352032
  misc_feature (215)..(215): Xaa is any aa, unknown or other
MIPYPAQGHITPMLQFAKLLHTRGFHVTFVNNEFNHRRHLRARGPNALDGTDGFRFAAIDDGLPLFEADATQDIPALCHSTLTTCLPRFKDLIARINAEAEAEGQPTVTCVVGDSTMTFALRAARELGLRCATLWTASACGFIGYFHYRHLVERGMVPLKNEEQLTDGYLDTIVDWIPGAPKDLRLRDFPSFVRTTDPNDVMLNFFIHETEGMSXASAVVINTFDELDATLLAAMAKLLPPIYTVGPLQLTVRNNVQANSPVAAIGSNLWKEQEAPLRWLNGRAPRSVVYVNFGSITVMSNEQLVEFAWGLANTGYYFLWNVRPDLVKSGDSAGLPPEFSAATEGRSMLSTWCPQAAVLEHDAVGVFLTHSGWNSTLESIAAAFPCCAGPSSPSSRPTADTSAPSGASEKRSVTMYSGAR

SEQ ID NO: 2316 - protein, 408 aa, Zea mays subsp. mays
  peptide (1)..(408): Ceres Seq. ID no. 12352033
  misc_feature (203)..(203): Xaa is any aa, unknown or other
MLQFAKLLHTRGFHVTFVNNEFNHRRHLRARGPNALDGTDGFRFAAIDDGLPLFEADATQDIPALCHSTLTTCLPRFKDLIARINAEAEAEGQPTVTCVVGDSTMTFALRAARELGLRCATLWTASACGFIGYFHYRHLVERGMVPLKNEEQLTDGYLDTIVDWIPGAPKDLRLRDFPSFVRTTDPNDVMLNFFIHETEGMSXASAVVINTFDELDATLLAAMAKLLPPIYTVGPLQLTVRNNVQANSPVAAIGSNLWKEQEAPLRWLNGRAPRSVVYVNFGSITVMSNEQLVEFAWGLANTGYYFLWNVRPDLVKSGDSAGLPPEFSAATEGRSMLSTWCPQAAVLEHDAVGVFLTHSGWNSTLESIAAAFPCCAGPSSPSSRPTADTSAPSGASEKRSVTMYSGAR

SEQ ID NO: 2317 - DNA, 1425 bp, Zea mays subsp. mays
  misc_feature (1)..(1425): Ceres Seq. ID no. 12410794
  misc_feature (1)..(1425): Ortholog of  Ceres SEQ ID NO 15176919 as cited in SEQ ID NO 54698
  misc_feature (1)..(1425): Ortholog of  Ceres SEQ ID NO 14302702 as cited in SEQ ID NO 57154
  misc_feature (1)..(1425): Ortholog of  Ceres SEQ ID NO 15179344 as cited in SEQ ID NO 0
attagcacagactgaagcgcaactagaggatacagccatccattggtagtacacagggtcccacccacaagagaggcatggcggccacatcgtccctgaagagcagccttctcctcccgtctaccatctccgacttcagtggcgcacgcaggccgtctccatctcaacgcagcgccaccatggaatttgatttggcagaagaggagatcacggggggcgagggtgcaggtctcagcggctgcggactccaagaacattctggtcatgggggggactaggttcatcggggtcttcctgtccaggctccttgtcaaggagggccaccaggtcacattgttcaccaggggaaaggcacccataactcagcagctgccaggggagtccgacgcggagtacgcagacttctcctccaaggttctgcacttgaaaggtgacaggcaggacttcgaattcgtgaagacaagcttggctgccaatggatacgatgtggtttacgacatcaatggacgtgaggctgtgcaagttgagcccataattgaggccttgcctaacctgcaacagtacatctattgctcatcggcaggagtgtacctgaaatctgacattcttccgcactgtgaggttgacgcggtggaccccaagagccgtcacaagggcaagctggagacggagagcctgctgacctcgcgcggcgtgaaactggacgtccatcaggcccgtgtacatctacggccccgctcaactacaaccccgtcgaggagtggtttttccaccgcctcaaggccggccgccccatccccatccccggcgccggcaaccagatcacgcagctcggccatgtcaaggatctggcaagagccttcaacctggtgctcgggaacccccaggcgagcaagcagatcttcaacatctccggggccaagtatgtcaccttcgacggccttgcgcgggcatgcgcaaaggctggagggttccctgagccggagctcgtccactacaatcccaaggaattcgacttcggcaagaagaaggccttcccattcagagaccagcacttctttgcgtctgtggagaaggcgacgagcgaactcgggtggacgccggagtttgacctcgtccaggggctcaccaactcgtacaacctcgacttcggccgcggcacgttccggaaggaggcggacttcaccacagacgacatgatcctcgacaagaagcttggccaccgtttgatgcatgtctcgggctagctgtacgtacgtacgattagagaagagataaatgatagcaaatcaaaatttgttgttaagtaaagtgagctcttagcttctatcagggacgattattaaggatacccgaattattcctcccaagaacacactcagagaagtaaggtacctcttaggccgaggcttctcctcgagagtc

SEQ ID NO: 2318 - protein, 311 aa, Zea mays subsp. mays
  peptide (1)..(311): Ceres Seq. ID no. 12410795
MGGTRFIGVFLSRLLVKEGHQVTLFTRGKAPITQQLPGESDAEYADFSSKVLHLKGDRQDFEFVKTSLAANGYDVVYDINGREAVQVEPIIEALPNLQQYIYCSSAGVYLKSDILPHCEVDAVDPKSRHKGKLETESLLTSRGVKLDVHQARVHLRPRSTTTPSRSGFSTASRPAAPSPSPAPATRSRSSAMSRIWQEPSTWCSGTPRRASRSSTSPGPSMSPSTALRGHAQRLEGSLSRSSSTTIPRNSTSARRRPSHSETSTSLRLWRRRRANSGGRRSLTSSRGSPTRTTSTSAAARSGRRRTSPQTT

SEQ ID NO: 2319 - DNA, 1026 bp, Zea mays subsp. mays
  misc_feature (1)..(1026): Ceres Seq. ID no. 12414280
  misc_feature (1)..(1026): Ortholog of  Ceres SEQ ID NO 13598420 as cited in SEQ ID NO 63088
gactcagactcactcccgtcccccctgcctgcctgcgcgcgctctctgcctcgtggcggcgacgacgccctcctccaggtggccaggccatcgtcggatcgtattcctcggccccttctccggtgatgagcacccagaataaaaggctcaaggatgtggaggtcagtttcccaatcgtctacggaaccatttccttctggctcggcaaaaaggccagcgagtataactctcacaagtggactgtatatgtccgctcggcaaacaatgaggatctgagtgtcatagtcaagcgcgcggtgtttcagcttcacccgagtttccagaacccgacgagagtcgtcggagcagccgcctttcgagctgtccgagtcggggtggggagagtttgagatagccataaccctttatttccacagcgatgtctgtgacaagcgcttggatctgttccatcagcttaagctgtatccagaagaggaagctggacctcaatcgaccaaaaagcctgttgtcgtggaaacgtacgatgagattgtcttccccgagcctacagaggcctttttcctacgcgtgcaaaatcatccagcagctaacgtgcccaggcttcctcctggtataaccttgcctcctccaggccctatggaaattgttccgtatgaaaagaagcgaggtgacactaaggatcatcctttgagtcagtggttctcgaatttctctgaggctgacgagcttttgaaactagctgcagctcggcaacaggttcaggttcacatagccaagctgagaaggcagttaaccatgatagaaggaatgccccagcaatcgaaagccttttctgtccctggacagcagtttaggcacatctaatgtagtgcacctggtttgtaaggaagatgttggaatggaacctttcagcaactgcttgacagattgggttctgtgtattcgcattgaagtcgctgccttgggcttgcaaatgacctgtatattctatgaagtgtagtaccgttaggctcataagagaacact

SEQ ID NO: 2320 - protein, 128 aa, Zea mays subsp. mays
  peptide (1)..(128): Ceres Seq. ID no. 12414281
LRLTPVPPACLRALSASWRRRRPPPGGQAIVGSYSSAPSPVMSTQNKRLKDVEVSFPIVYGTISFWLGKKASEYNSHKWTVYVRSANNEDLSVIVKRAVFQLHPSFQNPTRVVGAAAFRAVRVGVGRV

SEQ ID NO: 2321 - protein, 87 aa, Zea mays subsp. mays
  peptide (1)..(87): Ceres Seq. ID no. 12414282
MSTQNKRLKDVEVSFPIVYGTISFWLGKKASEYNSHKWTVYVRSANNEDLSVIVKRAVFQLHPSFQNPTRVVGAAAFRAVRVGVGRV

SEQ ID NO: 2322 - protein, 75 aa, Zea mays subsp. mays
  peptide (1)..(75): Ceres Seq. ID no. 12414283
MEIVPYEKKRGDTKDHPLSQWFSNFSEADELLKLAAARQQVQVHIAKLRRQLTMIEGMPQQSKAFSVPGQQFRHI

SEQ ID NO: 2323 - DNA, 1864 bp, Zea mays subsp. mays
  misc_feature (1)..(1864): Ceres Seq. ID no. 12363824
  misc_feature (1)..(1864): Ortholog of  Ceres SEQ ID NO 13655992 as cited in SEQ ID NO 65504
  misc_feature (1)..(1864): Ortholog of  Ceres SEQ ID NO 13587581 as cited in SEQ ID NO 0
gcacgagaccattacctagaacatcctaatcgaaaaactgtcttgcctgttgcctctgcggctttgcctgcgctcacggacggtcactggctcacgctcccctcgcctgcgtcgcctcgcctagacaagagacaagacgcctagtcgcctccgatcgaaatcgaatcgagtcgggtgggctcgggcccggtcttgttgtcttgtctcccagctaggaatagcgcaacgagatccctcgcgcgcgcggaccccggagaggccgagggagggtgacagggcgtgtcctcgaccgcgaggggaatgggatcggagggacgggcctggaacggcgcgggcatggccgccggcagcggctatggcggcggggtagaggcgaaagcgaccaccacggctgtgtcggccgcggcccccgcggaggttcccacgtcggcggcctccgtcgacatctcgctgccgctcctgaagatgtcgcctcgcatcatagctctctgcaaggaattggtcgaagggtggtcgtcgattgacagctcgctcttctccatcgagaccgtgtccgggggcatcacgaatctattgctgaaggtttctgtcaaagaagacaacggcaatgagtcttctgttactgttcggttgtatggaccaaatacggacttggtgattgataggaaaagggaattgcaggcgataccatatctctcagctgcagggttcggggctcggctacttggaatatttgagaatggagtagttcagtcattcatctatgctcgaacactgtcaccagcagacatgaaagaacctaaaatagcagctgaaattgccaaggagctacgcaaattccatcaagtagacataccagggtctaaataaccacaattgtggaatgatatattcaagtttttgaagaaagctgcagcattgaagtttgaggataacatgaagcagaagagatatgaaaagatctcatttagagaaatacaagatgaagttcaagaacttaaggatctcttggacattctgcgcgcgcctgtggtttatgcacacaatgacttgctttcaggaaatctgatgctcaatgatttggaagggaagctatattttattgattttgagtatgggtcatacagctaccgtggctatgacattgcaaatcatttcaatgagtatgcaggatttgattgtgactataatttgtacccagataaagatgcccagtatcacttcttcaggaattatctacacactgatagacctagtgaggtggatgcacaagatatggaagtactttatgtggaaacaaacactttcagactagcatcgcacatttactgggcattatgggcccttattcaggcaaaggtatccccaattgactttgactatcttggatacttcttcttgcggtatggtgagtacaagaaacaaagggagtcctgcttctccttggcacaaagctttctctccgagctaaaaaatggctagagcctgagaatctgttcacgagtttatactggtgtacgcatgctcggagcgggtacgcgttgtgatcatcgactgctacccagaaactctattatagcggttgtagcagcccctcattgttgtatctgatgttaggttcatcattgtctaaggactagtttggatactctagtatcgagctcaattcatgtgtatgagatggattcgggtgtaacttaaactaatttacacactaatccaactcaacacatgtggattggggtcaatactaaattacccaaacaaagcctaacagggaagtcaccagtggcaaattatgtacttatatttataataataaacacaatcctgatgggttgtgccctgttgaatttgttcttcg

SEQ ID NO: 2324 - protein, 189 aa, Zea mays subsp. mays
  peptide (1)..(189): Ceres Seq. ID no. 12363825
MGSEGRAWNGAGMAAGSGYGGGVEAKATTTAVSAAAPAEVPTSAASVDISLPLLKMSPRIIALCKELVEGWSSIDSSLFSIETVSGGITNLLLKVSVKEDNGNESSVTVRLYGPNTDLVIDRKRELQAIPYLSAAGFGARLLGIFENGVVQSFIYARTLSPADMKEPKIAAEIAKELRKFHQVDIPGSK

SEQ ID NO: 2325 - protein, 181 aa, Zea mays subsp. mays
  peptide (1)..(181): Ceres Seq. ID no. 12363826
MKQKRYEKISFREIQDEVQELKDLLDILRAPVVYAHNDLLSGNLMLNDLEGKLYFIDFEYGSYSYRGYDIANHFNEYAGFDCDYNLYPDKDAQYHFFRNYLHTDRPSEVDAQDMEVLYVETNTFRLASHIYWALWALIQAKVSPIDFDYLGYFFLRYGEYKKQRESCFSLAQSFLSELKNG

SEQ ID NO: 2326 - protein, 177 aa, Zea mays subsp. mays
  peptide (1)..(177): Ceres Seq. ID no. 12363827
MAAGSGYGGGVEAKATTTAVSAAAPAEVPTSAASVDISLPLLKMSPRIIALCKELVEGWSSIDSSLFSIETVSGGITNLLLKVSVKEDNGNESSVTVRLYGPNTDLVIDRKRELQAIPYLSAAGFGARLLGIFENGVVQSFIYARTLSPADMKEPKIAAEIAKELRKFHQVDIPGSK

SEQ ID NO: 2327 - DNA, 1445 bp, Zea mays subsp. mays
  misc_feature (1)..(1445): Ceres Seq. ID no. 12355917
  misc_feature (1)..(1445): Ortholog of  Ceres SEQ ID NO 13596643 as cited in SEQ ID NO 62565
  misc_feature (1)..(1445): Ortholog of  Ceres SEQ ID NO 13597550 as cited in SEQ ID NO 65037
accttcttcccagatcaataggggcgaggcgacaccagcgaggagacgaaatcgtttaaaggcgccagcttgtcttctgttccatttgtggtttcatttcctctgcaaacgatttccattttttctgcacgccgtcagctgatccttttcgccgtagtatccccgagcaaaagagaaaacccttttttttgtgcgctgtgctgtttcgccatctctgttcgtcccaccgaggcaccgactcaatccccattcttggcatctggcttcacaaaacaagaccggttcccgttccctagatctctgcgtagaggcggcggcgaggcacctgaatccggcaaaaaagggttcgcggtttggttgggaggagcgcaggagcccggcgccaaaacccaatcttggcgcccgggctgccgtgcgccatcgtcttctccctgtggtgtttagggagaggagaaggccggtggagatggtgccgtgggaagggtacgtcagcgacgagacgatgggcaccttctcgcccatcgtgctctactggctgtacgccggcggctaccagctgatccttcaccgccggccgcttgagcggtacaggctccacacgcgggacgaggaggaggagaagaacctcgtcagcctctccaccgtcgtccgtggcgtactcctgcagcagctcgtgcaggccatcgtcgcgatgattttgttcatggtgacttctgatagctcaataactgttgttcagccacctatcgtcgtccagatcttccagtttctagttgcaatgttagtgatggactcatggcagtactttgtgcaccgctacatgcaccaaaacaagttcctgtatcggcacatccactcgcagcaccatcggctgattgtcccttacgctatcggggctctgtacaaccacccactggagggcctgcttctggacaccttaggaggcgccatctccttcttggtctccggcatgacgccgaggaccgccgtgttcttcttctgcttcgcagtcctcaagacggtcgacgatcactgcgggctttggctaccgtataacatcttccagcacctgttccagaacaacaccgcctatcacgacatccaccaccagctgcaaggaaccaaatacaactactcccagccattcttctcgatctgggacagaatgctaggaacccacatgccgtacgacttagtgagcaggaaagaaggtggatttgaagcaaggccgtcgcgagactagcttgaagtcatggaagtgtacaggctccggtgaatgagtcagacagaatatggttttttagctgtcatggactcatggttcattttttaaaaaaaaattgtgcagggctgccatttacattgctgtgcagatagtgcatttgaaaatccacacttctgtatgtacccagttatttgtgtaattgattgaacctctcgtcgtg

SEQ ID NO: 2328 - protein, 258 aa, Zea mays subsp. mays
  peptide (1)..(258): Ceres Seq. ID no. 12355918
MVPWEGYVSDETMGTFSPIVLYWLYAGGYQLILHRRPLERYRLHTRDEEEEKNLVSLSTVVRGVLLQQLVQAIVAMILFMVTSDSSITVVQPPIVVQIFQFLVAMLVMDSWQYFVHRYMHQNKFLYRHIHSQHHRLIVPYAIGALYNHPLEGLLLDTLGGAISFLVSGMTPRTAVFFFCFAVLKTVDDHCGLWLPYNIFQHLFQNNTAYHDIHHQLQGTKYNYSQPFFSIWDRMLGTHMPYDLVSRKEGGFEARPSRD

SEQ ID NO: 2329 - protein, 246 aa, Zea mays subsp. mays
  peptide (1)..(246): Ceres Seq. ID no. 12355919
MGTFSPIVLYWLYAGGYQLILHRRPLERYRLHTRDEEEEKNLVSLSTVVRGVLLQQLVQAIVAMILFMVTSDSSITVVQPPIVVQIFQFLVAMLVMDSWQYFVHRYMHQNKFLYRHIHSQHHRLIVPYAIGALYNHPLEGLLLDTLGGAISFLVSGMTPRTAVFFFCFAVLKTVDDHCGLWLPYNIFQHLFQNNTAYHDIHHQLQGTKYNYSQPFFSIWDRMLGTHMPYDLVSRKEGGFEARPSRD

SEQ ID NO: 2330 - protein, 183 aa, Zea mays subsp. mays
  peptide (1)..(183): Ceres Seq. ID no. 12355920
MILFMVTSDSSITVVQPPIVVQIFQFLVAMLVMDSWQYFVHRYMHQNKFLYRHIHSQHHRLIVPYAIGALYNHPLEGLLLDTLGGAISFLVSGMTPRTAVFFFCFAVLKTVDDHCGLWLPYNIFQHLFQNNTAYHDIHHQLQGTKYNYSQPFFSIWDRMLGTHMPYDLVSRKEGGFEARPSRD

SEQ ID NO: 2331 - DNA, 1286 bp, Zea mays subsp. mays
  misc_feature (1)..(1286): Ceres Seq. ID no. 12410790
  misc_feature (1)..(1286): Ortholog of  Ceres SEQ ID NO 15169809 as cited in SEQ ID NO 52839
  misc_feature (1)..(1286): Ortholog of  Ceres SEQ ID NO 15224302 as cited in SEQ ID NO 53942
  misc_feature (1)..(1286): Ortholog of  Ceres SEQ ID NO 14306297 as cited in SEQ ID NO 56907
gagagccccgcccccgggaggccgggagagaagagaacacgcgcgtcaggagcgcacaccgcacggcgcacacacacacgcctcccgcggcaagcagcgcaggacaccgacgacgaagcgaggagaggggaggaggcggagccgagcgcccgagcccaaccccgcaaccacgacccacttccccgtcgcgattcgcattgcccttccctcgggttctacccccagcctcgcgccgccgccgccgccgccgcccttgccagagagatcaccccccattcccacaatcccgtccctccctccgtccctcgacgagccgagccctccgcgcggccgtgggatggggcagtgaccggtgagtggcgtggggagccggtgggcggtggcgagggcatatcatggtgcagtgcctggacggggtgaggcagctgctcgcggtcctgctcaattgctgcgacgtcgagctcaagcagccgcgggggctccaagacccccaggtcctcgcgagggagaccgtcttcagcgtgagtgaggtcgaggcgctgtacgagctgtttaagaggatcagcagcgccgtcattgatgatgggctgattaacaaggaggaatttcagttggcgctatttaagaccaacaagaaggagagcctgttcgcggatcgcgtatttgatttatttgacacaaagcacagtggaattttgggatttgaagaatttgctcgtgctctctcagtatttcatcctaatgctccccttgatgagaaaattgatttttcattccggctgtatgatctcaagcagcaaggctatattgagagacaagaggttaagcagatggttgttgcaacacttgccgagtcaggaatgaatctttcggatgaaattgtagagagtataattgacaagacatttgaggaggcagacacaaagcatgatggaagaattgacaaggaagagtggcgcaatctagtcattcggcatccttctttgctgaagaacatgactcttcagtacctcaaggacatcaccactacatttccaagctttgtctttcactctcaggttgatgataactgaaattgatggggttactttgaaaagaaacattagaagatattctcatgggttctgatatggttttcatttttcaaaattgggttgttggattgaaagattgtagtgttgtgaagtacgtgcatgttggattcgaggactcgattttttttgtcaaccttgtttctttcatttgcatgtctggatgcgcatgaataagatatgaagtttatgtct

SEQ ID NO: 2332 - protein, 225 aa, Zea mays subsp. mays
  peptide (1)..(225): Ceres Seq. ID no. 12410791
MVQCLDGVRQLLAVLLNCCDVELKQPRGLQDPQVLARETVFSVSEVEALYELFKRISSAVIDDGLINKEEFQLALFKTNKKESLFADRVFDLFDTKHSGILGFEEFARALSVFHPNAPLDEKIDFSFRLYDLKQQGYIERQEVKQMVVATLAESGMNLSDEIVESIIDKTFEEADTKHDGRIDKEEWRNLVIRHPSLLKNMTLQYLKDITTTFPSFVFHSQVDDN

SEQ ID NO: 2333 - protein, 139 aa, Zea mays subsp. mays
  peptide (1)..(139): Ceres Seq. ID no. 12410792
ESPAPGRPGEKRTRASGAHTARRTHTRLPRQAAQDTDDEARRGEEAEPSARAQPRNHDPLPRRDSHCPSLGFYPQPRAAAAAAALAREITPHSHNPVPPSVPRRAEPSARPWDGAVTGEWRGEPVGGGEGISWCSAWTG

SEQ ID NO: 2334 - protein, 117 aa, Zea mays subsp. mays
  peptide (1)..(117): Ceres Seq. ID no. 12410793
EPRPREAGREENTRVRSAHRTAHTHTPPAASSAGHRRRSEERGGGGAERPSPTPQPRPTSPSRFALPFPRVLPPASRRRRRRRPCQRDHPPFPQSRPSLRPSTSRALRAAVGWGSDR

SEQ ID NO: 2335 - DNA, 1618 bp, Zea mays subsp. mays
  misc_feature (1)..(1618): Ceres Seq. ID no. 13493644
  misc_feature (1)..(1618): Ortholog of  Ceres SEQ ID NO 15176230 as cited in SEQ ID NO 58796
  misc_feature (1)..(1618): Ortholog of  Ceres SEQ ID NO 14308156 as cited in SEQ ID NO 59006
  misc_feature (1)..(1618): Ortholog of  Ceres SEQ ID NO 13596321 as cited in SEQ ID NO 67976
gaaaagaatataataaaataaaaacccagcagcatttctccgccgcccatacgacgacgacggccactcggcgcagtgatttgggcgccccgcaaagcggtggctccaccggccagcgcatcaaaggccctgtggaatatggcgccgcgccgcttgccggggccgggccctcctctttatatatggcgtggcgagcaaacccaaaaccctcgcaggcagaaggcaaacgcggctgcgagcgcggcgccccctcccactatccagccgccgccagcccgcacacccctccctcgcgcgctcagggtttcggaatggaggccgatgcggcggccaagaggacgcgggagagcggggaggacgccaccgcggcggggatctccgccgtcatcccgggatggttctccgagatcagccccatgtggcccggtgaggcgcactctttgaaggtggagaaggtgctgttccaagggaagtcagactaccaaaacgttatggtctttcagtcctctacgtacgggaaggtgctcgtccttgatggagttattcaggttacggagagggatgagtgtgcgtaccaagagatgatcactcacctgcccctttgctccatcaaagatcccaagaaggtgttggttattggagggggtgatggtggtgttctgcgtgaggtttcacggcattcctctgtggaacaaattgacatctgtgaaattgacaagatggtggtagatgtatccaaacaatttttccctcatttagctgttggatttgaagaccctcgtgtgtcattacacattggagatggggttgcctttttgaaaaatgctccagaaggtacttatgacgcagtaattgtggactcatctgatccgataggtcctgctcaagagctttttgagaagcctttcttccagttggtggccagagctttgcgtccaggtggagttgtatgcacccaagcagagagcatatggctacatatacacattattgaagatattgttgtcaattgtcgacaagttttcaaaggctcggttaactatgcttggacaacggtgcctacataccctagcggagttattgggttcatgctttgctccaccgaagggcctgctgttgatttccagcaccctgttttcaacatcgaggaggatgaacatcctatgaaatcaaaaggaccccttaagttctacaactcggagatccacacggcatcattctgtttgccttcttttgcaaagagggtaatcgagtcaaaagcgaactagacgtgaaggtatctccaagggctaagtaccttaggtgcgcaacacagaatttgttgtagtgtgaaaagcggatgcctccctcccttttctccccctttgatgaatagtataagcacaggagatgagatgcaacagttatcggagttatcagtctacatggtcctgaccagtcgtatgtctcggctgcctggtgcagctatgaaaacgttttgcaatagcttttttcggcagtcctcacatcatcacggttgtgtttccgcttccacatcagaatggaatatatatacgtatgaaataaaactgtgtaatggctgctgccatcggatcctttttaaaacaggttcagctct

SEQ ID NO: 2336 - protein, 421 aa, Zea mays subsp. mays
  peptide (1)..(421): Ceres Seq. ID no. 13493645
KEYNKIKTQQHFSAAHTTTTATRRSDLGAPQSGGSTGQRIKGPVEYGAAPLAGAGPSSLYMAWRANPKPSQAEGKRGCERGAPSHYPAAASPHTPPSRAQGFGMEADAAAKRTRESGEDATAAGISAVIPGWFSEISPMWPGEAHSLKVEKVLFQGKSDYQNVMVFQSSTYGKVLVLDGVIQVTERDECAYQEMITHLPLCSIKDPKKVLVIGGGDGGVLREVSRHSSVEQIDICEIDKMVVDVSKQFFPHLAVGFEDPRVSLHIGDGVAFLKNAPEGTYDAVIVDSSDPIGPAQELFEKPFFQLVARALRPGGVVCTQAESIWLHIHIIEDIVVNCRQVFKGSVNYAWTTVPTYPSGVIGFMLCSTEGPAVDFQHPVFNIEEDEHPMKSKGPLKFYNSEIHTASFCLPSFAKRVIESKAN

SEQ ID NO: 2337 - protein, 361 aa, Zea mays subsp. mays
  peptide (1)..(361): Ceres Seq. ID no. 13493646
MAWRANPKPSQAEGKRGCERGAPSHYPAAASPHTPPSRAQGFGMEADAAAKRTRESGEDATAAGISAVIPGWFSEISPMWPGEAHSLKVEKVLFQGKSDYQNVMVFQSSTYGKVLVLDGVIQVTERDECAYQEMITHLPLCSIKDPKKVLVIGGGDGGVLREVSRHSSVEQIDICEIDKMVVDVSKQFFPHLAVGFEDPRVSLHIGDGVAFLKNAPEGTYDAVIVDSSDPIGPAQELFEKPFFQLVARALRPGGVVCTQAESIWLHIHIIEDIVVNCRQVFKGSVNYAWTTVPTYPSGVIGFMLCSTEGPAVDFQHPVFNIEEDEHPMKSKGPLKFYNSEIHTASFCLPSFAKRVIESKAN

SEQ ID NO: 2338 - protein, 318 aa, Zea mays subsp. mays
  peptide (1)..(318): Ceres Seq. ID no. 13493647
MEADAAAKRTRESGEDATAAGISAVIPGWFSEISPMWPGEAHSLKVEKVLFQGKSDYQNVMVFQSSTYGKVLVLDGVIQVTERDECAYQEMITHLPLCSIKDPKKVLVIGGGDGGVLREVSRHSSVEQIDICEIDKMVVDVSKQFFPHLAVGFEDPRVSLHIGDGVAFLKNAPEGTYDAVIVDSSDPIGPAQELFEKPFFQLVARALRPGGVVCTQAESIWLHIHIIEDIVVNCRQVFKGSVNYAWTTVPTYPSGVIGFMLCSTEGPAVDFQHPVFNIEEDEHPMKSKGPLKFYNSEIHTASFCLPSFAKRVIESKAN

SEQ ID NO: 2339 - DNA, 1462 bp, Zea mays subsp. mays
  misc_feature (1)..(1462): Ceres Seq. ID no. 12405153
  misc_feature (1)..(1462): Ortholog of  Ceres SEQ ID NO 14307273 as cited in SEQ ID NO 54302
  misc_feature (1)..(1462): Ortholog of  Ceres SEQ ID NO 14315317 as cited in SEQ ID NO 58242
  misc_feature (1)..(1462): Ortholog of  Ceres SEQ ID NO 13655375 as cited in SEQ ID NO 63347
  misc_feature (1)..(1462): Ortholog of  Ceres SEQ ID NO 12626166 as cited in SEQ ID NO 64505
  misc_feature (1)..(1462): Ortholog of  Ceres SEQ ID NO 14301599 as cited in SEQ ID NO 65699
  misc_feature (1)..(1462): Ortholog of  Ceres SEQ ID NO 14301978 as cited in SEQ ID NO 0
  misc_feature (1)..(1462): Ortholog of  Ceres SEQ ID NO 14303290 as cited in SEQ ID NO 0
aaccgagacgggacgagaccagcagccggccaccagcccatccgaaccctgctgctcccctctccgggttcgcgtgaggctgtgtgctgctgggaggagggggaagcggcggcggggcgccatggaggccgagaagaaggcgccggcggtgtcagacgtgggcgcgtgggcgatgaacgtcgtcagctccgtcagcctcatcatggccaacaagcagctcatgtcctcctccggctacgccttcgccttcgccaccacgctgaccgggttccacttcacggtcacggcgctcgtcgggtggatctccaacgccaccggctactccgtctccaagcacgtaccgctctgggagctcgtctggttctctctcgtcgccaacacctccatcaccgggatgaacctcagcctcatgctcaactccgtcggcttctaccagatctccaaactgagcatgattccggtggtctgcctcatggaatgggtgctgaacagcaagcactacaccaccaaggtcatctcggcagtggttgtcgtggccgccggtgtcgggatttgcacggtcacggatgtcgaggtcaatgccaaggggttcatctgcgcttgcgtggcagtgttctgcacgtcgcttcaacagattacaattggttcctttcaaaagaagtacaacattgggtcatttgagctgctgagcaaaactgcaccaatccaggcaatttcactcattatactgggcccctttgtggactactatctaaatggacggtcattgttgaactaccctttttcgggaggggcaactttcttcatcttgctttcctgctcccttgccgtcttctgcaacatgagccaatacctctgcatcggccggttctcagcgacctcgtttcaggtcctgggccacatgaagaccgtgtgcgtgctgatcctcggctggatcctgtttgactcggccctcaccgtgaagaacatcctcgggatgctgctcgccgtgatgggcatggtggtctacagctgggccgtggaagcggagaagaaggcggcagccccggtcccccggatcaagagcgaaatgctcgacggcgaggacgtacctctcaaggccagggtgagcggcgtgcccgcagtcgacctcgaggacggcgagatgaagagctagctgctgcggctgccgcagctgccgctgattcgttcattcttcttgttcttttgtaactgtgcgcgcgcgatcgctcgatccaaagttgcttgtccgtcagccctcagctatcgacactacactgttatttttggccccttgttggggagagtccagttcctacgtgacgacgaccacccccagttcggcgtagatgaaacacaaactagcagaatgcagattttaggatttttttttcaggcggcggggtggagccattcattgtcatggtgacaggactcataatagaaatacaggtaacatgtc

SEQ ID NO: 2340 - protein, 384 aa, Zea mays subsp. mays
  peptide (1)..(384): Ceres Seq. ID no. 12405154
TETGRDQQPATSPSEPCCSPLRVRVRLCAAGRRGKRRRGAMEAEKKAPAVSDVGAWAMNVVSSVSLIMANKQLMSSSGYAFAFATTLTGFHFTVTALVGWISNATGYSVSKHVPLWELVWFSLVANTSITGMNLSLMLNSVGFYQISKLSMIPVVCLMEWVLNSKHYTTKVISAVVVVAAGVGICTVTDVEVNAKGFICACVAVFCTSLQQITIGSFQKKYNIGSFELLSKTAPIQAISLIILGPFVDYYLNGRSLLNYPFSGGATFFILLSCSLAVFCNMSQYLCIGRFSATSFQVLGHMKTVCVLILGWILFDSALTVKNILGMLLAVMGMVVYSWAVEAEKKAAAPVPRIKSEMLDGEDVPLKARVSGVPAVDLEDGEMKS

SEQ ID NO: 2341 - protein, 344 aa, Zea mays subsp. mays
  peptide (1)..(344): Ceres Seq. ID no. 12405155
MEAEKKAPAVSDVGAWAMNVVSSVSLIMANKQLMSSSGYAFAFATTLTGFHFTVTALVGWISNATGYSVSKHVPLWELVWFSLVANTSITGMNLSLMLNSVGFYQISKLSMIPVVCLMEWVLNSKHYTTKVISAVVVVAAGVGICTVTDVEVNAKGFICACVAVFCTSLQQITIGSFQKKYNIGSFELLSKTAPIQAISLIILGPFVDYYLNGRSLLNYPFSGGATFFILLSCSLAVFCNMSQYLCIGRFSATSFQVLGHMKTVCVLILGWILFDSALTVKNILGMLLAVMGMVVYSWAVEAEKKAAAPVPRIKSEMLDGEDVPLKARVSGVPAVDLEDGEMKS

SEQ ID NO: 2342 - protein, 327 aa, Zea mays subsp. mays
  peptide (1)..(327): Ceres Seq. ID no. 12405156
MNVVSSVSLIMANKQLMSSSGYAFAFATTLTGFHFTVTALVGWISNATGYSVSKHVPLWELVWFSLVANTSITGMNLSLMLNSVGFYQISKLSMIPVVCLMEWVLNSKHYTTKVISAVVVVAAGVGICTVTDVEVNAKGFICACVAVFCTSLQQITIGSFQKKYNIGSFELLSKTAPIQAISLIILGPFVDYYLNGRSLLNYPFSGGATFFILLSCSLAVFCNMSQYLCIGRFSATSFQVLGHMKTVCVLILGWILFDSALTVKNILGMLLAVMGMVVYSWAVEAEKKAAAPVPRIKSEMLDGEDVPLKARVSGVPAVDLEDGEMKS

SEQ ID NO: 2343 - DNA, 1444 bp, Zea mays subsp. mays
  misc_feature (1)..(1444): Ceres Seq. ID no. 12342601
  misc_feature (1)..(1444): Ortholog of  Ceres SEQ ID NO 13598495 as cited in SEQ ID NO 63939
ctactcttttctcctggcaacgatttccaaacgcacgcaaacgctgtcacagtttgtcacggcagcggcaacggcaagtcggcaacgttgccgcggcacgtctcctccctctcttttcctgttcgggtagtcgggtgtaccgccattcgtgatcgaaccagactcgagagggagaggaggagggagtccgaggggagagacccaattaactgcagggattggtcgggttcggctccgccttcggagagtcccaagagatgggtggcgcggcggcgggtaccaagtggatccaccacatccagcgcctcagcgcggccaaggtgtcggcggaggcggtggagcggggccagagccgcgtcatcgacgcctccctcaccctaattcgcgagcgcgcaaagctcaaggcagagttgctgcgtgctctgggtggcgtgaaagcttcagcgtcgctcttaggggtccctcttggtcacaactcatcctttttacaaggccctgcatttgctcctccacgcatacgggaggccatttggtgtggaagcacaaactctagcacagaggaaggcaaagaattgaatgatcctcgggtgctaactgatgttggagatgtccccattcacgagatccgtgactgtggtgtcgaagatgacagattaatgcatgtaattagtgagtctgtcaaaacagtgatggaggaggagcctcttcgaccgttggtgttatgaggcgatcattcaatatcttatccagtggttagagctgtgtctgaaaagcttggaggacctgttgacatacttcatcttgatgcacatccagatatctatgattgttttgaagggaacacttattcgcatgcctcgtcatttgccagaataatggaaggtggttatgccaggagactgctacaggttggattgagatcaatcaccaaagaagggcgtgaacaagggaagagatttggtgtggaacagtatgagatgcgaaccttctcaaaggaccgagagaagcttgagaatctgaaacttggggaaggcgtaaagggtgtgtatgtctcagttgatgtggactgccttgacccagcgtttgctcctggggtctctcacatcgaacctggaggcctctccttccgcaatgtcctcaacatccttcagaatttgcagggtgacgttgtcgccgctgatgtggtggagttcaacccacagcgtgacacggtggatgggatgacagccatggtcgccgcgaagctggtccgggagctcactgctaagatctccaagtgagacggtcaggatcgcaccactcttcttgaagcaaagcgaaagggtgggttttgatgtcccggtggttattggtcatggtttctatgtattgagcaccaaattgttcgacatgtgacaggtttatatgttaattaggttgcaataataccataatggtttatttc

SEQ ID NO: 2344 - protein, 155 aa, Zea mays subsp. mays
  peptide (1)..(155): Ceres Seq. ID no. 12342602
MGGAAAGTKWIHHIQRLSAAKVSAEAVERGQSRVIDASLTLIRERAKLKAELLRALGGVKASASLLGVPLGHNSSFLQGPAFAPPRIREAIWCGSTNSSTEEGKELNDPRVLTDVGDVPIHEIRDCGVEDDRLMHVISESVKTVMEEEPLRPLVL

SEQ ID NO: 2345 - protein, 134 aa, Zea mays subsp. mays
  peptide (1)..(134): Ceres Seq. ID no. 12342603
MEGGYARRLLQVGLRSITKEGREQGKRFGVEQYEMRTFSKDREKLENLKLGEGVKGVYVSVDVDCLDPAFAPGVSHIEPGGLSFRNVLNILQNLQGDVVAADVVEFNPQRDTVDGMTAMVAAKLVRELTAKISK

SEQ ID NO: 2346 - protein, 126 aa, Zea mays subsp. mays
  peptide (1)..(126): Ceres Seq. ID no. 12342604
LLFSPGNDFQTHANAVTVCHGSGNGKSATLPRHVSSLSFPVRVVGCTAIRDRTRLERERRRESEGRDPINCRDWSGSAPPSESPKRWVARRRVPSGSTTSSASARPRCRRRRWSGARAASSTPPSP

SEQ ID NO: 2347 - DNA, 811 bp, Zea mays subsp. mays
  misc_feature (1)..(811): Ceres Seq. ID no. 12414277
  misc_feature (1)..(811): Ortholog of  Ceres SEQ ID NO 12556910 as cited in SEQ ID NO 39
  misc_feature (1)..(811): Ortholog of  Ceres SEQ ID NO 13594970 as cited in SEQ ID NO 56328
  misc_feature (1)..(811): Ortholog of  Ceres SEQ ID NO 12585079 as cited in SEQ ID NO 63137
acaggcaagcatctggccacatgtgcactcacacgactcagggcgagaggacagcagggcacaataaccgttccactttggtccataggagcgcatagcacagcacaaggagaggccgagaagcgctttagccgtagccgtagcgataagagtgagctagctggtgcacaccggcatggcggccacggcgtactccgtggcgctcctcggcggcgcgcgcctccccgccgctccgcgctccgccctcctccctcggcgcagcgtctgccagcttcgcttccaagatgcaccgaggctctccctgctccgtgcgaaggccgcttccgaggacacatcggcctccggcgacgagttgatcgaggacctcaaagcgaagtgggacgccgttgaggacaagcccaccgtcctcttgtacggcggcggcgccgtcgtcgccctatggctgacgtccgtggtcgtgggcgccatcaacgccgtgccgctgctccccaagatcctggagctcgttgggctcggctacaccggctggttcgtgtaccgctaccttctctttaaggaaagcaggaaagagttggccgccgacattgagaccttgaagaaaaaaatagctggaacagaataaacgctcatggaaagttttagagcgtcctttcttctttggaaagagatctattcgatcggagaaccaatatgcaactacttgagtactattattgcccatgtattgtgtgctgtatatcttctgtatacaaaggaaggttcgtttgttatgtacgtagtagcattgtagtttaaatgtatcgtattacct

SEQ ID NO: 2348 - protein, 148 aa, Zea mays subsp. mays
  peptide (1)..(148): Ceres Seq. ID no. 12414278
MAATAYSVALLGGARLPAAPRSALLPRRSVCQLRFQDAPRLSLLRAKAASEDTSASGDELIEDLKAKWDAVEDKPTVLLYGGGAVVALWLTSVVVGAINAVPLLPKILELVGLGYTGWFVYRYLLFKESRKELAADIETLKKKIAGTE

SEQ ID NO: 2349 - protein, 129 aa, Zea mays subsp. mays
  peptide (1)..(129): Ceres Seq. ID no. 12414279
TGKHLATCALTRLRARGQQGTITVPLWSIGAHSTAQGEAEKRFSRSRSDKSELAGAHRHGGHGVLRGAPRRRAPPRRSALRPPPSAQRLPASLPRCTEALPAPCEGRFRGHIGLRRRVDRGPQSEVGRR

SEQ ID NO: 2350 - DNA, 1452 bp, Zea mays subsp. mays
  misc_feature (1)..(1452): Ceres Seq. ID no. 12349889
  misc_feature (1)..(1452): Ortholog of  Ceres SEQ ID NO 12474685 as cited in SEQ ID NO 88
  misc_feature (1)..(1452): Ortholog of  Ceres SEQ ID NO 13638574 as cited in SEQ ID NO 51223
  misc_feature (1)..(1452): Ortholog of  Ceres SEQ ID NO 14311531 as cited in SEQ ID NO 51466
  misc_feature (1)..(1452): Ortholog of  Ceres SEQ ID NO 15170465 as cited in SEQ ID NO 52798
  misc_feature (1)..(1452): Ortholog of  Ceres SEQ ID NO 15177112 as cited in SEQ ID NO 55956
  misc_feature (1)..(1452): Ortholog of  Ceres SEQ ID NO 12610790 as cited in SEQ ID NO 56123
  misc_feature (1)..(1452): Ortholog of  Ceres SEQ ID NO 14315399 as cited in SEQ ID NO 57112
  misc_feature (1)..(1452): Ortholog of  Ceres SEQ ID NO 13596388 as cited in SEQ ID NO 62129
  misc_feature (1)..(1452): Ortholog of  Ceres SEQ ID NO 13655636 as cited in SEQ ID NO 63519
  misc_feature (1)..(1452): Ortholog of  Ceres SEQ ID NO 13655896 as cited in SEQ ID NO 64970
atgagtggagactggagaaagagccctactaccctagctaagcgcgcacagcggcggccggcgagacacgtgcgagcggcggcgtgaggaaaggcgggcggggtgagagatacctaaccactaagaggctgcggcagcgccgcagcataaccggcaccaggtcaaaaacgacgactgggcaggcaccgtatgcatatcctgaatttcagcaccgcatacactttctacagggcccttgccacaccagacaagcacagacaaacacgcaagcggcaggccatgtcatcaccggcagcaaggagcatcacctgctactccaaaattccagagttcttgttgggcactaatgggcagccaatgcccgcagtggggctcggcacagcatcacacccatttgtggcggaggatgtcaggacatccgtgctcactgcgctggagcttggctaccgccacatcgacactgcgggactctacgcctctgagtgggttgtcggcgaggccatggctgaggcagtgtcgcgtggccttgtggcgtccagggacgagctgtttgtgacatccaaggtgtggtgcacacaatgtcatcctgagcttgtgcttccgtccctcaaggagagcttgaagaaccttcaaatggaatatgttgatttgtacctgattcattggcccatggctgtaaagcctagcaagcctcacttcccaatgaaaagggaggacattgtgccgatggaccttagtggtgtatggcaggcaatggaggaatgccatcgacttggccttgctaaaatgattggtgttagcaatttcacaacaaagaaattgcaggagctgcttgccattgcaaaaattcccccagttgtaaatcaggttgaattgaatcccacttggcagcagaaaaaactaattgagttctgcaatgacaagggtattcatgtgacggcttattctcccctaggaggccaaagaatctctaaactgaatccagtacgacaatctgatatattggaagagattggaaaggctagagggaagtcagtggcccagatttcactgaggtggatatacgagcaaggagcaagcatggtggcaaagagcttgaaaagggagaggcttaaggagaacattgaaatcttcgattgggaattgagtgacgaagatcggtttaagattgatcatatagcacagcgcaagttggtcacagtacagaatctcctgtgtcctgaaggtatctccagtgtggatatcttggatgttgatgttattgaaatatagctgtggtctccatctatttgcaatgggcaaaagaattggtgtacaacatgttggatacatcagaagcagtctttcgcgtttctatgtaatgttcatcttgctaaattcacatgtgcacctttctattgtcaccaatacttttgtaccatttttctggattaatctactattaaaaatgct

SEQ ID NO: 2351 - protein, 360 aa, Zea mays subsp. mays
  peptide (1)..(360): Ceres Seq. ID no. 12349890
MHILNFSTAYTFYRALATPDKHRQTRKRQAMSSPAARSITCYSKIPEFLLGTNGQPMPAVGLGTASHPFVAEDVRTSVLTALELGYRHIDTAGLYASEWVVGEAMAEAVSRGLVASRDELFVTSKVWCTQCHPELVLPSLKESLKNLQMEYVDLYLIHWPMAVKPSKPHFPMKREDIVPMDLSGVWQAMEECHRLGLAKMIGVSNFTTKKLQELLAIAKIPPVVNQVELNPTWQQKKLIEFCNDKGIHVTAYSPLGGQRISKLNPVRQSDILEEIGKARGKSVAQISLRWIYEQGASMVAKSLKRERLKENIEIFDWELSDEDRFKIDHIAQRKLVTVQNLLCPEGISSVDILDVDVIEI

SEQ ID NO: 2352 - protein, 330 aa, Zea mays subsp. mays
  peptide (1)..(330): Ceres Seq. ID no. 12349891
MSSPAARSITCYSKIPEFLLGTNGQPMPAVGLGTASHPFVAEDVRTSVLTALELGYRHIDTAGLYASEWVVGEAMAEAVSRGLVASRDELFVTSKVWCTQCHPELVLPSLKESLKNLQMEYVDLYLIHWPMAVKPSKPHFPMKREDIVPMDLSGVWQAMEECHRLGLAKMIGVSNFTTKKLQELLAIAKIPPVVNQVELNPTWQQKKLIEFCNDKGIHVTAYSPLGGQRISKLNPVRQSDILEEIGKARGKSVAQISLRWIYEQGASMVAKSLKRERLKENIEIFDWELSDEDRFKIDHIAQRKLVTVQNLLCPEGISSVDILDVDVIEI

SEQ ID NO: 2353 - protein, 304 aa, Zea mays subsp. mays
  peptide (1)..(304): Ceres Seq. ID no. 12349892
MPAVGLGTASHPFVAEDVRTSVLTALELGYRHIDTAGLYASEWVVGEAMAEAVSRGLVASRDELFVTSKVWCTQCHPELVLPSLKESLKNLQMEYVDLYLIHWPMAVKPSKPHFPMKREDIVPMDLSGVWQAMEECHRLGLAKMIGVSNFTTKKLQELLAIAKIPPVVNQVELNPTWQQKKLIEFCNDKGIHVTAYSPLGGQRISKLNPVRQSDILEEIGKARGKSVAQISLRWIYEQGASMVAKSLKRERLKENIEIFDWELSDEDRFKIDHIAQRKLVTVQNLLCPEGISSVDILDVDVIEI

SEQ ID NO: 2354 - DNA, 1359 bp, Zea mays subsp. mays
  misc_feature (1)..(1359): Ceres Seq. ID no. 12410786
  misc_feature (1)..(1359): Ortholog of  Ceres SEQ ID NO 13594176 as cited in SEQ ID NO 59144
aaaaaatgccgtgagcgcagcagatgtcgtgcggtgcagtgcagtgcaggtgcgggatctctgaatcgctgacgcccagcctcctctgtcatctccctcctcggacctcgccacctcacgcggaaggaggggaagaggaagcgcggagactggaaatcgggccccaaatccgcttcggtctctcgatcggcgaggcatgattcatacaaccggctaggatggcctcaaaagctataaaaagaaggcctatcagcgctgagactgatacaacaggggaaaaacaaatggatacagcactgtcagatcctgtaacagaacctcttctaggaaacactcctcaggaagaaaatccaagacatatgagcctattacacggtcaggtttctgggatgggacggcacaggagtgtcttcgttggacacatcttttagcagcttttgttgctcaatctgcaagaaacatagtaaatgttctttctgaatttggatatttgctagcaagactctttggttgctcttctgcttccaaaagttcacaaaatggacagacacttccagttaacctcagtccattacaggaagaaaggttaagattgttgagacaaaggatagatgtgccatatgactgctcctctgtcaagcatcaggatgccctgaaagaactttggaagttggcttaccctaacagacaacttcctcctctgaagtcagatctctggaaggagatgggctggcagaactccgatccatccacagattttagagcagctgggttcatgtccttggagaatctaatatattttgccagaaattacccagattcctttcacaggctactgcataaagcagatggtaagagagctgaatgggagtatccttttgcagtaggcggcgtaaacatatcctatatgttagttcaaatgctggatttacagtcaggaaaaatgagaacaaaagctggtgttcactttgttcaactactcgatgatgacggtgtggctttcgataaccttttctgtgtagcatttcaggtgcttgattctcaatggcttgcaaggcgagcgagttatatggaattcaatgaggttctgaagtctacacggggtcagttagagcaagagcttactatcggaggtatttctcgcattcaagacatgccatcattcagaatgctgagaaggtagcgctgtttgtacttcacaggaaaagagatacattttagattccaatatattgtttaaatttgttgtccgttctttcactggattttgaagacgtgacattgtgtatgttattgagtatattgtttgtaatgtcgcagcttaaagctacagatcataatatatgatatgatatcttg

SEQ ID NO: 2355 - protein, 152 aa, Zea mays subsp. mays
  peptide (1)..(152): Ceres Seq. ID no. 12410787
MGWQNSDPSTDFRAAGFMSLENLIYFARNYPDSFHRLLHKADGKRAEWEYPFAVGGVNISYMLVQMLDLQSGKMRTKAGVHFVQLLDDDGVAFDNLFCVAFQVLDSQWLARRASYMEFNEVLKSTRGQLEQELTIGGISRIQDMPSFRMLRR

SEQ ID NO: 2356 - protein, 135 aa, Zea mays subsp. mays
  peptide (1)..(135): Ceres Seq. ID no. 12410788
MSLENLIYFARNYPDSFHRLLHKADGKRAEWEYPFAVGGVNISYMLVQMLDLQSGKMRTKAGVHFVQLLDDDGVAFDNLFCVAFQVLDSQWLARRASYMEFNEVLKSTRGQLEQELTIGGISRIQDMPSFRMLRR

SEQ ID NO: 2357 - protein, 91 aa, Zea mays subsp. mays
  peptide (1)..(91): Ceres Seq. ID no. 12410789
MLVQMLDLQSGKMRTKAGVHFVQLLDDDGVAFDNLFCVAFQVLDSQWLARRASYMEFNEVLKSTRGQLEQELTIGGISRIQDMPSFRMLRR

SEQ ID NO: 2358 - DNA, 1159 bp, Zea mays subsp. mays
  misc_feature (1)..(1159): Ceres Seq. ID no. 12410780
  misc_feature (1)..(1159): Ortholog of  Ceres SEQ ID NO 14301568 as cited in SEQ ID NO 66744
acgggtccacgacagtgccggatagaatcggtccaccactccccgtaccccgaactacctgacctgagagagagaccgtgcctccctcgccgccgccgccgcagcatccctagtcggagaagatggccgagaagccggcaggtcccaccccgaggacgaggatccgaggcggtctcgcggcctcagctccctcctccaggaggctgtcttccgtatctttcaccgcggccccgagcaagatcaagaaggttcctgaccctccaaaggccgtgaggccatcaagagccacacctgccaagaagcggccacaagtggatcaagctcagaagcggagagaagaggtcgctgctctgcaggagcagcttaatggcctgcaaagtaagttgcatgaaaaagatgaagctctaagatccgcagagaacttgatcggacgagttactgcggcgaatgaagcagttgatgggttgaggagccagctctccgagaaggaattgctgattgaatctactggttcagagctgcacggtgcaaagatcatgctagcagagaagcaggcggcactggagaagttagagtgggaggcaaatgtgtcgagtacaaaggtggaagagctccaagctgatgtagcttctatggatactgaagtttctgctctgatgaagctgttcaggaaaataacagagagtgacagagcccctccacccagggatagaaatgacgatttgtctttggaatgcgagccagttcaccttgatgacacggtagacgacattgaccttgagaagatggagaaggagatgtcagcctacgtttcggctttgtctgccgcgaaggagaaccctaccgacgagttcatgagagcagtcgcagatgcaagattaagacttcaagccgttgtactctgaccaagactagagcgttgcgttgtactgtgtaaccaacaggagcaagcaagtcgatagtacgtttgctaatcgctgtgttttgccggtggcccccctcagggccttttctgtgttctttctcctaccttgcatctgatcgggcggccgctagtgacagtgagctagcttgatgtaacctgtaacgctatgaaccgtggtgtacgtgactgaacctccgtaatagtagatggtatcgtgtacggtgtacctttttt

SEQ ID NO: 2359 - protein, 260 aa, Zea mays subsp. mays
  peptide (1)..(260): Ceres Seq. ID no. 12410781
MAEKPAGPTPRTRIRGGLAASAPSSRRLSSVSFTAAPSKIKKVPDPPKAVRPSRATPAKKRPQVDQAQKRREEVAALQEQLNGLQSKLHEKDEALRSAENLIGRVTAANEAVDGLRSQLSEKELLIESTGSELHGAKIMLAEKQAALEKLEWEANVSSTKVEELQADVASMDTEVSALMKLFRKITESDRAPPPRDRNDDLSLECEPVHLDDTVDDIDLEKMEKEMSAYVSALSAAKENPTDEFMRAVADARLRLQAVVL

SEQ ID NO: 2360 - DNA, 711 bp, Zea mays subsp. mays
  misc_feature (1)..(711): Ceres Seq. ID no. 12588472
  misc_feature (1)..(711): Ortholog of  Ceres SEQ ID NO 12783998 as cited in SEQ ID NO 61535
  misc_feature (1)..(711): Ortholog of  Ceres SEQ ID NO 15174264 as cited in SEQ ID NO 61877
  misc_feature (1)..(711): Ortholog of  Ceres SEQ ID NO 12616383 as cited in SEQ ID NO 63582
acggccatagaaatcgaccgagcgaatccctcgcatcgcattcgcagcctttgctgcatcacaccaccgcgaaaccccagcagccgcatcgatggcgcctaaggcggagaagaagccggctgcgaagaagccagcggaggaggagcccgctgccgcgaaggccccggcggggaagaagcccaaggccgagaagcgcctcccggcggccaagtcgtccggcaaagaaggcggcgacaagaagggtaagaagaaggcgaagaagtcggtggagacctacaagatctacatcttcaaggtgctgaagcaggtccacccggacatcggcatctcttccaaggccatgtccatcatgaactccttcatcaacgacatcttcgagaagctcgccggcgaggctgccaagcttgcgcgctacaacaagaagcccaccatcacctctcgggagattcaaacctctgtccgccttgtccttcccggcgagctcgccaagcacgcggtctccgagggcaccaaggccgtcactaagttcacatcatcttagatttgaggtagtagctattgggtggcgttggtagctgtgtctcaatttgtctgctactaatagtggtaggagtatccatgtgtagttgggttgcggtaagaattgtgttaaactggcaatatgtttgaaattgctttttatggatgtggaatagttgtgttgcttgttct

SEQ ID NO: 2361 - protein, 149 aa, Zea mays subsp. mays
  peptide (1)..(149): Ceres Seq. ID no. 12588473
MAPKAEKKPAAKKPAEEEPAAAKAPAGKKPKAEKRLPAAKSSGKEGGDKKGKKKAKKSVETYKIYIFKVLKQVHPDIGISSKAMSIMNSFINDIFEKLAGEAAKLARYNKKPTITSREIQTSVRLVLPGELAKHAVSEGTKAVTKFTSS

SEQ ID NO: 2362 - protein, 99 aa, Zea mays subsp. mays
  peptide (1)..(99): Ceres Seq. ID no. 12588474
GHRNRPSESLASHSQPLLHHTTAKPQQPHRWRLRRRRSRLRRSQRRRSPLPRRPRRGRSPRPRSASRRPSRPAKKAATRRVRRRRRSRWRPTRSTSSRC

SEQ ID NO: 2363 - DNA, 1607 bp, Zea mays subsp. mays
  misc_feature (1)..(1607): Ceres Seq. ID no. 12387119
  misc_feature (1)..(1607): Ortholog of  Ceres SEQ ID NO 12609146 as cited in SEQ ID NO 52118
  misc_feature (1)..(1607): Ortholog of  Ceres SEQ ID NO 13638136 as cited in SEQ ID NO 58644
  misc_feature (1)..(1607): Ortholog of  Ceres SEQ ID NO 15225826 as cited in SEQ ID NO 64774
  misc_feature (1)..(1607): Ortholog of  Ceres SEQ ID NO 13599119 as cited in SEQ ID NO 0
atttctcctctcctctcccctcgctagttcgtcgcgtcctcctcagatcaacaaaccgtgtcctgctgctgcctctggaaaccaccgggggatcgccccgcccttttcttcccgcaccccagatcctccgtcccaaaacggcagcttccggaggtctcccgtctccctgctccttccggcgcgacgggtggcccggctcgcggatccggcggtcttcggtcgacggcgaggcggcgctcgtcttggatcgggagtggttgctgaggcgcggagatggtggccgaggcggaagtcatgcatcagtcccccgttccggtgctggaggtgcagtaccaccggcgcgcgacgaccaagggggttgacgacgtcgtcgggatgtccgcgcccgcccccgcggaggttggggttggggttggggttgaggtcgaggtcgaggtcgaggtcgccgtggaggtgcctcgcatggggttggagcagcctgatgtcgcaccaagtttatccacggacatgatacagcagtttgtgcccaacatccgttctggtagcttcgccgacattgggcctcggaggtatatggaggacgagcacatccgaatagatgatctttccgcccatctcggctcgatgttggtctgccctctgcctagcgccttctacggggtctttgacggccatggcggcccggacgccgcagcctacatgaagaggcatgcgatgaggttcttgtttgaggaaagcgagttcccacaggcgtcgcaggtggatgaggtgtacctcgagtccgtggagagctgtgtccgcagagccttcctgcaggcggaccttgccctggctgatgatctggacatcagccggtcctctggaaccacggcgctcactgcattagtgtttggaaggcaactggtggtcgcgaacacgggggactgccgcgcggtgttgtgccggaaaggagtggcgatggagatgtcccgcgaccaccgcgcgaaccacgtggaggagcgcgagagggtggccgcgtcgggcgggtacatcgaggacgggtacctgaacggggtgctgtcggtgacgcgggcgctgggcgactgggacatgaaggcgcccggcgcgtcggcgtcggcggcgctgatcgcggagcccgagttccggcgggcgacgctgggtgaggacgacgagttcctcgtcatggggtgcgacgggatctgggacgtgatgacgagccagcacgcggtgagcctggtgcggcgcggcctgcggcagcacgacgaccccgcgcgctgcgcccgggagctggtgatggaggccaagcggctggagacggccgacaacctgacggtcgtcgtggtgtgcttcgcgccggagatggggtcgccgtttacaccgcagcaacagcaggaggaggagctgcccgcgaggcccaggagctgcaagaagggcctgtcgacggaggcgctgtgcagcctgaggagctggctggatacggaccaccggtagagggaggaagagctggggggtgtgtaaatactggagtattatgctgacagcaacactggttgattatgagcgctgggccatctgttgaggattttacgtaggctggttcagcagcc

SEQ ID NO: 2364 - protein, 405 aa, Zea mays subsp. mays
  peptide (1)..(405): Ceres Seq. ID no. 12387120
MVAEAEVMHQSPVPVLEVQYHRRATTKGVDDVVGMSAPAPAEVGVGVGVEVEVEVEVAVEVPRMGLEQPDVAPSLSTDMIQQFVPNIRSGSFADIGPRRYMEDEHIRIDDLSAHLGSMLVCPLPSAFYGVFDGHGGPDAAAYMKRHAMRFLFEESEFPQASQVDEVYLESVESCVRRAFLQADLALADDLDISRSSGTTALTALVFGRQLVVANTGDCRAVLCRKGVAMEMSRDHRANHVEERERVAASGGYIEDGYLNGVLSVTRALGDWDMKAPGASASAALIAEPEFRRATLGEDDEFLVMGCDGIWDVMTSQHAVSLVRRGLRQHDDPARCARELVMEAKRLETADNLTVVVVCFAPEMGSPFTPQQQQEEELPARPRSCKKGLSTEALCSLRSWLDTDHR

SEQ ID NO: 2365 - protein, 398 aa, Zea mays subsp. mays
  peptide (1)..(398): Ceres Seq. ID no. 12387121
MHQSPVPVLEVQYHRRATTKGVDDVVGMSAPAPAEVGVGVGVEVEVEVEVAVEVPRMGLEQPDVAPSLSTDMIQQFVPNIRSGSFADIGPRRYMEDEHIRIDDLSAHLGSMLVCPLPSAFYGVFDGHGGPDAAAYMKRHAMRFLFEESEFPQASQVDEVYLESVESCVRRAFLQADLALADDLDISRSSGTTALTALVFGRQLVVANTGDCRAVLCRKGVAMEMSRDHRANHVEERERVAASGGYIEDGYLNGVLSVTRALGDWDMKAPGASASAALIAEPEFRRATLGEDDEFLVMGCDGIWDVMTSQHAVSLVRRGLRQHDDPARCARELVMEAKRLETADNLTVVVVCFAPEMGSPFTPQQQQEEELPARPRSCKKGLSTEALCSLRSWLDTDHR

SEQ ID NO: 2366 - protein, 371 aa, Zea mays subsp. mays
  peptide (1)..(371): Ceres Seq. ID no. 12387122
MSAPAPAEVGVGVGVEVEVEVEVAVEVPRMGLEQPDVAPSLSTDMIQQFVPNIRSGSFADIGPRRYMEDEHIRIDDLSAHLGSMLVCPLPSAFYGVFDGHGGPDAAAYMKRHAMRFLFEESEFPQASQVDEVYLESVESCVRRAFLQADLALADDLDISRSSGTTALTALVFGRQLVVANTGDCRAVLCRKGVAMEMSRDHRANHVEERERVAASGGYIEDGYLNGVLSVTRALGDWDMKAPGASASAALIAEPEFRRATLGEDDEFLVMGCDGIWDVMTSQHAVSLVRRGLRQHDDPARCARELVMEAKRLETADNLTVVVVCFAPEMGSPFTPQQQQEEELPARPRSCKKGLSTEALCSLRSWLDTDHR

SEQ ID NO: 2367 - DNA, 1250 bp, Zea mays subsp. mays
  misc_feature (1)..(1250): Ceres Seq. ID no. 12406761
  misc_feature (1)..(1250): Ortholog of  Ceres SEQ ID NO 14316328 as cited in SEQ ID NO 57856
aagccaagcaaggagagcagcagcttagcctagcactgctgcagcttgcttgctttgctttgcttcttcttggccaggcctcagagcagagctttggcttggctagtcgtcgtccgcggatagtctccgctacaccgtgtgcgtgcaagcaaggcaaggcaaccagccagccgcggcgacgaccgatcgtcaacaagctcgatcgccttggccggcggccgggcgggccaccgcaagccgcgagcgatggaggagcagctgggcccggtggcggtgacgcacctgctgcagcacacgctgcggagcctctgcaccggcgacgccccgcagtggggtctacgccgtcttctggcgcatcctgccccggaactacccgccccccaaatgggatctccctggcgccgcgtacgacaggacccgagggaacaggaggaactggatcctggcatgggaggacgggttctgcaacttcgcggcggccagcagctctgccgccgcgtccgcgtgcggccaagagggggcagcggcagctgcggcggttgcatatgccggggactgtgaggcagctgtgcaggatgcggtgaagcaccagcaccagcaggcgcagggcctgcagcctgagctgttcttcaagatgtcccatgacatctacaactacggcgaaggtctgatagggaaagtggcggcagaccacagccacaagtgggtgttcaaggagccccaggagcacgagacgagcaacctcatctcctcctggagcaaccctgcagactctcatccgaggacgtgggaggcgcagttccagtgcggcatccaggtgcacacttttaggccttgacaaatcgcaatccggcccctttttgatcagaggcaggcagctagcgctagctagctgtgggctgtgtggcctacctcctctggctgcgattgcccaagacaagacatggccagctagctgactctgccatgccatggccaattggcctgcctgcctgcgtcggcttttctttttctttttttcccccctcgctcacattctgcgctttgctctgcacttgtgcagaccatcgccctgatcgctgtcagggagggcgtcgtgcagctcggctccatgaaaaaggtgccgctactctctcagtcagctactgctcaccggtcgttctctgcactccgattgagggtccgaggcagggcagcgcgtgtgtgcagtagcgagcgctgtagtatggtttttgtgttgtgtgtgtgtg

SEQ ID NO: 2368 - protein, 193 aa, Zea mays subsp. mays
  peptide (1)..(193): Ceres Seq. ID no. 12406762
AKQGEQQLSLALLQLACFALLLLGQASEQSFGLASRRPRIVSATPCACKQGKATSQPRRRPIVNKLDRLGRRPGGPPQAASDGGAAGPGGGDAPAAAHAAEPLHRRRPAVGSTPSSGASCPGTTRPPNGISLAPRTTGPEGTGGTGSWHGRTGSATSRRPAALPPRPRAAKRGQRQLRRLHMPGTVRQLCRMR

SEQ ID NO: 2369 - protein, 104 aa, Zea mays subsp. mays
  peptide (1)..(104): Ceres Seq. ID no. 12406763
MEEQLGPVAVTHLLQHTLRSLCTGDAPQWGLRRLLAHPAPELPAPQMGSPWRRVRQDPREQEELDPGMGGRVLQLRGGQQLCRRVRVRPRGGSGSCGGCICRGL

SEQ ID NO: 2370 - DNA, 968 bp, Zea mays subsp. mays
  misc_feature (1)..(968): Ceres Seq. ID no. 12350331
  misc_feature (1)..(968): Ortholog of  Ceres SEQ ID NO 13596426 as cited in SEQ ID NO 62055
aaaaatcaactgattcgctgaaaaacggagaattgaaagcgaatgctgtctcccaccacactgcggccgctggttccggcggcggcgccagcgcaccttaccgcctgcttcttgcccgcgtcggggcggcgtgcgccggcggcggcggtgcgcgcggtgcggaactacgactccatcccgaagcgggagcccttcacctccaaccgcagcaccctcgacgagttcctccggctggacaagccgctcgtccagcgtaccaaggaccagatcacagattattgcatgaccgtcgaaggtgatgaatgttgcagctgttgggatgcttactttgaactgaataaacttgagcaagagctgcctaaagaggaaatctcaaggatggtgaaggactcagagggtgacgtgaggtacctgatcgagagcatccatcatcgctcagatttgcggaagaagatggcagagaaatctcgtaattcagtaccatccggctcccaggggcaaactgcaaagccaaggccattccccgtgcctgatgggataccgaaaacacaggaagagctcaccgaagaagaggaagcgttgatgccagagtctccatacacaaggttgctgagaaggatgggtagataccctgaatggtacaccccacgccctgatcatgagactgactgaatcaagtcatctaccatccaggtgtcccttttggaagttttgcagcatgataatctgaagctgaagctcgttttatggtatgtggtaatattttagtgttgcacctatgctgctttgcagattagacttgtccttttctacttattaatgaaaaccggtgtgtgcggtttatgctgtaaatacctggagtgttcagaatatgttttgttcgaggttctgtgtactgaagtacggagtactaatgaatttccttgtacataacatcgaataaaatcactgggttttactttggtttc

SEQ ID NO: 2371 - protein, 209 aa, Zea mays subsp. mays
  peptide (1)..(209): Ceres Seq. ID no. 12350332
MLSPTTLRPLVPAAAPAHLTACFLPASGRRAPAAAVRAVRNYDSIPKREPFTSNRSTLDEFLRLDKPLVQRTKDQITDYCMTVEGDECCSCWDAYFELNKLEQELPKEEISRMVKDSEGDVRYLIESIHHRSDLRKKMAEKSRNSVPSGSQGQTAKPRPFPVPDGIPKTQEELTEEEEALMPESPYTRLLRRMGRYPEWYTPRPDHETD

SEQ ID NO: 2372 - protein, 129 aa, Zea mays subsp. mays
  peptide (1)..(129): Ceres Seq. ID no. 12350333
MTVEGDECCSCWDAYFELNKLEQELPKEEISRMVKDSEGDVRYLIESIHHRSDLRKKMAEKSRNSVPSGSQGQTAKPRPFPVPDGIPKTQEELTEEEEALMPESPYTRLLRRMGRYPEWYTPRPDHETD

SEQ ID NO: 2373 - DNA, 936 bp, Zea mays subsp. mays
  misc_feature (1)..(936): Ceres Seq. ID no. 13564260
  misc_feature (1)..(936): Ortholog of  Ceres SEQ ID NO 14311229 as cited in SEQ ID NO 53262
gccccgtcccaaatccccctgtcccgctaggattcccccgaaaccctcccccaaaaccccagagcggagaagagcgcaagatgttcggcttcgggcaccacggccaccacggccagaacccgccggcgcacggcggcgtgcaccagcccaccttcaagatcttctgcaaggccgacgaggggtactgcctcaccgtccgcgacggcaacgtggtgctggcccccgccaacccgcgcgacgagcaccagcactggtacaaggacatgcgcttcagcacccaggtcaaggacgaggagggcaaccctgcgttcgccctcgtcaacaaggccactggggctcgccatcaagcactccctcggccagtcccacccggtgaagctggtgccgttcaacccggagtaccaggacgagtcggtgctgtggacggagagcggcgacgtgggcaagggcttccgctgcatccgcatggtgaacaacatccgcctcaacttcgacgccttccacggcggacaagggccacggcggcgtgcgcgacggcaccaacatcgtgctctggaagtggtgcgagggcgacaaccagcgctggaagatcgtcccctggtaaatgtgctgttctgtggctgcactggtcatcaccatgatctggagctttgaaggcatagccacctgtggtcagcaactgctgccgtgttgctagaataaagttggtggcgatcgatcgatcgatctttggtgatgggtgtccctccctgtgtgtttgtgtttagttccagtcgtttgtgaggaagtcagttatgtttgagtgagaggggtacttcgctcttcggttaactctgtacttgtcatgaggagagttttcatacccggagtgtagaaccctgtactgtactcggatccttcctttttcatccaagtgggttttattttatcaaccgc

SEQ ID NO: 2374 - protein, 212 aa, Zea mays subsp. mays
  peptide (1)..(212): Ceres Seq. ID no. 13564261
PVPNPPVPLGFPRNPPPKPQSGEERKMFGFGHHGHHGQNPPAHGGVHQPTFKIFCKADEGYCLTVRDGNVVLAPANPRDEHQHWYKDMRFSTQVKDEEGNPAFALVNKATGARHQALPRPVPPGEAGAVQPGVPGRVGAVDGERRRGQGLPLHPHGEQHPPQLRRLPRRTRATAACATAPTSCSGSGARATTSAGRSSPGKCAVLWLHWSSP

SEQ ID NO: 2375 - protein, 186 aa, Zea mays subsp. mays
  peptide (1)..(186): Ceres Seq. ID no. 13564262
MFGFGHHGHHGQNPPAHGGVHQPTFKIFCKADEGYCLTVRDGNVVLAPANPRDEHQHWYKDMRFSTQVKDEEGNPAFALVNKATGARHQALPRPVPPGEAGAVQPGVPGRVGAVDGERRRGQGLPLHPHGEQHPPQLRRLPRRTRATAACATAPTSCSGSGARATTSAGRSSPGKCAVLWLHWSSP

SEQ ID NO: 2376 - protein, 125 aa, Zea mays subsp. mays
  peptide (1)..(125): Ceres Seq. ID no. 13564263
MRFSTQVKDEEGNPAFALVNKATGARHQALPRPVPPGEAGAVQPGVPGRVGAVDGERRRGQGLPLHPHGEQHPPQLRRLPRRTRATAACATAPTSCSGSGARATTSAGRSSPGKCAVLWLHWSSP

SEQ ID NO: 2377 - DNA, 934 bp, Zea mays subsp. mays
  misc_feature (1)..(934): Ceres Seq. ID no. 12344895
  misc_feature (1)..(934): Ortholog of  Ceres SEQ ID NO 14302617 as cited in SEQ ID NO 1022
atcaatccctaatctcggcggatggctccttccttccccgcgctcgctcccacggcgaccgagctccaaaacaacgccgccgccagatccgcccgccaccggccgtcctcagctcatgccggctgcaccaagccagatccaaccccgcaccctcctccagcaccaccagctcgccctcctgtgtcccagctcccatcgccaccgcccccaccaccaccgccggcccgcccttccgacccagctgtaagccgtgcgccggcggccccccgccctaccaagagggtgaggtttgcattcactacaagcaccatgccgccccgcattcaccacccctcccccgtatcccgcagccataatgccacccccgccccgatagctggtttgaagcccccctggaagctacgaccgcattgaagatgaggatcttgaaggatggacgacgattcggtgcaggcgtggacgcgtcacccgcgtaggcctaggccgcgccccagcggcgcctcgcctgctctcagctcaagcccctagccgtcttatgcctcgtgtgaagatgctagagaagacaaaaggcaagcgctgatgatcctgcaagtggtaatgaatagagagcctataaagcgcctttctggcgcacaatctgaagctgcaaagcaaacgcaatgctgccgtcgggagattggaactacaatatctttgcatctctagctagtggatgttcctttggactgatgactttgccgtagaggttagccgtcactcgtcactggacagtgcgtttgctgctatatcaagaggttcttcttttttttaagcttggtttcaatgtatacaaagtttcgtttaaggaccctttgctaccgagtgtagtccaaaggctacttaactcataaacacatgagacacaaagatataggaggtattgatactttcattc

SEQ ID NO: 2378 - protein, 130 aa, Zea mays subsp. mays
  peptide (1)..(130): Ceres Seq. ID no. 12344896
MAPSFPALAPTATELQNNAAARSARHRPSSAHAGCTKPDPTPHPPPAPPARPPVSQLPSPPPPPPPPARPSDPAVSRAPAAPRPTKRVRFAFTTSTMPPRIHHPSPVSRSHNATPAPIAGLKPPWKLRPH

SEQ ID NO: 2379 - protein, 117 aa, Zea mays subsp. mays
  peptide (1)..(117): Ceres Seq. ID no. 12344897
QSLISADGSFLPRARSHGDRAPKQRRRQIRPPPAVLSSCRLHQARSNPAPSSSTTSSPSCVPAPIATAPTTTAGPPFRPSCKPCAGGPPPYQEGEVCIHYKHHAAPHSPPLPRIPQP

SEQ ID NO: 2380 - protein, 81 aa, Zea mays subsp. mays
  peptide (1)..(81): Ceres Seq. ID no. 12344898
SIPNLGGWLLPSPRSLPRRPSSKTTPPPDPPATGRPQLMPAAPSQIQPRTLLQHHQLALLCPSSHRHRPHHHRRPALPTQL

SEQ ID NO: 2381 - DNA, 1385 bp, Zea mays subsp. mays
  misc_feature (1)..(1385): Ceres Seq. ID no. 12348953
  misc_feature (1)..(1385): Ortholog of  Ceres SEQ ID NO 14302021 as cited in SEQ ID NO 68979
  misc_feature (1)..(1385): Ortholog of  Ceres SEQ ID NO 14309296 as cited in SEQ ID NO 0
acctgcacgctggccccccgccccgccgcgggatcaaatacgccgcctccgcccgtccactccctcgccgcccccgtctcctctcctctcctctcccccgcatccacggccgcaggccgcagccagccactcgacgatctagtcgtctctctctccccgctctgccgcctcgctgccgcggcttcccgtcggctggaggatgaaggtcacggtcgtgtcccggagcggccgggaggtcgtcaagggcggcatcgacctcaaggactcggccaaggtcgcggacctgcaggaggccatccatgccaggactaagaagtattatccttctaggcagcggctcaccctcccccttcaacctggaaaaggcgggaagccagttgtcctcagtccgaaggccagcctgctagaatactgcgagaagggttctgggtcactgacagtggtcttcaaagatttagggccacaggtctactacagcacactgttcttcttcgagtacctgggtcctctcatcatctaccccatgttctactatctgcctgtctacaaatacttcgggtacgagggggagcgggccatgcaccctgtccagacctacgccatgtactactggtgcttccactacttcaagcggatcatggagacattcttcgtgcaccgcttcagccacgcgacgtcgccgctctcgaacgtcttcaggaactgtgcctactactggaccttcggcgcctacattgcttactactgcaaccacccgctgtacaccccagtgagtgatctgcagatgaagattgggtttggttttggggtcgtctgccaggtcgcgaacttctactgccacatcctgctgcggaacctcaggagcccaagcggcagcggcgggtaccagatcccccgcggtttcttgttcaacatcgtgacctgcgccaattacaccaccgagatctatcagtgggtcggcttcaacatcgccacgcagaccgtggcaggttacgtcttccttgtcgtggcggcaggcatcatgaccaactgggcgctcggcaagcacagccgtctgaagaagctgtttgacggcaaggatgggaggcccaagtaccctcgccggtgggtgattctccctccgttcctgtgaagaggtggtggtggtcggcctattgtgattcgatgtctacagacagttgtactgtactaatcgtgcctgtttagcggttgaacttggattccgttgtccgaaatttctaatccgaaagatggatttcattgtcttcttcttcttagcattatgtcactatctcacgtcgtcctgtctcaatacagtctaaggttcatgtgatgttatccccatttgtccacgcacaagtgaatgcagtcactatttcgatccg

SEQ ID NO: 2382 - protein, 310 aa, Zea mays subsp. mays
  peptide (1)..(310): Ceres Seq. ID no. 12348954
MKVTVVSRSGREVVKGGIDLKDSAKVADLQEAIHARTKKYYPSRQRLTLPLQPGKGGKPVVLSPKASLLEYCEKGSGSLTVVFKDLGPQVYYSTLFFFEYLGPLIIYPMFYYLPVYKYFGYEGERAMHPVQTYAMYYWCFHYFKRIMETFFVHRFSHATSPLSNVFRNCAYYWTFGAYIAYYCNHPLYTPVSDLQMKIGFGFGVVCQVANFYCHILLRNLRSPSGSGGYQIPRGFLFNIVTCANYTTEIYQWVGFNIATQTVAGYVFLVVAAGIMTNWALGKHSRLKKLFDGKDGRPKYPRRWVILPPFL

SEQ ID NO: 2383 - protein, 202 aa, Zea mays subsp. mays
  peptide (1)..(202): Ceres Seq. ID no. 12348955
MFYYLPVYKYFGYEGERAMHPVQTYAMYYWCFHYFKRIMETFFVHRFSHATSPLSNVFRNCAYYWTFGAYIAYYCNHPLYTPVSDLQMKIGFGFGVVCQVANFYCHILLRNLRSPSGSGGYQIPRGFLFNIVTCANYTTEIYQWVGFNIATQTVAGYVFLVVAAGIMTNWALGKHSRLKKLFDGKDGRPKYPRRWVILPPFL

SEQ ID NO: 2384 - protein, 184 aa, Zea mays subsp. mays
  peptide (1)..(184): Ceres Seq. ID no. 12348956
MHPVQTYAMYYWCFHYFKRIMETFFVHRFSHATSPLSNVFRNCAYYWTFGAYIAYYCNHPLYTPVSDLQMKIGFGFGVVCQVANFYCHILLRNLRSPSGSGGYQIPRGFLFNIVTCANYTTEIYQWVGFNIATQTVAGYVFLVVAAGIMTNWALGKHSRLKKLFDGKDGRPKYPRRWVILPPFL

SEQ ID NO: 2385 - DNA, 1825 bp, Zea mays subsp. mays
  misc_feature (1)..(1825): Ceres Seq. ID no. 12373878
  misc_feature (1)..(1825): Ortholog of  Ceres SEQ ID NO 13595861 as cited in SEQ ID NO 58153
  misc_feature (1)..(1825): Ortholog of  Ceres SEQ ID NO 13584292 as cited in SEQ ID NO 63687
atcaactctatccagtttcctgtctcgtttcatattgttttcccagaaatggaccggatgtgatttgtattcgtttttatccctaaatctgagtttagggggatttttagggaaataatggaggtgctgtaagtacccttccgtctgtctctccctcactcccttcgcgacgactacgcccggtgctcttcttcggccccaggtagctttcgctgccgtcctacggcaggtgcccaagtcttcttcgggcccttcaacgacgacgagcactaccagtttgttgaagatggaaaataaagagttgttcaagatgggaagtgcagatacagatactgctgcactgcacaaggagtgggatgatgttctctgtccgatatgcatggaccatccgcacaatgctgtccttctgttgtgcagctcccatgacaaaggatgccgatcctatatatgtgatacaagctataggcattcaaattgcctagataggttcaagaaaatgaaagtgaatgatgaggacagtccttcacagtcaagctcgtccatgcctaggggtacaggaaaccaaaatgttgtccagagatctcgttttggtcccactagagagagccccaggctacacatagacatatctgtacccgatgaaacttccgatcatcaagatgccagccacagacctgctgccatagttggagaacaggaagaaaacatctacaatgaaggcccagatttgacattggaaactcacgaggttgggatcaatggttcttcagtgtcaagcgacgtgtcaagcttaaatcaattgttgtgcccactgtgcagaggggtggttagtggctggaagatcatcaaagaagctagacagtatttggatgggaaatccagagcttgctcacgagaagcctgcatgttttctggtaactacagggagatccgtagacatgccagaagggtgcaccccacaacaaggcctgctgatgttgatccatcaagacgtcgtgcgtggcaccacctggagcatcagcgggattatgctgacatagtaagcgcaataaggtccgctatgcctggggcagttgtgcttggtgattatgctattgaaggcggagaaatattttcacatgaccgggaaaccagtgaaccaagtgggtctcttctgacaacattctttctatttcatatgctcagcagtagtccgattagatcaggtgatgagccaagaggcacatcaaggggcctgagaaggcagaggagacgctatctgtggggagagaatttgttaggtctccaatatgatgatgatgatgacgacgacgataacgaaggggaggaggatgaagtggatgctgtggatgaagttcagagaccaaggagtcgccggaggttcataagatcaagatcagaggagcgggcctaatacattgtggagatgtggatgatgtgcttccttgcttggttaaaatgctgtgcgcatccctgcaatcaaagaccaaaaggcaaatggacctcaagttcaagtttagatgatttggatgcgtctgacaccatccatgtgccctctttaatctgacgatcataagaaacactcattcttagggcaaagctggactgctctcagaccagaactgacatggaagctagcgtttggagatgctcgctccatcacaacagctggtgccgtcactcattcaccatgcctttttacctttgcactgcgtgtcatctgcatctgtagtatattctttccgtattacgtctcattgagtccatgctgctactgttctggttgatatccttgttcaaaggctataaaatttattatattttc

SEQ ID NO: 2386 - protein, 375 aa, Zea mays subsp. mays
  peptide (1)..(375): Ceres Seq. ID no. 12373879
MENKELFKMGSADTDTAALHKEWDDVLCPICMDHPHNAVLLLCSSHDKGCRSYICDTSYRHSNCLDRFKKMKVNDEDSPSQSSSSMPRGTGNQNVVQRSRFGPTRESPRLHIDISVPDETSDHQDASHRPAAIVGEQEENIYNEGPDLTLETHEVGINGSSVSSDVSSLNQLLCPLCRGVVSGWKIIKEARQYLDGKSRACSREACMFSGNYREIRRHARRVHPTTRPADVDPSRRRAWHHLEHQRDYADIVSAIRSAMPGAVVLGDYAIEGGEIFSHDRETSEPSGSLLTTFFLFHMLSSSPIRSGDEPRGTSRGLRRQRRRYLWGENLLGLQYDDDDDDDDNEGEEDEVDAVDEVQRPRSRRRFIRSRSEERA

SEQ ID NO: 2387 - protein, 367 aa, Zea mays subsp. mays
  peptide (1)..(367): Ceres Seq. ID no. 12373880
MGSADTDTAALHKEWDDVLCPICMDHPHNAVLLLCSSHDKGCRSYICDTSYRHSNCLDRFKKMKVNDEDSPSQSSSSMPRGTGNQNVVQRSRFGPTRESPRLHIDISVPDETSDHQDASHRPAAIVGEQEENIYNEGPDLTLETHEVGINGSSVSSDVSSLNQLLCPLCRGVVSGWKIIKEARQYLDGKSRACSREACMFSGNYREIRRHARRVHPTTRPADVDPSRRRAWHHLEHQRDYADIVSAIRSAMPGAVVLGDYAIEGGEIFSHDRETSEPSGSLLTTFFLFHMLSSSPIRSGDEPRGTSRGLRRQRRRYLWGENLLGLQYDDDDDDDDNEGEEDEVDAVDEVQRPRSRRRFIRSRSEERA

SEQ ID NO: 2388 - protein, 344 aa, Zea mays subsp. mays
  peptide (1)..(344): Ceres Seq. ID no. 12373881
MDHPHNAVLLLCSSHDKGCRSYICDTSYRHSNCLDRFKKMKVNDEDSPSQSSSSMPRGTGNQNVVQRSRFGPTRESPRLHIDISVPDETSDHQDASHRPAAIVGEQEENIYNEGPDLTLETHEVGINGSSVSSDVSSLNQLLCPLCRGVVSGWKIIKEARQYLDGKSRACSREACMFSGNYREIRRHARRVHPTTRPADVDPSRRRAWHHLEHQRDYADIVSAIRSAMPGAVVLGDYAIEGGEIFSHDRETSEPSGSLLTTFFLFHMLSSSPIRSGDEPRGTSRGLRRQRRRYLWGENLLGLQYDDDDDDDDNEGEEDEVDAVDEVQRPRSRRRFIRSRSEERA

SEQ ID NO: 2389 - DNA, 1429 bp, Zea mays subsp. mays
  misc_feature (1)..(1429): Ceres Seq. ID no. 12407830
  misc_feature (1)..(1429): Ortholog of  Ceres SEQ ID NO 14308615 as cited in SEQ ID NO 58538
  misc_feature (1)..(1429): Ortholog of  Ceres SEQ ID NO 13585342 as cited in SEQ ID NO 63601
  misc_feature (1)..(1429): Ortholog of  Ceres SEQ ID NO 15177459 as cited in SEQ ID NO 0
tttttataagggagcaagagggctcggcggcagcggcgacggcgaccgcgacggcagtggcagtggcagtggcaggctgtcagccgtccctatcttgtgtgtcaagcgcgaactccctatctcgtgtgtcaagcgcgttcgcgtccgttctaggcacaggcagccgaggcgagccccttccgctcagtggccgccgccggaccgtggacgcagctagcccatcagcccatggcagggacggacgtcgcaggctccgcacgcggctccgatgccgcgctcgggaagacgggcgaaccacccgccgcggcgcggctctggcgcagccaagaaggtggctctcgctctgctagcctccttctcggcgctgctgtacagccagattcagccgccgccgtctaagatccccggcatgccgggcgggcctccggtcacggcgcccagaacaaggctcaaggacggccggcacttggcgtacctggaatctggcgtcccaaaggagaaggccaagtacaagatcatattcgttcacggcttcgactgctgtagatacgacgtgctgaatgtctcccaggggctgttggaagagctgggaatctacctgttgtccttcgaccggcccgggtacgccgagagcgacgcccacccggcccggacagagaagagcatcgcccttgacatcgcggagctggcggacaatctccagctcggccccaagttccatctcatcggcttctccatgggcggcgagatcatgtggagctgcctcaagtacatcccgcacaggctcgccggcgtggcgattcttgccccggtgggcaactactggtggtccggcttcccgccggacgtgttcaaggaggcgtggcgcgtgcagtttccgcaagaccagcgcgcggtctgggtcgctcaccacctgccgtggctgacgcactggtggaacacccagaagctgttccgcggatccagcgtcaaggacggcgaccctgccatgctatccaaggaggacaggcttgtagctgacaagttcgagaagcgaacctatgagaagcaggtcagacagcagggagagcacgactcgctccaccgcgacatgatggtcggtttcgggaagtgggactggagcccgctggagatggagaacccgttcgccggcggcctagacgaggtgaaggtgcacctgtggcacggcgtcgaggacctctacgtgccggttcaactgtcgcggtacatcagcgagaggctcccatgggtcatctaccatgagctcccgacggccggccacctcttcccggtcgccgacggcatgcccgacgctatcgtcaggtcgcttctgctcggagatgagtgatcagtatttaggatgcgcggatccaggacttgtgcactttttgcagcttcatcagtaataaaaatacactcggaggtcgag

SEQ ID NO: 2390 - protein, 359 aa, Zea mays subsp. mays
  peptide (1)..(359): Ceres Seq. ID no. 12407831
MPRSGRRANHPPRRGSGAAKKVALALLASFSALLYSQIQPPPSKIPGMPGGPPVTAPRTRLKDGRHLAYLESGVPKEKAKYKIIFVHGFDCCRYDVLNVSQGLLEELGIYLLSFDRPGYAESDAHPARTEKSIALDIAELADNLQLGPKFHLIGFSMGGEIMWSCLKYIPHRLAGVAILAPVGNYWWSGFPPDVFKEAWRVQFPQDQRAVWVAHHLPWLTHWWNTQKLFRGSSVKDGDPAMLSKEDRLVADKFEKRTYEKQVRQQGEHDSLHRDMMVGFGKWDWSPLEMENPFAGGLDEVKVHLWHGVEDLYVPVQLSRYISERLPWVIYHELPTAGHLFPVADGMPDAIVRSLLLGDE

SEQ ID NO: 2391 - protein, 312 aa, Zea mays subsp. mays
  peptide (1)..(312): Ceres Seq. ID no. 12407832
MPGGPPVTAPRTRLKDGRHLAYLESGVPKEKAKYKIIFVHGFDCCRYDVLNVSQGLLEELGIYLLSFDRPGYAESDAHPARTEKSIALDIAELADNLQLGPKFHLIGFSMGGEIMWSCLKYIPHRLAGVAILAPVGNYWWSGFPPDVFKEAWRVQFPQDQRAVWVAHHLPWLTHWWNTQKLFRGSSVKDGDPAMLSKEDRLVADKFEKRTYEKQVRQQGEHDSLHRDMMVGFGKWDWSPLEMENPFAGGLDEVKVHLWHGVEDLYVPVQLSRYISERLPWVIYHELPTAGHLFPVADGMPDAIVRSLLLGDE

SEQ ID NO: 2392 - protein, 203 aa, Zea mays subsp. mays
  peptide (1)..(203): Ceres Seq. ID no. 12407833
MGGEIMWSCLKYIPHRLAGVAILAPVGNYWWSGFPPDVFKEAWRVQFPQDQRAVWVAHHLPWLTHWWNTQKLFRGSSVKDGDPAMLSKEDRLVADKFEKRTYEKQVRQQGEHDSLHRDMMVGFGKWDWSPLEMENPFAGGLDEVKVHLWHGVEDLYVPVQLSRYISERLPWVIYHELPTAGHLFPVADGMPDAIVRSLLLGDE

SEQ ID NO: 2393 - DNA, 1980 bp, Zea mays subsp. mays
  misc_feature (1)..(1980): Ceres Seq. ID no. 12355925
  misc_feature (1)..(1980): Ortholog of  Ceres SEQ ID NO 15169603 as cited in SEQ ID NO 65772
  misc_feature (1)..(1980): Ortholog of  Ceres SEQ ID NO 14308003 as cited in SEQ ID NO 65919
  misc_feature (1)..(1980): Ortholog of  Ceres SEQ ID NO 14303087 as cited in SEQ ID NO 66569
aagaacagcgccatttcttaatcgcagagcctaaacccggtcctcctaattatatcgccacagtgctgtcacaaccaggcgcgatcacaaagcttaaaacgcactggcatggccactactgtactggatgccggtgaactgcacttgcacccctatgccgtcgccgccgcggcggcggcattggtgtcgatgtacatggtgtggttctgggcgctgacacgggggctgtccgggccgcggatgtggcccctcgtcggcagcctgcccagcgtcgtcctgaaccgggcgcgggttcacgactggatcgtcgacaacctgcgctccacgggggaagcggccacgtaccagacgtgcatcttgccgatgccgttcctcgcgcggcgccaggggctggtgaccgtgacgtgcaacccgcggaacctggagcacatcctgcgcgtgcgtttcgacaactaccccaagggccccatgtggcaggcggcgttccacgacctcctgggccagggcatcttcaactccgacggcgagacgtggctgctccagcgcaagacggcggcgctcgagttcaccacgcggaccttgcgccaggcgatggcgcgctgggccaaccgcatcatcaagtaccgcctgtggagcatcctcgcggaccgctgcgaggccgccgcgagcgtcgacctccaggacctgctcctgcgcctcaccttcgacaacatctgcggcctcacgttcggcaaggaccccgagacactgtcgccggggctgcaggagaaccccttcgccaacgccttcgactccgccaccgaggcgacgctgcagaggttcctgttccccagcttcctgtggcgcgtcaagaaggcgctcggcgtcggcagcgagcggagcctccgcgagagcctcgcgaccgtggaccagtacatgacggaggccatcgcggcgcgcaaggcgacgccgtcggacgacctgctctccaggttcatgaagaagcgcgacggcagcggcagggcgttcccagaggacgtgctccagtgggtcgcgctcaacttcgtgctcgccgggcgcgacacgtcgtccgtcgcgctcagctggttcttctggatgctcatgctgcggcgcgacgtcgagcgcaaggtggtcctggagatcgtctccgtggtcagggagacgcggggcgacgaccgcaggaggtggaccgaggagccgctggacttcgacgagctggaccgcctcgtgtacctcaaggcagcgttggcggagacgctgcggctgtacccgtcggtgccgcaggactccaagtacgtggtggaggacgacgtgctgcccgatggcaccgtggtgccggccggctcagcggtcacctactccatctactcggttggacggatggagagcatctgggggaaggactgcgctgagttccggcccgagcggtggctctcggctgacggcacccgtttcgagccgcccaaggacgcgtaccgcttcgtggcgttcaacggcgggccccggacgtgcctgggcaaggacctggcgtacctgcagatgaagtccatcgcgtccgctgtgctgctgcgccactcggtcgagctcgtccctgggcacaaggtggagcagaagatgtcgctcactctgttcatgaagagcggcctccgcgtgcacgtcaagccgcgggacctcgccggctacgtcgcggcaccggaggacgcaccgcagctgggagcctttgtgatcccgaccacaactgcagcagctgcataagccttgcatatgcccgcgcacattggctcgggcttcttcctgctgaacttttttctgctatgtgatgtgcctctgcatgccaaagtcgtatcgttttctctgcacccccttcattagactgttaggtttgtggctacctggcgttttatggttgtaactgtgtatttttgtgtggatggatgtggtggtggatttaggataaaggatgaatgatacaaaattatt

SEQ ID NO: 2394 - protein, 548 aa, Zea mays subsp. mays
  peptide (1)..(548): Ceres Seq. ID no. 12355926
MATTVLDAGELHLHPYAVAAAAAALVSMYMVWFWALTRGLSGPRMWPLVGSLPSVVLNRARVHDWIVDNLRSTGEAATYQTCILPMPFLARRQGLVTVTCNPRNLEHILRVRFDNYPKGPMWQAAFHDLLGQGIFNSDGETWLLQRKTAALEFTTRTLRQAMARWANRIIKYRLWSILADRCEAAASVDLQDLLLRLTFDNICGLTFGKDPETLSPGLQENPFANAFDSATEATLQRFLFPSFLWRVKKALGVGSERSLRESLATVDQYMTEAIAARKATPSDDLLSRFMKKRDGSGRAFPEDVLQWVALNFVLAGRDTSSVALSWFFWMLMLRRDVERKVVLEIVSVVRETRGDDRRRWTEEPLDFDELDRLVYLKAALAETLRLYPSVPQDSKYVVEDDVLPDGTVVPAGSAVTYSIYSVGRMESIWGKDCAEFRPERWLSADGTRFEPPKDAYRFVAFNGGPRTCLGKDLAYLQMKSIASAVLLRHSVELVPGHKVEQKMSLTLFMKSGLRVHVKPRDLAGYVAAPEDAPQLGAFVIPTTTAAAA

SEQ ID NO: 2395 - protein, 521 aa, Zea mays subsp. mays
  peptide (1)..(521): Ceres Seq. ID no. 12355927
MYMVWFWALTRGLSGPRMWPLVGSLPSVVLNRARVHDWIVDNLRSTGEAATYQTCILPMPFLARRQGLVTVTCNPRNLEHILRVRFDNYPKGPMWQAAFHDLLGQGIFNSDGETWLLQRKTAALEFTTRTLRQAMARWANRIIKYRLWSILADRCEAAASVDLQDLLLRLTFDNICGLTFGKDPETLSPGLQENPFANAFDSATEATLQRFLFPSFLWRVKKALGVGSERSLRESLATVDQYMTEAIAARKATPSDDLLSRFMKKRDGSGRAFPEDVLQWVALNFVLAGRDTSSVALSWFFWMLMLRRDVERKVVLEIVSVVRETRGDDRRRWTEEPLDFDELDRLVYLKAALAETLRLYPSVPQDSKYVVEDDVLPDGTVVPAGSAVTYSIYSVGRMESIWGKDCAEFRPERWLSADGTRFEPPKDAYRFVAFNGGPRTCLGKDLAYLQMKSIASAVLLRHSVELVPGHKVEQKMSLTLFMKSGLRVHVKPRDLAGYVAAPEDAPQLGAFVIPTTTAAAA

SEQ ID NO: 2396 - protein, 519 aa, Zea mays subsp. mays
  peptide (1)..(519): Ceres Seq. ID no. 12355928
MVWFWALTRGLSGPRMWPLVGSLPSVVLNRARVHDWIVDNLRSTGEAATYQTCILPMPFLARRQGLVTVTCNPRNLEHILRVRFDNYPKGPMWQAAFHDLLGQGIFNSDGETWLLQRKTAALEFTTRTLRQAMARWANRIIKYRLWSILADRCEAAASVDLQDLLLRLTFDNICGLTFGKDPETLSPGLQENPFANAFDSATEATLQRFLFPSFLWRVKKALGVGSERSLRESLATVDQYMTEAIAARKATPSDDLLSRFMKKRDGSGRAFPEDVLQWVALNFVLAGRDTSSVALSWFFWMLMLRRDVERKVVLEIVSVVRETRGDDRRRWTEEPLDFDELDRLVYLKAALAETLRLYPSVPQDSKYVVEDDVLPDGTVVPAGSAVTYSIYSVGRMESIWGKDCAEFRPERWLSADGTRFEPPKDAYRFVAFNGGPRTCLGKDLAYLQMKSIASAVLLRHSVELVPGHKVEQKMSLTLFMKSGLRVHVKPRDLAGYVAAPEDAPQLGAFVIPTTTAAAA

SEQ ID NO: 2397 - DNA, 1090 bp, Zea mays subsp. mays
  misc_feature (1)..(1090): Ceres Seq. ID no. 12387248
  misc_feature (1)..(1090): Ortholog of  Ceres SEQ ID NO 13596512 as cited in SEQ ID NO 62074
aatcagatgtcatactggggtctaaaaagattgaggctcctgtattatttcgtggaattggacacacggctaatccatcaaacagtttggttctgaaagtcctatctgcctctccatcagcatactcagctaacccaaagactaagttatcgttgcctccatcgcttactgggtcagctatatcactggtttcggttatgcaggcaagaaataatgctcgggtgctgctatctggatcacttgatctttttagcaaccggttcctgaagtctggtgttcaaaaggctggtagcaaaacgagatacgagagagctggaaatgagcaatttgtgacagagacaagcaaatgggtcttccatgagagggggcaccttaaggctgttaatgttaagcaccacaaggttggggagaccaatgaaccaggcatgtaccgcattaacgatgacctggaatactctgttgagatctatgaatggtctggaacaagctggaagccatatgttgctgatgatgtgcaactccagtttttcatgatgagtccttatgttctgaaaactatgtcgaatgacaacaagggtttatactcaacatccttcaaagttcctgatgtctacggagttttccagttcaaagttgagtaccagaggctgggatatactggtttgtcttttacaaagcagattccagtgcgcccttacaggcataacgagtatgagaggttcataacatcagcgtacccatactacactgcctcattttcaacgatgtgtgctttcttcatattctcgcttgtgtacctgtaccacaaataaaggactcacgggagcgcacaagtttctggaggctgctgatgcgacctagatctgtggccaagtgttacccggtgcaattttatggaatcatatatttgtagtaggccaacttagctagaattagacgaccgtgaccgcaatcatgggaaatttactcgtgctagtaggatgttcgatctgccccacaattttttgttttcggatccttctgatcagcacttgtgaaaacgtttacagtctgtagcattgaaaggatgatgaagcatgtagtgattttg

SEQ ID NO: 2398 - protein, 269 aa, Zea mays subsp. mays
  peptide (1)..(269): Ceres Seq. ID no. 12387249
SDVILGSKKIEAPVLFRGIGHTANPSNSLVLKVLSASPSAYSANPKTKLSLPPSLTGSAISLVSVMQARNNARVLLSGSLDLFSNRFLKSGVQKAGSKTRYERAGNEQFVTETSKWVFHERGHLKAVNVKHHKVGETNEPGMYRINDDLEYSVEIYEWSGTSWKPYVADDVQLQFFMMSPYVLKTMSNDNKGLYSTSFKVPDVYGVFQFKVEYQRLGYTGLSFTKQIPVRPYRHNEYERFITSAYPYYTASFSTMCAFFIFSLVYLYHK

SEQ ID NO: 2399 - protein, 204 aa, Zea mays subsp. mays
  peptide (1)..(204): Ceres Seq. ID no. 12387250
MQARNNARVLLSGSLDLFSNRFLKSGVQKAGSKTRYERAGNEQFVTETSKWVFHERGHLKAVNVKHHKVGETNEPGMYRINDDLEYSVEIYEWSGTSWKPYVADDVQLQFFMMSPYVLKTMSNDNKGLYSTSFKVPDVYGVFQFKVEYQRLGYTGLSFTKQIPVRPYRHNEYERFITSAYPYYTASFSTMCAFFIFSLVYLYHK

SEQ ID NO: 2400 - DNA, 1056 bp, Zea mays subsp. mays
  misc_feature (1)..(1056): Ceres Seq. ID no. 12340732
  misc_feature (1)..(1056): Ortholog of  Ceres SEQ ID NO 15175425 as cited in SEQ ID NO 0
tttttgccttgcctgcctgccttccttctcgtagaagataagcaaagcaaggcaaccgttgtcgttgtctctgttcctccgcttcctgctctcttggcttgctgcttgccctcggagcagtgccttccgccgccgccgccgccgcctgttgtgagaaggagaggccggggctgggaggagatgagcgtgaccaagttcatcaagtgcgtcacggtgggggacggcgcggtgggcaagacctgcatgctcatctgctacaccagcaacaagttccccacggattacatccccacggtgttcgacaacttcagcgccaacgtctccgtggacggcagcatcgtcaacctgggcctctgggacactgcaggacaagaggactacagcagattgcggccactgagctacaggggcgcggacgtgttcgtgctggccttctccttgatcagcagggcgagctatgagaacgtccttaagaagtgggtgccagagcttcgcagattcgcgcccgacgtcccggtcgttcttgtcgggaccaagttagatctccgtgaccacagggcctaccttgctgaccatcctggagcgtcgacgatcacgacggcacagggcgaagaactgaggaggcagatcggcgctgcggcttacatcgagtgcagttccaaaacgcagcagaatgtcaagtcggtcttcgacacagccatcaaagtggtccttcagcccccgcggaggagggaggcgacgcctgccaggaggaagaacaggcgtggctccgggtgctctatcatgaacctcatgtgtggcagcacgtgcgctgcttaggagtctagaacactgatctggaaggaggtgaaggtgaaggcatggtgtctatgtgctatggcgactggcaagttaatggggccgcatggatgactgctgctcttgtttttttaagctcgtctgccgtatgctttgtttttttaggcttcaaggactgacaattgcaagaatgcagtgtttatgtaagaggttgtttgctggaataggattgctgtaactgtaatgttgttctccgag

SEQ ID NO: 2401 - protein, 272 aa, Zea mays subsp. mays
  peptide (1)..(272): Ceres Seq. ID no. 12340733
FLPCLPAFLLVEDKQSKATVVVVSVPPLPALLACCLPSEQCLPPPPPPPVVRRRGRGWEEMSVTKFIKCVTVGDGAVGKTCMLICYTSNKFPTDYIPTVFDNFSANVSVDGSIVNLGLWDTAGQEDYSRLRPLSYRGADVFVLAFSLISRASYENVLKKWVPELRRFAPDVPVVLVGTKLDLRDHRAYLADHPGASTITTAQGEELRRQIGAAAYIECSSKTQQNVKSVFDTAIKVVLQPPRRREATPARRKNRRGSGCSIMNLMCGSTCAA

SEQ ID NO: 2402 - protein, 212 aa, Zea mays subsp. mays
  peptide (1)..(212): Ceres Seq. ID no. 12340734
MSVTKFIKCVTVGDGAVGKTCMLICYTSNKFPTDYIPTVFDNFSANVSVDGSIVNLGLWDTAGQEDYSRLRPLSYRGADVFVLAFSLISRASYENVLKKWVPELRRFAPDVPVVLVGTKLDLRDHRAYLADHPGASTITTAQGEELRRQIGAAAYIECSSKTQQNVKSVFDTAIKVVLQPPRRREATPARRKNRRGSGCSIMNLMCGSTCAA

SEQ ID NO: 2403 - protein, 191 aa, Zea mays subsp. mays
  peptide (1)..(191): Ceres Seq. ID no. 12340735
MLICYTSNKFPTDYIPTVFDNFSANVSVDGSIVNLGLWDTAGQEDYSRLRPLSYRGADVFVLAFSLISRASYENVLKKWVPELRRFAPDVPVVLVGTKLDLRDHRAYLADHPGASTITTAQGEELRRQIGAAAYIECSSKTQQNVKSVFDTAIKVVLQPPRRREATPARRKNRRGSGCSIMNLMCGSTCAA

SEQ ID NO: 2404 - DNA, 1312 bp, Zea mays subsp. mays
  misc_feature (1)..(1312): Ceres Seq. ID no. 12349927
  misc_feature (1)..(1312): Ortholog of  Ceres SEQ ID NO 13597888 as cited in SEQ ID NO 64299
agtcactaggctacgaaacagtgccgcggtgcgcgcacacacagccgccacagcccagacccctcgcctcggcctcttttaaatatcgcgcattccggcgccgcaaatggctcacgcggcgctgctccattgctcccagtcctccaggagcctcgcagcctgccgccgcggcagccactaccccgccccttcgcacgtcccgcgccactcccgccgtcgccgacgcgccgtcgtcagcctgcgtccgatggcctcgtcgacggctcaggcccccgcgacggcgccgccgggtctgaaggagggcatcgcggggctgtacgacgagtcgtcagggctgtgggagaacatctggggcgaccacatgcaccacggcttctacgactcgagcgaggccgcctccatggccgatcaccgccgcgcccagatccgcatgatcgaggaggcgctcgccttcgccggcgtcccagcctcagatgatccagagaatacaccaaaaacaatagtcgatgtcggatgtggcattggtggtagttcaaggtacttggcgaagaaatacggagcgcagtgcacggggatcacgttgagccctgttcaagccgagagaggaaatgctctcgctggagcgcaggggttgtcggatcaggttactctgcaagttgctgatgctctggagcaaccgtttcctgacgggcagttcgatctggtgtggtccatggagagtggcgagcacatgccggacaagagaaagtttgttagtgagctagcacgcgtggcggctcctggagggacaataatcatcgtgacatggtgccataggaacctggatccatccgaaacctcgctaaagcccgatgaactgagcctcctgaagagaatatgcgacgcgtactacctcccggactggtgctcaccttcagactatgtgaacattgccaagtcactgtctctcgaggatatcaagacagctgactggtcggagaacgtggccccgttttggcccgccgtgataaaatcagcgctaacatggaagggcttcacctctctgctgacgaccggatggaagacgatcagaggcgcgatggtgatgccgctaatgatccagggctacaagaagggcctcatcaaattcaccatcatcacctgtcgcaagcctggagccgcgtaggaggaggccaaggagcaggagttacaggcacaggcacaggagtgccaagtgcaataatgtagatccgtggccccatcgccgtctactcatctgtactgcaccaaaatcaacattctcctaggacatgttaaataattttctgccacc

SEQ ID NO: 2405 - protein, 352 aa, Zea mays subsp. mays
  peptide (1)..(352): Ceres Seq. ID no. 12349928
MAHAALLHCSQSSRSLAACRRGSHYPAPSHVPRHSRRRRRAVVSLRPMASSTAQAPATAPPGLKEGIAGLYDESSGLWENIWGDHMHHGFYDSSEAASMADHRRAQIRMIEEALAFAGVPASDDPENTPKTIVDVGCGIGGSSRYLAKKYGAQCTGITLSPVQAERGNALAGAQGLSDQVTLQVADALEQPFPDGQFDLVWSMESGEHMPDKRKFVSELARVAAPGGTIIIVTWCHRNLDPSETSLKPDELSLLKRICDAYYLPDWCSPSDYVNIAKSLSLEDIKTADWSENVAPFWPAVIKSALTWKGFTSLLTTGWKTIRGAMVMPLMIQGYKKGLIKFTIITCRKPGAA

SEQ ID NO: 2406 - protein, 305 aa, Zea mays subsp. mays
  peptide (1)..(305): Ceres Seq. ID no. 12349929
MASSTAQAPATAPPGLKEGIAGLYDESSGLWENIWGDHMHHGFYDSSEAASMADHRRAQIRMIEEALAFAGVPASDDPENTPKTIVDVGCGIGGSSRYLAKKYGAQCTGITLSPVQAERGNALAGAQGLSDQVTLQVADALEQPFPDGQFDLVWSMESGEHMPDKRKFVSELARVAAPGGTIIIVTWCHRNLDPSETSLKPDELSLLKRICDAYYLPDWCSPSDYVNIAKSLSLEDIKTADWSENVAPFWPAVIKSALTWKGFTSLLTTGWKTIRGAMVMPLMIQGYKKGLIKFTIITCRKPGAA

SEQ ID NO: 2407 - protein, 267 aa, Zea mays subsp. mays
  peptide (1)..(267): Ceres Seq. ID no. 12349930
MHHGFYDSSEAASMADHRRAQIRMIEEALAFAGVPASDDPENTPKTIVDVGCGIGGSSRYLAKKYGAQCTGITLSPVQAERGNALAGAQGLSDQVTLQVADALEQPFPDGQFDLVWSMESGEHMPDKRKFVSELARVAAPGGTIIIVTWCHRNLDPSETSLKPDELSLLKRICDAYYLPDWCSPSDYVNIAKSLSLEDIKTADWSENVAPFWPAVIKSALTWKGFTSLLTTGWKTIRGAMVMPLMIQGYKKGLIKFTIITCRKPGAA

SEQ ID NO: 2408 - DNA, 1236 bp, Zea mays subsp. mays
  misc_feature (1)..(1236): Ceres Seq. ID no. 12405803
  misc_feature (1)..(1236): Ortholog of  Ceres SEQ ID NO 15173003 as cited in SEQ ID NO 51318
  misc_feature (1)..(1236): Ortholog of  Ceres SEQ ID NO 15224290 as cited in SEQ ID NO 62810
  misc_feature (1)..(1236): Ortholog of  Ceres SEQ ID NO 14302267 as cited in SEQ ID NO 68607
aatagaggttactgctctcctgggctgtgaggctgtgaggctgtgaccaaacgctctacgctcccacttcccaccaactcccaaatcctccctgaaaataagaatacgagggtgagcgatcgagcggtcgagggggttgtgcttgtgcgtcagatcaaccgactggtggcgaggctgcgggaggagatggccggcgaagggaatggggatgaagggtggaggcggagcggcatcgaggtcagcgccctgcagttcggctacgacgggcagccgccgctcttcgcgcgcttcaacctctgcgtcgcacccggctcccgctgcctcctcgtcggcgccaacggatcaggcaagaccacactcttgaagattcttgcgggaaagcatatggttggaggaagagatgtggtccgtgtcctcaatggttccgcttttcatgatacacagctagtgtgcaatggtgacctttcgtacttgggtggttcttggagccgtactattggttcagctggggatgttccactgcaaggcgacttctctgctgagcacatgatttttggagttgatggggttgatcctgtcaggcgagagaagctggttgatctgctagacattgatctgcagtggcgcatgcataaagtttcagatgggcagcgccgcagggtgcaaatctgcatgggtcttcttcatccatacaaggtgcttttgctcgatgagatcacggttgatctggacgtggtgaccaggatggacctgcttggtttcttcaaggaagagtgcgagcagagggaagctaccatcgtgtacgccacccatatatttgacggactcgagacgtgggctaccgactttgcgtacatccaagaaggcgagctgagaaggtccgggagatactccgacatcgaggagctaaggagcgccaagaacttgctgtcggtagtcgagtcgtggctgaggtcagagaccaaactcccgaagaaggaacccccaccacgtcctgagacccaggccaggcgttcctcgccgttcgatgcttctcctttccgttcgtcacgccacatggcctactaccgttgatggtttcccaactcgtactacaccattgcctcttgttattttgttgtcactcatatcgtatagtagctgtggagtttaatatgtgtcctcttcacggcccttgtagacatcaatcaatatatagcaggcagcacagaaataaaagtttggttcggttggtct

SEQ ID NO: 2409 - protein, 295 aa, Zea mays subsp. mays
  peptide (1)..(295): Ceres Seq. ID no. 12405804
MAGEGNGDEGWRRSGIEVSALQFGYDGQPPLFARFNLCVAPGSRCLLVGANGSGKTTLLKILAGKHMVGGRDVVRVLNGSAFHDTQLVCNGDLSYLGGSWSRTIGSAGDVPLQGDFSAEHMIFGVDGVDPVRREKLVDLLDIDLQWRMHKVSDGQRRRVQICMGLLHPYKVLLLDEITVDLDVVTRMDLLGFFKEECEQREATIVYATHIFDGLETWATDFAYIQEGELRRSGRYSDIEELRSAKNLLSVVESWLRSETKLPKKEPPPRPETQARRSSPFDASPFRSSRHMAYYR

SEQ ID NO: 2410 - protein, 229 aa, Zea mays subsp. mays
  peptide (1)..(229): Ceres Seq. ID no. 12405805
MVGGRDVVRVLNGSAFHDTQLVCNGDLSYLGGSWSRTIGSAGDVPLQGDFSAEHMIFGVDGVDPVRREKLVDLLDIDLQWRMHKVSDGQRRRVQICMGLLHPYKVLLLDEITVDLDVVTRMDLLGFFKEECEQREATIVYATHIFDGLETWATDFAYIQEGELRRSGRYSDIEELRSAKNLLSVVESWLRSETKLPKKEPPPRPETQARRSSPFDASPFRSSRHMAYYR

SEQ ID NO: 2411 - protein, 175 aa, Zea mays subsp. mays
  peptide (1)..(175): Ceres Seq. ID no. 12405806
MIFGVDGVDPVRREKLVDLLDIDLQWRMHKVSDGQRRRVQICMGLLHPYKVLLLDEITVDLDVVTRMDLLGFFKEECEQREATIVYATHIFDGLETWATDFAYIQEGELRRSGRYSDIEELRSAKNLLSVVESWLRSETKLPKKEPPPRPETQARRSSPFDASPFRSSRHMAYYR

SEQ ID NO: 2412 - DNA, 1179 bp, Zea mays subsp. mays
  misc_feature (1)..(1179): Ceres Seq. ID no. 12381139
  misc_feature (1)..(1179): Ortholog of  Ceres SEQ ID NO 15170617 as cited in SEQ ID NO 52614
aggtttgcttggtgcccccgatttgcctgctactcgtggcgcgccgctcctaggcgaagggaaggatccgactcaacatggccgccgccgcttctaccatgtccctgctcccgatctcccagcccaggaagcagcagcagcaaggcgcgggcgccgtggtcgtgttccagcggcggccctgggacgcgcggcggaggcgatacgtcgtcccgacggcgaggttgttcgggccggcgatcttcgaggcgtccaagctgaaggtgctgttcctgggcgtggacgagggcgaggggagcagcaagcatctgcatgcgcaccacccggcgccggcgccggcgctgctgccgcggacgtacacgctgacgcacagcgacgtgacggccagcctgacgctcgccgtctcccacaccatcaaccgcgcgcagctgcagggctggtacaaccgcctgcagcgcgacgaggtggtggccgagtggaagaaggtgcgcggccggatgtcgctgcacgtgcactgccacatctccggcggacacttgctcctggacctcatcgccggcctccgctactacatcttccgcaaggagctccccgtggtgctcgaggcgttcgtgcacggcgacggcgacctgttcagccgtcacccggagctggaggaggccacggtgtgggtctatttccactccaacctggcccgcttcaaccgcgtcgagtgctggggtccgctccgcgacgccgccgcccccgcgcccgccgaggacgactccaccgcgccggccgccgcctccatcgccatggagggccagatgcccgtgggcgagtggccgcaccggtgtccccagcagtgcgactgctgcttcccgccgcacagcctcataccctggccgaacgagcaagacatggccaccgccgccggccaggtccgacagcagtagtgaagctgcacctgtacctgtacgtacggaggaagagcctttgccgcagctaataatacactactagcgcgttgtttggtttgctattgctagatgcaagcgtgtgcgtgcaccgtgcagtgcaggtgtggagtggcgtcaacaccttgcatgcacgcgctattctttaattggtagcttagctcagctcagctcagttccacttctacaccttcgtatttggaagtagcttggttgaggttggggg

SEQ ID NO: 2413 - protein, 327 aa, Zea mays subsp. mays
  peptide (1)..(327): Ceres Seq. ID no. 12381140
GLLGAPDLPATRGAPLLGEGKDPTQHGRRRFYHVPAPDLPAQEAAAARRGRRGRVPAAALGRAAEAIRRPDGEVVRAGDLRGVQAEGAVPGRGRGRGEQQASACAPPGAGAGAAAADVHADAQRRDGQPDARRLPHHQPRAAAGLVQPPAARRGGGRVEEGARPDVAARALPHLRRTLAPGPHRRPPLLHLPQGAPRGARGVRARRRRPVQPSPGAGGGHGVGLFPLQPGPLQPRRVLGSAPRRRRPRARRGRLHRAGRRLHRHGGPDARGRVAAPVSPAVRLLLPAAQPHTLAERARHGHRRRPGPTAVVKLHLYLYVRRKSLCRS

SEQ ID NO: 2414 - protein, 284 aa, Zea mays subsp. mays
  peptide (1)..(284): Ceres Seq. ID no. 12381141
MAAAASTMSLLPISQPRKQQQQGAGAVVVFQRRPWDARRRRYVVPTARLFGPAIFEASKLKVLFLGVDEGEGSSKHLHAHHPAPAPALLPRTYTLTHSDVTASLTLAVSHTINRAQLQGWYNRLQRDEVVAEWKKVRGRMSLHVHCHISGGHLLLDLIAGLRYYIFRKELPVVLEAFVHGDGDLFSRHPELEEATVWVYFHSNLARFNRVECWGPLRDAAAPAPAEDDSTAPAAASIAMEGQMPVGEWPHRCPQQCDCCFPPHSLIPWPNEQDMATAAGQVRQQ

SEQ ID NO: 2415 - protein, 277 aa, Zea mays subsp. mays
  peptide (1)..(277): Ceres Seq. ID no. 12381142
MSLLPISQPRKQQQQGAGAVVVFQRRPWDARRRRYVVPTARLFGPAIFEASKLKVLFLGVDEGEGSSKHLHAHHPAPAPALLPRTYTLTHSDVTASLTLAVSHTINRAQLQGWYNRLQRDEVVAEWKKVRGRMSLHVHCHISGGHLLLDLIAGLRYYIFRKELPVVLEAFVHGDGDLFSRHPELEEATVWVYFHSNLARFNRVECWGPLRDAAAPAPAEDDSTAPAAASIAMEGQMPVGEWPHRCPQQCDCCFPPHSLIPWPNEQDMATAAGQVRQQ

SEQ ID NO: 2416 - DNA, 775 bp, Zea mays subsp. mays
  misc_feature (1)..(775): Ceres Seq. ID no. 12544805
  misc_feature (1)..(775): Ortholog of  Ceres SEQ ID NO 13575779 as cited in SEQ ID NO 20515
aagtcagcacactgaaacccctgcaaaccctagtgcttcccaccgatccatttcagccgccgccgcgcgtagcaagcaggagcagcaaggatgccggctggccacgggctgcgctcgcggacgcgcgacctgttcgcgcgccccttccgcaagaagggctacatcccgctcaccacctacctccgcacctacaagatcggcgactacgtcgacgtcaaggtgaacggcgccgtccacaaggggatgccgcacaagttctaccacggccgcaccggtcgcgtctggaacgtcaccaagcgcgccatcggcgtcgagataaacaagcaggtgaatggtcgcatcatcaggaagcgtatccatgtccgcgtggagcatgtgcagccgtcccgctgcacagaagagttccgcctgaggaaggtgaagaatgatcagctgaaggcggatgcaaaggagcgcggcgaggtcatcagcaccaagaggcagccgttgggtcccaagcctggcttcatggttgaggggactaccatcgagaccgtcactcccatcccgtacgatgtggtcaatgatcttaagggcggatactaggttgtttgtttggtctttctacctgttctacatctgtgttactctagtgcgtacaattttgctcacactgagcagtagtatgaacctattgtgtgttcatgttgaaaattttcccgttctgtgcaaacctgagtttagaagaacgctatgccttgatctttgcttctgagaacaaagatttgcatttttc

SEQ ID NO: 2417 - protein, 164 aa, Zea mays subsp. mays
  peptide (1)..(164): Ceres Seq. ID no. 12544806
MPAGHGLRSRTRDLFARPFRKKGYIPLTTYLRTYKIGDYVDVKVNGAVHKGMPHKFYHGRTGRVWNVTKRAIGVEINKQVNGRIIRKRIHVRVEHVQPSRCTEEFRLRKVKNDQLKADAKERGEVISTKRQPLGPKPGFMVEGTTIETVTPIPYDVVNDLKGGY

SEQ ID NO: 2418 - protein, 141 aa, Zea mays subsp. mays
  peptide (1)..(141): Ceres Seq. ID no. 12544807
VSTLKPLQTLVLPTDPFQPPPRVASRSSKDAGWPRAALADARPVRAPLPQEGLHPAHHLPPHLQDRRLRRRQGERRRPQGDAAQVLPRPHRSRLERHQARHRRRDKQAGEWSHHQEAYPCPRGACAAVPLHRRVPPEEGEE

SEQ ID NO: 2419 - protein, 113 aa, Zea mays subsp. mays
  peptide (1)..(113): Ceres Seq. ID no. 12544808
MPHKFYHGRTGRVWNVTKRAIGVEINKQVNGRIIRKRIHVRVEHVQPSRCTEEFRLRKVKNDQLKADAKERGEVISTKRQPLGPKPGFMVEGTTIETVTPIPYDVVNDLKGGY

SEQ ID NO: 2420 - DNA, 1573 bp, Zea mays subsp. mays
  misc_feature (1)..(1573): Ceres Seq. ID no. 13493056
  misc_feature (1)..(1573): Ortholog of  Ceres SEQ ID NO 13645078 as cited in SEQ ID NO 51158
gcattttggctcctcactgccgcgccgccacccactacaggtgaatgaatataacgaatccgccgccggcgtcatctcctcctcccacctcgactcgccttgctcgccgtcggcggccatttcgtcgcctcgcggcgagccgcccaagttgagctcgcggcggatctgatgggcttgttgtgatctcctgcaggtaaggaagaggaggagggcaggatgtcgcaccgtaagttcgagcacccgaggcacggctccctcggcttccttcccaggaagcgctcctcccgccaccgcggcaaggtgaagtcatttcccagggatgaccccaagaagccttgccatctcactgccttccttggctacaaggctggcatgactcacattgtccgtgaggttgagaagccaggatccaaactccataagaaggaaacttgtgaggctgttaccatcattgaaacccctcctcttgtcattgttgggctcgtggcatatgtgaagactcctcgtggcctccgcacactcaactctgtttgggcccaacatcttagcgaagaagtgaggagaaggttctacaagaactggtgcaagagcaagaagaaggctttcacaaagtatgctctcaaatatgaaaatgatgctggcaagaaggaaattcagctgcagcttgagaagatgaagaaatatgcttctgttatccgtgtcattgctcatacccagattaggaagatgaagggtttgaagcagaagaaggctcacctgatggagattcaggtcaatggtggtaccattgctgacaaggtggactacggctataaattttttgagaaagaggtccctgttgatgctgtcttccagaaggatgagatgattgacatcattggtgtgaccaaaggtaaaggttatgagggtgtggtcactcgttggggtgtcacccgccttccccgcaaaacccacaggggtctccgcaaggttgcttgtatcggtgcatggcatccggctagggtctcgtatacggttgcccgtgctggtcagaatgggtaccaccaccgcactgagatgaacaagaaggtctacaagatcggcaaggctggacaagagacccacgatgcctccacagagtttgacaggaccgagaaggacatcactcccatgggtggcttcccccactatggtatcgtgaagggtgactacctgatgatcaagggatgctgtgtgggtccaaaaaagagggtggtgaccctccgccagtccctcctgaagcagacttcccggctggcgctggaggagatcaagctcaagttcattgacacatcgtccaaatttgggcacggtcgcttccagactaccgatgagaagcagaggttctttggtaagctcaaggcgtaaggtgctgcggtgcagcgaaagtcccatttgtcaaaatcatcaaactgtgaaacctttgtttgttaccttgctgtaccaagttttgtagcaggatgatttgggagcatgttccggtcttcaatggattgttctacgcttcagaactgcagtgactatgttttgtgctattttggttgttttaatgccc

SEQ ID NO: 2421 - protein, 389 aa, Zea mays subsp. mays
  peptide (1)..(389): Ceres Seq. ID no. 13493057
MSHRKFEHPRHGSLGFLPRKRSSRHRGKVKSFPRDDPKKPCHLTAFLGYKAGMTHIVREVEKPGSKLHKKETCEAVTIIETPPLVIVGLVAYVKTPRGLRTLNSVWAQHLSEEVRRRFYKNWCKSKKKAFTKYALKYENDAGKKEIQLQLEKMKKYASVIRVIAHTQIRKMKGLKQKKAHLMEIQVNGGTIADKVDYGYKFFEKEVPVDAVFQKDEMIDIIGVTKGKGYEGVVTRWGVTRLPRKTHRGLRKVACIGAWHPARVSYTVARAGQNGYHHRTEMNKKVYKIGKAGQETHDASTEFDRTEKDITPMGGFPHYGIVKGDYLMIKGCCVGPKKRVVTLRQSLLKQTSRLALEEIKLKFIDTSSKFGHGRFQTTDEKQRFFGKLKA

SEQ ID NO: 2422 - protein, 337 aa, Zea mays subsp. mays
  peptide (1)..(337): Ceres Seq. ID no. 13493058
MTHIVREVEKPGSKLHKKETCEAVTIIETPPLVIVGLVAYVKTPRGLRTLNSVWAQHLSEEVRRRFYKNWCKSKKKAFTKYALKYENDAGKKEIQLQLEKMKKYASVIRVIAHTQIRKMKGLKQKKAHLMEIQVNGGTIADKVDYGYKFFEKEVPVDAVFQKDEMIDIIGVTKGKGYEGVVTRWGVTRLPRKTHRGLRKVACIGAWHPARVSYTVARAGQNGYHHRTEMNKKVYKIGKAGQETHDASTEFDRTEKDITPMGGFPHYGIVKGDYLMIKGCCVGPKKRVVTLRQSLLKQTSRLALEEIKLKFIDTSSKFGHGRFQTTDEKQRFFGKLKA

SEQ ID NO: 2423 - protein, 237 aa, Zea mays subsp. mays
  peptide (1)..(237): Ceres Seq. ID no. 13493059
MKKYASVIRVIAHTQIRKMKGLKQKKAHLMEIQVNGGTIADKVDYGYKFFEKEVPVDAVFQKDEMIDIIGVTKGKGYEGVVTRWGVTRLPRKTHRGLRKVACIGAWHPARVSYTVARAGQNGYHHRTEMNKKVYKIGKAGQETHDASTEFDRTEKDITPMGGFPHYGIVKGDYLMIKGCCVGPKKRVVTLRQSLLKQTSRLALEEIKLKFIDTSSKFGHGRFQTTDEKQRFFGKLKA

SEQ ID NO: 2424 - DNA, 1103 bp, Zea mays subsp. mays
  misc_feature (1)..(1103): Ceres Seq. ID no. 12407827
  misc_feature (1)..(1103): Ortholog of  Ceres SEQ ID NO 12598353 as cited in SEQ ID NO 62205
atggcggtgaccacttaagcgtggtggcttctgagttttgcctcgatttcgattctttctttttcccccacgtgcgccgccgcgaccttcctcgatcccatctcccaacgcccccgcctcgcctcgggatcccgccgccgctccatctgcctttgctcccccacccgcaggcagcgagcgacagcgacggcgagggatggccaaggccaggtcgttggcgaagcagaagcaggcgcagcaatcaaacggcggcggcggccacgcgctgtcctccaagctcgcccggtacctcgacccggaggcctccttggacaaggaccaactgctggacgcggtgcactggatccgccaggcggtggggctcatatgcggcctgctctggggagccgtccccgtcgtcggcgccgtctggatcgcactatttatggccatctcgactggcattatctattggtactacacctacttgctgaaggttgacgaggaggaatatggaggccatggggcgcttcttcaggagggtcttttcgcttcattcacccttttcctgctttcgtggactctagtatacagtctggctcacttctgagaagctcctttggcgcacatacctttgttcactgtgccagacagaaaagactcaccaggacagtgtagactaaggagcttctcagaagttgagcgagatgagctgatcaaagtccacgaggacaagaagttgaagctcaagaaagaatacatggatctggagctggagctggagaaggagtttgacgcagccctgacgggcctgatggagaagcataagccagataccttcgaggcctccagctcgtaagggggcttcagcggctaagcgctttccttaggccccagctaagcttggagcagtctcgtacatgctcctgcttgcttatccatgaaataatgcctggacagtctgtagatgttgcgaaaacatggtgccccctgtggttgccgcgtgtgtagtaagtatctctcagtcgtagtgtggttgaagcatctgaactcttgagcggtttgcctgtgatggcatatgggtcaaactacaactggagtgtgatatctagtttatatggtcc

SEQ ID NO: 2425 - protein, 156 aa, Zea mays subsp. mays
  peptide (1)..(156): Ceres Seq. ID no. 12407828
GGDHLSVVASEFCLDFDSFFFPHVRRRDLPRSHLPTPPPRLGIPPPLHLPLLPHPQAASDSDGEGWPRPGRWRSRSRRSNQTAAAATRCPPSSPGTSTRRPPWTRTNCWTRCTGSARRWGSYAACSGEPSPSSAPSGSHYLWPSRLALSIGTTPTC

SEQ ID NO: 2426 - protein, 130 aa, Zea mays subsp. mays
  peptide (1)..(130): Ceres Seq. ID no. 12407829
MAKARSLAKQKQAQQSNGGGGHALSSKLARYLDPEASLDKDQLLDAVHWIRQAVGLICGLLWGAVPVVGAVWIALFMAISTGIIYWYYTYLLKVDEEEYGGHGALLQEGLFASFTLFLLSWTLVYSLAHF

SEQ ID NO: 2427 - DNA, 1290 bp, Zea mays subsp. mays
  misc_feature (1)..(1290): Ceres Seq. ID no. 12410757
  misc_feature (1)..(1290): Ortholog of  Ceres SEQ ID NO 13592803 as cited in SEQ ID NO 20481
gaatttgttcctcgtttcgttgccagcccaatcggttcagtttcggcggtaacaagatcaactgcggtcgccagtcgattctgtgagcctgccagccatggagttgtccagttccgtctcgtccacggcggcggcggcggcgcaggcgcggctgctccggccgccgtcgtttcgccagccggggccggcgggattcgtgtcctgtaggagttacgctataaggagcaaactggtgagggcgatgcctccgatccttgctagcttccagcctgcatctcctcggtacccaagctttcaagacgcaaatggcaaaagacgaaatgttccttgttatcagagacaacaaaccccgcaggtagaagccaggtcgatggaggaggtatatgacgctttggctgaacaccttctttcggtcttgaagaatattgaacatcttgattcaaaatacattgttggtctagctggcccacctggtgctggcaagtccacagttgcctctgaagttgttcgacgtgttaatacattttggtcccagaagcacacaaagggtagtggagcaccgcttcctaccaaggaaattgctgcaatgcttccaatggatggtttccacctttatcgtgcccagcttgatgcaatggaggatccaaaagaagcacatgcaagaagaggagcaccctggacattcaatccatcactgtttctgaaatgtctacatacactaagaacagagggttcagtttatgctccatcatttgatcatggtgttggcgacccagttgagaatgacatatttgtaaagccacagcacaaaatagtgatagttgaagggaactatctgttactggaagaagatgtttggaccgaaattagagacttgtttgatgagaaatggttcattgacattgacatcgatatctccatgcaaagagtgctcaagagacatattgcaaccggaaaagagccagatgtagcagcatggaggatctcctacaacgaccgaccgaatgcagagcttatcctggaatcaaggaagaatgctgaccttgtgatcagatcagtagacttctcaagctagtgttcaattctttcaataggaaatagcattgtggttctagagttggaggttgttgtgggctgtttccgtggagattcctgtacatataataagctgaatgcctgtttcaaattttcatggtgattgtgttgcatgtaataagatattccttcactatgtaccgtggaggattgttaagtaatttattgacattttttaatagaaacacccttcag

SEQ ID NO: 2428 - protein, 325 aa, Zea mays subsp. mays
  peptide (1)..(325): Ceres Seq. ID no. 12410758
MELSSSVSSTAAAAAQARLLRPPSFRQPGPAGFVSCRSYAIRSKLVRAMPPILASFQPASPRYPSFQDANGKRRNVPCYQRQQTPQVEARSMEEVYDALAEHLLSVLKNIEHLDSKYIVGLAGPPGAGKSTVASEVVRRVNTFWSQKHTKGSGAPLPTKEIAAMLPMDGFHLYRAQLDAMEDPKEAHARRGAPWTFNPSLFLKCLHTLRTEGSVYAPSFDHGVGDPVENDIFVKPQHKIVIVEGNYLLLEEDVWTEIRDLFDEKWFIDIDIDISMQRVLKRHIATGKEPDVAAWRISYNDRPNAELILESRKNADLVIRSVDFSS

SEQ ID NO: 2429 - protein, 277 aa, Zea mays subsp. mays
  peptide (1)..(277): Ceres Seq. ID no. 12410759
MPPILASFQPASPRYPSFQDANGKRRNVPCYQRQQTPQVEARSMEEVYDALAEHLLSVLKNIEHLDSKYIVGLAGPPGAGKSTVASEVVRRVNTFWSQKHTKGSGAPLPTKEIAAMLPMDGFHLYRAQLDAMEDPKEAHARRGAPWTFNPSLFLKCLHTLRTEGSVYAPSFDHGVGDPVENDIFVKPQHKIVIVEGNYLLLEEDVWTEIRDLFDEKWFIDIDIDISMQRVLKRHIATGKEPDVAAWRISYNDRPNAELILESRKNADLVIRSVDFSS

SEQ ID NO: 2430 - protein, 234 aa, Zea mays subsp. mays
  peptide (1)..(234): Ceres Seq. ID no. 12410760
MEEVYDALAEHLLSVLKNIEHLDSKYIVGLAGPPGAGKSTVASEVVRRVNTFWSQKHTKGSGAPLPTKEIAAMLPMDGFHLYRAQLDAMEDPKEAHARRGAPWTFNPSLFLKCLHTLRTEGSVYAPSFDHGVGDPVENDIFVKPQHKIVIVEGNYLLLEEDVWTEIRDLFDEKWFIDIDIDISMQRVLKRHIATGKEPDVAAWRISYNDRPNAELILESRKNADLVIRSVDFSS

SEQ ID NO: 2431 - DNA, 1632 bp, Zea mays subsp. mays
  misc_feature (1)..(1632): Ceres Seq. ID no. 12410754
  misc_feature (1)..(1632): Ortholog of  Ceres SEQ ID NO 14313413 as cited in SEQ ID NO 58766
  misc_feature (1)..(1632): Ortholog of  Ceres SEQ ID NO 15171109 as cited in SEQ ID NO 59576
agacgtgcagccagcgccggggcgtccagctaactcgcaaacatttttataacccgagcacgcgtcagacatgggaaacggcggtgggactggcgataagacgaagacgaaggcgacaggagggctcaccggtcgcgaatcctcctcctccagccacgcctcgaaacggcgtcggggcctgcgcggcgagtccatggctgatcgcttcattcccaatgactttcctgacttcgtcgccgaggctgaggcctccgacggcgaggggcaccgccccgcagggcatcggggcctgctctcgcttccgtacaccaggctctccgaccacttcgtccgcgccgcgcgccgcctcaaggacaaggtggttgaggagacgtgggtgaaagccggacggaaggtgacggactacacgctctacacgggctctctcgggacagcgctgctgctgttcaagtccttccaggtcactggagaccgcggggacctcgccctcgccgctgatatcgtccgcgcgtgcgatgatgcatcgcggggcctgccgttcttgacattcatatgcgggagggcgggtgtctgcgctcttggggcggtgattgccaagcattgcgatgatcagctgagggtcactcagtatctgagctcctttgatgagataacaatcaccgagaaagttccaaatgagttgctgtatggaagggcaggctatctgtgggcttgtttgttcttgaataagcatctcagcgagaagacgatccctctcgatcacattaattctgtggcgaaggacattattaatgagggaagaggttttgcaagcaaggggagtagccctctgatgtacgaatggcatgggaagaaatactggggggctgcgcatggtcttgctggaatcatgcacgtgctaatgcacaccgaactgaaaccagatgagcaggatgatgtaaagaacaccctgcggtatatgatcaaaaacaagtttcctagtggcaattatccctcaagtgaaggcaatgaatcagatcacttggtgcactggtgtcatggtgccccaggtgttgctcttacccttgctaaagcatatgaggtcttccatgatgattatttcgagcaatcagctgcagaggctgctgaggttgtctggaaccgagggcttctgaagagagtcggaatatgccacggtgtaagcgggaatgcctatgcgtttctctcactctacaggctaaccggtaatgttgagtacctctaccgggcaaaggcttttgcctgctttcttctggagaaagctgatcagttgatagccgagggggccatgcatggtggtgatcgcccgttttcactgtttgaagggaaagctgggatgtcatacctcctcttggacatggttgatccatctgaatcaaggttccctgcgtatgaactttgagatatactattaccctgcgacttgtgaggctgttcgatgatccatcagtcacgaaaactctgtttgtattttctcgtctagtatgtgatgtgtgcttagacctcggtggtctgttgtgtttgtagatttggcgttcgtgatgttgcaaacttgaatcttctgtgaagtatgtgtgaccatcacattctgctaaatagattataatctcaaac

SEQ ID NO: 2432 - protein, 449 aa, Zea mays subsp. mays
  peptide (1)..(449): Ceres Seq. ID no. 12410755
MGNGGGTGDKTKTKATGGLTGRESSSSSHASKRRRGLRGESMADRFIPNDFPDFVAEAEASDGEGHRPAGHRGLLSLPYTRLSDHFVRAARRLKDKVVEETWVKAGRKVTDYTLYTGSLGTALLLFKSFQVTGDRGDLALAADIVRACDDASRGLPFLTFICGRAGVCALGAVIAKHCDDQLRVTQYLSSFDEITITEKVPNELLYGRAGYLWACLFLNKHLSEKTIPLDHINSVAKDIINEGRGFASKGSSPLMYEWHGKKYWGAAHGLAGIMHVLMHTELKPDEQDDVKNTLRYMIKNKFPSGNYPSSEGNESDHLVHWCHGAPGVALTLAKAYEVFHDDYFEQSAAEAAEVVWNRGLLKRVGICHGVSGNAYAFLSLYRLTGNVEYLYRAKAFACFLLEKADQLIAEGAMHGGDRPFSLFEGKAGMSYLLLDMVDPSESRFPAYEL

SEQ ID NO: 2433 - protein, 408 aa, Zea mays subsp. mays
  peptide (1)..(408): Ceres Seq. ID no. 12410756
MADRFIPNDFPDFVAEAEASDGEGHRPAGHRGLLSLPYTRLSDHFVRAARRLKDKVVEETWVKAGRKVTDYTLYTGSLGTALLLFKSFQVTGDRGDLALAADIVRACDDASRGLPFLTFICGRAGVCALGAVIAKHCDDQLRVTQYLSSFDEITITEKVPNELLYGRAGYLWACLFLNKHLSEKTIPLDHINSVAKDIINEGRGFASKGSSPLMYEWHGKKYWGAAHGLAGIMHVLMHTELKPDEQDDVKNTLRYMIKNKFPSGNYPSSEGNESDHLVHWCHGAPGVALTLAKAYEVFHDDYFEQSAAEAAEVVWNRGLLKRVGICHGVSGNAYAFLSLYRLTGNVEYLYRAKAFACFLLEKADQLIAEGAMHGGDRPFSLFEGKAGMSYLLLDMVDPSESRFPAYEL

SEQ ID NO: 2434 - DNA, 1479 bp, Zea mays subsp. mays
  misc_feature (1)..(1479): Ceres Seq. ID no. 12410751
  misc_feature (1)..(1479): Ortholog of  Ceres SEQ ID NO 15169749 as cited in SEQ ID NO 55675
agtcgctcgtcccgcttcctgatcctcacccctgcctgcgcggctcggctcctcggctttccgcgttcgctacggtcggtttgtgccagcagccgtgccggatcgttggccttgcgccgttgcgcggttacaccgtgctccaggcaatggcgagccaacagcaagcaaaaggcacaatcctgtgagccaatcaacactcactaggactctaggagccagggcattgattcagagaactctgagaccatttttgttgcatcttttgacaggattacatgatgagtgctcttgtttttcctctggttgtatatgttatccagtgaacacatgtttaattttataaacatttcaatttttgtcatgtttgaatctattattttctagctttcgcagtttcaaaaaagtgtggtccagtgtctgtacttttatgctgtttaggttttcgcggccactgcctcctcccatcgtggtattcattccttccggactgtcagagagcggggatctatctacgctagtattcagttcttccattactggtctaccacacgatggttccctgtcatggagcggctactgcgaatcctcagcagtttggtgttattgccgcaaaccgctatggttctcctgtgaagccatctttatgccctagtgttgcgtttctgagactgcagggttccgcatttcgtcttgggaataaatccttggctttgagagctggtgcggattctcaccgttatgcgacatcttcagcatttgcaaagtataatcctgtcaagaacatcaagccactactgtcatccccaaagttgaaaccaagaactaaagttggttgtcaagcatccttgtcgtcattcagctaccctgagttatcttccaaaccgaaatggtggtggaggaccctagcatgtgtaccttatcttctgccactgcacaacatgtgggggcatgcagatgctatctatcagcttcatccatacttgcaaagatttagcctgccttacgctttcatcgatacaatggctctgctccctgggtggcttttcctggcgatcttcatgactatatacttctttgttgtgaggcggaagtggtcgccacacttcttgcgcttccacatcatattggctatcctgcttgacacgggctcacaagctctggccactgcctgcaactggaatccaagcattgcttttcagggcaaacaaatggcacatttctggatggcaatggccttcattcaaatcttcacggttgccgagtgtgtaaggtgtgcactttcaggggtgtatgcaaatgttccatttatatgtcatgcagcactcatccattcagatcttaacctgtttaggtagttgatcattgcaaagtgcatttttggaattaagaggtactgaattggttaaactgtcgagtagaggactaatcagactatcagaggaaattaatgtaaccattgctcttcactgcattgttgtc

SEQ ID NO: 2435 - protein, 267 aa, Zea mays subsp. mays
  peptide (1)..(267): Ceres Seq. ID no. 12410752
MVPCHGAATANPQQFGVIAANRYGSPVKPSLCPSVAFLRLQGSAFRLGNKSLALRAGADSHRYATSSAFAKYNPVKNIKPLLSSPKLKPRTKVGCQASLSSFSYPELSSKPKWWWRTLACVPYLLPLHNMWGHADAIYQLHPYLQRFSLPYAFIDTMALLPGWLFLAIFMTIYFFVVRRKWSPHFLRFHIILAILLDTGSQALATACNWNPSIAFQGKQMAHFWMAMAFIQIFTVAECVRCALSGVYANVPFICHAALIHSDLNLFR

SEQ ID NO: 2436 - protein, 138 aa, Zea mays subsp. mays
  peptide (1)..(138): Ceres Seq. ID no. 12410753
MWGHADAIYQLHPYLQRFSLPYAFIDTMALLPGWLFLAIFMTIYFFVVRRKWSPHFLRFHIILAILLDTGSQALATACNWNPSIAFQGKQMAHFWMAMAFIQIFTVAECVRCALSGVYANVPFICHAALIHSDLNLFR

SEQ ID NO: 2437 - DNA, 963 bp, Zea mays subsp. mays
  misc_feature (1)..(963): Ceres Seq. ID no. 12353619
  misc_feature (1)..(963): Ortholog of  Ceres SEQ ID NO 15171175 as cited in SEQ ID NO 57476
  misc_feature (1)..(963): Ortholog of  Ceres SEQ ID NO 15178436 as cited in SEQ ID NO 57919
ctgttctccaccagccccggaggtcgacacgtgcgccacaccatagggcagggcccagggagcccggcgacctccatctccatggccgagtgcgaggagctggtggagagcggcggcgccgaggaggacatgccccgcgtcgtagccgccctcgccggcatcctggagcgcgtcgcgaaccgcaacgacgctgcggcggtcgcagaggtctcggccgtagccccggcgtcggcgttccgggcgacgacgaagccgggcatctcggtgcgcgcgtacatggcgcgcatcgcgcggttcgctgggtgcagccccgcgtgctacgtcgtggcctacgtctacctcgaccgcctcctgcgccgcggccgcctcctggcgctggccgtcgactcctacagcgtgcaccgcctcctcattaccgccgtgcttgccgccgtcaagttcatggacgacatatgctacaacaacgcctacttcgccaaggtcgggggcatcagcctggtggagatgaactacctggaggtggacttcctgttcggcgtcggcttcgacctcaacgtggcgccggagacgttcggcgactactgcgccgtgctgcggtcggagctactgtgcgcggaggctgcccccgcgccactcaggctgcagcactgctgcctgtccgaggatgacgccggggccggatgcagcgcccagcagcagctcgctgcatgaatgaaagaaacctaagcccatcgatcgatcgacgactcatccggtggcttgggcgcaggagttgtaagccggtgcaaattgttccaaattattagatgttttgtcttttctagattataaagctttcgatatatacacacatctatatatacagtgtgtctagaggtgtagtggtggtgtaggtcgtcgtcggttgtaccagctgctacagtagattgtgtatacagtgctggtgtctttggtgactttctg

SEQ ID NO: 2438 - protein, 236 aa, Zea mays subsp. mays
  peptide (1)..(236): Ceres Seq. ID no. 12353620
LFSTSPGGRHVRHTIGQGPGSPATSISMAECEELVESGGAEEDMPRVVAALAGILERVANRNDAAAVAEVSAVAPASAFRATTKPGISVRAYMARIARFAGCSPACYVVAYVYLDRLLRRGRLLALAVDSYSVHRLLITAVLAAVKFMDDICYNNAYFAKVGGISLVEMNYLEVDFLFGVGFDLNVAPETFGDYCAVLRSELLCAEAAPAPLRLQHCCLSEDDAGAGCSAQQQLAA

SEQ ID NO: 2439 - protein, 221 aa, Zea mays subsp. mays
  peptide (1)..(221): Ceres Seq. ID no. 12353621
VLHQPRRSTRAPHHRAGPREPGDLHLHGRVRGAGGERRRRGGHAPRRSRPRRHPGARREPQRRCGGRRGLGRSPGVGVPGDDEAGHLGARVHGAHRAVRWVQPRVLRRGLRLPRPPPAPRPPPGAGRRLLQRAPPPHYRRACRRQVHGRHMLQQRLLRQGRGHQPGGDELPGGGLPVRRRLRPQRGAGDVRRLLRRAAVGATVRGGCPRATQAAALLPVRG

SEQ ID NO: 2440 - protein, 209 aa, Zea mays subsp. mays
  peptide (1)..(209): Ceres Seq. ID no. 12353622
MAECEELVESGGAEEDMPRVVAALAGILERVANRNDAAAVAEVSAVAPASAFRATTKPGISVRAYMARIARFAGCSPACYVVAYVYLDRLLRRGRLLALAVDSYSVHRLLITAVLAAVKFMDDICYNNAYFAKVGGISLVEMNYLEVDFLFGVGFDLNVAPETFGDYCAVLRSELLCAEAAPAPLRLQHCCLSEDDAGAGCSAQQQLAA

SEQ ID NO: 2441 - DNA, 1459 bp, Zea mays subsp. mays
  misc_feature (1)..(1459): Ceres Seq. ID no. 12454773
  misc_feature (1)..(1459): Ortholog of  Ceres SEQ ID NO 14311249 as cited in SEQ ID NO 53778
aaaacgtgtggcgtcggcagccgggcaggtaggaaaaggtatcagcgtcgccaatctccatggagctcacaggcgccgcgctccggcgatacgcgctgccgtcggcgtccccggtggccgcgagggtggggaggaggaggcgaccagccagggtggcctgcgtcgggggcggggggttcgcggaggaggggcacctcaggtactacgaggcggccccgcggaggaaggcggtggaggcggtggcgagggacctgggaaagctccgggccatggggctcgtcgcgggggacgcagccaaggagaaggtcctctcggaagccacggatcttctgctgcaggagctgagccagatgaaggatgcggaatacaagataaacaagatggagaaagaacagaatgctgctatgaaagcactgaagaagcaggagaggcgcaccaagaagactgccatcatgatgatgaagtgtgaagaagatgagtcatctgagtcgagcgagagcgattgtgaggacgaggcaaccatgaatgccgagcaggacatggtgatgtcaacagcggttcccgaggttgttgcatcaagcatctcagctgtcctcgcgatggagtgtgataaggctgcagtgaaggccatgaagaaaatggagaaggaacaaatgaaggccatgaagaagatggagaaggaacagaagaaggctgcgaagaaggccatgaagatggagaaggaagcaaagaagatggcaatggctacactgaatggctgcagggatgaagacgattcctcatgctcatcagagtcgagtgaaagtgaatgcgagggccaagttatgaggatgagccgctgcggctacaatcaccgcaccggaaatgccacctccaagcacgggtcttccaatcatagttcctcaaattccagcacctttggcaccacagccgtctcaatctcaaccttcagagccagcaaccgcagtgcaagccaccagagtcagcagcgttgcagtaactgagacatccacaaccagcagaattgaggtctgcatggggggcaaatgcaagaagtcaggcgcgcttgctctcctgcaggagttcgagaaggctgtgggcaccggtggcgcggtcgtcggctgcaagtgcctggggaagtgcggcctaggtcccaacgtgaggctgaggagcggtgcctctgcggaaggttctgcaaaggggaacccactctgcatcggtgtaggctttgaagatgttgacaccatcgtggctggtctctttggaggcgctgatctgggcatgacacccacctagacctggtggtactacctcgacctagtcgtacttcaagaaatcaagagcacaacttgtaatcacagatgttgcattgaacaaatgtatagtgcagctacggccttgctagtgctaagtttatgtactctatgtctatatagaacacgtatggtaatcttgttcc

SEQ ID NO: 2442 - protein, 314 aa, Zea mays subsp. mays
  peptide (1)..(314): Ceres Seq. ID no. 12454774
MELTGAALRRYALPSASPVAARVGRRRRPARVACVGGGGFAEEGHLRYYEAAPRRKAVEAVARDLGKLRAMGLVAGDAAKEKVLSEATDLLLQELSQMKDAEYKINKMEKEQNAAMKALKKQERRTKKTAIMMMKCEEDESSESSESDCEDEATMNAEQDMVMSTAVPEVVASSISAVLAMECDKAAVKAMKKMEKEQMKAMKKMEKEQKKAAKKAMKMEKEAKKMAMATLNGCRDEDDSSCSSESSESECEGQVMRMSRCGYNHRTGNATSKHGSSNHSSSNSSTFGTTAVSISTFRASNRSASHQSQQRCSN

SEQ ID NO: 2443 - protein, 244 aa, Zea mays subsp. mays
  peptide (1)..(244): Ceres Seq. ID no. 12454775
MGLVAGDAAKEKVLSEATDLLLQELSQMKDAEYKINKMEKEQNAAMKALKKQERRTKKTAIMMMKCEEDESSESSESDCEDEATMNAEQDMVMSTAVPEVVASSISAVLAMECDKAAVKAMKKMEKEQMKAMKKMEKEQKKAAKKAMKMEKEAKKMAMATLNGCRDEDDSSCSSESSESECEGQVMRMSRCGYNHRTGNATSKHGSSNHSSSNSSTFGTTAVSISTFRASNRSASHQSQQRCSN

SEQ ID NO: 2444 - protein, 217 aa, Zea mays subsp. mays
  peptide (1)..(217): Ceres Seq. ID no. 12454776
MKDAEYKINKMEKEQNAAMKALKKQERRTKKTAIMMMKCEEDESSESSESDCEDEATMNAEQDMVMSTAVPEVVASSISAVLAMECDKAAVKAMKKMEKEQMKAMKKMEKEQKKAAKKAMKMEKEAKKMAMATLNGCRDEDDSSCSSESSESECEGQVMRMSRCGYNHRTGNATSKHGSSNHSSSNSSTFGTTAVSISTFRASNRSASHQSQQRCSN

SEQ ID NO: 2445 - DNA, 1132 bp, Zea mays subsp. mays
  misc_feature (1)..(1132): Ceres Seq. ID no. 12352055
  misc_feature (1)..(1132): Ortholog of  Ceres SEQ ID NO 15173410 as cited in SEQ ID NO 61812
tatatatgcatgcgcatcaagatcaagaataatccagcgccacacgggatcgacctagtacatagatacaacaagtcaacaacgtactaactagcccaccatggcgtcacgcctcgccgccgcccttctcctctccgtcgtcgccctgctgacgtccgtggcgccgctggcgtgcggccaggcagcgtcggcgccgtccccagcccccgcgccgcccaagaccatcacggcgatcctgagcaaggccgggcagttcaccaagttcctccagctgctgcagtcgacgcgggaggcggagcagatcaccaaccagctcaagggcaagccgtccaacggcgggctcacggtgttcgcgccgcccgacagcgccttctccgcgctccccgccggcacgctcaactccctctccgaccagcagaagacgtcgctggtgcagttccacgtcgtgtccgcggcgctccccgccgcgcagctcgagaccgtcagcaacccgctgcggacgcaggctggcgacaccggcaggggcaagtacccgctcaacctcaccgcggacggctccagcgtcaacgtctccacgggggtcgtcaacgccacgctcgacgccacgccgctttacgccggggacaggctcgtcgtctaccaggtcagcaaggtgctgctgccgtgggcgctctacggcccgccggtccccgcgccggccccttccccggcggagagcaagaagaagaagaaggccacgccggatgctgtggcggatgcgccggcggctgagactgcggcggggacgacgacggcgtcggcggccgcgcgcgcgggagggaccccagctggcgtccgagctgcttcgtcctgcgtcgtggcgctcgccgccgtggcagctttgtggtgggctatctgaccacgtacagtacagtaaggatgcatgcgtgttttgccatcgtggagcttctttccggacagatttgtttctaattcatcaatcgaccagttcattattcttttcttcgttttataaaaaaagatgtattgtggatgtatttggtggcgttttgtaatgtttgtattgtatactttgaagaactgtacatcatattttgtggacgtatattgttatccaattgtattaatgtgg

SEQ ID NO: 2446 - protein, 265 aa, Zea mays subsp. mays
  peptide (1)..(265): Ceres Seq. ID no. 12352056
MASRLAAALLLSVVALLTSVAPLACGQAASAPSPAPAPPKTITAILSKAGQFTKFLQLLQSTREAEQITNQLKGKPSNGGLTVFAPPDSAFSALPAGTLNSLSDQQKTSLVQFHVVSAALPAAQLETVSNPLRTQAGDTGRGKYPLNLTADGSSVNVSTGVVNATLDATPLYAGDRLVVYQVSKVLLPWALYGPPVPAPAPSPAESKKKKKATPDAVADAPAAETAAGTTTASAAARAGGTPAGVRAASSCVVALAAVAALWWAI

SEQ ID NO: 2447 - DNA, 473 bp, Zea mays subsp. mays
  misc_feature (1)..(473): Ceres Seq. ID no. 13564955
  misc_feature (1)..(473): Ortholog of  Ceres SEQ ID NO 13590776 as cited in SEQ ID NO 64877
acgcgctcaactccacgggccttgagctagggttttcttcgccgctacctccctacgargcgggcgtgcagccatggcgctggtgcaggcgggcatgggccttacccgggtcgttatcctcgtcggcgccggcgttgccgctccgtcgtcctccgcaacggccgcctcgccgagatcctcggcgagctccaggagatactcgacaaggggaagaaggtgaaggatggavgarggggagacggggaaaccgatctcaacgaggctcttacctcgcaggtgcgtcgccttgccatggaggtccggcaacttggtaattcacgttcaataactgttctcaatggaggttctgcacaatcaggagtatcaggcctgatagtacctgcagcaactgtaggagcactgggttacggttatatgtrgtggaaggggatctcgttctcagatctaatgtatgtcaccaagcgcaacatggc

SEQ ID NO: 2448 - protein, 103 aa, Zea mays subsp. mays
  peptide (1)..(103): Ceres Seq. ID no. 13564956
  misc_feature (19)..(19): Xaa is any aa, unknown or other
  misc_feature (76)..(76): Xaa is any aa, unknown or other
  misc_feature (77)..(77): Xaa is any aa, unknown or other
ALNSTGLELGFSSPLPPYXAGVQPWRWCRRAWALPGSLSSSAPALPLRRPPQRPPRRDPRRAPGDTRQGEEGEGWXXGRRGNRSQRGSYLAGASPCHGGPATW

SEQ ID NO: 2449 - protein, 60 aa, Zea mays subsp. mays
  peptide (1)..(60): Ceres Seq. ID no. 13564957
  misc_feature (43)..(43): Xaa is any aa, unknown or other
MEVRQLGNSRSITVLNGGSAQSGVSGLIVPAATVGALGYGYMXWKGISFSDLMYVTKRNM

SEQ ID NO: 2450 - DNA, 1377 bp, Zea mays subsp. mays
  misc_feature (1)..(1377): Ceres Seq. ID no. 12407875
  misc_feature (1)..(1377): Ortholog of  Ceres SEQ ID NO 14311543 as cited in SEQ ID NO 51619
  misc_feature (1)..(1377): Ortholog of  Ceres SEQ ID NO 14302378 as cited in SEQ ID NO 67409
aaaacccaatccacttcgcaagccccgccgcacacttcttccccctgcctccaaaaactcagaaaaccctgaccgccggcggcggccatgcttctccaccaccgcctcctccctcgcctacttcttgttccttccacacatacctccacactcctctgcccctcccgtttgccgcgccgcctctccctctcgccgcgcttctacgcgctgccccacctcgcggcaccccagaccgtcgaccactccgacgatgagggggcaccccagggggaggggcagatcaagctcccgctcgaccatctcttcgtgccgcccggggcaacaatggatgcgggggaccaggaggccgtgagcgcacgggtgcttaagggctccaacatcgtgctgggcccatacgcgcgcggcgacgcacaggtggtcaacgcagattttgtaaagagcagcgtgcgtcccgatgactgccctcgggacggccttccggagtttgcactcgttggccggtccaacgtcggcaaatcgtcgctgctcaactcgcttgtccgccgcaagcgccttgcccttacctccaagaagcctgggaagacccaatgtatcaatcatttcaaagtaaatgacagctggtatcttgttgacttgcctggttatggatatgcttctgcaccacaggaagctcgtaccaattgggatgaatttactagaaattactttctcagtcgggagaatttggtatctgtttttcttcttatagatgcaagtatacctgccaagaagattgatcttgactatgctagttggcttggccaaaacaaggttcccatgacccttgtgttcacaaaatgtgacaagcgcaagaagaagaagaacggcggcaggaaacctgaagaaaacgtggaaactttccagggcctaatccgcgaatacttcgaggccgcgcctccttggatcatgacgagcagcgtgaccaaccagggccgcgatgagatactcctgcacatgtctcagcttaggaattattggctcaagcattgagatgcaatgataaccaaaccggagcgaagcaactagaacagcatgcaaagcactgtagtccattgacgcatggacattcagcagtcggcgcctccgcaatcaggcgttcgcaccaactagtccagccttttgagctgttgactgtccaatatggcccctgtacatgattacccaatcaacactccggggatgcggacaaggtgctaaaatcagctgatcatggttttttttctttatttctattgtgtacacgtacaatcccaaccaacgttttccccttgttcccatctgattataggcttgtgtatactgtggggttaaatgattaataaattctggtgttagctg

SEQ ID NO: 2451 - protein, 313 aa, Zea mays subsp. mays
  peptide (1)..(313): Ceres Seq. ID no. 12407876
MLLHHRLLPRLLLVPSTHTSTLLCPSRLPRRLSLSPRFYALPHLAAPQTVDHSDDEGAPQGEGQIKLPLDHLFVPPGATMDAGDQEAVSARVLKGSNIVLGPYARGDAQVVNADFVKSSVRPDDCPRDGLPEFALVGRSNVGKSSLLNSLVRRKRLALTSKKPGKTQCINHFKVNDSWYLVDLPGYGYASAPQEARTNWDEFTRNYFLSRENLVSVFLLIDASIPAKKIDLDYASWLGQNKVPMTLVFTKCDKRKKKKNGGRKPEENVETFQGLIREYFEAAPPWIMTSSVTNQGRDEILLHMSQLRNYWLKH

SEQ ID NO: 2452 - protein, 234 aa, Zea mays subsp. mays
  peptide (1)..(234): Ceres Seq. ID no. 12407877
MDAGDQEAVSARVLKGSNIVLGPYARGDAQVVNADFVKSSVRPDDCPRDGLPEFALVGRSNVGKSSLLNSLVRRKRLALTSKKPGKTQCINHFKVNDSWYLVDLPGYGYASAPQEARTNWDEFTRNYFLSRENLVSVFLLIDASIPAKKIDLDYASWLGQNKVPMTLVFTKCDKRKKKKNGGRKPEENVETFQGLIREYFEAAPPWIMTSSVTNQGRDEILLHMSQLRNYWLKH

SEQ ID NO: 2453 - DNA, 1282 bp, Zea mays subsp. mays
  misc_feature (1)..(1282): Ceres Seq. ID no. 12353623
  misc_feature (1)..(1282): Ortholog of  Ceres SEQ ID NO 15178027 as cited in SEQ ID NO 55634
  misc_feature (1)..(1282): Ortholog of  Ceres SEQ ID NO 14314739 as cited in SEQ ID NO 59911
acctgggactgggaggctgggaatcccggcaggcaaagcgaaagcatccgcgcgagaggcgtcgcgtgttccttgcttcgtcctcacgtgccgtggcccttccgcttcccccgtatccgcccgtcctgttcccgccccgagcgaaccggcggcggcggaggcgatgcagcacgagccgtggcggcctggcgctgagcccgccgccggggctggggcgggccctgctcccaccaccgtcgacgaggcatccatggagcggagcatgagcttcgtcaaggcgcttcaggagctcaagaacctgcgcccgcagctctactcggcctccgagtactgcgagaagtcctacctccgcagcgaacagaagcaagtggtgctggacaacatgaaagattacgctgtcagggccctggtcaacgctgtcgaccatcttggcacagtggcctacaagctgacagacctatacgaagagcaggcttcagaaataacaaccctcgagttgaaagtagcatgcttgaaccagcaagtccgtacctgccagacatacacggacaaagaaggccttaggcaacagcagatgatgggggctgccagaagacaccataaccattacatcgtaccatatgcgggaaacaaaagaatgcaggccttctctgttacgcaagccgatgctgatttcgacccaacgccaaggcctttctcttcagcaaggacccttgagtggcatttggtttccgagaagaattccaaaaccagtagaccagatcagtctgaaactgccttaggagaaacaaaaaccactaaggcttcgtcaagtggtttccgccttctcggcaaggaatcatctgcatctcccttgtccaggaatgtgcagtccaacataaccagtttggatattgtcagcgtcggcatgaaggatcagcccacgaccaggcacttgtcatcgttcagttctttggacaaccccagggggcgccaaatccagaaggccccgcttcgcacaaaaagtatgctagccgctttcttcgtcaaacacagatcagcaaagatgaaaaacgtctctgtgcgttgatcaactgcaagccaagcctgtagtttgctccagccaaaccaacgtggaagtgttaagggcatgagatgtatacatgtttgtatatggtatttgggtcttgtatgctagtgctctagagataaacctttacggatgcgctttcaatctagagtctttggcattttgctcatgaccttaatgtaatgatttatatggatatatattactagtttt

SEQ ID NO: 2454 - protein, 355 aa, Zea mays subsp. mays
  peptide (1)..(355): Ceres Seq. ID no. 12353624
PGTGRLGIPAGKAKASAREASRVPCFVLTCRGPSASPVSARPVPAPSEPAAAEAMQHEPWRPGAEPAAGAGAGPAPTTVDEASMERSMSFVKALQELKNLRPQLYSASEYCEKSYLRSEQKQVVLDNMKDYAVRALVNAVDHLGTVAYKLTDLYEEQASEITTLELKVACLNQQVRTCQTYTDKEGLRQQQMMGAARRHHNHYIVPYAGNKRMQAFSVTQADADFDPTPRPFSSARTLEWHLVSEKNSKTSRPDQSETALGETKTTKASSSGFRLLGKESSASPLSRNVQSNITSLDIVSVGMKDQPTTRHLSSFSSLDNPRGRQIQKAPLRTKSMLAAFFVKHRSAKMKNVSVR

SEQ ID NO: 2455 - protein, 301 aa, Zea mays subsp. mays
  peptide (1)..(301): Ceres Seq. ID no. 12353625
MQHEPWRPGAEPAAGAGAGPAPTTVDEASMERSMSFVKALQELKNLRPQLYSASEYCEKSYLRSEQKQVVLDNMKDYAVRALVNAVDHLGTVAYKLTDLYEEQASEITTLELKVACLNQQVRTCQTYTDKEGLRQQQMMGAARRHHNHYIVPYAGNKRMQAFSVTQADADFDPTPRPFSSARTLEWHLVSEKNSKTSRPDQSETALGETKTTKASSSGFRLLGKESSASPLSRNVQSNITSLDIVSVGMKDQPTTRHLSSFSSLDNPRGRQIQKAPLRTKSMLAAFFVKHRSAKMKNVSVR

SEQ ID NO: 2456 - protein, 272 aa, Zea mays subsp. mays
  peptide (1)..(272): Ceres Seq. ID no. 12353626
MERSMSFVKALQELKNLRPQLYSASEYCEKSYLRSEQKQVVLDNMKDYAVRALVNAVDHLGTVAYKLTDLYEEQASEITTLELKVACLNQQVRTCQTYTDKEGLRQQQMMGAARRHHNHYIVPYAGNKRMQAFSVTQADADFDPTPRPFSSARTLEWHLVSEKNSKTSRPDQSETALGETKTTKASSSGFRLLGKESSASPLSRNVQSNITSLDIVSVGMKDQPTTRHLSSFSSLDNPRGRQIQKAPLRTKSMLAAFFVKHRSAKMKNVSVR

SEQ ID NO: 2457 - DNA, 1067 bp, Zea mays subsp. mays
  misc_feature (1)..(1067): Ceres Seq. ID no. 12336665
  misc_feature (1)..(1067): Ortholog of  Ceres SEQ ID NO 14311044 as cited in SEQ ID NO 53643
agcccctcctaaatttttttctagatccgtccctgtttgccgctgtgtttagctctcttccccgcaagatccatcgatcggtcggacaggataagacatgggtcagattttgggtttagttcaggttgatcagtcaactgtagccatcaaagaaaattttggcaagttcagcgaggtcctggagcctggttgccacttcctgccctggtgcatagggcagcagattgctggttacctctccttgcgtgtgcgccagctggatgtccgctgcgaaacaaagacaaaggacaatgtctttgtcactgttgttgcatctgttcaatatcgcgctcttgctgataaggcatctgacgccttctacaagctgagcaacaccagggaacaaatccagtcatacgtatttgatgtcatcagagctactgttccgaagctgggcttggacgatgcatttgagcagaagaatgagatcgcaaaagcagtggaagaggagcttgaaaaggcaatgtctacttatggctatcagatcgtgcaaacgctaattgttgatattgagcctgacgaccgcgtcaagagagcaatgaacgagatcaatgcagctgctaggatgagggtggcagccagtgagaaagctgaggctgagaagatactccagatcaagaaagccgagggagaggcggaatccaagtacctggctggcgtgggtattgcaaggcagcgccaggccattgtggatgggctgagggacagtgtgctcgccttctcagagaacgttccaggcaccactgccaaggacatcatggacatggtcctggtcacccagtactttgacaccatgagggagattggggcctcctccaagtcctcttcggtgttcatcccccacggtcctggagctgtcaaggatgtctcggcgcagataagagatggcctcctgcaggctaatctgcactgagggtaccctgagaaaacgaaggattcagagggatgagggcatcggtcctatgatgctataaaattgtcaattatagactatatatgatatatagaggcaggcttgattgatttgt

SEQ ID NO: 2458 - protein, 284 aa, Zea mays subsp. mays
  peptide (1)..(284): Ceres Seq. ID no. 12336666
MGQILGLVQVDQSTVAIKENFGKFSEVLEPGCHFLPWCIGQQIAGYLSLRVRQLDVRCETKTKDNVFVTVVASVQYRALADKASDAFYKLSNTREQIQSYVFDVIRATVPKLGLDDAFEQKNEIAKAVEEELEKAMSTYGYQIVQTLIVDIEPDDRVKRAMNEINAAARMRVAASEKAEAEKILQIKKAEGEAESKYLAGVGIARQRQAIVDGLRDSVLAFSENVPGTTAKDIMDMVLVTQYFDTMREIGASSKSSSVFIPHGPGAVKDVSAQIRDGLLQANLH

SEQ ID NO: 2459 - protein, 149 aa, Zea mays subsp. mays
  peptide (1)..(149): Ceres Seq. ID no. 12336667
MSTYGYQIVQTLIVDIEPDDRVKRAMNEINAAARMRVAASEKAEAEKILQIKKAEGEAESKYLAGVGIARQRQAIVDGLRDSVLAFSENVPGTTAKDIMDMVLVTQYFDTMREIGASSKSSSVFIPHGPGAVKDVSAQIRDGLLQANLH

SEQ ID NO: 2460 - DNA, 1520 bp, Zea mays subsp. mays
  misc_feature (1)..(1520): Ceres Seq. ID no. 12349893
  misc_feature (1)..(1520): Ortholog of  Ceres SEQ ID NO 13598609 as cited in SEQ ID NO 65569
  misc_feature (1)..(1520): Ortholog of  Ceres SEQ ID NO 14303205 as cited in SEQ ID NO 67255
atttttcctccgcctgcccaccctcgccgatgtagggcgcgccgccaccacctgcgcctccttccgccgcgtcgtcgccgacagcaccttcctgcgccgcctccgctccgtccacccggcgcccctcctcggcttactgctcttctcatcagtccacccggcggagccgccccacccctccgcgccctatgcgcgagctctgcagagggccgcagacctctccttctccttcgtcccctgcgccggccgctggatcccgatcgacgcccgcgacggccgcgtcctcctggagagcgagaccatgggcggcgactttgcggtgtgcgaccctgtgtcccggcgatacctctttctgccccgtatccccggacacccagccgctcagcgctgccgccgtctggagccgttcctcgttcccgccagtaacgaggagccggagacgtcgctgagggtggtctgcgtggcagagcgcaaacctggacagctggtcgccttcgtcttctcttcggacaccgggcgatggggaagtctgaccgtggatgtcagcgtgcctccctcttgcaaattttcgtggtcctcctacggtttcggcagctgctactggaaggtgactgggagtaacaaactccttgggctcgacacgcgttccatggtgttctcctctttcgatatcccgtctggttacggccagcaagattctgtcgttgtggaggcagcggaaggcagattcagaatgttcactctccacaacagcatgatttctgctgcatcttacctggttcatgctgttcgggtaatccgcgaagaaggcaacaacctttggcaggttaagaggagagtcaggttgccgtcccaatatattttcagctttgcagatgcaacggataagcacttactccttcgtgggattccatggaatttgcacctggagccttctactcctggcgctgatataggatacttctctgttgagttcgagtctatgcaggttgagaaaatttgtggcatcaggaatcttctatacgccaaactgtacactggttttccaccgtcattgtccctaccaagcatatgaaatggtggcttcacaacgtgaatgaactatgctggctattgacttcaatctggtggtttggaaaggaagcaaaggattcatgtatgaactacttccagggcagggtcactaaggagtaaaaggacttgaggactgatgagcagttggatgatctgtttttcagtcttttaggacatgtttggatgcagccctggcctggaccgcctgctggcttaggcagctttcccgtgccgccatccaaacatgcccgcccttattttgtcgtcgtaccaatatttcgatgtgattctgcatccgcatctgccagagtgctgttgcaacgttgcatcctatcctggaaggctggaatgtttatttggtgctcggcatctctctgaacttcatgtttccccggcgtaccatgctagtgtttttcaatggagccattattgcacttcgctgtgcc

SEQ ID NO: 2461 - protein, 357 aa, Zea mays subsp. mays
  peptide (1)..(357): Ceres Seq. ID no. 12349894
FFLRLPTLADVGRAATTCASFRRVVADSTFLRRLRSVHPAPLLGLLLFSSVHPAEPPHPSAPYARALQRAADLSFSFVPCAGRWIPIDARDGRVLLESETMGGDFAVCDPVSRRYLFLPRIPGHPAAQRCRRLEPFLVPASNEEPETSLRVVCVAERKPGQLVAFVFSSDTGRWGSLTVDVSVPPSCKFSWSSYGFGSCYWKVTGSNKLLGLDTRSMVFSSFDIPSGYGQQDSVVVEAAEGRFRMFTLHNSMISAASYLVHAVRVIREEGNNLWQVKRRVRLPSQYIFSFADATDKHLLLRGIPWNLHLEPSTPGADIGYFSVEFESMQVEKICGIRNLLYAKLYTGFPPSLSLPSI

SEQ ID NO: 2462 - protein, 257 aa, Zea mays subsp. mays
  peptide (1)..(257): Ceres Seq. ID no. 12349895
MGGDFAVCDPVSRRYLFLPRIPGHPAAQRCRRLEPFLVPASNEEPETSLRVVCVAERKPGQLVAFVFSSDTGRWGSLTVDVSVPPSCKFSWSSYGFGSCYWKVTGSNKLLGLDTRSMVFSSFDIPSGYGQQDSVVVEAAEGRFRMFTLHNSMISAASYLVHAVRVIREEGNNLWQVKRRVRLPSQYIFSFADATDKHLLLRGIPWNLHLEPSTPGADIGYFSVEFESMQVEKICGIRNLLYAKLYTGFPPSLSLPSI

SEQ ID NO: 2463 - DNA, 1468 bp, Zea mays subsp. mays
  misc_feature (1)..(1468): Ceres Seq. ID no. 12372661
  misc_feature (1)..(1468): Ortholog of  Ceres SEQ ID NO 12612330 as cited in SEQ ID NO 56418
  misc_feature (1)..(1468): Ortholog of  Ceres SEQ ID NO 13664295 as cited in SEQ ID NO 61486
  misc_feature (1)..(1468): Ortholog of  Ceres SEQ ID NO 15179147 as cited in SEQ ID NO 0
gcacgagaccattacctagaacatcctaatcgaaaaatctcccaagttcccatcccagtccgtcagtcaagcgagcgaaatcgaatggctcccctcttcgccgcggcgtcccacgcgtccctcctccccctctcctccctcgaccgccccgccgccggccacctagtccgtggcaccctcaggccccgcacctcgagcctccgcctgcgccgccccccgggggcaaccgggcgcggccgcgggcgtggccgagggggcatcccagacgagtggggcgagcgctcgccgccggccaaccccgagccccccgcgcagcccgatcctcccatcgacgaagacgagtggggccgcgacgactctgccgacggcaactcacgccctatcgtcgtcgacgagtggggcgagcccggggtgcctgagcccgagccgccctccgccgcggacccgcctagcccctccgcagacgacgactggggaaaggagccggaggcgccggcgccggcccctgctccggcggcggaggaggacgagcaggaggtgaagagggaggagctcaagcggtgcctggtggacacggtgtacggctccgacctcggcttccgggcgtccacggaggtcagaggtgaggtcgtcgagctagtcacccagctcgaggcggttaaccctactactgctcccgtcgactcgccggatctcctcgacggcaactggatcctcatatatacagcatattccgagcttctgcctattctagctgctggggcaacacctttggtcaaagtaaagcagatatcccaagaaattgactccaaaatcatgacgatagtcaatgcttcgacccttacgactccattcgcttcattttcattcagcgcaaccgcctctttcgaggttcaaagcccatcaaggatagaggtccaatttaaggaggggagctttcagcctccggcaatatcatcatccgtggatctacctcaacaagttgatatatttgggcagaagatcagcctggggccagtccagcaggcactgaatccattgcagcaagcatttgctagcattgctgggtccatttctgggcagccacccctcaaggtaccaattcctggcaacaacagagctcgatcctggctcttgactacctacctggacaaagacttaaggatctcgagaggcgatggaggcttgtttattcttgccaaagaggggagccctttgctagatcaattgtaaatctgtaattggttgctaccggaaaggatatccagaactccacaggtaacctaacagaggacgcctcacattgtatttatcaatcaatattgttgttggcggcactgttacatgtatggggccatgaaatcttagaaatgaatatttagtcgataagaatcgagagctgaactgagactgatacaaacaaaacacttcaatgttcatctgaaaaaaaaaaaaaaaaaaaaaaaaa

SEQ ID NO: 2464 - protein, 410 aa, Zea mays subsp. mays
  peptide (1)..(410): Ceres Seq. ID no. 12372662
ARDHYLEHPNRKISQVPIPVRQSSERNRMAPLFAAASHASLLPLSSLDRPAAGHLVRGTLRPRTSSLRLRRPPGATGRGRGRGRGGIPDEWGERSPPANPEPPAQPDPPIDEDEWGRDDSADGNSRPIVVDEWGEPGVPEPEPPSAADPPSPSADDDWGKEPEAPAPAPAPAAEEDEQEVKREELKRCLVDTVYGSDLGFRASTEVRGEVVELVTQLEAVNPTTAPVDSPDLLDGNWILIYTAYSELLPILAAGATPLVKVKQISQEIDSKIMTIVNASTLTTPFASFSFSATASFEVQSPSRIEVQFKEGSFQPPAISSSVDLPQQVDIFGQKISLGPVQQALNPLQQAFASIAGSISGQPPLKVPIPGNNRARSWLLTTYLDKDLRISRGDGGLFILAKEGSPLLDQL

SEQ ID NO: 2465 - protein, 382 aa, Zea mays subsp. mays
  peptide (1)..(382): Ceres Seq. ID no. 12372663
MAPLFAAASHASLLPLSSLDRPAAGHLVRGTLRPRTSSLRLRRPPGATGRGRGRGRGGIPDEWGERSPPANPEPPAQPDPPIDEDEWGRDDSADGNSRPIVVDEWGEPGVPEPEPPSAADPPSPSADDDWGKEPEAPAPAPAPAAEEDEQEVKREELKRCLVDTVYGSDLGFRASTEVRGEVVELVTQLEAVNPTTAPVDSPDLLDGNWILIYTAYSELLPILAAGATPLVKVKQISQEIDSKIMTIVNASTLTTPFASFSFSATASFEVQSPSRIEVQFKEGSFQPPAISSSVDLPQQVDIFGQKISLGPVQQALNPLQQAFASIAGSISGQPPLKVPIPGNNRARSWLLTTYLDKDLRISRGDGGLFILAKEGSPLLDQL

SEQ ID NO: 2466 - DNA, 482 bp, Zea mays subsp. mays
  misc_feature (1)..(482): Ceres Seq. ID no. 1348034
  misc_feature (1)..(482): Ortholog of  Ceres SEQ ID NO 13646963 as cited in SEQ ID NO 20658
  misc_feature (1)..(482): Ortholog of  Ceres SEQ ID NO 15169278 as cited in SEQ ID NO 58762
ctcaggttcgtgcgcttcacccaccctcccgtgcttccgctgcatttctttctcgtgatcttggggggttctaggacagggacggccggacgggccttgatgtttttgttgtgccgccgcaggtggaagaagcgtgacaatggaggctccacccgtggcgctgttcgacaccctcaaggcagccaaaccgttcttcttgttggctggtcccaacgtgattgaatcggaggagcacgtcctgaagatggccaaacacatcaaagcaattacgaccaagcttggaattccactcgtgttcaagtccagctttgataaagcaaaccgtacatcatcaaaatcgttccgtggtcctggtcttgaagaaggtctaaagatccttcaaaaggtgaaagcaacatatgaccttccgatagtcactgatgtgcacgaaagccaccagtgtgaagctgttggaagagttgctgacatcatacagattccag

SEQ ID NO: 2467 - protein, 73 aa, Zea mays subsp. mays
  peptide (1)..(73): Ceres Seq. ID no. 1348035
LRFVRFTHPPVLPLHFFLVILGGSRTGTAGRALMFLLCRRRWKKRDNGGSTRGAVRHPQGSQTVLLVGWSQRD

SEQ ID NO: 2468 - protein, 114 aa, Zea mays subsp. mays
  peptide (1)..(114): Ceres Seq. ID no. 1348036
MEAPPVALFDTLKAAKPFFLLAGPNVIESEEHVLKMAKHIKAITTKLGIPLVFKSSFDKANRTSSKSFRGPGLEEGLKILQKVKATYDLPIVTDVHESHQCEAVGRVADIIQIP

SEQ ID NO: 2469 - protein, 79 aa, Zea mays subsp. mays
  peptide (1)..(79): Ceres Seq. ID no. 1348037
MAKHIKAITTKLGIPLVFKSSFDKANRTSSKSFRGPGLEEGLKILQKVKATYDLPIVTDVHESHQCEAVGRVADIIQIP

SEQ ID NO: 2470 - DNA, 1877 bp, Zea mays subsp. mays
  misc_feature (1)..(1877): Ceres Seq. ID no. 12408017
  misc_feature (1)..(1877): Ortholog of  Ceres SEQ ID NO 14311183 as cited in SEQ ID NO 58495
  misc_feature (1)..(1877): Ortholog of  Ceres SEQ ID NO 15169627 as cited in SEQ ID NO 64517
  misc_feature (1)..(1877): Ortholog of  Ceres SEQ ID NO 14307991 as cited in SEQ ID NO 65737
  misc_feature (1)..(1877): Ortholog of  Ceres SEQ ID NO 14307952 as cited in SEQ ID NO 66029
  misc_feature (1)..(1877): Ortholog of  Ceres SEQ ID NO 13502874 as cited in SEQ ID NO 66298
  misc_feature (1)..(1877): Ortholog of  Ceres SEQ ID NO 12614124 as cited in SEQ ID NO 68392
accctcccccaccgccattgctcagcagcagtagtaaagccacgcctgacagacagctggttcatttctggttgctgccttgctggtggtagccctcggcgcaggcagccaagaacagagagagcgagatggatgtgaacgacgtgctgctagtggtgctggcggcggcgctggctgccatgtggtggcgtcggtgctccaagaccggcggtgtcgacggccctcccgccggggcctccgggttggccggtggtggggaacctgttccaggtgatcctgcagcgacggcccttcatgtacgtggtgcgcgacctccgggagaagtacgggcccatcttcaccatgcggatggggcagcgcaccctcatcgtggtcacctcggcggagctcatccacgaggcgctggtgaagcagggccccatgttcgcgagccggcccgaggacagccccacccgcctcctcttcagcgtcggcaagtgcaccgtcaactcggcgccctacggccccctgtggcgtgctctgcgccgcaacttcgtcgccgagatcgtgtccccgcaccgcgtcaagggcttctcctggatccgggagtgggccgtggacgcgcacttgcgccgcctctgcgccgagctcgcggcggacggtgccgtgcgggtcatggccagctgccgcctcaccatctgcagcatcctcatctgcatctgcttcggcgccaagatccccgacgagctcatccgggagatcgaggaggtgctcaaggacgtgatgatgatgaccatgcccaagctcccggacttcctgcccctcctcacaccgctcttcaggaagcagctcaccgaggcccgcgccctgcgccgccgccagctcaactgcctcgtgccgctcgtccgcgcgcggagggacttcctccgcgacggcaccgcggcagcggcggacggcgtggagatgatgagcgggcctggggaagcgtacgtggactcgctcttcgacctggagccgcccggccgcgggaagcgcctcggcgaggaggagctcgtcacgctctgctccgaggtcatgagcgccggcacagacaccagcgccacagcgctggaatgggccatgatgcacctcgtcctcgaccccgccgcgcagtagcgcctctacgacgaggtcgtcgccaaggtgggcaagaccgcccggatcaccgaagccgacgtcgaggccatgccctacctccaggcggtggtgaaggagacgttccggcggcacccgccgagccacttcgtgctgtcgcacgcggcgacgcgggacacggagctgggcgggtaccgcgtgccggcggacgccagcgtggagttctacacggcgtgggtgacggagaacccggcgacgtggccggacccggacgcgtggcggccggagcgcttcctggaaggcggcgagggcttcgacaccgacatcaccggcacccgcgcgctgcgcatgatgcccttcggcgccggccgccgcatctgccccgccgccacgctcggcgtgctccacatccagctcatgctcgccaacatggtgcgcgagttccgctggctgccgcccgccggtgagggcccgccggaccccaccgagaccttcgcattcaccgtcgtcatgaagaacccgctccgggcagccttcgtcgagcgggccacgacggagacggcgacaaccgcgtgacgagtgacgacggaaagtaaaaaaaaagggagagagagagaagttactagtacaagttactctttcactgggctctggctgggtgggtaagttgctgcaacgtgcgtgtcgtgcggggttaattcggtcccgcactctgcggtataaattacagttattaattaattagtccacggggaaggtgcgtg

SEQ ID NO: 2471 - protein, 483 aa, Zea mays subsp. mays
  peptide (1)..(483): Ceres Seq. ID no. 12408018
MDVNDVLLVVLAAALAAMWWRRCSKTGGVDGPPAGASGLAGGGEPVPGDPAATALHVRGARPPGEVRAHLHHADGAAHPHRGHLGGAHPRGAGEAGPHVREPARGQPHPPPLQRRQVHRQLGALRPPVACSAPQLRRRDRVPAPRQGLLLDPGVGRGRALAPPLRRARGGRCRAGHGQLPPHHLQHPHLHLLRRQDPRRAHPGDRGGAQGRDDDDHAQAPGLPAPPHTALQEAAHRGPRPAPPPAQLPRAARPRAEGLPPRRHRGSGGRRGDDERAWGSVRGLALRPGAARPREAPRRGGARHALLRGHERRHRHQRHSAGMGHDAPRPRPRRAVAPLRRGRRQGGQDRPDHRSRRRGHALPPGGGEGDVPAAPAEPLRAVARGDAGHGAGRVPRAGGRQRGVLHGVGDGEPGDVAGPGRVAAGALPGRRRGLRHRHHRHPRAAHDALRRRPPHLPRRHARRAPHPAHARQHGARVPLAAARR

SEQ ID NO: 2472 - protein, 466 aa, Zea mays subsp. mays
  peptide (1)..(466): Ceres Seq. ID no. 12408019
MWWRRCSKTGGVDGPPAGASGLAGGGEPVPGDPAATALHVRGARPPGEVRAHLHHADGAAHPHRGHLGGAHPRGAGEAGPHVREPARGQPHPPPLQRRQVHRQLGALRPPVACSAPQLRRRDRVPAPRQGLLLDPGVGRGRALAPPLRRARGGRCRAGHGQLPPHHLQHPHLHLLRRQDPRRAHPGDRGGAQGRDDDDHAQAPGLPAPPHTALQEAAHRGPRPAPPPAQLPRAARPRAEGLPPRRHRGSGGRRGDDERAWGSVRGLALRPGAARPREAPRRGGARHALLRGHERRHRHQRHSAGMGHDAPRPRPRRAVAPLRRGRRQGGQDRPDHRSRRRGHALPPGGGEGDVPAAPAEPLRAVARGDAGHGAGRVPRAGGRQRGVLHGVGDGEPGDVAGPGRVAAGALPGRRRGLRHRHHRHPRAAHDALRRRPPHLPRRHARRAPHPAHARQHGARVPLAAARR

SEQ ID NO: 2473 - protein, 279 aa, Zea mays subsp. mays
  peptide (1)..(279): Ceres Seq. ID no. 12408020
MYVVRDLREKYGPIFTMRMGQRTLIVVTSAELIHEALVKQGPMFASRPEDSPTRLLFSVGKCTVNSAPYGPLWRALRRNFVAEIVSPHRVKGFSWIREWAVDAHLRRLCAELAADGAVRVMASCRLTICSILICICFGAKIPDELIREIEEVLKDVMMMTMPKLPDFLPLLTPLFRKQLTEARALRRRQLNCLVPLVRARRDFLRDGTAAAADGVEMMSGPGEAYVDSLFDLEPPGRGKRLGEEELVTLCSEVMSAGTDTSATALEWAMMHLVLDPAAQ

SEQ ID NO: 2474 - DNA, 1591 bp, Zea mays subsp. mays
  misc_feature (1)..(1591): Ceres Seq. ID no. 12357866
  misc_feature (1)..(1591): Ortholog of  Ceres SEQ ID NO 15177221 as cited in SEQ ID NO 53046
  misc_feature (1)..(1591): Ortholog of  Ceres SEQ ID NO 15170209 as cited in SEQ ID NO 58562
  misc_feature (1)..(1591): Ortholog of  Ceres SEQ ID NO 14315134 as cited in SEQ ID NO 59476
  misc_feature (1)..(1591): Ortholog of  Ceres SEQ ID NO 12616332 as cited in SEQ ID NO 63449
  misc_feature (1)..(1591): Ortholog of  Ceres SEQ ID NO 13597498 as cited in SEQ ID NO 64648
  misc_feature (1)..(1591): Ortholog of  Ceres SEQ ID NO 14308053 as cited in SEQ ID NO 67790
aggcagagctctcacgcggacggcggacctggccacctggggggcgcggacggagccttcgcttttcccccctcccctccctttcgaacgactaccgaggaggcatccgaggtggccagccacgatgatggccgcggcggcgctgaggccgcacaagtcttcgccggcgcgcgtgcccacgcggtgcgtggccgcgctctgcgccgcctgcttcctcgtcggcgtcggcgtcgtcaacaggtactggcctgttcctgagcctcatcccggttgcccagacaaggctggccctgaccactcgagggccgtgttgaaccaagcgtcacagactcgcgaagtcgtcatggcgttggacaagacgatatccgacatcgagatgcgcctggctgcggctagagccgcccaggcgatgagccagggcatgtcaccgggcgactcggactcggagggcgaccagggaaccgcgcggcgtaggatgtcttttgtcatgggcgttttcaccactcttgctaaccggaagcggagagattcaataaggcagacgtggatgccacagggtgatcagttgcgaagattggaagacaagggcgttgttatccgttttgttgttggacgcagtgcaaatccaaacctggaaaatgaggtcgaccatgcaattgatatggaggatgaagaatacagtgatatcttgagaattaatcatgtggaaggctatggagggctccctatgaaggttcagatgttcctttcgactgctcttacaatgtgggacgctgatttctatgtaaaagccgacgataatgtccatgtcaacattggtatcaccagatcgattttggcgcgacacaggatgaaacctcgggtgtacattggctgcatgaaatctggacctgttgttgctaagaatgactccaagtattatgagccagaccattggaagtttgggactgagggtaacaactactttaggcatgcaacacgtcagttgtatgctgtaaccagggatttagcaacttacatatcagcaaaccggcatatcctgcacaagtattcaaatgaagatgtatcatttggctcttggttgatcgggttggaagttgagcatgttgatgagagaagcctttgctgtggtactcccccagactgcgaatggaaagggcaggccgggaacccatgtgcggcgtccttcgactggaactgcactggcatctgcaatccggtggagaggatgacagaggtacaccgacgatgttgggaaggccttggagccgaagggcacgcacagtctttgacttttgacagccaatagttggcgcttggcggatcattgtcgcaccattttcttcctcttctttagggccctgtaattaatatgcggagatgaacttgtatgcaatggctcggtttttcagatgtgcagcaatggcatcgtttcctggccagttcgcgtgcggaaactggggtagagaattaggagttcaatctgcaagtgagtctctaataactggagatgcctcactggacgtccgatgaaactggggtagactgtttgattctctgatgaaagaattagctgtctgtctgagttctc

SEQ ID NO: 2475 - protein, 435 aa, Zea mays subsp. mays
  peptide (1)..(435): Ceres Seq. ID no. 12357867
GRALTRTADLATWGARTEPSLFPPPLPFERLPRRHPRWPATMMAAAALRPHKSSPARVPTRCVAALCAACFLVGVGVVNRYWPVPEPHPGCPDKAGPDHSRAVLNQASQTREVVMALDKTISDIEMRLAAARAAQAMSQGMSPGDSDSEGDQGTARRRMSFVMGVFTTLANRKRRDSIRQTWMPQGDQLRRLEDKGVVIRFVVGRSANPNLENEVDHAIDMEDEEYSDILRINHVEGYGGLPMKVQMFLSTALTMWDADFYVKADDNVHVNIGITRSILARHRMKPRVYIGCMKSGPVVAKNDSKYYEPDHWKFGTEGNNYFRHATRQLYAVTRDLATYISANRHILHKYSNEDVSFGSWLIGLEVEHVDERSLCCGTPPDCEWKGQAGNPCAASFDWNCTGICNPVERMTEVHRRCWEGLGAEGHAQSLTFDSQ

SEQ ID NO: 2476 - protein, 394 aa, Zea mays subsp. mays
  peptide (1)..(394): Ceres Seq. ID no. 12357868
MMAAAALRPHKSSPARVPTRCVAALCAACFLVGVGVVNRYWPVPEPHPGCPDKAGPDHSRAVLNQASQTREVVMALDKTISDIEMRLAAARAAQAMSQGMSPGDSDSEGDQGTARRRMSFVMGVFTTLANRKRRDSIRQTWMPQGDQLRRLEDKGVVIRFVVGRSANPNLENEVDHAIDMEDEEYSDILRINHVEGYGGLPMKVQMFLSTALTMWDADFYVKADDNVHVNIGITRSILARHRMKPRVYIGCMKSGPVVAKNDSKYYEPDHWKFGTEGNNYFRHATRQLYAVTRDLATYISANRHILHKYSNEDVSFGSWLIGLEVEHVDERSLCCGTPPDCEWKGQAGNPCAASFDWNCTGICNPVERMTEVHRRCWEGLGAEGHAQSLTFDSQ

SEQ ID NO: 2477 - protein, 393 aa, Zea mays subsp. mays
  peptide (1)..(393): Ceres Seq. ID no. 12357869
MAAAALRPHKSSPARVPTRCVAALCAACFLVGVGVVNRYWPVPEPHPGCPDKAGPDHSRAVLNQASQTREVVMALDKTISDIEMRLAAARAAQAMSQGMSPGDSDSEGDQGTARRRMSFVMGVFTTLANRKRRDSIRQTWMPQGDQLRRLEDKGVVIRFVVGRSANPNLENEVDHAIDMEDEEYSDILRINHVEGYGGLPMKVQMFLSTALTMWDADFYVKADDNVHVNIGITRSILARHRMKPRVYIGCMKSGPVVAKNDSKYYEPDHWKFGTEGNNYFRHATRQLYAVTRDLATYISANRHILHKYSNEDVSFGSWLIGLEVEHVDERSLCCGTPPDCEWKGQAGNPCAASFDWNCTGICNPVERMTEVHRRCWEGLGAEGHAQSLTFDSQ

SEQ ID NO: 2478 - DNA, 1777 bp, Zea mays subsp. mays
  misc_feature (1)..(1777): Ceres Seq. ID no. 12423983
  misc_feature (1)..(1777): Ortholog of  Ceres SEQ ID NO 14311203 as cited in SEQ ID NO 53639
  misc_feature (1)..(1777): Ortholog of  Ceres SEQ ID NO 15176053 as cited in SEQ ID NO 57792
  misc_feature (1)..(1777): Ortholog of  Ceres SEQ ID NO 14311175 as cited in SEQ ID NO 60223
  misc_feature (1)..(1777): Ortholog of  Ceres SEQ ID NO 15224727 as cited in SEQ ID NO 64990
  misc_feature (1)..(1777): Ortholog of  Ceres SEQ ID NO 14308023 as cited in SEQ ID NO 65865
  misc_feature (1)..(1777): Ortholog of  Ceres SEQ ID NO 14307972 as cited in SEQ ID NO 66436
  misc_feature (1)..(1777): Ortholog of  Ceres SEQ ID NO 15170175 as cited in SEQ ID NO 67138
  misc_feature (1)..(1777): Ortholog of  Ceres SEQ ID NO 12614670 as cited in SEQ ID NO 68565
gcacgagaccattacctagaacatcctaatcgaaaaattgctgttagctccacacaaaagagagaaccggcggcgagctaggagctagccatggacggacacggcgcggtctcgccgtggagcgtgctaggcggggcggcggctgtgctgttcctgtggttggcgtcgcaggtgctggagtgggcctggtgggcgccccggcgcgtgaaccgtgcgctgagggcgcagggcctgaggggcacccggtaccgcctcctctgcggcgacctcatcgaggagcagcgtctccgcgcggcggccctggcaaggcccgtccccgtggatcgaccacacgacttcctccctcgcgtcgcgcctttccttcaccgcgtcctccaagagcacggcaagctctcgtttacatggtttgggccgaccccaagagttctaatcaccgatcccgagcttgcccgggaagtgctgtcgaataagtgtggcgacttcgtgaagtcgctgctctctcccctgtcaacgctgctggttgctgggctcgtcgtccttgacggtgaaaagtgggtcaaacatcgaaggattctgaatccggcattccacgcggagaagctgaagggaatgctgccggcattcttagcatgttgcaacgaactggttgacagatgggagaaacagatctcctgcttccgctgaaccaactgagctggatgtctggccagagttccaaaacttatcgggagatgtgatttcaagagctgcattcggtgttagctatgaagaaggcagaagaattttcctacttcaggcggagcaagctgaacgccttgttcaatctttcaagacaaattacatccctggcttctctctcctgccaacagaaaacaacagaaggatgaatgaaatcgacagggaggtgaagacggtcntgaggggcataatagagaagagacagaaggcagccaagaacggtgaagcaaccaaggacgacctgctgggcttgctactggagtcgaacatgaattacagcgactcggacggcaaatccagcaaggggattacggtggaggaggtgatcggcgagtgcaaggtgttctacttcgcagggatggagaccaccgccgtgctgctcacatggacagtggccgtgctaagcatgcacccggagtggcaggaccgtgccagggaggaggtcctgcaggtctttggtgaaaacaagccggacttcaatggtgtggcacgcctaaaagtggtgaccatggtgctctacgaggtgctgcgtctgtaccctccggtggcggccatcaaccgccggacacgccagccgacaaagctcggaggcgtcacgtacccggcgggggtcatgcttatgacgcccgtcatgttcatccaccgggaccctgccctgtggggctccgacgccgacgagttcaacccggggaggttcgccgacggcgtgtccaaggcgtgcagggaccccggcgccttcgcccccttcagctggggcccgcgcgtctgcatcggccagaactttgcgctcctggaggccaagctggccgtcagcatgatcctgcagcgcttcgcgttcgaggtgtcgccggcgtacgtccacgcgccctacaccgtgctgacactgcacccgcagcacggcgctccggtcaggctgcgcaggctatgaatacacgatcggtgcttccgttaagcaatttctctccaatacccgaagactcttgtttattcatttcaaagttacgattacaaaacataatgcaaaatctcaaacttatat

SEQ ID NO: 2479 - protein, 260 aa, Zea mays subsp. mays
  peptide (1)..(260): Ceres Seq. ID no. 12423984
  misc_feature (12)..(12): Xaa is any aa, unknown or other
MNEIDREVKTVXRGIIEKRQKAAKNGEATKDDLLGLLLESNMNYSDSDGKSSKGITVEEVIGECKVFYFAGMETTAVLLTWTVAVLSMHPEWQDRAREEVLQVFGENKPDFNGVARLKVVTMVLYEVLRLYPPVAAINRRTRQPTKLGGVTYPAGVMLMTPVMFIHRDPALWGSDADEFNPGRFADGVSKACRDPGAFAPFSWGPRVCIGQNFALLEAKLAVSMILQRFAFEVSPAYVHAPYTVLTLHPQHGAPVRLRRL

SEQ ID NO: 2480 - protein, 219 aa, Zea mays subsp. mays
  peptide (1)..(219): Ceres Seq. ID no. 12423985
MNYSDSDGKSSKGITVEEVIGECKVFYFAGMETTAVLLTWTVAVLSMHPEWQDRAREEVLQVFGENKPDFNGVARLKVVTMVLYEVLRLYPPVAAINRRTRQPTKLGGVTYPAGVMLMTPVMFIHRDPALWGSDADEFNPGRFADGVSKACRDPGAFAPFSWGPRVCIGQNFALLEAKLAVSMILQRFAFEVSPAYVHAPYTVLTLHPQHGAPVRLRRL

SEQ ID NO: 2481 - protein, 197 aa, Zea mays subsp. mays
  peptide (1)..(197): Ceres Seq. ID no. 12423986
MDGHGAVSPWSVLGGAAAVLFLWLASQVLEWAWWAPRRVNRALRAQGLRGTRYRLLCGDLIEEQRLRAAALARPVPVDRPHDFLPRVAPFLHRVLQEHGKLSFTWFGPTPRVLITDPELAREVLSNKCGDFVKSLLSPLSTLLVAGLVVLDGEKWVKHRRILNPAFHAEKLKGMLPAFLACCNELVDRWEKQISCFR

SEQ ID NO: 2482 - DNA, 1163 bp, Zea mays subsp. mays
  misc_feature (1)..(1163): Ceres Seq. ID no. 12343976
  misc_feature (1)..(1163): Ortholog of  Ceres SEQ ID NO 12611101 as cited in SEQ ID NO 55920
agcttgtggtcgcgatgccgtacaccggatatcctctagcgccttcccacaatcgcgcttctgcggttctgccgccgacgtccgcgccgccgacgtccgcgcccgcgtccctcgctgctttgccctctccaccctccgccatcaccgccgcggcgtccttctgtaccggatccgtcgcagccaccactccgcagatccgctgggttgacgtccacggagctgctccggggatgtcgtcctccgcttccagcgtccagggcgacgccgccggagagttcacggaggtcgtaatcgtgcgtcacggcgagacgtcatggaacgcctcgcgcatcatacagggacacttggatgcagagcttaatgatattggaaggcagcaagctgttgcggttgctcatcgtctttctaaagaagtgaaaccagttgccatatactcttctgatctgaagcgagcagcagagactgcgcaaacaattgcaagaatttgcaatgtgccaaatgtcgtgttcgatccagcactgagagaaagacacattggagatctgcaaggcatgacgcttcaagatgctgctacagagaggccagaggcatacaaagcttttatgtcccacaagagaaatcaacaagttcctggtggtggagagagtcttgatcaactgtcggagcgatgtgtgtcttttctgtacgacattgttggtaaacacaaaggggagcgagttatcctggtttcacatggcggcaccatcagagagctctacagacacgtgagtcccacgaagccgctccacggcaaaatacacaacacgtcggtgagcgtcatcctcgtgtccgacgccaccggccggtgcatcgtcaagatgtgcggggacgtcagccacctccaggagacgggcgtcctggagaacgccttcggtggcgacaagacctccgcctgagattccaacattcatcacgcgccgagagctctcggcaattatcacgcgccgagtgagcgctcgtttcggccgtctttttttccactgtaccaatcatcctgttgctaccagtagtggtctagcggagaatgatgcacacttccccccgctgggaacgcggcgatttttgctggaacagttgaaggccgagccggggcgaatccttttggcctggccgtgcactgcttg

SEQ ID NO: 2483 - protein, 310 aa, Zea mays subsp. mays
  peptide (1)..(310): Ceres Seq. ID no. 12343977
LVVAMPYTGYPLAPSHNRASAVLPPTSAPPTSAPASLAALPSPPSAITAAASFCTGSVAATTPQIRWVDVHGAAPGMSSSASSVQGDAAGEFTEVVIVRHGETSWNASRIIQGHLDAELNDIGRQQAVAVAHRLSKEVKPVAIYSSDLKRAAETAQTIARICNVPNVVFDPALRERHIGDLQGMTLQDAATERPEAYKAFMSHKRNQQVPGGGESLDQLSERCVSFLYDIVGKHKGERVILVSHGGTIRELYRHVSPTKPLHGKIHNTSVSVILVSDATGRCIVKMCGDVSHLQETGVLENAFGGDKTSA

SEQ ID NO: 2484 - protein, 306 aa, Zea mays subsp. mays
  peptide (1)..(306): Ceres Seq. ID no. 12343978
MPYTGYPLAPSHNRASAVLPPTSAPPTSAPASLAALPSPPSAITAAASFCTGSVAATTPQIRWVDVHGAAPGMSSSASSVQGDAAGEFTEVVIVRHGETSWNASRIIQGHLDAELNDIGRQQAVAVAHRLSKEVKPVAIYSSDLKRAAETAQTIARICNVPNVVFDPALRERHIGDLQGMTLQDAATERPEAYKAFMSHKRNQQVPGGGESLDQLSERCVSFLYDIVGKHKGERVILVSHGGTIRELYRHVSPTKPLHGKIHNTSVSVILVSDATGRCIVKMCGDVSHLQETGVLENAFGGDKTSA

SEQ ID NO: 2485 - protein, 234 aa, Zea mays subsp. mays
  peptide (1)..(234): Ceres Seq. ID no. 12343979
MSSSASSVQGDAAGEFTEVVIVRHGETSWNASRIIQGHLDAELNDIGRQQAVAVAHRLSKEVKPVAIYSSDLKRAAETAQTIARICNVPNVVFDPALRERHIGDLQGMTLQDAATERPEAYKAFMSHKRNQQVPGGGESLDQLSERCVSFLYDIVGKHKGERVILVSHGGTIRELYRHVSPTKPLHGKIHNTSVSVILVSDATGRCIVKMCGDVSHLQETGVLENAFGGDKTSA

SEQ ID NO: 2486 - DNA, 1415 bp, Zea mays subsp. mays
  misc_feature (1)..(1415): Ceres Seq. ID no. 12410718
  misc_feature (1)..(1415): Ortholog of  Ceres SEQ ID NO 14312711 as cited in SEQ ID NO 1401
  misc_feature (1)..(1415): Ortholog of  Ceres SEQ ID NO 15170220 as cited in SEQ ID NO 55383
  misc_feature (1)..(1415): Ortholog of  Ceres SEQ ID NO 14304198 as cited in SEQ ID NO 56479
  misc_feature (1)..(1415): Ortholog of  Ceres SEQ ID NO 14316543 as cited in SEQ ID NO 57118
  misc_feature (1)..(1415): Ortholog of  Ceres SEQ ID NO 12616285 as cited in SEQ ID NO 63483
gatcgatggatttctacggttcctgcctgtcaagtgtttgtcctcgtctcgtcttcggaaaacaccaaacgacaagtccaaggcagagcagatttagaccgaaatatacaaaaactggatcgaaaattgcatatcggactggaccgagaacgaaaaaagaaaccgagggaaagttcaagtgttcaaccttgaatggccatggccttcttttcgttttcggccctataaaactgatgatctgctgatgagacatcccactcgccggccgtccttgaagagcgagcagcaatggcgcaggagatcgagcacacccacctccccatccgcggcctcaacctccacgtcgcacaagtaggcacaggtgaactgggcacggtggtgttcctgcacggcttcccggagatatggtactcgtggcgccaccagatgcgggcccgtggccgcggcggggtaccgcgccatcgcgccggactgccgcgggtacggcctgtcggagcagccgccggagcacgaggaggtctctcctgacgacctcatcgccgacgtgctgggcatcctcgacgccctcagcgtcccgaaggcgttcttggtgggcaaggacttcggcgccatgccggcgtacgagttcgcgctgcagcacccgggccgcacctgcggcgtggtgtgcctgggcatccccttcaacccggcccccatatccttcgacgccatcatgcccgaaggattctacatcctgcgctggcgcgagccgggcagggcggaggccgacttcggccggttcgacgtgaggcgcgtggtgcgcaccatctacgtgctcttcgccggcgccgagatcccgattgccaaggaagggcaggagatcatggacctggccgacctgtccacgcccctcccggagtggttcaccgaggaggacctggacgcctacgccaagctctacgagaagtccggcttcgggtacccgctcaagatgccgtacagatctatgcacaagctcccgaaccggctggacgccaagttccaggtgccggtgttcatggtgatgggggagaaggactacgcgttcaagttcccggggttcgagaccgccatgcgcggcggggtcatggacaacttcatgccggacctcaagatcacctacatccctgaggggagccacttcgtgcaggagcagctcccagagcaggtcaacgacctgctcctcggcttcctcagggaccatccctccgccgcataagcagtgggtgagaccgtcagaataatggaatgcttcctgagcaacggtttctctactctattgccgttgcctggatccatgaccgtgttaattaattaattagtgcatatacttcctactcaaatcagatgtacgttttttttatctgcaataaaaatcatcgtcgctgcattactcg

SEQ ID NO: 2487 - protein, 208 aa, Zea mays subsp. mays
  peptide (1)..(208): Ceres Seq. ID no. 12410719
MPAYEFALQHPGRTCGVVCLGIPFNPAPISFDAIMPEGFYILRWREPGRAEADFGRFDVRRVVRTIYVLFAGAEIPIAKEGQEIMDLADLSTPLPEWFTEEDLDAYAKLYEKSGFGYPLKMPYRSMHKLPNRLDAKFQVPVFMVMGEKDYAFKFPGFETAMRGGVMDNFMPDLKITYIPEGSHFVQEQLPEQVNDLLLGFLRDHPSAA

SEQ ID NO: 2488 - protein, 174 aa, Zea mays subsp. mays
  peptide (1)..(174): Ceres Seq. ID no. 12410720
MPEGFYILRWREPGRAEADFGRFDVRRVVRTIYVLFAGAEIPIAKEGQEIMDLADLSTPLPEWFTEEDLDAYAKLYEKSGFGYPLKMPYRSMHKLPNRLDAKFQVPVFMVMGEKDYAFKFPGFETAMRGGVMDNFMPDLKITYIPEGSHFVQEQLPEQVNDLLLGFLRDHPSAA

SEQ ID NO: 2489 - protein, 127 aa, Zea mays subsp. mays
  peptide (1)..(127): Ceres Seq. ID no. 12410721
MVLVAPPDAGPWPRRGTAPSRRTAAGTACRSSRRSTRRSLLTTSSPTCWASSTPSASRRRSWWARTSAPCRRTSSRCSTRAAPAAWCAWASPSTRPPYPSTPSCPKDSTSCAGASRAGRRPTSAGST

SEQ ID NO: 2490 - DNA, 1239 bp, Zea mays subsp. mays
  misc_feature (1)..(1239): Ceres Seq. ID no. 12410710
  misc_feature (1)..(1239): Ortholog of  Ceres SEQ ID NO 15170627 as cited in SEQ ID NO 52703
  misc_feature (1)..(1239): Ortholog of  Ceres SEQ ID NO 13655124 as cited in SEQ ID NO 62896
  misc_feature (1)..(1239): Ortholog of  Ceres SEQ ID NO 13597493 as cited in SEQ ID NO 64613
  misc_feature (1)..(1239): Ortholog of  Ceres SEQ ID NO 14313540 as cited in SEQ ID NO 68110
  misc_feature (1)..(1239): Ortholog of  Ceres SEQ ID NO 13596175 as cited in SEQ ID NO 68297
  misc_feature (1)..(1239): Ortholog of  Ceres SEQ ID NO 14301898 as cited in SEQ ID NO 69243
atcatccagaccaccattaccagagtgctctgctctcgctggaggccgtggttcattcacgttcatggaggccgccgccattcccaccagtgccccggaaaccaggattgccgttgtcaccggcggcaacaaagggatcgggctagaggtgtgccggcagctggccggcgccggcgccaccgtcgtcgtcttaacagccagggacgagacgaggggtgcagccgctgcacaagagctcagagaatctgggctctccgatgtcatcttccatcagctggacatcaccgacgctgcgagcgtcagtcggctggctgagttcctcaaggctcgttttggaaagctagatatcctggtaaataatgccgcagttggtgctgttgagtacgtccaagatcctgctgacagttcaacgagcgaggaagagctgagtggcatggatatggtccaaaggcttcagtgcatgcttaagagagtccgggagacctacgacgctgcgacagaaggcatcaagacaaactactatggcataaagcatgtgatcgaagccttgctgcctctgcttcaagcttcctccgatgggaggatcgttaacgtctcctctgacttcggactgctaaggctgatcaacaacgaggaagctaaggcaggagctaaacgacgtggagaagctcaccgaggagaggctggacgaggtgctggccgcgtacctgagagacttcgacgccggcgaggtgggggcgcgcgggtggccggtggacttctcggcctacaaggtggccaaggtggccatgaacgcgtacacgaggatcctagcgaggagccacccggggctgcgcgtcaactgcgcgcaccccggctacgtgagcaccgacatgaccgtccacaccgggcctctcacgcccgagcaaggcgcggccaacgtcgtgaaggtggcgctgctgccggagggcggcccgaccggcgcgtacttcgcgttgggagaggaggcgtcctttatgtgacgaaagcaccgtcgtcgttaagttcgtcgttgttcgccaactccctgttagtcgatttctaaatcgacgtacaatgaaatacatcatcgctgcaaactcacaaatgaaaacaagggaaccttgtagcaaaaaaaaaaaagaagtggacagaataatgaataagcatgtcaaatatctcttgagtatctatttgttcaagtatcaatgactttgtacaaatatcaaagattgtgagtgg

SEQ ID NO: 2491 - protein, 353 aa, Zea mays subsp. mays
  peptide (1)..(353): Ceres Seq. ID no. 12410711
SSRPPLPECSALAGGRGSFTFMEAAAIPTSAPETRIAVVTGGNKGIGLEVCRQLAGAGATVVVLTARDETRGAAAAQELRESGLSDVIFHQLDITDAASVSRLAEFLKARFGKLDILVNNAAVGAVEYVQDPADSSTSEEELSGMDMVQRLQCMLKRVRETYDAATEGIKTNYYGIKHVIEALLPLLQASSDGRIVNVSSDFGLLRLINNEEAKAGAKRRGEAHRGEAGRGAGRVPERLRRRRGGGARVAGGLLGLQGGQGGHERVHEDPSEEPPGAARQLRAPRLREHRHDRPHRASHARARRGQRREGGAAAGGRPDRRVLRVGRGGVLYVTKAPSSLSSSLFANSLLVDF

SEQ ID NO: 2492 - protein, 332 aa, Zea mays subsp. mays
  peptide (1)..(332): Ceres Seq. ID no. 12410712
MEAAAIPTSAPETRIAVVTGGNKGIGLEVCRQLAGAGATVVVLTARDETRGAAAAQELRESGLSDVIFHQLDITDAASVSRLAEFLKARFGKLDILVNNAAVGAVEYVQDPADSSTSEEELSGMDMVQRLQCMLKRVRETYDAATEGIKTNYYGIKHVIEALLPLLQASSDGRIVNVSSDFGLLRLINNEEAKAGAKRRGEAHRGEAGRGAGRVPERLRRRRGGGARVAGGLLGLQGGQGGHERVHEDPSEEPPGAARQLRAPRLREHRHDRPHRASHARARRGQRREGGAAAGGRPDRRVLRVGRGGVLYVTKAPSSLSSSLFANSLLVDF

SEQ ID NO: 2493 - protein, 209 aa, Zea mays subsp. mays
  peptide (1)..(209): Ceres Seq. ID no. 12410713
MDMVQRLQCMLKRVRETYDAATEGIKTNYYGIKHVIEALLPLLQASSDGRIVNVSSDFGLLRLINNEEAKAGAKRRGEAHRGEAGRGAGRVPERLRRRRGGGARVAGGLLGLQGGQGGHERVHEDPSEEPPGAARQLRAPRLREHRHDRPHRASHARARRGQRREGGAAAGGRPDRRVLRVGRGGVLYVTKAPSSLSSSLFANSLLVDF

SEQ ID NO: 2494 - DNA, 1175 bp, Zea mays subsp. mays
  misc_feature (1)..(1175): Ceres Seq. ID no. 13499108
  misc_feature (1)..(1175): Ortholog of  Ceres SEQ ID NO 14306627 as cited in SEQ ID NO 53023
  misc_feature (1)..(1175): Ortholog of  Ceres SEQ ID NO 15174917 as cited in SEQ ID NO 53650
  misc_feature (1)..(1175): Ortholog of  Ceres SEQ ID NO 14304034 as cited in SEQ ID NO 53878
  misc_feature (1)..(1175): Ortholog of  Ceres SEQ ID NO 14307559 as cited in SEQ ID NO 54006
  misc_feature (1)..(1175): Ortholog of  Ceres SEQ ID NO 14307797 as cited in SEQ ID NO 54802
  misc_feature (1)..(1175): Ortholog of  Ceres SEQ ID NO 13663874 as cited in SEQ ID NO 67003
acacccatctcctgagtcctgcctgcgctcgcctcagctcctttcttccccgccccttggcttttgcttggttgcatcgggccggtcgagccggagaggaaaagctagctactagctaccagctctcggccggcggtggtagtctgcctgcagctggggttagctgcaagggttgggagctagccatggggaggggtcgggtggagctcaagcggatcgagaacaagatcaaccgccaggtcaccttcgccaagcgccgcaacggcctgctcaagaaggcgtacgagctctccgtgctctgcgacgccgaagtcgcgctcatcatcttctccaaccgcggcaagctctacgagttctgcagcggacagagcatcaccaaaacacttgagaggtatgaaaaaaacagttatggaggaccagatactgctgtacagaacaaggagaacgagttagtccagagcagtcgtaatgagtacctcaagctgaaagcgagggtggataatttacagaggactcagaggaatttgcttggtgaagatctggggtcacttggtgtcaaagagcttgagcagcttgagaagcaacttgattcatccttaaggcacataagatccacaaggacacaacatatgcttgatcagctcactgatcttcagaggagggagcaaatgctgtgtgaagcaaataagtgccttagaagaaagctggaggagaccagcaaccaggtgcatggccaagtgtgggagcacggtgccaacttactcggctacgagaggcactctcctcaacagcaggccccatcacatgttggcaatggtttgttctttcatcccctggaagctgcagcagagccaaccctgcagatcgggttcgctcctgagcatatgaataacttcatgccaacatggctaccctgaagatggatcttgaggcaaaggaaataaataaagatgcggtggcagcatcatactctatgcaagctaagagtgacagctgtgtttcagtcacatatatgatctagtctgtgtgtcaatgtgtcgaaaaacatgtctgtgattttgttatatgaatgtaacgcgcaatgaaacatacatgactagctgcttgcttgacgatgcgtttgcgtgtatccgtataaattaaaggctataagccacatcgtatatgcgtactgc

SEQ ID NO: 2495 - protein, 304 aa, Zea mays subsp. mays
  peptide (1)..(304): Ceres Seq. ID no. 13499109
THLLSPACARLSSFLPRPLAFAWLHRAGRAGEEKLATSYQLSAGGGSLPAAGVSCKGWELAMGRGRVELKRIENKINRQVTFAKRRNGLLKKAYELSVLCDAEVALIIFSNRGKLYEFCSGQSITKTLERYEKNSYGGPDTAVQNKENELVQSSRNEYLKLKARVDNLQRTQRNLLGEDLGSLGVKELEQLEKQLDSSLRHIRSTRTQHMLDQLTDLQRREQMLCEANKCLRRKLEETSNQVHGQVWEHGANLLGYERHSPQQQAPSHVGNGLFFHPLEAAAEPTLQIGFAPEHMNNFMPTWLP

SEQ ID NO: 2496 - protein, 243 aa, Zea mays subsp. mays
  peptide (1)..(243): Ceres Seq. ID no. 13499110
MGRGRVELKRIENKINRQVTFAKRRNGLLKKAYELSVLCDAEVALIIFSNRGKLYEFCSGQSITKTLERYEKNSYGGPDTAVQNKENELVQSSRNEYLKLKARVDNLQRTQRNLLGEDLGSLGVKELEQLEKQLDSSLRHIRSTRTQHMLDQLTDLQRREQMLCEANKCLRRKLEETSNQVHGQVWEHGANLLGYERHSPQQQAPSHVGNGLFFHPLEAAAEPTLQIGFAPEHMNNFMPTWLP

SEQ ID NO: 2497 - DNA, 1168 bp, Zea mays subsp. mays
  misc_feature (1)..(1168): Ceres Seq. ID no. 12352064
  misc_feature (1)..(1168): Ortholog of  Ceres SEQ ID NO 14311568 as cited in SEQ ID NO 51732
  misc_feature (1)..(1168): Ortholog of  Ceres SEQ ID NO 14303877 as cited in SEQ ID NO 53500
  misc_feature (1)..(1168): Ortholog of  Ceres SEQ ID NO 15169781 as cited in SEQ ID NO 54829
  misc_feature (1)..(1168): Ortholog of  Ceres SEQ ID NO 15173757 as cited in SEQ ID NO 57537
  misc_feature (1)..(1168): Ortholog of  Ceres SEQ ID NO 13597743 as cited in SEQ ID NO 65452
  misc_feature (1)..(1168): Ortholog of  Ceres SEQ ID NO 13654231 as cited in SEQ ID NO 68285
atgcgcatatatctttctctcttttttttctgtccaagggaaagaaggaaggcttgtgtgtatctgccagttttcggtctgcgattctgtagcctaacctatggtcatgcgactatgcgagttagattaatcagcgatctgcagtgctacttggtttgcattatcatgatcccctaggcgttttcttcttatcttttgactgaaatgctagcagcacaatagtttattagatgcttgagcagctactctgcactttcatttcctctgtatgtatttcctagtgtggaatttggtacttactttgcaattgtagcagacttgggattgagggtatccatggagatgcttgtggatttgagcaatctaatttggggaaaaggggtagagatgaaccatgttcatctggcccaacatccaaagcttgtcgtgaaaaaatgaggagagacaagctgaatgacaggttcctggaattaagttcagttatgagtcatggtaaggaagcaaagttagataaagcaaatatattgagtgatgcagcccgtatggtggcacaacttagaggtgaggcagaaaagcttaaggaatcaaatgagaagctgcgggagaatatcaaggatctgaaggaggagaagaacgagctccgtgaagagaaagtgagactaaaggtagaaaaggataggctggagcagcaagtcaaagctatgagtgtagctcctacaggatatgtaccccatctccctcatccagcttcataccatcctgctgcgttcactccatttgcgccgcctccagccaacaaaagtgctccaatcccagcaccgttccctgggatggcgatgtggcagtggttgcctccgaccatcgtggacacaactcaagatccaaagctctggcccccaaatgcttaggggcagctaccttggaatgttgtctcattgtgccttttcatgcatctggtgggcaaatcagtgtcagttaggtccctggagactggagaggaatcaagttcgcaattcgcgccatgtttatgctgtaacagctggtttccagcactagttatgaacttactatgttctactgaagggtggtgcctgtaattaatatatggatctcaaccctctagttggcatgtatatcatttgttctattcgagagctgcattttaagg

SEQ ID NO: 2498 - protein, 157 aa, Zea mays subsp. mays
  peptide (1)..(157): Ceres Seq. ID no. 12352065
MRRDKLNDRFLELSSVMSHGKEAKLDKANILSDAARMVAQLRGEAEKLKESNEKLRENIKDLKEEKNELREEKVRLKVEKDRLEQQVKAMSVAPTGYVPHLPHPASYHPAAFTPFAPPPANKSAPIPAPFPGMAMWQWLPPTIVDTTQDPKLWPPNA

SEQ ID NO: 2499 - protein, 141 aa, Zea mays subsp. mays
  peptide (1)..(141): Ceres Seq. ID no. 12352066
MSHGKEAKLDKANILSDAARMVAQLRGEAEKLKESNEKLRENIKDLKEEKNELREEKVRLKVEKDRLEQQVKAMSVAPTGYVPHLPHPASYHPAAFTPFAPPPANKSAPIPAPFPGMAMWQWLPPTIVDTTQDPKLWPPNA

SEQ ID NO: 2500 - protein, 121 aa, Zea mays subsp. mays
  peptide (1)..(121): Ceres Seq. ID no. 12352067
MVAQLRGEAEKLKESNEKLRENIKDLKEEKNELREEKVRLKVEKDRLEQQVKAMSVAPTGYVPHLPHPASYHPAAFTPFAPPPANKSAPIPAPFPGMAMWQWLPPTIVDTTQDPKLWPPNA

SEQ ID NO: 2501 - DNA, 1421 bp, Zea mays subsp. mays
  misc_feature (1)..(1421): Ceres Seq. ID no. 12414261
  misc_feature (1)..(1421): Ortholog of  Ceres SEQ ID NO 12583421 as cited in SEQ ID NO 56410
  misc_feature (1)..(1421): Ortholog of  Ceres SEQ ID NO 15169300 as cited in SEQ ID NO 59572
  misc_feature (1)..(1421): Ortholog of  Ceres SEQ ID NO 15176407 as cited in SEQ ID NO 59620
  misc_feature (1)..(1421): Ortholog of  Ceres SEQ ID NO 13596876 as cited in SEQ ID NO 62696
  misc_feature (1)..(1421): Ortholog of  Ceres SEQ ID NO 13655442 as cited in SEQ ID NO 64359
  misc_feature (1)..(1421): Ortholog of  Ceres SEQ ID NO 14303652 as cited in SEQ ID NO 67569
agaaaaggctgagaggctgtaaagagtgttgaaggacgctcggttccttcaggtgcggcggcgaccttgtctaggattttacccgtggaacgtggcgaccacttccgacgggccactcgccgccgctcgcccgccctgctcttcaccccttctcccgggaccgggacaagcgatctcccgtccccgtagtccgcaggagagagatttttttctcggttgcaatgaagagttatccgtgggcgggggcccgccctcttgccgtcgtgcagctcctcctcttcctcgcccacctcgtcgaccgcggcggtgctgccggtggaggcagcaagggcagctcggtgtacccggcggctgtcgtctacccgcatcactcccgccagatctcctgcaaacccagggtgttcctgtatcagcacttcctcagcgacgacgaggctaaccacctgatctccctcgcgagagcggagctcaagaggtcagcggtcgccgataatatgtctggcaagagcacgctcagtgaggtccgcaccagctccggcaccttcctcaggaagggccaggatcctattgttgagggtatagaggacaaaattgctgcatggacattccttccaaaagagaatggtgaagatatccaagtcctaagatataagcatggggagaagtatgaaccacactatgattacttcactgacaatgttaacactgtccgtggtggtcatcgctacgctactgttcttttgtacttaactgatgtaccagaaggaggggaaacggttttccccttggctgaggagcccgatgatgctaaagatgcaaccttgtcagaatgtgctcagaaaggcattgcagtgagaccacggaaaggtgacgccctccttttcttcaaccttaacccagacggcaccaccgactcggtgagcctccatggtggttgcccggtcataaaaggcgagaaatggtcggctacgaagtggatccgtgtggcctcgttcgataaggtccatcacccacagggcaactgcaccgacgagaacgagagctgcgcgaaatgggcggccctaggggagtgcataaagaacccagagtacatggtgggaaccacagcgttgcctggttactgtcggaggagctgcaatgtgtgctagggtcaggacgtgagagtactagtatttgttagtgcataccacttgtatccatagtctgttgttggtctcctacatctcgcataaaagaaatactcctatgctataggttatgccgatggaggtgcatttagaataagcctagtatttgatctattgatttattagattgcttggttctgctagctcataatttgtaccggaaccttagaagatctttgattcgttgtcatctgtaacattttctcgatatatatatggtgtgcatttctgggc

SEQ ID NO: 2502 - protein, 308 aa, Zea mays subsp. mays
  peptide (1)..(308): Ceres Seq. ID no. 12414262
MKSYPWAGARPLAVVQLLLFLAHLVDRGGAAGGGSKGSSVYPAAVVYPHHSRQISCKPRVFLYQHFLSDDEANHLISLARAELKRSAVADNMSGKSTLSEVRTSSGTFLRKGQDPIVEGIEDKIAAWTFLPKENGEDIQVLRYKHGEKYEPHYDYFTDNVNTVRGGHRYATVLLYLTDVPEGGETVFPLAEEPDDAKDATLSECAQKGIAVRPRKGDALLFFNLNPDGTTDSVSLHGGCPVIKGEKWSATKWIRVASFDKVHHPQGNCTDENESCAKWAALGECIKNPEYMVGTTALPGYCRRSCNVC

SEQ ID NO: 2503 - protein, 217 aa, Zea mays subsp. mays
  peptide (1)..(217): Ceres Seq. ID no. 12414263
MSGKSTLSEVRTSSGTFLRKGQDPIVEGIEDKIAAWTFLPKENGEDIQVLRYKHGEKYEPHYDYFTDNVNTVRGGHRYATVLLYLTDVPEGGETVFPLAEEPDDAKDATLSECAQKGIAVRPRKGDALLFFNLNPDGTTDSVSLHGGCPVIKGEKWSATKWIRVASFDKVHHPQGNCTDENESCAKWAALGECIKNPEYMVGTTALPGYCRRSCNVC

SEQ ID NO: 2504 - DNA, 1522 bp, Zea mays subsp. mays
  misc_feature (1)..(1522): Ceres Seq. ID no. 12410682
  misc_feature (1)..(1522): Ortholog of  Ceres SEQ ID NO 14303471 as cited in SEQ ID NO 59423
ctgggcctttaggtttttctgcgtatgtgttggacgcacgccaccctcctctctcctctacggctcagccggccgccgccctcctctctcggtctctcctctcctccaacggctcagccggcgccaccgccctcctccctcctatcctccaacatctccggcgcgtctctcctcagccgcggaggcaaagccggccgccggccgtggaggcacagcagacctgcgccaccgctggccgcctaccccacagcagatctgcactcaagaccagcagccagccagccatcctctgcggctccactctgccagcgcccaagaccagcgctagcagccagccatcctccacctccactgctctccatttgatcatttgctttggtaattggtcgtatagtccctcatcatcggaatggtggggtcacttatctttcccacacctaatgtggatccgaaggcagagaatcctaatgagatggttacagctggtgtgctttcaagccttcagaatttcctacgcaagtgcctcatagctatcctctcatatggcccaatgccgaagcacattgcatttattatggatggcaatcgtcgatatgctaaattcagaagcatgcaagaaggagctggtcacaggatgggtttctctacccttattgcaagtctaatgtactgctatgaaatgggtgtgaagtacatcactgtctacgcattcagcatcgacaattttaaaagggacccaagtgaggtggaatccttgatgcagttaatggaggaaaaaatcaacgaactcttagagaaccgaagtgtaatcaacaagattaactgtaagatcaacttttggggtaacttggacttgttatatgagccggtgcggttggcggctgagaagctgatggcgagcacagctgggaacacagggctggtcttttctatctgcatgccatacaactcgacttctgagattgtcaatgctgtcagtgaagtctgtgcggaaaggatggaaatgtttcagagtgaacatattggcgactgcaatggtcatgctgcaaataacggtgtgcgttcagagatttcagtggcggatttggatcgccacatgtatagtgccggatgcccagatcctgatatcgtcatccggacttcgggcgagactcgattgagcaatttcctcctttggcagacaacgtttagtcacttgcagaatccagatcctctgtggcccgagttctcttttaggcaccttgtttgggctatcttgcagtatcagagagtttaccctgctctggagcataacagaaagttggctaagaagcagttgtgattccatgttacttgcaaggaggtatcatgaagggctattaacatcaaacttttccttctcaatttcctggtaatggtaaatgcaaagaagaacatactagcatataacattatgaatagatcaccatgtaacttaagtgtgattgctaccgtaaccatgtaacttatttgagctcgtacaaatgctgtgattcctatatat

SEQ ID NO: 2505 - protein, 303 aa, Zea mays subsp. mays
  peptide (1)..(303): Ceres Seq. ID no. 12410683
MVGSLIFPTPNVDPKAENPNEMVTAGVLSSLQNFLRKCLIAILSYGPMPKHIAFIMDGNRRYAKFRSMQEGAGHRMGFSTLIASLMYCYEMGVKYITVYAFSIDNFKRDPSEVESLMQLMEEKINELLENRSVINKINCKINFWGNLDLLYEPVRLAAEKLMASTAGNTGLVFSICMPYNSTSEIVNAVSEVCAERMEMFQSEHIGDCNGHAANNGVRSEISVADLDRHMYSAGCPDPDIVIRTSGETRLSNFLLWQTTFSHLQNPDPLWPEFSFRHLVWAILQYQRVYPALEHNRKLAKKQL

SEQ ID NO: 2506 - protein, 282 aa, Zea mays subsp. mays
  peptide (1)..(282): Ceres Seq. ID no. 12410684
MVTAGVLSSLQNFLRKCLIAILSYGPMPKHIAFIMDGNRRYAKFRSMQEGAGHRMGFSTLIASLMYCYEMGVKYITVYAFSIDNFKRDPSEVESLMQLMEEKINELLENRSVINKINCKINFWGNLDLLYEPVRLAAEKLMASTAGNTGLVFSICMPYNSTSEIVNAVSEVCAERMEMFQSEHIGDCNGHAANNGVRSEISVADLDRHMYSAGCPDPDIVIRTSGETRLSNFLLWQTTFSHLQNPDPLWPEFSFRHLVWAILQYQRVYPALEHNRKLAKKQL

SEQ ID NO: 2507 - protein, 256 aa, Zea mays subsp. mays
  peptide (1)..(256): Ceres Seq. ID no. 12410685
MPKHIAFIMDGNRRYAKFRSMQEGAGHRMGFSTLIASLMYCYEMGVKYITVYAFSIDNFKRDPSEVESLMQLMEEKINELLENRSVINKINCKINFWGNLDLLYEPVRLAAEKLMASTAGNTGLVFSICMPYNSTSEIVNAVSEVCAERMEMFQSEHIGDCNGHAANNGVRSEISVADLDRHMYSAGCPDPDIVIRTSGETRLSNFLLWQTTFSHLQNPDPLWPEFSFRHLVWAILQYQRVYPALEHNRKLAKKQL

SEQ ID NO: 2508 - DNA, 1823 bp, Zea mays subsp. mays
  misc_feature (1)..(1823): Ceres Seq. ID no. 12344471
  misc_feature (1)..(1823): Ortholog of  Ceres SEQ ID NO 15172560 as cited in SEQ ID NO 57325
  misc_feature (1)..(1823): Ortholog of  Ceres SEQ ID NO 13655716 as cited in SEQ ID NO 68965
atcctttttatatcttgcctttcccctcccgttccgttcccgtctcgctctcgcatcggccaacaacgcttcacggcaaaatccttccacaggcgggggagtcgcctcacctcacttcaccccgttcatccccagcgaagaaggtaactaccgccatctcccggtaatgatcctcggtatcttccggccagaaaagatttgttttcggtacggatagggtttctgatcaagtgcgcgcgagcccaggagctaagaagaatcccagttctttgttcgccgactcgagtttgacattatgcaaaatacttagcacaccagtgatggcggctacttaccaaactggccttgtggccgagccacagttgctgaacactgaaattatcactcggagggccaccaactctgttgctgacactaacagaaaagacaaatgcgtcggctacttggatgtgtttgtacaccaagcacgcgacatccacaatgtttgtatctatcacaagcaggatgtgtatgcaaagctgtgcctcacgagcagccctgatgtttcgtgctcaaccaaggtgatcaacagtgctgggcgcaacccagtatttgaggaaagcctacgccttgatgtgcaaactgtggatgcttctctcaagtgcgagatatggatgttaagcagagtgaggaactacctggaggatcagctccttggctttgcccttgttcctctggtagacattgtaattggtaatggaaagctggtccaggagttctccttgacatctactgacctattccacacaccagctggatttgtgcacttgtccttgtcatatgctggttgttccccagatgttgtcctcatctcatcacccaataagtccccatcaacagtggatgattctggaaatgatcatgtggttcctgctcagcttgagaagattgtgttcccagacctaaatgtggagaaggaagacgagattatggtctcaaagtatctcgagatgacttcagactctgaaacccctataaaagttgagaacgtcatgtcactgcattctgcaaatgatgatgatgttccttctaaacttgaaaagatcaagttcatagattctgagagccgtgcgaaagctgaaaatggcaagatgctactatttggtgtagctgtgcctagtactgcaatttgtgcagataaggttgaggaacaccgcgatgaaagccctctaagttgtgtctcaaccacaggctcctccactaccctttctgcaacaacacaatcagtttctgagccttcggagaccagtgtcgaggcatcccctacaatgccatagggagaaaagccaagatgttacaggtggtgaggctaattcttctgaaacaccagcaaaggatgaagttatcaagcctgtgatctgcgttaaccttcagccagagcagtcagttgtccaacaggacatagttgacatgtacatgaagagcatgcaacagttcacagaatctcttgcaaaaatgaaacttccattggacgttgagaatactagtccctcaaacgatgattcatactccagtacaattgagaagacatccccatccccatcttcatctgcagcaaagggttctagggtcttttatggaagcagggccttcttttaagtttctaatgcaaagtagtacactagctcgttactatctcctacatacatatacatggttccaggtttatcagatatcttctggcatgtaatcacatactttctgtctccataatatgcttctaggactcactcctggtattgctattagtgttatgctttgttagaagataataatttcatctc

SEQ ID NO: 2509 - protein, 331 aa, Zea mays subsp. mays
  peptide (1)..(331): Ceres Seq. ID no. 12344472
MAATYQTGLVAEPQLLNTEIITRRATNSVADTNRKDKCVGYLDVFVHQARDIHNVCIYHKQDVYAKLCLTSSPDVSCSTKVINSAGRNPVFEESLRLDVQTVDASLKCEIWMLSRVRNYLEDQLLGFALVPLVDIVIGNGKLVQEFSLTSTDLFHTPAGFVHLSLSYAGCSPDVVLISSPNKSPSTVDDSGNDHVVPAQLEKIVFPDLNVEKEDEIMVSKYLEMTSDSETPIKVENVMSLHSANDDDVPSKLEKIKFIDSESRAKAENGKMLLFGVAVPSTAICADKVEEHRDESPLSCVSTTGSSTTLSATTQSVSEPSETSVEASPTMP

SEQ ID NO: 2510 - protein, 220 aa, Zea mays subsp. mays
  peptide (1)..(220): Ceres Seq. ID no. 12344473
MLSRVRNYLEDQLLGFALVPLVDIVIGNGKLVQEFSLTSTDLFHTPAGFVHLSLSYAGCSPDVVLISSPNKSPSTVDDSGNDHVVPAQLEKIVFPDLNVEKEDEIMVSKYLEMTSDSETPIKVENVMSLHSANDDDVPSKLEKIKFIDSESRAKAENGKMLLFGVAVPSTAICADKVEEHRDESPLSCVSTTGSSTTLSATTQSVSEPSETSVEASPTMP

SEQ ID NO: 2511 - DNA, 1549 bp, Zea mays subsp. mays
  misc_feature (1)..(1549): Ceres Seq. ID no. 12352684
  misc_feature (1)..(1549): Ortholog of  Ceres SEQ ID NO 14303572 as cited in SEQ ID NO 65530
tcaaaaaaaaaggaaaataaaaaaaaaatcgtagagagttcgattggcagttgctgagcccgagcgcgccctccggcgccgacaagccgggaccccacctccgccggcggcgatgggcaactcgcaggcttcgccggcgtccgcctccagctcccgcttcgtcatggcctcgagggccttcccgaaggcaggagctggacggcctccgcgagctattcgcctccctcgcagcgcagtcgcggaccggcggccgcgccatctcacgccccgtcttcctcgaatactatcaggtccgggggcgattaggagacaggctgttccagcttgtggcgaaggagagtggcgggagcgatggggtcacgttcgaggatttgatcatctccaaagcaacatatggaaggggaactcgtgatgaggtcgatgaattcatttatcaactatgtgatgtcacaggagatggcgccttaacaaggtctgatttggaatcagtcttggcgtctgttcatgaaactgtatttgcaataaagaaggaagttgtcgaagtttccaacaatagaccattcgaagaattcctcaactctgcagtgttttcaaaggatgttgaaggggtctcagggaagtctatgtcattgtcagactttaggaactggtgcactctcttgccatcattgaggaatttcttggaaatttgttgatgccccctgattcaggtagaccaggatttgaagtaccactgcttcatcatcctgaaaacatctgcactgatacgctgcttctaaacaaagagtatgcctggcatattggaggaggtttctcccaacatgaggtgcaagagtggaagcttttatatcatagttctcttcatggacaaagcttcaacactttcttgggcaaagtaacgaatggagatgctcagactgttctgattgttaaagatacagaaggatcaatttatggtggatatgcttcacagccttgggaaaggcacagtgatttttatggtgacatgaagacattcctcttcaaatgctatcctcaagcatccatttttcgtcctactggagcaaacaagaatttgcaatggtgtgctgtaaacttcagctctgagaacatacccaatggtattggatttggagggcagccacatcatttcggactctttttatcagcaaattttgaccaagggcactcatttacgtgtagcacatttaccagccctcccctttccaagacaaataggttcaggccagaagttattgaatgttggggtatacaaatgagaggagcacaagatgaaaaactggagttagtcaaggggacagtcctcgagagattcaaggaggaccggaacatgctgaagatggttggtttggcaaatgcaagtgattaagtgatagaggatcacaatgatgtacatgatggagagtctgtacagcacatgttcataaaaataatcaaatctgagaccatgtttctatattctactgttcatattttgtcactcaaaatattcatttgatccacactttgtaacaattgaccagtcgtt

SEQ ID NO: 2512 - protein, 231 aa, Zea mays subsp. mays
  peptide (1)..(231): Ceres Seq. ID no. 12352685
MPPDSGRPGFEVPLLHHPENICTDTLLLNKEYAWHIGGGFSQHEVQEWKLLYHSSLHGQSFNTFLGKVTNGDAQTVLIVKDTEGSIYGGYASQPWERHSDFYGDMKTFLFKCYPQASIFRPTGANKNLQWCAVNFSSENIPNGIGFGGQPHHFGLFLSANFDQGHSFTCSTFTSPPLSKTNRFRPEVIECWGIQMRGAQDEKLELVKGTVLERFKEDRNMLKMVGLANASD

SEQ ID NO: 2513 - protein, 127 aa, Zea mays subsp. mays
  peptide (1)..(127): Ceres Seq. ID no. 12352686
MKTFLFKCYPQASIFRPTGANKNLQWCAVNFSSENIPNGIGFGGQPHHFGLFLSANFDQGHSFTCSTFTSPPLSKTNRFRPEVIECWGIQMRGAQDEKLELVKGTVLERFKEDRNMLKMVGLANASD

SEQ ID NO: 2514 - DNA, 1305 bp, Zea mays subsp. mays
  misc_feature (1)..(1305): Ceres Seq. ID no. 13498849
  misc_feature (1)..(1305): Ortholog of  Ceres SEQ ID NO 13581804 as cited in SEQ ID NO 51424
  misc_feature (1)..(1305): Ortholog of  Ceres SEQ ID NO 14307797 as cited in SEQ ID NO 54802
  misc_feature (1)..(1305): Ortholog of  Ceres SEQ ID NO 15168374 as cited in SEQ ID NO 55652
  misc_feature (1)..(1305): Ortholog of  Ceres SEQ ID NO 13663874 as cited in SEQ ID NO 67003
  misc_feature (1)..(1305): Ortholog of  Ceres SEQ ID NO 13624654 as cited in SEQ ID NO 0
aaaaaaccgccccctcccttcctcttctcctagctctcttgcctgcgcaccactcgagtcgagactcgagaggcacctgatctttccttcccgtcttcctcccacacgtccccatcaccattgctgcgacgagagtgagcgggagagggtaggtggcgaggcggcggagatggggcgggggccggtgcagctgcgccggatcgagaacaagatcaaccgccaggtgaccttctccaagcgccggaacgggctgctgaagaaggcccacgagatctccgtgctctgcgacgcagaggtcgcgctcatcgtcttctccactaaggggaagctctacgagtactctagccattccagcatggaaggcattcttgagcgttaccagcgttactcatttgaagaaagggcagtacttaacccaagtattgaagaccaggcaaattggggagatgaatatgtccggttaaaatccaaacttgatgcacttcagaagagtcaaaggcagctgttaggagaacaattgagttcactgaccataaaagaactccagcaactggagcaacaactggacagttctttgaagcatattaggtcaagaaagaatcagctcatgttcgattcaatttccgcgcttcagaaaaaggagaaagcacttacagatcaaaacggtgtcctgcaaaagttcatggaggcagagaaggagaaaaacaaggctttgatgaacgcgcagctccgggagcagcaaaatggagcatcaacaagctccccatcactttcaccaccaatagttccagattccatgccaactctaaatatagggccatgtcaacatagaggggcagcagaatctgagtctgaaccgtctcctgctcctgcacaagcaaacaggggcaacctgccaccatggatgctccgcactgtcaagtaacaggtgaggtcttcccagtgtagttttgcagctgatctcgacagcaacacacctgtcaccgaaatgcttcggtgaccctagatatcaaccgatgcacgatccatctcgatcctgtgatcgaataccggcgtaggtactaccaataaagtcaggccccgtcaaatgctttacatggtgattgaagtctggagcttctcagcaccaccatatattgtgttcagttcctgtgtttattgccatagctaccctttttttctctgatctacgagctagacgtagctttgtgcttggagattccactactatgtttcctctgtcctgtgtatgctttaacggagatgcacgttgtacccgtggtaatatatataaatttgcgttgt

SEQ ID NO: 2515 - protein, 307 aa, Zea mays subsp. mays
  peptide (1)..(307): Ceres Seq. ID no. 13498850
KNRPLPSSSPSSLACAPLESRLERHLIFPSRLPPTRPHHHCCDESERERVGGEAAEMGRGPVQLRRIENKINRQVTFSKRRNGLLKKAHEISVLCDAEVALIVFSTKGKLYEYSSHSSMEGILERYQRYSFEERAVLNPSIEDQANWGDEYVRLKSKLDALQKSQRQLLGEQLSSLTIKELQQLEQQLDSSLKHIRSRKNQLMFDSISALQKKEKALTDQNGVLQKFMEAEKEKNKALMNAQLREQQNGASTSSPSLSPPIVPDSMPTLNIGPCQHRGAAESESEPSPAPAQANRGNLPPWMLRTVK

SEQ ID NO: 2516 - protein, 251 aa, Zea mays subsp. mays
  peptide (1)..(251): Ceres Seq. ID no. 13498851
MGRGPVQLRRIENKINRQVTFSKRRNGLLKKAHEISVLCDAEVALIVFSTKGKLYEYSSHSSMEGILERYQRYSFEERAVLNPSIEDQANWGDEYVRLKSKLDALQKSQRQLLGEQLSSLTIKELQQLEQQLDSSLKHIRSRKNQLMFDSISALQKKEKALTDQNGVLQKFMEAEKEKNKALMNAQLREQQNGASTSSPSLSPPIVPDSMPTLNIGPCQHRGAAESESEPSPAPAQANRGNLPPWMLRTVK

SEQ ID NO: 2517 - protein, 189 aa, Zea mays subsp. mays
  peptide (1)..(189): Ceres Seq. ID no. 13498852
MEGILERYQRYSFEERAVLNPSIEDQANWGDEYVRLKSKLDALQKSQRQLLGEQLSSLTIKELQQLEQQLDSSLKHIRSRKNQLMFDSISALQKKEKALTDQNGVLQKFMEAEKEKNKALMNAQLREQQNGASTSSPSLSPPIVPDSMPTLNIGPCQHRGAAESESEPSPAPAQANRGNLPPWMLRTVK

SEQ ID NO: 2518 - DNA, 2830 bp, Zea mays subsp. mays
  misc_feature (1)..(2830): Ceres Seq. ID no. 12362942
  misc_feature (1)..(2830): Ortholog of  Ceres SEQ ID NO 13600595 as cited in SEQ ID NO 629
  misc_feature (1)..(2830): Ortholog of  Ceres SEQ ID NO 13593379 as cited in SEQ ID NO 20573
gcacgagaccattacctagaacatcctaatcgaaaaagttcgccaccatcgtgctccgtacacgctccgctccggccatggccgccgccgcggcctccttttcggccctgccgttccttctacttttgctgctggtgccgtcgctcgacggcgcctccaatgtgacgtacgaccaccgctccctcatcatctccggccgccgccgcctcgtcatctccacctccatccactacccccgcagcgtccccgagatgtggcccaagctggtggctgaagccaaagacggcggcgccgactgcatcgagacctacgtcttctggaacggccatgagatcgccccaggccagtactacttcgaggaccggtttgacctggtgcggttcgtgaaggtcgttagagacgctgggctgctcttgatcctgcgcatcgggccctatgtcgccgccgagtggaattatggaggcgtgccggtgtggttgcactacgtgccaggaacggttttcaggacaaacaacgagccattcaagaaccatatgaagagtttcacgacatacatcgtggatatgatgaagaaagagcagctcttcgcttctcagggagggaacattatcctagctcagatagagaacgaatatggagattattatgaacaagcgtatggagctggcggcaaaccatacgccatgtgggcagctagtatggctcttgctcaaaacactggtgtcccttggattatgtgccaagagtctgatgcccctgatcccgtgataaactcttgcaacggtttctactgcgatggattccagccaaattcgccaaccaagccaaaaatttggactgagaattggccaggatggttccagacttttggtgaaagtaatccccacagaccacctgaagatgttgcattcgctgttgcacgttttttcgagaaaggtggcagtgttcaaaattactatgtgtatcatggtggcacaaattttggtcgcactactggggggccattcattacaactagctacgactatgatgcaccaattgatgaatatggacttcggagatttccgaagtgggcacatctgagggaacttcacaaatctataagattgtgtgagcacaccctgctttatggaaatacaacgtttctttctctgggtcctaaacaagaggctgatatttacagtgatcagtctggaggctgtgttgcattcctggcaaatattgattcagccaatgacaaagttgtcactttccgtaacaggcaatatgatcttcctgcttggtcagttagtattcttcctgactgcaggaatgtggtgttcaacactgcaaaggtgcaatctcaaacttcaatggtgaccatggttccagaaagtttgcaagcatcaaaacctgagcgatggagcattttcagggagagaactgggatttggggtaaaaatgactttgtccggaatggatttgtggaccatattaatacgacaaaggactccaccgactacctatggtacacaacaagttttagtgtggatggaagttactcctcaaaagggagccatgctgtccttaatatcgactccaatggccatggtgtccatgctttcttgaataatgtgctcataggtagtgcatatggtaatggctcacaatcaagattcagtgtcaaattgaccatcaacctgaggactggaaagaatgaacttgcccttctaagtatgactgttggtttacaaaatgcaggattcgcttatgaatggataggagcaggctttacaaatgtgaacatctctggtgtgagaactggaatcatagacttgtcttcaaataattgggcatacaagattggactggaaggggaatattataatttgttcaagcctgatcagacaaataaccaacggtggataccacaatccgagccaccaaaaaaccaacctttgacatggtataaggtaaatgttgatgttccacaaggagatgacccagttgggatagacatgcagtctatggggaaaggcttggcttggttgaatggaaatgccatcgggcggtattggccgaggaccagttctattaatgataggtgcactcccagttgtaactacaggggaacatttattccagacaagtgcaggacaggttgtggacagccaactcagagatggtaccatatcccacggtcatggtttcatccctcagggaacatcctcgtggtctttgaggagaagggtggggatcccacgaagatcacattctcaagaagagctgtgacgagcgtgtgctcctttgtgtcagagcacttcccttccatagacttggaatcctgggatgaaagtgccatgaacgaaggcacacccccagccaaagcacagctgtcttgccccgagggtaaaagtatatcttccgtgaagtttgcgagcttgggaaaccccagtggaacctgtagatcataccaaatggggcgctgccaccacccgaactccttatctgttgttgagaaggcctgtctgaacaccaacagctgtacagtctccctgacagacgagagctttgggaaggatttatgccatggagtcaccaaaacactcgccatcgaagcggactgttcttagcgacctacggagtacgaagtacctcggtgtgcatctaggttccactgcaagtatgcccgtcaaaattctaaaattgtagtgcttcttgcacggcaatgctattgtaacctggatttgaatgtatccatctgagataggttatgtttcaggagctttcttaaactaacgttgttgctgagcagcatggtttgaaatagcaggctatggcaaatgacggc

SEQ ID NO: 2519 - protein, 844 aa, Zea mays subsp. mays
  peptide (1)..(844): Ceres Seq. ID no. 12362943
MAAAAASFSALPFLLLLLLVPSLDGASNVTYDHRSLIISGRRRLVISTSIHYPRSVPEMWPKLVAEAKDGGADCIETYVFWNGHEIAPGQYYFEDRFDLVRFVKVVRDAGLLLILRIGPYVAAEWNYGGVPVWLHYVPGTVFRTNNEPFKNHMKSFTTYIVDMMKKEQLFASQGGNIILAQIENEYGDYYEQAYGAGGKPYAMWAASMALAQNTGVPWIMCQESDAPDPVINSCNGFYCDGFQPNSPTKPKIWTENWPGWFQTFGESNPHRPPEDVAFAVARFFEKGGSVQNYYVYHGGTNFGRTTGGPFITTSYDYDAPIDEYGLRRFPKWAHLRELHKSIRLCEHTLLYGNTTFLSLGPKQEADIYSDQSGGCVAFLANIDSANDKVVTFRNRQYDLPAWSVSILPDCRNVVFNTAKVQSQTSMVTMVPESLQASKPERWSIFRERTGIWGKNDFVRNGFVDHINTTKDSTDYLWYTTSFSVDGSYSSKGSHAVLNIDSNGHGVHAFLNNVLIGSAYGNGSQSRFSVKLTINLRTGKNELALLSMTVGLQNAGFAYEWIGAGFTNVNISGVRTGIIDLSSNNWAYKIGLEGEYYNLFKPDQTNNQRWIPQSEPPKNQPLTWYKVNVDVPQGDDPVGIDMQSMGKGLAWLNGNAIGRYWPRTSSINDRCTPSCNYRGTFIPDKCRTGCGQPTQRWYHIPRSWFHPSGNILVVFEEKGGDPTKITFSRRAVTSVCSFVSEHFPSIDLESWDESAMNEGTPPAKAQLSCPEGKSISSVKFASLGNPSGTCRSYQMGRCHHPNSLSVVEKACLNTNSCTVSLTDESFGKDLCHGVTKTLAIEADCS

SEQ ID NO: 2520 - protein, 786 aa, Zea mays subsp. mays
  peptide (1)..(786): Ceres Seq. ID no. 12362944
MWPKLVAEAKDGGADCIETYVFWNGHEIAPGQYYFEDRFDLVRFVKVVRDAGLLLILRIGPYVAAEWNYGGVPVWLHYVPGTVFRTNNEPFKNHMKSFTTYIVDMMKKEQLFASQGGNIILAQIENEYGDYYEQAYGAGGKPYAMWAASMALAQNTGVPWIMCQESDAPDPVINSCNGFYCDGFQPNSPTKPKIWTENWPGWFQTFGESNPHRPPEDVAFAVARFFEKGGSVQNYYVYHGGTNFGRTTGGPFITTSYDYDAPIDEYGLRRFPKWAHLRELHKSIRLCEHTLLYGNTTFLSLGPKQEADIYSDQSGGCVAFLANIDSANDKVVTFRNRQYDLPAWSVSILPDCRNVVFNTAKVQSQTSMVTMVPESLQASKPERWSIFRERTGIWGKNDFVRNGFVDHINTTKDSTDYLWYTTSFSVDGSYSSKGSHAVLNIDSNGHGVHAFLNNVLIGSAYGNGSQSRFSVKLTINLRTGKNELALLSMTVGLQNAGFAYEWIGAGFTNVNISGVRTGIIDLSSNNWAYKIGLEGEYYNLFKPDQTNNQRWIPQSEPPKNQPLTWYKVNVDVPQGDDPVGIDMQSMGKGLAWLNGNAIGRYWPRTSSINDRCTPSCNYRGTFIPDKCRTGCGQPTQRWYHIPRSWFHPSGNILVVFEEKGGDPTKITFSRRAVTSVCSFVSEHFPSIDLESWDESAMNEGTPPAKAQLSCPEGKSISSVKFASLGNPSGTCRSYQMGRCHHPNSLSVVEKACLNTNSCTVSLTDESFGKDLCHGVTKTLAIEADCS

SEQ ID NO: 2521 - protein, 692 aa, Zea mays subsp. mays
  peptide (1)..(692): Ceres Seq. ID no. 12362945
MKSFTTYIVDMMKKEQLFASQGGNIILAQIENEYGDYYEQAYGAGGKPYAMWAASMALAQNTGVPWIMCQESDAPDPVINSCNGFYCDGFQPNSPTKPKIWTENWPGWFQTFGESNPHRPPEDVAFAVARFFEKGGSVQNYYVYHGGTNFGRTTGGPFITTSYDYDAPIDEYGLRRFPKWAHLRELHKSIRLCEHTLLYGNTTFLSLGPKQEADIYSDQSGGCVAFLANIDSANDKVVTFRNRQYDLPAWSVSILPDCRNVVFNTAKVQSQTSMVTMVPESLQASKPERWSIFRERTGIWGKNDFVRNGFVDHINTTKDSTDYLWYTTSFSVDGSYSSKGSHAVLNIDSNGHGVHAFLNNVLIGSAYGNGSQSRFSVKLTINLRTGKNELALLSMTVGLQNAGFAYEWIGAGFTNVNISGVRTGIIDLSSNNWAYKIGLEGEYYNLFKPDQTNNQRWIPQSEPPKNQPLTWYKVNVDVPQGDDPVGIDMQSMGKGLAWLNGNAIGRYWPRTSSINDRCTPSCNYRGTFIPDKCRTGCGQPTQRWYHIPRSWFHPSGNILVVFEEKGGDPTKITFSRRAVTSVCSFVSEHFPSIDLESWDESAMNEGTPPAKAQLSCPEGKSISSVKFASLGNPSGTCRSYQMGRCHHPNSLSVVEKACLNTNSCTVSLTDESFGKDLCHGVTKTLAIEADCS

SEQ ID NO: 2522 - DNA, 1431 bp, Zea mays subsp. mays
  misc_feature (1)..(1431): Ceres Seq. ID no. 12367901
  misc_feature (1)..(1431): Ortholog of  Ceres SEQ ID NO 15169300 as cited in SEQ ID NO 59572
  misc_feature (1)..(1431): Ortholog of  Ceres SEQ ID NO 15176407 as cited in SEQ ID NO 59620
  misc_feature (1)..(1431): Ortholog of  Ceres SEQ ID NO 13596876 as cited in SEQ ID NO 62696
  misc_feature (1)..(1431): Ortholog of  Ceres SEQ ID NO 13655442 as cited in SEQ ID NO 64359
  misc_feature (1)..(1431): Ortholog of  Ceres SEQ ID NO 14303652 as cited in SEQ ID NO 67569
atttccattttccagcgcgcacggacgactgttacctcccccgcccttcgccactccgctccctcctccacctgtcatctcccgcgcgggagacctgcccgctccatggcgccgtcgcgaccgctcatgcgggggatccgcccgccgcgcgtcttcccgacccgcggcggccgcgcctcgccgtacaccgtcgcgctcaccgcgctacttctcgtctccgccgccctcctcgcgctcatagccttcggcgtcttctcgctccccgtgtccgcgccaaatgctgccgccaccaccggcactgcagccggaggggagaccgagtcggccgacgtccgcccccgcgcccgccgcgacctgggggaggggctgggagagcgcggtgcgcagtggaccgaggtcatctcgtgggagcccagggcatttgtctaccacaacttcctctctaaggatgagtgtgaatacctaattggattggccaagcctcacatggtaaaatcaacagttgtcgacagcactaccggcaaaagcaaggacagcagggtccggacaagttcaggcatgtttcttcaaagaggaagagacaaggttattcgagcaattgaaaagaggatagcagactataccttcatacccgtagatcatggtgagggactccaagtgctgcattatgaagtcgggcagaagtatgagcctcactttgattattttcttgatgagtttaacacaaagaatggtggtcagaggatagctactcttctgatgtatctatcagatgttgaagaagggggcgagactattttccctgatgcaaatgtgaacgccagttctttaccatggtacaatgagcttttcagattgtgccaaaagaggcctttctgtcaaaccaaagatgggagatgcgcttcttttctggagcatgaaaccagatgccactttggacccattaagcttgcatgggggttgtcctgtgattaaaggaaataaatggtcatcaaccaagtggatgcacatccatgagtacaaagcttgaggcttggcgaatcaaatatatgctgttgaattgggtttgtaagatggatctttatgcatgtgacttagggatttctacgggattgacactcatgtatgctttacagacccactggagctgtattctttgcttctttgttggaggggagataatagggataagcaggggccttgctcgtccttgcagtttttttttttttttggctgatccttgctgacttggctttttttcacttttctttttcttccttgcagtaccccaactatagaggagttgtgtagtgcctatagagtttgagattttgtttttgtgtcatgcccctaatattagtacatgaatgttgtgttactatgatacttgtaagctttggtactaatgaatagtgaggtctagagctcaac

SEQ ID NO: 2523 - protein, 324 aa, Zea mays subsp. mays
  peptide (1)..(324): Ceres Seq. ID no. 12367902
ISIFQRARTTVTSPALRHSAPSSTCHLPRGRPARSMAPSRPLMRGIRPPRVFPTRGGRASPYTVALTALLLVSAALLALIAFGVFSLPVSAPNAAATTGTAAGGETESADVRPRARRDLGEGLGERGAQWTEVISWEPRAFVYHNFLSKDECEYLIGLAKPHMVKSTVVDSTTGKSKDSRVRTSSGMFLQRGRDKVIRAIEKRIADYTFIPVDHGEGLQVLHYEVGQKYEPHFDYFLDEFNTKNGGQRIATLLMYLSDVEEGGETIFPDANVNASSLPWYNELFRLCQKRPFCQTKDGRCASFLEHETRCHFGPIKLAWGLSCD

SEQ ID NO: 2524 - protein, 289 aa, Zea mays subsp. mays
  peptide (1)..(289): Ceres Seq. ID no. 12367903
MAPSRPLMRGIRPPRVFPTRGGRASPYTVALTALLLVSAALLALIAFGVFSLPVSAPNAAATTGTAAGGETESADVRPRARRDLGEGLGERGAQWTEVISWEPRAFVYHNFLSKDECEYLIGLAKPHMVKSTVVDSTTGKSKDSRVRTSSGMFLQRGRDKVIRAIEKRIADYTFIPVDHGEGLQVLHYEVGQKYEPHFDYFLDEFNTKNGGQRIATLLMYLSDVEEGGETIFPDANVNASSLPWYNELFRLCQKRPFCQTKDGRCASFLEHETRCHFGPIKLAWGLSCD

SEQ ID NO: 2525 - protein, 282 aa, Zea mays subsp. mays
  peptide (1)..(282): Ceres Seq. ID no. 12367904
MRGIRPPRVFPTRGGRASPYTVALTALLLVSAALLALIAFGVFSLPVSAPNAAATTGTAAGGETESADVRPRARRDLGEGLGERGAQWTEVISWEPRAFVYHNFLSKDECEYLIGLAKPHMVKSTVVDSTTGKSKDSRVRTSSGMFLQRGRDKVIRAIEKRIADYTFIPVDHGEGLQVLHYEVGQKYEPHFDYFLDEFNTKNGGQRIATLLMYLSDVEEGGETIFPDANVNASSLPWYNELFRLCQKRPFCQTKDGRCASFLEHETRCHFGPIKLAWGLSCD

SEQ ID NO: 2526 - DNA, 1263 bp, Zea mays subsp. mays
  misc_feature (1)..(1263): Ceres Seq. ID no. 12410662
  misc_feature (1)..(1263): Ortholog of  Ceres SEQ ID NO 12562215 as cited in SEQ ID NO 20489
  misc_feature (1)..(1263): Ortholog of  Ceres SEQ ID NO 13595548 as cited in SEQ ID NO 51024
  misc_feature (1)..(1263): Ortholog of  Ceres SEQ ID NO 13582350 as cited in SEQ ID NO 56734
  misc_feature (1)..(1263): Ortholog of  Ceres SEQ ID NO 12476493 as cited in SEQ ID NO 58163
  misc_feature (1)..(1263): Ortholog of  Ceres SEQ ID NO 14313459 as cited in SEQ ID NO 62395
  misc_feature (1)..(1263): Ortholog of  Ceres SEQ ID NO 13597295 as cited in SEQ ID NO 63743
  misc_feature (1)..(1263): Ortholog of  Ceres SEQ ID NO 12617090 as cited in SEQ ID NO 64005
  misc_feature (1)..(1263): Ortholog of  Ceres SEQ ID NO 13597233 as cited in SEQ ID NO 64370
  misc_feature (1)..(1263): Ortholog of  Ceres SEQ ID NO 13623850 as cited in SEQ ID NO 0
  misc_feature (1)..(1263): Ortholog of  Ceres SEQ ID NO 14309162 as cited in SEQ ID NO 0
atcctcaagtcatcagctagctagccttccctacagcaactgcatacatacaacacttccatctgcccgctcgtcttcgatcaattcccaagtcaaataatataacagcaatggtggttcccgtgatcgacttctccaagctggacggcgctgagagggccgaaaccctggcgcagatcgccaatggctgcgaggagtggggattcttccagctcgtgaaccacggcatcccgctggagctgctcgagcgcgtcaagaaggtgtgctccgacagctaccgcctccgggaggccgggttcaaggcgtcggagccggtgcgcacgctggaggcgctcgtcgacgcggagcggcgcggtgaggtggtggcgccggtggacgacctggactgggaggacatcttctacattcatgacggatgccagtggccgtccgacccgccggcgttcaaggagaccatgcgcgagtaccgcgccgagctgaggaagctcgccgagcgagtcatggaggccatggacgagaacctcggcctcgccaggggcaccatcaaggacgccttcaccggcggcagccggcacgagcccttcttcggcaccaaggtcagccactacccgccgtgcccacgcccggacctcatcacgggcctgcgcgcgcacaccgacgccggcggcgtcatcctcctgttccaggacgacaaggtcggtggcctggaggtgctcaaggacggcgagtgggccgacgtacagccgctcgagggcgccatcgtcgtcaacaccggcgaccagatcgaggtgctcagcaacgggcggtaccgcagcgcctggcaccgcgtgctgcccatgcgccgacggcaatcgccgctccatcgcatccttctacaacccggccaaccgaagccaccatctcgccggcggcggtgcaggtcagcggcggtgacgcgtatcccaagtacttgttcggcgattacatggacgtgtacgtcaagcagaagttccaggccaaggagcctaggttcgaagccgtcaagacgggggcgccaaagtcatctccagcggcataaataaatagggaaaacaattattgaatgcattattaaaagtagtaataagtttgttaaatataaactagctcgaccggattgcaccgtccgatctggacttcctctagttattggaagcttatatatatatatatatatagccagttgccagtgctttgactatggatctaaatatattatataaataggtattgtcatatttatcc

SEQ ID NO: 2527 - protein, 316 aa, Zea mays subsp. mays
  peptide (1)..(316): Ceres Seq. ID no. 12410663
MVVPVIDFSKLDGAERAETLAQIANGCEEWGFFQLVNHGIPLELLERVKKVCSDSYRLREAGFKASEPVRTLEALVDAERRGEVVAPVDDLDWEDIFYIHDGCQWPSDPPAFKETMREYRAELRKLAERVMEAMDENLGLARGTIKDAFTGGSRHEPFFGTKVSHYPPCPRPDLITGLRAHTDAGGVILLFQDDKVGGLEVLKDGEWADVQPLEGAIVVNTGDQIEVLSNGRYRSAWHRVLPMRRRQSPLHRILLQPGQPKPPSRRRRCRSAAVTRIPSTCSAITWTCTSSRSSRPRSLGSKPSRRGRQSHLQRHK

SEQ ID NO: 2528 - protein, 213 aa, Zea mays subsp. mays
  peptide (1)..(213): Ceres Seq. ID no. 12410664
MPVAVRPAGVQGDHARVPRRAEEARRASHGGHGREPRPRQGHHQGRLHRRQPARALLRHQGQPLPAVPTPGPHHGPARAHRRRRRHPPVPGRQGRWPGGAQGRRVGRRTAARGRHRRQHRRPDRGAQQRAVPQRLAPRAAHAPTAIAAPSHPSTTRPTEATISPAAVQVSGGDAYPKYLFGDYMDVYVKQKFQAKEPRFEAVKTGAPKSSPAA

SEQ ID NO: 2529 - protein, 201 aa, Zea mays subsp. mays
  peptide (1)..(201): Ceres Seq. ID no. 12410665
MREYRAELRKLAERVMEAMDENLGLARGTIKDAFTGGSRHEPFFGTKVSHYPPCPRPDLITGLRAHTDAGGVILLFQDDKVGGLEVLKDGEWADVQPLEGAIVVNTGDQIEVLSNGRYRSAWHRVLPMRRRQSPLHRILLQPGQPKPPSRRRRCRSAAVTRIPSTCSAITWTCTSSRSSRPRSLGSKPSRRGRQSHLQRHK

SEQ ID NO: 2530 - DNA, 1626 bp, Zea mays subsp. mays
  misc_feature (1)..(1626): Ceres Seq. ID no. 12407976
  misc_feature (1)..(1626): Ortholog of  Ceres SEQ ID NO 14308099 as cited in SEQ ID NO 58651
  misc_feature (1)..(1626): Ortholog of  Ceres SEQ ID NO 13596893 as cited in SEQ ID NO 62932
ggtcgcggctgcccgccgcttttcccttcttccgttgcggcctcgctataaaaaccgtccgtccagtccgcgccgcggccgcgcacggcgaacccgaatcccgagcacaggccgccgctcgctcgctcgctgcagctacgcacgcacgcgcctgctcctccccttagcttccacaaggctcgactcggccggcggcgatggcgcggaagaagatccgggagtacgactccaagcgcctcctccgggagcacctcaagcgcctcgccggcatcgacctccagatcctctccgcgcaggtcacacagtcaacggatttcactgagcttgcaaaccaggagccgtggctctcatctatgaagttggttgtgaaacctgacatgctctttgggaaacgtgggaagagtgggcttgtggccctcaacctagatcttgcccaagttcgccaatttgtcaaggagcggttgggagttgaggtcgagatgggtggctgcaaagctccaattacaaccttcatagttgaaccatttgtgccacatgaccaagagtactacctttcgattgtatctgaaaggcttggcaacaccattagtttctcagaatgtggaggtattgagatcgaggagaactgggacaaggttaagactatctttcttcccacagagaagcaaatgacacctgacgcatgtgctccattgattgccaccctgccattggaggtccgcacaaagataggtggtttcattagagctgtattttctgttttccaagacttggatttctcatttcttgagatgaacccattcaccttggtaaatggtgaaccgtatcctctggatatgagaggagaactagatgacacagctgctttcaaaaacttcaataagtggggcaatattgtgtttcccctaccatttggaagagttctcagtccctccgaaagttttatccatgaactggatgagaagacaagtgcttctctgaaattcacggtactgaacccaaaaggacgcatctggacaatggttgcaggtggtggtgctagtgtcatatacgcagacactgttggtgatttgggatatgcttcggagctaggaaattatgcagagtacagtggagctcccaaggaggaggaggttctgcagtatgctagagtgcttttggattgcgctacctctgatcctgatggccgtaagagagcccttctaatcggaggaggaatcgctaacttcacagatgttgcttctacatttagtggcatcattcgggctttaagagagaaggagtccaaattaaaggctgcaaggatgaacatttatgtccggagaggtggtccgaactaccaaactggactcgccaaaatgcgcaccctaggcgccgaacttggcgttccaattgaggtctatggaccagaggcgaccatgactgggatctgcaaagaagccattgattgcatcatggccgcgtaaatcacaaatgtggttgttccatttgaagtcacatccgttttgtactagacgttccttgtacgtgattgctctggtaaaacagagaacgatcattgtcatgagtaaactcggcctttgtaacacagttacgcaagtaataattaagatcttggtttggtgc

SEQ ID NO: 2531 - protein, 422 aa, Zea mays subsp. mays
  peptide (1)..(422): Ceres Seq. ID no. 12407977
MARKKIREYDSKRLLREHLKRLAGIDLQILSAQVTQSTDFTELANQEPWLSSMKLVVKPDMLFGKRGKSGLVALNLDLAQVRQFVKERLGVEVEMGGCKAPITTFIVEPFVPHDQEYYLSIVSERLGNTISFSECGGIEIEENWDKVKTIFLPTEKQMTPDACAPLIATLPLEVRTKIGGFIRAVFSVFQDLDFSFLEMNPFTLVNGEPYPLDMRGELDDTAAFKNFNKWGNIVFPLPFGRVLSPSESFIHELDEKTSASLKFTVLNPKGRIWTMVAGGGASVIYADTVGDLGYASELGNYAEYSGAPKEEEVLQYARVLLDCATSDPDGRKRALLIGGGIANFTDVASTFSGIIRALREKESKLKAARMNIYVRRGGPNYQTGLAKMRTLGAELGVPIEVYGPEATMTGICKEAIDCIMAA

SEQ ID NO: 2532 - protein, 370 aa, Zea mays subsp. mays
  peptide (1)..(370): Ceres Seq. ID no. 12407978
MKLVVKPDMLFGKRGKSGLVALNLDLAQVRQFVKERLGVEVEMGGCKAPITTFIVEPFVPHDQEYYLSIVSERLGNTISFSECGGIEIEENWDKVKTIFLPTEKQMTPDACAPLIATLPLEVRTKIGGFIRAVFSVFQDLDFSFLEMNPFTLVNGEPYPLDMRGELDDTAAFKNFNKWGNIVFPLPFGRVLSPSESFIHELDEKTSASLKFTVLNPKGRIWTMVAGGGASVIYADTVGDLGYASELGNYAEYSGAPKEEEVLQYARVLLDCATSDPDGRKRALLIGGGIANFTDVASTFSGIIRALREKESKLKAARMNIYVRRGGPNYQTGLAKMRTLGAELGVPIEVYGPEATMTGICKEAIDCIMAA

SEQ ID NO: 2533 - protein, 362 aa, Zea mays subsp. mays
  peptide (1)..(362): Ceres Seq. ID no. 12407979
MLFGKRGKSGLVALNLDLAQVRQFVKERLGVEVEMGGCKAPITTFIVEPFVPHDQEYYLSIVSERLGNTISFSECGGIEIEENWDKVKTIFLPTEKQMTPDACAPLIATLPLEVRTKIGGFIRAVFSVFQDLDFSFLEMNPFTLVNGEPYPLDMRGELDDTAAFKNFNKWGNIVFPLPFGRVLSPSESFIHELDEKTSASLKFTVLNPKGRIWTMVAGGGASVIYADTVGDLGYASELGNYAEYSGAPKEEEVLQYARVLLDCATSDPDGRKRALLIGGGIANFTDVASTFSGIIRALREKESKLKAARMNIYVRRGGPNYQTGLAKMRTLGAELGVPIEVYGPEATMTGICKEAIDCIMAA

SEQ ID NO: 2534 - DNA, 1052 bp, Zea mays subsp. mays
  misc_feature (1)..(1052): Ceres Seq. ID no. 13499104
  misc_feature (1)..(1052): Ortholog of  Ceres SEQ ID NO 13594548 as cited in SEQ ID NO 51267
  misc_feature (1)..(1052): Ortholog of  Ceres SEQ ID NO 12614847 as cited in SEQ ID NO 61970
aaccagcaccagcgccagcaacagcaacagctgtggttttagcacaagaaggacgaggaagaagcgcagctgcgtttcttggacggtgagcgcggctactccggcggacatggcgaccaacagtgccctggcgaagctggcgccgctggaagccatcctgttcgacatcgacggcacgctctgcgactccgaccccatccacttctgcgccttccgagagctcctgcagcaggccggcttcaacggcggtgtccccatcacggaggagttctacagcgccaacatcagcgggggccacaacgacgacctcgccaggtcgctgttcccgggcatggatcaccagaaggcgatgcggttcatggatgataaagaagctatgttcagaaagttggcgcctgggcagctgaagcccgtggatgggctgcaggagctgtgcggatggatggaaggccgcgacatgaagcgcgcggcggtgacgaacgccccgagggcgaacgccgagctgatgctgtcgctgctggggctcaccgacttcttcccggtgctcgtcatcgggagcgagtgcgaccgggccaagccgttccctgacccgtacctcaaggcgctccagctcatcgacgcatcgcctcaacacaccttcatatttgaagactctgcatcgggggtccgggccggtgtggctgccggagtgcccgtggttggcctgacgacgaggaaccccgggaaggtgctgaaagacgcaggggccagcttgctggtcaaggattttcaggacccggagctgctgtccgtgcttcaacaggtggaggtcgaacccgcagcggagaatgcacaaggctgatgggtcgggcattgcggaaaatgtcatgctggacagactagccatcagcgattctttcacggagtggaatagctgtgtaactgcatcgtggaataaactaactccggtcggttcctcggcaggaacctggagccggtgcgcatggatgtgtgctgtgtgcaaaacctggcgcctactacactggttcttaacatgcaacaggcattttggc

SEQ ID NO: 2535 - protein, 279 aa, Zea mays subsp. mays
  peptide (1)..(279): Ceres Seq. ID no. 13499105
TSTSASNSNSCGFSTRRTRKKRSCVSWTVSAATPADMATNSALAKLAPLEAILFDIDGTLCDSDPIHFCAFRELLQQAGFNGGVPITEEFYSANISGGHNDDLARSLFPGMDHQKAMRFMDDKEAMFRKLAPGQLKPVDGLQELCGWMEGRDMKRAAVTNAPRANAELMLSLLGLTDFFPVLVIGSECDRAKPFPDPYLKALQLIDASPQHTFIFEDSASGVRAGVAAGVPVVGLTTRNPGKVLKDAGASLLVKDFQDPELLSVLQQVEVEPAAENAQG

SEQ ID NO: 2536 - protein, 243 aa, Zea mays subsp. mays
  peptide (1)..(243): Ceres Seq. ID no. 13499106
MATNSALAKLAPLEAILFDIDGTLCDSDPIHFCAFRELLQQAGFNGGVPITEEFYSANISGGHNDDLARSLFPGMDHQKAMRFMDDKEAMFRKLAPGQLKPVDGLQELCGWMEGRDMKRAAVTNAPRANAELMLSLLGLTDFFPVLVIGSECDRAKPFPDPYLKALQLIDASPQHTFIFEDSASGVRAGVAAGVPVVGLTTRNPGKVLKDAGASLLVKDFQDPELLSVLQQVEVEPAAENAQG

SEQ ID NO: 2537 - protein, 169 aa, Zea mays subsp. mays
  peptide (1)..(169): Ceres Seq. ID no. 13499107
MDHQKAMRFMDDKEAMFRKLAPGQLKPVDGLQELCGWMEGRDMKRAAVTNAPRANAELMLSLLGLTDFFPVLVIGSECDRAKPFPDPYLKALQLIDASPQHTFIFEDSASGVRAGVAAGVPVVGLTTRNPGKVLKDAGASLLVKDFQDPELLSVLQQVEVEPAAENAQG

SEQ ID NO: 2538 - DNA, 1452 bp, Zea mays subsp. mays
  misc_feature (1)..(1452): Ceres Seq. ID no. 12367355
  misc_feature (1)..(1452): Ortholog of  Ceres SEQ ID NO 15177750 as cited in SEQ ID NO 57772
  misc_feature (1)..(1452): Ortholog of  Ceres SEQ ID NO 13596581 as cited in SEQ ID NO 62420
  misc_feature (1)..(1452): Ortholog of  Ceres SEQ ID NO 13591273 as cited in SEQ ID NO 65904
  misc_feature (1)..(1452): Ortholog of  Ceres SEQ ID NO 13623086 as cited in SEQ ID NO 0
gcaaccaccgtgcgcgcatcaactcggcacaaccggtgagtcttctgcatcttcgatggagaaccagggacccaaacccatccgatgcaaagcggccgtgtgcagggccgccggcgagccgctggccatcgaggaggtcgtcgttgacacgcccaaggcgcacgaggtcaggatacggatcatctgcacgtcgctctgccacagcgacgtcacgttctggcgcatgaaggatctccctgacaatatccccagaatatttggccacgaagccttcggggtggtggagagcgtgggtgaacaggtggacgagttcgcggcgggcgacgcggtggtgccgacgttcctggggcagtgcagcgagtgcgtggactgcaggtcggcgcggagcaacatgtgctccaagtaccggttcgcggtgcgcccggggatgccgcgcgacggcaccacccggttcaccgacggccaggggcgcccgctgcaccacttcttcggcgtgtccagcttcgccgagtacaccgtggtggacgtgaaccaggtcgtcaagctcaaccccgccgtgccgccggcactcgcctgcctgctcagctgcggcgcctccacgggggttggagccgcatggaagcaggcgaaagttgagcctggatcttcggtcgctatcttcggcctcggcgctgtaggattggcggtggctgaaggagccaggatttgtggggcgtcgaagataatcggcgtggatataaaccctgataaatgcgagcttggaaagaagttcggcgtgacacatttcatcaatcccaaagagctcggtgaggagaaacctgtccaccaggcgatcgccgagatgaccgacggtggcgcggactactgcttcgagtgcattggactggcggcgctgatgaacgacgcgttccggagctcccgagacgggtggggcaagacgatcattcttggggtggaaatgcacggtgcccccctctgcatctctcctcacgagatcctccacgggaagtctgtcatcgggtccatgttcggcggggtgaagcctaagcaggatatccccattctcgccgacaagtacatgaacaaggagctggagcttgacaagttcataacccatgaagttggcctcaaggacatcaaccaagcttttgacctcctgctgcaagggaagagtctcaggtgcaccatatggatggacaagtgatgcaataaccagagttacgcatcggaacctgaagatgctatgatgcttccacctcgtttcagtgaaaataattgtttcatcagctgccaaaagaaatgttatatgtatcttaaattcgagttttccattccttttcttcacgtcatcactcaaacatgttaaaatgtgcccatgttttgatttttactgctttcaaaagttgtgactatccttatcttattagtgatattttcggaatttatctggcg

SEQ ID NO: 2539 - protein, 400 aa, Zea mays subsp. mays
  peptide (1)..(400): Ceres Seq. ID no. 12367356
QPPCAHQLGTTGESSASSMENQGPKPIRCKAAVCRAAGEPLAIEEVVVDTPKAHEVRIRIICTSLCHSDVTFWRMKDLPDNIPRIFGHEAFGVVESVGEQVDEFAAGDAVVPTFLGQCSECVDCRSARSNMCSKYRFAVRPGMPRDGTTRFTDGQGRPLHHFFGVSSFAEYTVVDVNQVVKLNPAVPPALACLLSCGASTGVGAAWKQAKVEPGSSVAIFGLGAVGLAVAEGARICGASKIIGVDINPDKCELGKKFGVTHFINPKELGEEKPVHQAIAEMTDGGADYCFECIGLAALMNDAFRSSRDGWGKTIILGVEMHGAPLCISPHEILHGKSVIGSMFGGVKPKQDIPILADKYMNKELELDKFITHEVGLKDINQAFDLLLQGKSLRCTIWMDK

SEQ ID NO: 2540 - protein, 382 aa, Zea mays subsp. mays
  peptide (1)..(382): Ceres Seq. ID no. 12367357
MENQGPKPIRCKAAVCRAAGEPLAIEEVVVDTPKAHEVRIRIICTSLCHSDVTFWRMKDLPDNIPRIFGHEAFGVVESVGEQVDEFAAGDAVVPTFLGQCSECVDCRSARSNMCSKYRFAVRPGMPRDGTTRFTDGQGRPLHHFFGVSSFAEYTVVDVNQVVKLNPAVPPALACLLSCGASTGVGAAWKQAKVEPGSSVAIFGLGAVGLAVAEGARICGASKIIGVDINPDKCELGKKFGVTHFINPKELGEEKPVHQAIAEMTDGGADYCFECIGLAALMNDAFRSSRDGWGKTIILGVEMHGAPLCISPHEILHGKSVIGSMFGGVKPKQDIPILADKYMNKELELDKFITHEVGLKDINQAFDLLLQGKSLRCTIWMDK

SEQ ID NO: 2541 - protein, 326 aa, Zea mays subsp. mays
  peptide (1)..(326): Ceres Seq. ID no. 12367358
MKDLPDNIPRIFGHEAFGVVESVGEQVDEFAAGDAVVPTFLGQCSECVDCRSARSNMCSKYRFAVRPGMPRDGTTRFTDGQGRPLHHFFGVSSFAEYTVVDVNQVVKLNPAVPPALACLLSCGASTGVGAAWKQAKVEPGSSVAIFGLGAVGLAVAEGARICGASKIIGVDINPDKCELGKKFGVTHFINPKELGEEKPVHQAIAEMTDGGADYCFECIGLAALMNDAFRSSRDGWGKTIILGVEMHGAPLCISPHEILHGKSVIGSMFGGVKPKQDIPILADKYMNKELELDKFITHEVGLKDINQAFDLLLQGKSLRCTIWMDK

SEQ ID NO: 2542 - DNA, 1234 bp, Zea mays subsp. mays
  misc_feature (1)..(1234): Ceres Seq. ID no. 12410659
  misc_feature (1)..(1234): Ortholog of  Ceres SEQ ID NO 15175072 as cited in SEQ ID NO 59991
  misc_feature (1)..(1234): Ortholog of  Ceres SEQ ID NO 15178850 as cited in SEQ ID NO 0
atataatccgctctctctcccccggtttctcttgtcttcttgctgcggcgatggaccaagaaacctcacgggaaccccactccttgaggagccgtccagtgccgcattagtgggttccattcttctttggatcgctgctcgcgatcgcattgcccgcgtttcttttggccgtcttggttcgttcttgattcttggacgaggtgggatttggagagccgagagcggcgcggcagcggcgggtttctcggtcgggctagattgtttccatcgagatggtgggcggcggagggcattcgtcgatggaccacactggcgccaaggacctcgagcgcggcgagctgcgccgtggcgcgcctgagtttgcggacggcgacgatggagacggggaagaaagccagtacttctcggacgcggaggaccggtcgtggccgtcgcactcacgccacgactccaccgcctacgaggactacgtctcgccgtgcgtgtccgcccgcgcaagctccgtcgacgccgacgccgacgccgacgccgacggcgaggccgtcagacaacactgcaggaagtcgtcgtgcgtgtcagagggctcgctggacgacgttgacctggaggccggactgagcgagatcatcaaggccagccctgagaaggccgaacagaactgtcgcatttgccaccttggcctggagagcgcggcggccgagtccggtgccggcatcacgctcggctgctcctgcaagggggacttatcctacgcccacaagcagtgcgccgacacctggttcaagatcagaggcaacaaggtctgtgagatatgtagctcgactgcatccaacgtggtagtcttgggggatcccgagttcagcgaccagtggagtgaaacaaacagtgccgccgccgcggcgcaggcgccgccgccaccagccgaaccccggaggttctggcaggggcatcggttcctcaacttcctcctcgcctgcatggtgttcgccttcgtcatctcttggctcttccacttcaacgtccccggctaacaagttctttggcgcacatacatggcccccgaataaaaaaaaaagctccaaaaaagccatcactccggacgccgggtcggtaagttagcggatctggaagaacaggctggtgggtgctgggttggttgaagtaaaagctcgacatgggtgggggggccgggggacgatgatactgcattttttgtttatgatgaatgcctttg

SEQ ID NO: 2543 - protein, 252 aa, Zea mays subsp. mays
  peptide (1)..(252): Ceres Seq. ID no. 12410660
MVGGGGHSSMDHTGAKDLERGELRRGAPEFADGDDGDGEESQYFSDAEDRSWPSHSRHDSTAYEDYVSPCVSARASSVDADADADADGEAVRQHCRKSSCVSEGSLDDVDLEAGLSEIIKASPEKAEQNCRICHLGLESAAAESGAGITLGCSCKGDLSYAHKQCADTWFKIRGNKVCEICSSTASNVVVLGDPEFSDQWSETNSAAAAAQAPPPPAEPRRFWQGHRFLNFLLACMVFAFVISWLFHFNVPG

SEQ ID NO: 2544 - protein, 243 aa, Zea mays subsp. mays
  peptide (1)..(243): Ceres Seq. ID no. 12410661
MDHTGAKDLERGELRRGAPEFADGDDGDGEESQYFSDAEDRSWPSHSRHDSTAYEDYVSPCVSARASSVDADADADADGEAVRQHCRKSSCVSEGSLDDVDLEAGLSEIIKASPEKAEQNCRICHLGLESAAAESGAGITLGCSCKGDLSYAHKQCADTWFKIRGNKVCEICSSTASNVVVLGDPEFSDQWSETNSAAAAAQAPPPPAEPRRFWQGHRFLNFLLACMVFAFVISWLFHFNVPG

SEQ ID NO: 2545 - DNA, 1233 bp, Zea mays subsp. mays
  misc_feature (1)..(1233): Ceres Seq. ID no. 13564187
  misc_feature (1)..(1233): Ortholog of  Ceres SEQ ID NO 15172729 as cited in SEQ ID NO 56037
  misc_feature (1)..(1233): Ortholog of  Ceres SEQ ID NO 13584899 as cited in SEQ ID NO 64830
  misc_feature (1)..(1233): Ortholog of  Ceres SEQ ID NO 13654441 as cited in SEQ ID NO 67814
  misc_feature (1)..(1233): Ortholog of  Ceres SEQ ID NO 13596128 as cited in SEQ ID NO 67831
  misc_feature (1)..(1233): Ortholog of  Ceres SEQ ID NO 12585194 as cited in SEQ ID NO 68878
  misc_feature (1)..(1233): Ortholog of  Ceres SEQ ID NO 12589186 as cited in SEQ ID NO 0
aacgcaacaaagccgaggtaaagcagggagcatcttgagtgttcgacagtgagccatggagaagacgtccgagagcgctataccgccggcggcatccccgctgatgctgttcgggtcgtgggcgagctcgtacacgcaccgcgtgcagctggcgctgcggctcaagggcctggagttcgactacgtggaggaggacctggggaacaagagcgacgagctgctgcgccacaaccccgtccacaagaaggtgcccgtgctcgtccacggcggccgcgcgctcccggagtccgtcattatcctccagtaccttgacgacgcctggccggagacccgcccgctgctccccgccgacgccttcgaccgcgcgctcgcgcggttctggtgccacttcgccgacgacaagctcgggccggcggtgggcgcggtgttcgcgtcgacgggggagggccaggaggcggcggtgcggcaggtgcacgagaacctggccctgatcgagtccgagctccgcgacggcgcgttccggggccgccgcttcttcggcggcgacgaggtgggcctgctggacgtcgtcctgggctgcggctcctactggctcgccgtgttcgaggaggtgaccggggtgcgcctcgtggacgccgacgccttcccgcgcttccacgcctggctgcgcgacttcgaggccctggacgaggtccgggagaccatccccgcggtggaccgcctgctcgagtacgcgcgcggcctccgccacatgctgctcggcctcgcgggggccggcgccggcgccggcgcggacgcgccctccaccgacgcccccgccgcaccgccggcctcggctgacatcgccgtcgacatttgaacgcagggcgtcgtcgcgccgggcgtctgccagcgccgtccggctagccatcagtagctagtacgtagtaccagtatagtttgcagagtcgattgcgccatgtgtggtggctgcgtgcctgtgcctgcctgccggcctggcctggagtgcggttctgctgccgccacagttaattggcccagtttgtctagctgtcgagttttttttttttcaactctctctgtctctctccgactcttcccttctttttgataaagttcgtccctgcagttaaatctctgtttgctgcgacttgttcttcttgtgtgtgagagtgggacgaaatctcgtgtgtttgtatgtggcagtttggctcgcttgttgaatgtaagcca

SEQ ID NO: 2546 - protein, 267 aa, Zea mays subsp. mays
  peptide (1)..(267): Ceres Seq. ID no. 13564188
MEKTSESAIPPAASPLMLFGSWASSYTHRVQLALRLKGLEFDYVEEDLGNKSDELLRHNPVHKKVPVLVHGGRALPESVIILQYLDDAWPETRPLLPADAFDRALARFWCHFADDKLGPAVGAVFASTGEGQEAAVRQVHENLALIESELRDGAFRGRRFFGGDEVGLLDVVLGCGSYWLAVFEEVTGVRLVDADAFPRFHAWLRDFEALDEVRETIPAVDRLLEYARGLRHMLLGLAGAGAGAGADAPSTDAPAAPPASADIAVDI

SEQ ID NO: 2547 - protein, 251 aa, Zea mays subsp. mays
  peptide (1)..(251): Ceres Seq. ID no. 13564189
MLFGSWASSYTHRVQLALRLKGLEFDYVEEDLGNKSDELLRHNPVHKKVPVLVHGGRALPESVIILQYLDDAWPETRPLLPADAFDRALARFWCHFADDKLGPAVGAVFASTGEGQEAAVRQVHENLALIESELRDGAFRGRRFFGGDEVGLLDVVLGCGSYWLAVFEEVTGVRLVDADAFPRFHAWLRDFEALDEVRETIPAVDRLLEYARGLRHMLLGLAGAGAGAGADAPSTDAPAAPPASADIAVDI

SEQ ID NO: 2548 - DNA, 1442 bp, Zea mays subsp. mays
  misc_feature (1)..(1442): Ceres Seq. ID no. 12414246
  misc_feature (1)..(1442): Ortholog of  Ceres SEQ ID NO 15176596 as cited in SEQ ID NO 55168
  misc_feature (1)..(1442): Ortholog of  Ceres SEQ ID NO 14301576 as cited in SEQ ID NO 62362
aagtgttctcttctctccaagcggacaaagcccgtccctctcctactcctcccccaaagttccgttcagttccctcccgcaggtcaaaaccctcaacctcccacgcggctcgctgggtgggtcggtcggccatggctccccccgcgctcggatctcaggtggccgccgcagcctcggttcccgtcggctcggactctctcgctaagggcgcggcgctcaagggtaacagcactctaaactttcggaccaaaccatgcatcggaatggcattagcatggaaaaacaggacccagcaaccacggcgtctgaacaaggtactctgcatgtctgttcaacaagcaagcaggagcaaggttgctgtcatgcccgtcgagttggagaaggcaaaggagccactgctccacctgtacaaaccaaaggagccttacacggccacgatcgtctctgtcgagaggcttgtaggacccagagctcctggcgaaacatgccacgttgtcattgatcatggcggcaatgttccgtactgggaaggacagagttacggcgtcattcctcctggagagaatccaaaaaaacctggatctcccaatactgttaggctctattcaattgcttctactaggtatggtgattcttttgatggaaagacagcaagcttatgtgttcgtcgtgctgtttattatgatcctgaaactggagaggaagacccatcaaagagaggtgtctgcagtaacttcctgtgtggctcaaaaccaggggacaaagttcagatcacaggcccctcgggcaaaataatgcttcttcccgaggatgatccaaatgcgactcatatcatgattgccacggggactggtgttgctccctaccgcggctacctacgtcgcatgttcatggaagatgtcccaactttcaaatttggtggtctggcttggctcttccttggtgttgcgaactctgacagccttctctatgatgaagagttcacaaactaccttcaacagtatccagacaatttcaggtacgacaaagcgctaagcagggagcagaagaacaagagcggcgggaagatgtacgtgcaggacaagatcgaggagtacagcgacgaaatcttcagactgctagatggcggtgcgcacatctacttctgtggtttgaaggggatgatgccggggatccaggacacgctcaagaaggtggctgagcaaagaggcgagagctgggaccagaagctgtcacagctgaaaaagaacaagcagtggcacgtcgaggtttactaggctataagatggcaaggattgtgattgtttagctactgagctgagaaactggacgtatgattgaacgactgtggctgcgatgtaatataacattgtagacttggattcataagcttctgctccaaatggtgaataaaatgaagcacgcggtctgtagctgctact

SEQ ID NO: 2549 - protein, 424 aa, Zea mays subsp. mays
  peptide (1)..(424): Ceres Seq. ID no. 12414247
VFSSLQADKARPSPTPPPKFRSVPSRRSKPSTSHAARWVGRSAMAPPALGSQVAAAASVPVGSDSLAKGAALKGNSTLNFRTKPCIGMALAWKNRTQQPRRLNKVLCMSVQQASRSKVAVMPVELEKAKEPLLHLYKPKEPYTATIVSVERLVGPRAPGETCHVVIDHGGNVPYWEGQSYGVIPPGENPKKPGSPNTVRLYSIASTRYGDSFDGKTASLCVRRAVYYDPETGEEDPSKRGVCSNFLCGSKPGDKVQITGPSGKIMLLPEDDPNATHIMIATGTGVAPYRGYLRRMFMEDVPTFKFGGLAWLFLGVANSDSLLYDEEFTNYLQQYPDNFRYDKALSREQKNKSGGKMYVQDKIEEYSDEIFRLLDGGAHIYFCGLKGMMPGIQDTLKKVAEQRGESWDQKLSQLKKNKQWHVEVY

SEQ ID NO: 2550 - protein, 381 aa, Zea mays subsp. mays
  peptide (1)..(381): Ceres Seq. ID no. 12414248
MAPPALGSQVAAAASVPVGSDSLAKGAALKGNSTLNFRTKPCIGMALAWKNRTQQPRRLNKVLCMSVQQASRSKVAVMPVELEKAKEPLLHLYKPKEPYTATIVSVERLVGPRAPGETCHVVIDHGGNVPYWEGQSYGVIPPGENPKKPGSPNTVRLYSIASTRYGDSFDGKTASLCVRRAVYYDPETGEEDPSKRGVCSNFLCGSKPGDKVQITGPSGKIMLLPEDDPNATHIMIATGTGVAPYRGYLRRMFMEDVPTFKFGGLAWLFLGVANSDSLLYDEEFTNYLQQYPDNFRYDKALSREQKNKSGGKMYVQDKIEEYSDEIFRLLDGGAHIYFCGLKGMMPGIQDTLKKVAEQRGESWDQKLSQLKKNKQWHVEVY

SEQ ID NO: 2551 - protein, 337 aa, Zea mays subsp. mays
  peptide (1)..(337): Ceres Seq. ID no. 12414249
MALAWKNRTQQPRRLNKVLCMSVQQASRSKVAVMPVELEKAKEPLLHLYKPKEPYTATIVSVERLVGPRAPGETCHVVIDHGGNVPYWEGQSYGVIPPGENPKKPGSPNTVRLYSIASTRYGDSFDGKTASLCVRRAVYYDPETGEEDPSKRGVCSNFLCGSKPGDKVQITGPSGKIMLLPEDDPNATHIMIATGTGVAPYRGYLRRMFMEDVPTFKFGGLAWLFLGVANSDSLLYDEEFTNYLQQYPDNFRYDKALSREQKNKSGGKMYVQDKIEEYSDEIFRLLDGGAHIYFCGLKGMMPGIQDTLKKVAEQRGESWDQKLSQLKKNKQWHVEVY

SEQ ID NO: 2552 - DNA, 1401 bp, Zea mays subsp. mays
  misc_feature (1)..(1401): Ceres Seq. ID no. 12410655
  misc_feature (1)..(1401): Ortholog of  Ceres SEQ ID NO 13581848 as cited in SEQ ID NO 51340
  misc_feature (1)..(1401): Ortholog of  Ceres SEQ ID NO 14316412 as cited in SEQ ID NO 59209
aactttgggctgtcgccaccagaaagccctcacgagtcctttgcctcctcactccgtcaggctcgtcgccacagggttttgttcctaactttttagcttcaatttttgtcttgaatggcaacacctctggatgttccactggatgatttgattaagagcagagctgggaggggaacaggaagaggcaggggacaaggagggggtcgaggcagaggtgatggccaaaggttggctcgtggttcgtggcgtgggcgtggtactggcaacttccgtgaaaggggacttggggtgtcttcgcggaggccacttggtgttaatacttggtcctcatcatttgctattgccaagtcattcaataaagcaaaggattttgtgtggagacatgatctctttgaggatagcatggtagcagctgggctttctgggatagaatctggaacaaagctttacatttcaaatttgcactatggagtgacaagtgaagatctacaggagcttttttcagaaatgggtcatttgaagcactgtgctgttcattatgacagttatagacacccaactggttcggctgaggtgatattcaccaggagaagtgaagctctcgcagcactgaagcgatataataatatgcgccttgatgggaaggccatgaagattgaagtaataggagcagaattgggtctatcagctgctgccgtaccccagattagtgttgttcctggtgcaagcagaagagggcagagagaagttgttatgatgcctggtggaagtgggtttggacaaggtgcatctggcccatctagttcgcttcctgggtggaagcgtggaggctttgttcgaagaggacaagggcgtgttagttttcctcaaagagggcgagggcaagtgcgcagccgtggccgtggccgtggccgcagtagccttgttcagagccgtggacgtggctatgtgcgcaggggtaatgcagagaaatcagccaaacaattggacaatgaacttgacaactacaactctggtgcgatgaatgtcgactaagttaatccatcgtgacatcattcaatccaacctggaagttggaactatgttgaagctaagcttgttttctgtcggtattctgtcaaatgtgcacacttctgtcatgctctagtggcatcagttgaagattagatattccattattcctactgcaatagtcttgtgatatcagaatttgctgtaattgaatgatgaattatgttttcaaccgttgaaaggtttgctgtcaaaatttcaatattatcctagttattgtcagaattttcagtaggcattagccaaaaagattggtgctgactactggtatatcagaatttgctgtaattgaatgatgaattatgttttcaaccgttgaaaggtttggtg

SEQ ID NO: 2553 - protein, 306 aa, Zea mays subsp. mays
  peptide (1)..(306): Ceres Seq. ID no. 12410656
MATPLDVPLDDLIKSRAGRGTGRGRGQGGGRGRGDGQRLARGSWRGRGTGNFRERGLGVSSRRPLGVNTWSSSFAIAKSFNKAKDFVWRHDLFEDSMVAAGLSGIESGTKLYISNLHYGVTSEDLQELFSEMGHLKHCAVHYDSYRHPTGSAEVIFTRRSEALAALKRYNNMRLDGKAMKIEVIGAELGLSAAAVPQISVVPGASRRGQREVVMMPGGSGFGQGASGPSSSLPGWKRGGFVRRGQGRVSFPQRGRGQVRSRGRGRGRSSLVQSRGRGYVRRGNAEKSAKQLDNELDNYNSGAMNVD

SEQ ID NO: 2554 - protein, 210 aa, Zea mays subsp. mays
  peptide (1)..(210): Ceres Seq. ID no. 12410657
MVAAGLSGIESGTKLYISNLHYGVTSEDLQELFSEMGHLKHCAVHYDSYRHPTGSAEVIFTRRSEALAALKRYNNMRLDGKAMKIEVIGAELGLSAAAVPQISVVPGASRRGQREVVMMPGGSGFGQGASGPSSSLPGWKRGGFVRRGQGRVSFPQRGRGQVRSRGRGRGRSSLVQSRGRGYVRRGNAEKSAKQLDNELDNYNSGAMNVD

SEQ ID NO: 2555 - protein, 175 aa, Zea mays subsp. mays
  peptide (1)..(175): Ceres Seq. ID no. 12410658
MGHLKHCAVHYDSYRHPTGSAEVIFTRRSEALAALKRYNNMRLDGKAMKIEVIGAELGLSAAAVPQISVVPGASRRGQREVVMMPGGSGFGQGASGPSSSLPGWKRGGFVRRGQGRVSFPQRGRGQVRSRGRGRGRSSLVQSRGRGYVRRGNAEKSAKQLDNELDNYNSGAMNVD

SEQ ID NO: 2556 - DNA, 1911 bp, Zea mays subsp. mays
  misc_feature (1)..(1911): Ceres Seq. ID no. 13492653
  misc_feature (1)..(1911): Ortholog of  Ceres SEQ ID NO 14311942 as cited in SEQ ID NO 51516
atcccacgccccctcggcgctgcgcctggacccggcacctacctcccccctccccacctcgccgccggcgggtggagtcgggctggagcagccgctctcctctgttacccccctaaccccctataaagaaaaaaaaaaaaaaacagagagagagagcgagcgaccggcggctcggcagccatggggcacggcgtcagctgcgcccgcaccggcgacgagcacgactacttccgcgcggcgcaggtcggggacctcgaggccctggacgcgctcctcgacgccgacccctctctcgcccgccgcgccacgctctacgaccgcctctccgcgctccacatcgccgccgcgaatggccgcctcgaggtgctgtcaatggtcttggatcacggggtgccgccggacgtggtgaatcggcacaagcagacgccgctgatgctcgcggcgatgcacggcaagactgactgcgtgctgaagctcctgcaggccggcgccaatatcctcatgttcgattcccagcacgggcggacctgcctgcaccacgcgtcctacttcggccacgtcggctgcctgcaggccatcctcacggcggcgcggaccacgccggtggccgactcatggggtttcgcccggttcgtcaacgtgagggacgaccacggcgccacgccgctccacctcgccgccaggcagggccgccccggctgcgtgcaggcgctgctggagaacggcgccatcgtctccgctttgaccggctcatacgggtttcctggtagcacagtcgctgcacctcgccgctcgcagcgggagcctggattgcacccggaagctgctcgcctggggagcggatcgtctccggagggattcagcagggaggatcccttacgccgtggcgctgaagcgcaaccacgaggcgtgcgcagcgctgctgaacccgtcggcggcggagcccatggtgtggccgtccccgctcaagttcatcagcgagctggagccggaggccaaggcgctcctggaagcggcgctgacggaagccaacagggagagggaggagaagatcctcaggggcaccaagcactctccgcctcctcccacctgggaccacgcgagcgacgccgccgacgccgacgccatcgacgacgcgtcctcagatgccagcgccagcgacgcggagctgtgctgcatctgcttcgaccaggcgtgcaccatggaggtgcaggactgcgggcaccagatgtgcgcgccgtgcacgctcgcgctgtgctgccacagcaagcccgacccggtgactctggcgctgccgtcgccagcctgcccgttctgccgcggcagcatctcgcggctgctcctggtggcccgggcaagcagcgacgacgcggacaccgagaagtcggcggcggcggcagcgggctgcctcctccccgcagctcgtccggcggcggtcccggcggtcgcacaacctcagcgacggcggcagcagcagcttcaaggggctgtcgtccgccgtggccggttccttctccaagatcgggcgcgggtcgagccggacgatggccgacagcgacggctgcggcgtggacaagcccgagcacgacccgtgatcggcattggatcctgcgcatgtggagccgagcgcggggccattgcggacatccaatcgaatccaagccaagcgtgactgcttgctgcgaaaataaccgcatccttttcttcttcttctccccatgtccctgtctgtcaatcctattcttgggcgtgccaggatttgttcacctggccattgccgtattccattgtcaccgaccggctatagtatatagtactagattccatttccaaaaaaaaaaaaaaaaaaaaaaaaaaaaaaaaaaaaaaagaaaaaaaaaaaaaaaaaacggcacgagaagccggcacgag

SEQ ID NO: 2557 - protein, 577 aa, Zea mays subsp. mays
  peptide (1)..(577): Ceres Seq. ID no. 13492654
MGHGVSCARTGDEHDYFRAAQVGDLEALDALLDADPSLARRATLYDRLSALHIAAANGRLEVLSMVLDHGVPPDVVNRHKQTPLMLAAMHGKTDCVLKLLQAGANILMFDSQHGRTCLHHASYFGHVGCLQAILTAARTTPVADSWGFARFVNVRDDHGATPLHLAARQGRPGCVQALLENGAIVSALTGSYGFPGSTVAAPRRSQREPGLHPEAARLGSGSSPEGFSREDPLRRGAEAQPRGVRSAAEPVGGGAHGVAVPAQVHQRAGAGGQGAPGSGADGSQQGEGGEDPQGHQALSASSHLGPRERRRRRRRHRRRVLRCQRQRRGAVLHLLRPGVHHGGAGLRAPDVRAVHARAVLPQQARPGDSGAAVASLPVLPRQHLAAAPGGPGKQRRRGHREVGGGGSGLPPPRSSSGGGPGGRTTSATAAAAASRGCRPPWPVPSPRSGAGRAGRWPTATAAAWTSPSTTRDRHWILRMWSRARGHCGHPIESKPSVTACCENNRILFFFFSPCPCLSILFLGVPGFVHLAIAVFHCHRPAIVYSTRFHFQKKKKKKKKKKKKRKKKKKNGTRSRHE

SEQ ID NO: 2558 - protein, 513 aa, Zea mays subsp. mays
  peptide (1)..(513): Ceres Seq. ID no. 13492655
MVLDHGVPPDVVNRHKQTPLMLAAMHGKTDCVLKLLQAGANILMFDSQHGRTCLHHASYFGHVGCLQAILTAARTTPVADSWGFARFVNVRDDHGATPLHLAARQGRPGCVQALLENGAIVSALTGSYGFPGSTVAAPRRSQREPGLHPEAARLGSGSSPEGFSREDPLRRGAEAQPRGVRSAAEPVGGGAHGVAVPAQVHQRAGAGGQGAPGSGADGSQQGEGGEDPQGHQALSASSHLGPRERRRRRRRHRRRVLRCQRQRRGAVLHLLRPGVHHGGAGLRAPDVRAVHARAVLPQQARPGDSGAAVASLPVLPRQHLAAAPGGPGKQRRRGHREVGGGGSGLPPPRSSSGGGPGGRTTSATAAAAASRGCRPPWPVPSPRSGAGRAGRWPTATAAAWTSPSTTRDRHWILRMWSRARGHCGHPIESKPSVTACCENNRILFFFFSPCPCLSILFLGVPGFVHLAIAVFHCHRPAIVYSTRFHFQKKKKKKKKKKKKRKKKKKNGTRSRHE

SEQ ID NO: 2559 - protein, 493 aa, Zea mays subsp. mays
  peptide (1)..(493): Ceres Seq. ID no. 13492656
MLAAMHGKTDCVLKLLQAGANILMFDSQHGRTCLHHASYFGHVGCLQAILTAARTTPVADSWGFARFVNVRDDHGATPLHLAARQGRPGCVQALLENGAIVSALTGSYGFPGSTVAAPRRSQREPGLHPEAARLGSGSSPEGFSREDPLRRGAEAQPRGVRSAAEPVGGGAHGVAVPAQVHQRAGAGGQGAPGSGADGSQQGEGGEDPQGHQALSASSHLGPRERRRRRRRHRRRVLRCQRQRRGAVLHLLRPGVHHGGAGLRAPDVRAVHARAVLPQQARPGDSGAAVASLPVLPRQHLAAAPGGPGKQRRRGHREVGGGGSGLPPPRSSSGGGPGGRTTSATAAAAASRGCRPPWPVPSPRSGAGRAGRWPTATAAAWTSPSTTRDRHWILRMWSRARGHCGHPIESKPSVTACCENNRILFFFFSPCPCLSILFLGVPGFVHLAIAVFHCHRPAIVYSTRFHFQKKKKKKKKKKKKRKKKKKNGTRSRHE

SEQ ID NO: 2560 - DNA, 1570 bp, Zea mays subsp. mays
  misc_feature (1)..(1570): Ceres Seq. ID no. 12352072
  misc_feature (1)..(1570): Ortholog of  Ceres SEQ ID NO 15171275 as cited in SEQ ID NO 51428
  misc_feature (1)..(1570): Ortholog of  Ceres SEQ ID NO 14307678 as cited in SEQ ID NO 59456
  misc_feature (1)..(1570): Ortholog of  Ceres SEQ ID NO 13586716 as cited in SEQ ID NO 0
aatcgaaaacctgaacacctctctctcgccacctcacctgaacacctgctcgccccacccattccctccgcatggctggcctccgccctcgcgccgccgtagcttcgaattgcctccgaccggcaattcggcgaggcgcccgtcacgcatcgggggcagcgtttggatactacacctgctggcagctacagggaaatattttgaattggagatctatatccgcaactaaaaagctctggagtacagtagctagtgcaaagcctgatgattctaaatttgaaagtgtggatgcaccacttgagccccaaacatgtgaaggcagcttcttgtgtggtctgttgaagaacctgccacacatttttctagctgcagcagagaagcagttgcaagaactgtcttaccaaagagaagagagcttaaaacgctgggagcatagtattggttctaaagaggattgccttcacaggaggattgctgaactcaaggaacacgagtgtcagagagctattgaggacatcatgtacatgttgattgtttataagttttttaagattgaagtaccaatggttcccaatctatcgaaactcatcagcaacagaaggttacagttatggccaccaagggagacagatcttgaatccattcatggacctgaggtgctagagctaattagggaacacttgaccagcattatcagatgggtgcacagaaatggtcccaagatcaatcgttcaacacttcgcattaaaagactgcaatttgttcggatatattctgcttcaataatgtacggatacttcctgaaatctgtcagcatcaggcatcgattggagctgacccttactcgctcagaaggagtgcctccgattcaatttctgaatgctcaactcacaaataaacaagagcaggaaggggccattggaggctctagtgaagcttcgtcttctttgagaccaagttctgtggtcaacccacacgacttgaggggctacataatgggattcgatccaaagaccttgcagctttgcgcgaagctgcgctcatctgaagcttctaatctcatcgagaggcacagctgggctctttttgggggcgacatggaactctcccaggagaatgatgaagcggttatacttgatccttcatccctgaaaagactactgcttgaagccattgcattcggttccttcctctgggacgtcgaggattatgtggacgagatcttcaagttatcggatagctgaagaaactgctacagaaagctcctacagcctttgtggttgtggatagatgaagccagctgaaaagaggagctgcagttcttttctctagatttgtatatatggctggctgttatgtacatgcatatacatcttcatctcaagtttgctttttggagggtacacaagtttttttttgtaagttatgtcatcttacactagtacacaatagcatcagcctatcaacgcagaggacgtgtgacataattttatggtcccaaaataactgggcattttgctaatctagaacgacattattttggaatgaaatgagttgtatcagcatttgt

SEQ ID NO: 2561 - protein, 390 aa, Zea mays subsp. mays
  peptide (1)..(390): Ceres Seq. ID no. 12352073
MAGLRPRAAVASNCLRPAIRRGARHASGAAFGYYTCWQLQGNILNWRSISATKKLWSTVASAKPDDSKFESVDAPLEPQTCEGSFLCGLLKNLPHIFLAAAEKQLQELSYQREESLKRWEHSIGSKEDCLHRRIAELKEHECQRAIEDIMYMLIVYKFFKIEVPMVPNLSKLISNRRLQLWPPRETDLESIHGPEVLELIREHLTSIIRWVHRNGPKINRSTLRIKRLQFVRIYSASIMYGYFLKSVSIRHRLELTLTRSEGVPPIQFLNAQLTNKQEQEGAIGGSSEASSSLRPSSVVNPHDLRGYIMGFDPKTLQLCAKLRSSEASNLIERHSWALFGGDMELSQENDEAVILDPSSLKRLLLEAIAFGSFLWDVEDYVDEIFKLSDS

SEQ ID NO: 2562 - protein, 241 aa, Zea mays subsp. mays
  peptide (1)..(241): Ceres Seq. ID no. 12352074
MYMLIVYKFFKIEVPMVPNLSKLISNRRLQLWPPRETDLESIHGPEVLELIREHLTSIIRWVHRNGPKINRSTLRIKRLQFVRIYSASIMYGYFLKSVSIRHRLELTLTRSEGVPPIQFLNAQLTNKQEQEGAIGGSSEASSSLRPSSVVNPHDLRGYIMGFDPKTLQLCAKLRSSEASNLIERHSWALFGGDMELSQENDEAVILDPSSLKRLLLEAIAFGSFLWDVEDYVDEIFKLSDS

SEQ ID NO: 2563 - protein, 239 aa, Zea mays subsp. mays
  peptide (1)..(239): Ceres Seq. ID no. 12352075
MLIVYKFFKIEVPMVPNLSKLISNRRLQLWPPRETDLESIHGPEVLELIREHLTSIIRWVHRNGPKINRSTLRIKRLQFVRIYSASIMYGYFLKSVSIRHRLELTLTRSEGVPPIQFLNAQLTNKQEQEGAIGGSSEASSSLRPSSVVNPHDLRGYIMGFDPKTLQLCAKLRSSEASNLIERHSWALFGGDMELSQENDEAVILDPSSLKRLLLEAIAFGSFLWDVEDYVDEIFKLSDS

SEQ ID NO: 2564 - DNA, 1084 bp, Zea mays subsp. mays
  misc_feature (1)..(1084): Ceres Seq. ID no. 12350953
  misc_feature (1)..(1084): Ortholog of  Ceres SEQ ID NO 15225415 as cited in SEQ ID NO 0
gaaaagaaagcattagtatatttgcatttgcttcgttctccaccgccagcgaggtgctcgtgcggtgtgtatatatatatgcacggggttgcattgcacccagctgcagatgatatataccttaagccagcagaaaattaggtataggcgtagagactagagagcgagcgagctcagtccgtgttcagtcgagagagctcgtttagcttggccatcgacgagctagcagagcagtagctaggatagatccatggcgaacgcgggcatgaagccggtggccggactcctgctggtgctcaacttgtgcatgtacgtcatcgtggcggcggtgggcggctgggccatcaaccacgccatcaactacggcttcttcatcggcaccggcctgcacctcccggctcacttctccccgatcaacttccccatcgggaacgcggcgaccgggttcttcgtcatcttcgccgtgatcgccggggtggtcggcgcgggctcggcgctggcggggctcaaccacgtccgcgcctggagcaccgagagcctgccggcggcggcctccgccgggttcattgcgtggacgctcaccctgctcgccatggggttggcggtgaaggagattgaactgcacggcaggaatgccagactgatatgcatggagtccttcaccatcatcctgtcggcgacgcagctcttctacctgctcgccattcacggaggcttgagataaaatcgatcaccgtgttggccggaggcactgaggcagtgactgatgaatggagacttgtcgtcggttccgtacgtgtgtgtctgtcggattgagtgggcgtgcatcggattcacggggcagcgcgtgtactatatatgtgacttcattcggttcgctgtgtcgttgtgggctgggctgtcttccaagatgcatggagaggcagtacgtatgtacacgtacgtgtatctatctgttcgtgtgtgtgcgcccgctgctgcttgatttatcttgtgcgtccgattggttacgtcattccgtgtcattcattgattgtttcggagatggagagtcaatatgtctacacgtcatgatgacgtggtg

SEQ ID NO: 2565 - protein, 157 aa, Zea mays subsp. mays
  peptide (1)..(157): Ceres Seq. ID no. 12350954
MANAGMKPVAGLLLVLNLCMYVIVAAVGGWAINHAINYGFFIGTGLHLPAHFSPINFPIGNAATGFFVIFAVIAGVVGAGSALAGLNHVRAWSTESLPAAASAGFIAWTLTLLAMGLAVKEIELHGRNARLICMESFTIILSATQLFYLLAIHGGLR

SEQ ID NO: 2566 - protein, 152 aa, Zea mays subsp. mays
  peptide (1)..(152): Ceres Seq. ID no. 12350955
MKPVAGLLLVLNLCMYVIVAAVGGWAINHAINYGFFIGTGLHLPAHFSPINFPIGNAATGFFVIFAVIAGVVGAGSALAGLNHVRAWSTESLPAAASAGFIAWTLTLLAMGLAVKEIELHGRNARLICMESFTIILSATQLFYLLAIHGGLR

SEQ ID NO: 2567 - protein, 138 aa, Zea mays subsp. mays
  peptide (1)..(138): Ceres Seq. ID no. 12350956
MYVIVAAVGGWAINHAINYGFFIGTGLHLPAHFSPINFPIGNAATGFFVIFAVIAGVVGAGSALAGLNHVRAWSTESLPAAASAGFIAWTLTLLAMGLAVKEIELHGRNARLICMESFTIILSATQLFYLLAIHGGLR

SEQ ID NO: 2568 - DNA, 1328 bp, Zea mays subsp. mays
  misc_feature (1)..(1328): Ceres Seq. ID no. 12410649
  misc_feature (1)..(1328): Ortholog of  Ceres SEQ ID NO 14304941 as cited in SEQ ID NO 53358
  misc_feature (1)..(1328): Ortholog of  Ceres SEQ ID NO 15176197 as cited in SEQ ID NO 58416
accaaagccctagctcggctcacttgctttcctggccgccgtctcctccgcggctcttaacgccgcatccactcgccggttcttaacgccgcccgccgcctcctccgcggctctgccctcccgccgctgccgccgcctacccaggaatcaggatgcgggtgaagaagcggtcgaagcaccgcaaagcggtcaagttctacgccacatgcttcggcttccgcgagccctataaagtcctcatcgacggcaccttcgtccaccacctcctcacccagcgcctcctcccggccgacgaggctctccgagacctcctctcggcctccaggacgccagccctcttcacctccaagtgcatcctcgcagagctcagacgtctcggcaagtcacatgccgaatcatttgacgccgcgcagcttctcaccacaaccaagtgtgagcatgacaaggtggtcggtgcagttaactgtgtccagtcactgataggtgataaaaatcctgaacatttcttcgttgccacccaggatcctggtctccgagaaaacttacgagagattcctggggttcctgtgatatatggtctgaagaactctttatgcatagaacggccctctatgcagcaacgcaagtttgctcaattggatgaggagaagcgtctcaatatggatatctctgaatacaagaagttactgaaggctgcatcagaaggaaagacaattgccagtgaaaatggaagtggcgaagaacaacatgagatgcctattagttctcttgtaaaaaatgcacttcatgttactgataaaaccaagtttaagaggaacaaagcaaagggtccaaacccactctcctgtaagaagaagaaaccaaagctccccacggctattcaaaagcaggcaggtacggctgatggcgaggcaaagaggaagagggttcggaagcggaagagaggccaaaaagataacaagcaattggaggctgcgaactagaaggatgggcttgcgtaggaagtttcagtgctcttgctagacatccatcctgactccggagcaagtcaactatggaggagttcctttctcccacacaggattcagtatgccatgccataccatgctcattatatgttgaagatgcttcttgcaacgtaacacttgattggttatggtgatcgtgaatccttctctagaggatgttattggatgtttcttttgtcgcaagatgcaactttaaatgttttttgaagcaaaagtttgatgccagtagctctaccaggttcttgcttgccctgctacatgtgtgatcccattcttcaattgtaagatgtgtttgttgag

SEQ ID NO: 2569 - protein, 276 aa, Zea mays subsp. mays
  peptide (1)..(276): Ceres Seq. ID no. 12410650
MRVKKRSKHRKAVKFYATCFGFREPYKVLIDGTFVHHLLTQRLLPADEALRDLLSASRTPALFTSKCILAELRRLGKSHAESFDAAQLLTTTKCEHDKVVGAVNCVQSLIGDKNPEHFFVATQDPGLRENLREIPGVPVIYGLKNSLCIERPSMQQRKFAQLDEEKRLNMDISEYKKLLKAASEGKTIASENGSGEEQHEMPISSLVKNALHVTDKTKFKRNKAKGPNPLSCKKKKPKLPTAIQKQAGTADGEAKRKRVRKRKRGQKDNKQLEAAN

SEQ ID NO: 2570 - DNA, 1271 bp, Zea mays subsp. mays
  misc_feature (1)..(1271): Ceres Seq. ID no. 12369155
  misc_feature (1)..(1271): Ortholog of  Ceres SEQ ID NO 14309755 as cited in SEQ ID NO 20741
  misc_feature (1)..(1271): Ortholog of  Ceres SEQ ID NO 13638746 as cited in SEQ ID NO 59296
  misc_feature (1)..(1271): Ortholog of  Ceres SEQ ID NO 14314050 as cited in SEQ ID NO 59952
  misc_feature (1)..(1271): Ortholog of  Ceres SEQ ID NO 13596474 as cited in SEQ ID NO 62169
  misc_feature (1)..(1271): Ortholog of  Ceres SEQ ID NO 13598714 as cited in SEQ ID NO 62656
  misc_feature (1)..(1271): Ortholog of  Ceres SEQ ID NO 13596969 as cited in SEQ ID NO 63375
  misc_feature (1)..(1271): Ortholog of  Ceres SEQ ID NO 15225685 as cited in SEQ ID NO 63616
  misc_feature (1)..(1271): Ortholog of  Ceres SEQ ID NO 13597519 as cited in SEQ ID NO 64759
  misc_feature (1)..(1271): Ortholog of  Ceres SEQ ID NO 14302388 as cited in SEQ ID NO 65655
  misc_feature (1)..(1271): Ortholog of  Ceres SEQ ID NO 13595926 as cited in SEQ ID NO 67778
  misc_feature (1)..(1271): Ortholog of  Ceres SEQ ID NO 13587054 as cited in SEQ ID NO 0
accgagttcgtcggtcgtcacctgatattttttccgacggacacacaagcatatatacatacacgccgacatagggatgatggcttcctctagtcctcagcgtgcagccggcgccgccgtcgccggcgtgctgctggtggcggctgccgccctgtgctcgtgcggcgccatggcgcagctgaccgcggactactacgactgcacatgccctgacgcctacaacatcgtgaagcaggtcctgatcgaggcgcacaagtccgacgtgcgcatctacgccagcctcacccgcctccacttccacgactgcttcgtccagggctgcgatggctcggtgctcctggacgccgttccgggggtggccaactccactgagaagctggcgccggccaacaacaactcggcgcgagggttcccggtggtggacaaagtgaaggcggcgctggaggacgcctgccccggcgtcgtctcctgcgccgacatcctcgccctcgccgcagagatctcggtcgaactgtccggaggaccaaagtgggcagtgcttcttgggaggctagacagcaagaaggccgacttcaagagcgcggagaacctgccgtcgccgttcgacaacctgacggtgctggagcagaagttcgcggccgtgggcctccacaccgtggacctggtggccctctcgggagctcacacgttcgggcgggtccagtgccagttcgtcacggggcggctgtacaacttcagcggcacgaaccggccggaccccacgctcaactccggctaccgggcgttcctggcccagaggtgcccccagaacggcagcccctcggccctcaacgacctggaccccacgacgccgaacctgttcgacaaccactactacaccaacctggaggtgaaccggggcttcctcggctcggaccaggagctcaagtcggcgccgcaggcgcagggcgtcaccgcgcccgtcgtcgaccagttcgccaccagccaggccgccttcttcagcagcttcgcgcagtccatgatcaacatgggcaacatccagccgctcaccgacccggccaagggagaggtccgctgcgactgccgggtggctaatgatgattaatccacgacgacgacgtgtgtagttagaaacggacgtgaatgcatgtgcatgtgcccggccgggtcgttagtacaccgacaagcaagagtgcactagcgctatggatcggactatatggtgcacaactgcacatgcatgcatataatatcagggcctcgtcgtttcg

SEQ ID NO: 2571 - protein, 342 aa, Zea mays subsp. mays
  peptide (1)..(342): Ceres Seq. ID no. 12369156
MMASSSPQRAAGAAVAGVLLVAAAALCSCGAMAQLTADYYDCTCPDAYNIVKQVLIEAHKSDVRIYASLTRLHFHDCFVQGCDGSVLLDAVPGVANSTEKLAPANNNSARGFPVVDKVKAALEDACPGVVSCADILALAAEISVELSGGPKWAVLLGRLDSKKADFKSAENLPSPFDNLTVLEQKFAAVGLHTVDLVALSGAHTFGRVQCQFVTGRLYNFSGTNRPDPTLNSGYRAFLAQRCPQNGSPSALNDLDPTTPNLFDNHYYTNLEVNRGFLGSDQELKSAPQAQGVTAPVVDQFATSQAAFFSSFAQSMINMGNIQPLTDPAKGEVRCDCRVANDD

SEQ ID NO: 2572 - protein, 341 aa, Zea mays subsp. mays
  peptide (1)..(341): Ceres Seq. ID no. 12369157
MASSSPQRAAGAAVAGVLLVAAAALCSCGAMAQLTADYYDCTCPDAYNIVKQVLIEAHKSDVRIYASLTRLHFHDCFVQGCDGSVLLDAVPGVANSTEKLAPANNNSARGFPVVDKVKAALEDACPGVVSCADILALAAEISVELSGGPKWAVLLGRLDSKKADFKSAENLPSPFDNLTVLEQKFAAVGLHTVDLVALSGAHTFGRVQCQFVTGRLYNFSGTNRPDPTLNSGYRAFLAQRCPQNGSPSALNDLDPTTPNLFDNHYYTNLEVNRGFLGSDQELKSAPQAQGVTAPVVDQFATSQAAFFSSFAQSMINMGNIQPLTDPAKGEVRCDCRVANDD

SEQ ID NO: 2573 - protein, 311 aa, Zea mays subsp. mays
  peptide (1)..(311): Ceres Seq. ID no. 12369158
MAQLTADYYDCTCPDAYNIVKQVLIEAHKSDVRIYASLTRLHFHDCFVQGCDGSVLLDAVPGVANSTEKLAPANNNSARGFPVVDKVKAALEDACPGVVSCADILALAAEISVELSGGPKWAVLLGRLDSKKADFKSAENLPSPFDNLTVLEQKFAAVGLHTVDLVALSGAHTFGRVQCQFVTGRLYNFSGTNRPDPTLNSGYRAFLAQRCPQNGSPSALNDLDPTTPNLFDNHYYTNLEVNRGFLGSDQELKSAPQAQGVTAPVVDQFATSQAAFFSSFAQSMINMGNIQPLTDPAKGEVRCDCRVANDD

SEQ ID NO: 2574 - DNA, 1502 bp, Zea mays subsp. mays
  misc_feature (1)..(1502): Ceres Seq. ID no. 12357279
  misc_feature (1)..(1502): Ortholog of  Ceres SEQ ID NO 13623732 as cited in SEQ ID NO 0
attatagccacggccggccggtggacgacagcaccacaccacctccaactacccgagaccatcgacgagcatcttcctgcatctgcaatggctgccgctaccgtgtccgtcccccgcatcaagctgggctcccaggggctagaggtctccgcgcagggcctcggctgcatgggcatgtccgccttctacggtccgcccaaacccgagcctgacatgatcaagctcatccaccacgccgtcgccgccggggtcaccctccttgacacctccgacatgtacggcccgcacaccaacgagatcctgctaggcaaggcgcttcaaggcggtgtaaaggagaaggtcgagctggccaccaagtttgccgtctccttcgccgacggcaagcgcgagatccgcggtgacccggcgtatgtacgggcagcctgcgaagccagcctcaagcggctcggcatcgactgcatcgacctctactaccagcaccgcatcgacaagaaggtgcccatcgaggtcacgattggtgaactcaagaagctagtggaagaaggaaaggttaagtacattgggttatccgaagcatctgcatcaacaatccgaagagctcacgcagtccatcctattactgcagtacagcttgaatggtcattatggtctagagatgcggaagaagatataattcccacttgcagagaacttggaattggaattgtagcttacagtccactaggcagagggtttttttgtagtggagcaaaactagttgactcactgtcagagcaggacttccgcaagcatatgcctagacttcaaccagagaatattgtcaagaatgctaagatattcgagcatgtgaatgcaatggcagctaaaaaaggatgcacaccatcacagctagcattggcatgggttcaccatcagggaaacgatgtttgccccatacctggaacaacaaaaatcgagaacttcaaccagaacgtgggggcgctttctgtgaagttgacaccagatgagatggccgaactcgagtcctgtgctgctgcaggtgaaatcttgggtgaccgttatcctcaaatggccaacacctggaaggactctgagaccccgccattgtcttcttggaaatctgagtagccaatctggtgtctcttcaattctgccaccgtcacattggtgtatctccaaattgtcggactgcagaagatactcaggtgcactttgcaaaagcgtccatatgatgtgcttgccttttgcaagctatgatgtttggtacttggtgtgtattgcatgcctcaatttgtatcaagagtatttacccatgagtatagcttgaaggttaaaaccactggttcgacgaataaccatatgcatttgtatcgagagtatttaccatgagtagcaaactgaattttgtaataatagtcaaaagtgtgattgtaaaatgtacttagggaatgtggtacgctatattagcgtgcaaacataagtatagccagttaagcccctcc

SEQ ID NO: 2575 - protein, 375 aa, Zea mays subsp. mays
  peptide (1)..(375): Ceres Seq. ID no. 12357280
IIATAGRWTTAPHHLQLPETIDEHLPASAMAAATVSVPRIKLGSQGLEVSAQGLGCMGMSAFYGPPKPEPDMIKLIHHAVAAGVTLLDTSDMYGPHTNEILLGKALQGGVKEKVELATKFAVSFADGKREIRGDPAYVRAACEASLKRLGIDCIDLYYQHRIDKKVPIEVTIGELKKLVEEGKVKYIGLSEASASTIRRAHAVHPITAVQLEWSLWSRDAEEDIIPTCRELGIGIVAYSPLGRGFFCSGAKLVDSLSEQDFRKHMPRLQPENIVKNAKIFEHVNAMAAKKGCTPSQLALAWVHHQGNDVCPIPGTTKIENFNQNVGALSVKLTPDEMAELESCAAAGEILGDRYPQMANTWKDSETPPLSSWKSE

SEQ ID NO: 2576 - protein, 346 aa, Zea mays subsp. mays
  peptide (1)..(346): Ceres Seq. ID no. 12357281
MAAATVSVPRIKLGSQGLEVSAQGLGCMGMSAFYGPPKPEPDMIKLIHHAVAAGVTLLDTSDMYGPHTNEILLGKALQGGVKEKVELATKFAVSFADGKREIRGDPAYVRAACEASLKRLGIDCIDLYYQHRIDKKVPIEVTIGELKKLVEEGKVKYIGLSEASASTIRRAHAVHPITAVQLEWSLWSRDAEEDIIPTCRELGIGIVAYSPLGRGFFCSGAKLVDSLSEQDFRKHMPRLQPENIVKNAKIFEHVNAMAAKKGCTPSQLALAWVHHQGNDVCPIPGTTKIENFNQNVGALSVKLTPDEMAELESCAAAGEILGDRYPQMANTWKDSETPPLSSWKSE

SEQ ID NO: 2577 - protein, 319 aa, Zea mays subsp. mays
  peptide (1)..(319): Ceres Seq. ID no. 12357282
MGMSAFYGPPKPEPDMIKLIHHAVAAGVTLLDTSDMYGPHTNEILLGKALQGGVKEKVELATKFAVSFADGKREIRGDPAYVRAACEASLKRLGIDCIDLYYQHRIDKKVPIEVTIGELKKLVEEGKVKYIGLSEASASTIRRAHAVHPITAVQLEWSLWSRDAEEDIIPTCRELGIGIVAYSPLGRGFFCSGAKLVDSLSEQDFRKHMPRLQPENIVKNAKIFEHVNAMAAKKGCTPSQLALAWVHHQGNDVCPIPGTTKIENFNQNVGALSVKLTPDEMAELESCAAAGEILGDRYPQMANTWKDSETPPLSSWKSE

SEQ ID NO: 2578 - DNA, 1461 bp, Zea mays subsp. mays
  misc_feature (1)..(1461): Ceres Seq. ID no. 12414242
  misc_feature (1)..(1461): Ortholog of  Ceres SEQ ID NO 14307053 as cited in SEQ ID NO 54262
aaaaggggatctcagggtcagagcgcatcagcacacagacagcgcggtgctctccagtccccaccaattaagctcagggtctagtgagcagccagagagcctcgtcccgttcccacccccattgcttgctctgactgctccgccgtgcgtgcgtcacccgcgctcgggaggtgagtggtttggttgcgcagccaactgccggcccggcaccgtaccgcttgttcgcttctgaggttgtgcggagtggttgctggcctggccgtggccggcataccgataaaggcgagagacaaggcgttgtctcactctcatccgtcgtccgtctcgtctcggctttctcgcctcctcgggcggcagcggtgttccactcccatcgcgtcgggacatagaaagggggagcgcgggcgacacgcgagcgttagttgccatggacgcgcccttcttccacgagctcaggcggcaggcctcctcctacctcaccggcaagatccgctccgcgcggctggcgctcaccgacgtcaccccgacgcagctcatgacggaggaggcgacgaacggggacgcgtcgccgccgaacgtcaagacgatgggcctcatagcccggcaggcgttcgaggtcgacgagtacgtcaggatcacggacatcctgcacaggcgcttcgcgagcttcgaccccaggcaggggcaggggcagtggcagtggcgggaggcgtacaaggcgctgctcctcctggaccacctcctcacgcacgggccccgcagcgtcgcggtcgagttccagaaggacagggaggccatcgagcggatggccaccttccaacacatcgacgagagaggcttcaactggggacggacggtgacgagcaagtcggagcgcgtgctcaagctgctggagcgcggcccgttcctggaggaggagcgcgagcgggcacgcaagatcgcgcgcgagatcaagggcttcggcagcttcaacctcagcagcgcctcccacgccgcgccacagccaccaccaggtgacgagggaagccgcggctacggccggagcaactcgcagttcgagcagcggtggaggcacaaggacggcgacgacagcgacaaggagaatctgatccagagcccggagccagcacgggtcgcgcgggaagtcgaggccgagccggaggagccgcaccaccacccgttccacgggctcgggcaaaaacagcggccggaggcgatgctgctcctgagccagtgacgggatcagtcggttcgtgtcatggtgatatgaaaaagaaccgtgtgctctgctcgactcaactagcttttctccattcctcaaggctgcaggggtcggaggcagtgatgggatcagtcagtactttactgacactgcttggtgcaccatgcatgagaactttgatgtctcatgtagtagtcatgtctgcttcgccttgtaaataattctatgcttcagttcgc

SEQ ID NO: 2579 - protein, 269 aa, Zea mays subsp. mays
  peptide (1)..(269): Ceres Seq. ID no. 12414243
MDAPFFHELRRQASSYLTGKIRSARLALTDVTPTQLMTEEATNGDASPPNVKTMGLIARQAFEVDEYVRITDILHRRFASFDPRQGQGQWQWREAYKALLLLDHLLTHGPRSVAVEFQKDREAIERMATFQHIDERGFNWGRTVTSKSERVLKLLERGPFLEEERERARKIAREIKGFGSFNLSSASHAAPQPPPGDEGSRGYGRSNSQFEQRWRHKDGDDSDKENLIQSPEPARVAREVEAEPEEPHHHPFHGLGQKQRPEAMLLLSQ

SEQ ID NO: 2580 - protein, 233 aa, Zea mays subsp. mays
  peptide (1)..(233): Ceres Seq. ID no. 12414244
MTEEATNGDASPPNVKTMGLIARQAFEVDEYVRITDILHRRFASFDPRQGQGQWQWREAYKALLLLDHLLTHGPRSVAVEFQKDREAIERMATFQHIDERGFNWGRTVTSKSERVLKLLERGPFLEEERERARKIAREIKGFGSFNLSSASHAAPQPPPGDEGSRGYGRSNSQFEQRWRHKDGDDSDKENLIQSPEPARVAREVEAEPEEPHHHPFHGLGQKQRPEAMLLLSQ

SEQ ID NO: 2581 - protein, 216 aa, Zea mays subsp. mays
  peptide (1)..(216): Ceres Seq. ID no. 12414245
MGLIARQAFEVDEYVRITDILHRRFASFDPRQGQGQWQWREAYKALLLLDHLLTHGPRSVAVEFQKDREAIERMATFQHIDERGFNWGRTVTSKSERVLKLLERGPFLEEERERARKIAREIKGFGSFNLSSASHAAPQPPPGDEGSRGYGRSNSQFEQRWRHKDGDDSDKENLIQSPEPARVAREVEAEPEEPHHHPFHGLGQKQRPEAMLLLSQ

SEQ ID NO: 2582 - DNA, 902 bp, Zea mays subsp. mays
  misc_feature (1)..(902): Ceres Seq. ID no. 12387230
  misc_feature (1)..(902): Ortholog of  Ceres SEQ ID NO 15169763 as cited in SEQ ID NO 1284
  misc_feature (1)..(902): Ortholog of  Ceres SEQ ID NO 12610243 as cited in SEQ ID NO 56206
  misc_feature (1)..(902): Ortholog of  Ceres SEQ ID NO 12586495 as cited in SEQ ID NO 64946
atacacagcaaagcctcaaaacctgatcatcagagaaacgaaaaggaagaggagcgtgggagaaaaaacaaaagaaaggaaaagagatatagccctgagaagaatgtcccttacaactgatgaactcaaggccaaggccgaggtatactacggtgacgagatctgccatctgtgtacccagctcctgctcagggaagcaggcctccccaatggcctgcttccattgaaggacctaatcgagtgcggctatgtccaggaaactggattcgtgtggctgaagcaaagcaacagggttgaccacatcttccatagtctaggaaggctggtctcttacggcacggagatcaccggctatgccgagaagggcaggatcaggaaggtcaaagggataaagaccagggagctcatgctgtgggtcccggtggaggagattgctcttgatgatgatccagcgactgggaagcttgtctgcaagagcattgctgggattaccaaaaccttccctgcatcggctttccatatcccggagaaggagaacaatgtgaaggcgaactgtgctgcactgaagccggtggtcctcatggagagagctccacgagttgttaaaaacagctgatccgccttcaattctgcatccactggtatttggagttgacgtacggccgccatatcagcccttaatcctacgtatttaaataatggttgaactagtgtcctttactattttccgttcatgtacttgggaaatgataacacaaagttcttccgcctatatatatactgcggttgtacgattgccctggcatctatataatattgtcctgtaaggtaaccacccaacttcctttcatgtactacgtagctctatattactaatacaaagcatgttgtggacttctatg

SEQ ID NO: 2583 - protein, 204 aa, Zea mays subsp. mays
  peptide (1)..(204): Ceres Seq. ID no. 12387231
YTAKPQNLIIRETKRKRSVGEKTKERKRDIALRRMSLTTDELKAKAEVYYGDEICHLCTQLLLREAGLPNGLLPLKDLIECGYVQETGFVWLKQSNRVDHIFHSLGRLVSYGTEITGYAEKGRIRKVKGIKTRELMLWVPVEEIALDDDPATGKLVCKSIAGITKTFPASAFHIPEKENNVKANCAALKPVVLMERAPRVVKNS

SEQ ID NO: 2584 - protein, 170 aa, Zea mays subsp. mays
  peptide (1)..(170): Ceres Seq. ID no. 12387232
MSLTTDELKAKAEVYYGDEICHLCTQLLLREAGLPNGLLPLKDLIECGYVQETGFVWLKQSNRVDHIFHSLGRLVSYGTEITGYAEKGRIRKVKGIKTRELMLWVPVEEIALDDDPATGKLVCKSIAGITKTFPASAFHIPEKENNVKANCAALKPVVLMERAPRVVKNS

SEQ ID NO: 2585 - DNA, 1843 bp, Zea mays subsp. mays
  misc_feature (1)..(1843): Ceres Seq. ID no. 12410645
  misc_feature (1)..(1843): Ortholog of  Ceres SEQ ID NO 12465151 as cited in SEQ ID NO 67782
aggaagccatccgctccctctcgaacattggatcctatgctctcctctccctgctcgcagtcagggcacagggactgcctccggagaccggagcaggccgcaagcgtccaggttcgagacgccagcacgctctcgcagtacagcagcattatcagggagcgtgccgtgggagtgggaggttgcctcaggtgcggagcagtcgccggcggcgaccatcggtgtctgagatgaaggagagaggcggctccagggcggcagtggacgagcgctacgcgcagtggaagtcgctcatccccgttctctacgactggtttgccaaccacaacctcgtttggccatccctctcctgccggtgggggccacagtttgagaaagctacctacaagaatcgtcaacgcctttacctatctgaacagaccgatgggagtgtgcctaatactctggttatcgcaaactgtgaagttgtgaaaccaagggttgcagctgctgaacatatctcgcagtttaacgaggaagcacgatcaccttttgtaaagaagtacaagactatagttcatcctggtgaagttaacagaatcagggagcttccacagaacagtaagatcatagccacacacactgacagtccagatgtacttgtttgggatgttgaagcacaaccaaatagacatgctgtcttaggagcttctgaatctcgtcctgatctgatattaacgggacaccaggaaaatgcagaatttgcgcttgccatgtgtccagcagaaccatatgtcctgtcaggaggaaaggacaaatttgttgtcttgtggagcatccaagaccacatatctgcccttggggattcctcgtcttctcccggagcatctggcagcaagcagtctggcaaaattgcaaatgaaaaggagagtcctaaagttgatcctagaggtatattccatggccatgacagtactgttgaagatgttcagttctgcccttccagtgcgcaggagttttgtagtgtgggtgatgatgcttgtcttattctgtgggatgctcgaactggcactgacccagctgttaaggttgagaaagctcacagtggagatgttcattgtgttgattggaatccccttgatgttaactatatcttaactggttctgccgataactctgtccgaatgtgggatcgtcgcaatctgggttcgggaggagctggttctccaattcacaaatttgagggccataaagctgctgttctttgtgttcagtggtcacctgacagagcatctgtttttggaagttctgcagaagatggtttcttaaatgtttgggaccatgagaaggttgggaagaagaaaaattctaatgtcccagctgggcttttctttcagcatgctggtcatagggataagatcgtagacttccactggaattcgtcagatccttggacaattgtcagtgtctcagatgatggtgagagcactggtggaggtggaacactgcagatatggcgaatgagtgatttgatctaccgcccagaggatgaagttcttacagagctggagaatttcaaggctcacctggccagttgcgctccgaggaattgagtcatgtgaaaactctgagtaggttatgtagtttcctggccctaagtagtttcctggccataagtatggccccaattgacattggatctgtcttctcatgctcctagagctgtacccttcgaggtgcttgtgcctttgtgagcttgtgttgaaccatgttgtatgactaaatagtccgcaaacgagtcagctggatggctaatctgtaggccaactattgggatattgttggatattatcaacaaccggttcag

SEQ ID NO: 2586 - protein, 528 aa, Zea mays subsp. mays
  peptide (1)..(528): Ceres Seq. ID no. 12410646
EAIRSLSNIGSYALLSLLAVRAQGLPPETGAGRKRPGSRRQHALAVQQHYQGACRGSGRLPQVRSSRRRRPSVSEMKERGGSRAAVDERYAQWKSLIPVLYDWFANHNLVWPSLSCRWGPQFEKATYKNRQRLYLSEQTDGSVPNTLVIANCEVVKPRVAAAEHISQFNEEARSPFVKKYKTIVHPGEVNRIRELPQNSKIIATHTDSPDVLVWDVEAQPNRHAVLGASESRPDLILTGHQENAEFALAMCPAEPYVLSGGKDKFVVLWSIQDHISALGDSSSSPGASGSKQSGKIANEKESPKVDPRGIFHGHDSTVEDVQFCPSSAQEFCSVGDDACLILWDARTGTDPAVKVEKAHSGDVHCVDWNPLDVNYILTGSADNSVRMWDRRNLGSGGAGSPIHKFEGHKAAVLCVQWSPDRASVFGSSAEDGFLNVWDHEKVGKKKNSNVPAGLFFQHAGHRDKIVDFHWNSSDPWTIVSVSDDGESTGGGGTLQIWRMSDLIYRPEDEVLTELENFKAHLASCAPRN

SEQ ID NO: 2587 - protein, 453 aa, Zea mays subsp. mays
  peptide (1)..(453): Ceres Seq. ID no. 12410647
MKERGGSRAAVDERYAQWKSLIPVLYDWFANHNLVWPSLSCRWGPQFEKATYKNRQRLYLSEQTDGSVPNTLVIANCEVVKPRVAAAEHISQFNEEARSPFVKKYKTIVHPGEVNRIRELPQNSKIIATHTDSPDVLVWDVEAQPNRHAVLGASESRPDLILTGHQENAEFALAMCPAEPYVLSGGKDKFVVLWSIQDHISALGDSSSSPGASGSKQSGKIANEKESPKVDPRGIFHGHDSTVEDVQFCPSSAQEFCSVGDDACLILWDARTGTDPAVKVEKAHSGDVHCVDWNPLDVNYILTGSADNSVRMWDRRNLGSGGAGSPIHKFEGHKAAVLCVQWSPDRASVFGSSAEDGFLNVWDHEKVGKKKNSNVPAGLFFQHAGHRDKIVDFHWNSSDPWTIVSVSDDGESTGGGGTLQIWRMSDLIYRPEDEVLTELENFKAHLASCAPRN

SEQ ID NO: 2588 - protein, 279 aa, Zea mays subsp. mays
  peptide (1)..(279): Ceres Seq. ID no. 12410648
MCPAEPYVLSGGKDKFVVLWSIQDHISALGDSSSSPGASGSKQSGKIANEKESPKVDPRGIFHGHDSTVEDVQFCPSSAQEFCSVGDDACLILWDARTGTDPAVKVEKAHSGDVHCVDWNPLDVNYILTGSADNSVRMWDRRNLGSGGAGSPIHKFEGHKAAVLCVQWSPDRASVFGSSAEDGFLNVWDHEKVGKKKNSNVPAGLFFQHAGHRDKIVDFHWNSSDPWTIVSVSDDGESTGGGGTLQIWRMSDLIYRPEDEVLTELENFKAHLASCAPRN

SEQ ID NO: 2589 - DNA, 670 bp, Zea mays subsp. mays
  misc_feature (1)..(670): Ceres Seq. ID no. 12482970
  misc_feature (1)..(670): Ortholog of  Ceres SEQ ID NO 14306355 as cited in SEQ ID NO 1268
gtttctgttcggacttccgccgcgcttcgccctctcgctccagccgcttcacagcgccgccgctcgcctctccgaccgccgcgagaatgccgttcaagaggttcgtggagatcgggcgcgtggccctggtgaactacggcaaagactatggccgcctcgtcgtcatcgtcgatgtggtcgaccagaacagggcacttgtggacgcggcggcggtgggtacggtggtggccgtggaggcggcggctacggcggtggcgggcgccgtgatggcggtggcggctacggcggtggcggcggctacggtggcggcggcggctacggtggtggtggcggcggctaccgcggtggcaaccgtggcggcggctacggcaactccgacgggaactggaggaactgagcggtggggcccgcgcggccaagttatcctgttcgctaccgtgatgtttaccctagtccagagggtttatcttcgttcgtgtcgtgtttgttgttgcccatctgtgtttttgattgcaaggtcgctctgtgtcagttgttagtgctgtgttcatcctcggtttcagcagacccatgcatcaaacagcatggactgcggatcgatggatgctgttacccccgtcaggctttattctaagttaatcttaaggaaaaaatggtgcttcttggtgct

SEQ ID NO: 2590 - protein, 178 aa, Zea mays subsp. mays
  peptide (1)..(178): Ceres Seq. ID no. 12482971
FCSDFRRASPSRSSRFTAPPLASPTAARMPFKRFVEIGRVALVNYGKDYGRLVVIVDVVDQNRALVDAAAVGTVVAVEAAATAVAGAVMAVAATAVAAATVAAAATVVVAAATAVATVAAATATPTGTGGTERWGPRGQVILFATVMFTLVQRVYLRSCRVCCCPSVFLIARSLCVSC

SEQ ID NO: 2591 - protein, 150 aa, Zea mays subsp. mays
  peptide (1)..(150): Ceres Seq. ID no. 12482972
MPFKRFVEIGRVALVNYGKDYGRLVVIVDVVDQNRALVDAAAVGTVVAVEAAATAVAGAVMAVAATAVAAATVAAAATVVVAAATAVATVAAATATPTGTGGTERWGPRGQVILFATVMFTLVQRVYLRSCRVCCCPSVFLIARSLCVSC

SEQ ID NO: 2592 - protein, 131 aa, Zea mays subsp. mays
  peptide (1)..(131): Ceres Seq. ID no. 12482973
FLFGLPPRFALSLQPLHSAAARLSDRRENAVQEVRGDRARGPGELRQRLWPPRRHRRCGRPEQGTCGRGGGGYGGGRGGGGYGGGGRRDGGGGYGGGGGYGGGGGYGGGGGGYRGGNRGGGYGNSDGNWRN

SEQ ID NO: 2593 - DNA, 1400 bp, Zea mays subsp. mays
  misc_feature (1)..(1400): Ceres Seq. ID no. 13589375
  misc_feature (1)..(1400): Ortholog of  Ceres SEQ ID NO 13593831 as cited in SEQ ID NO 53828
tcttccttgctcactctcctcaccactacctgacctgctcccaagctccctctgcctgcctttataaatcaccggggcagagcnactcactgacacacgccgctgctccaagaaaccaccgccgagcccaaccgcacaagcgcgcgaggcaggagagagagagaggcggggagcaaaacaatggaggggaaagaggaggacgtgcgcctgggcgccaacaagttctcggagcgccagcccatcgggacggcggcgcagggcgccgctgacgacaaggactacaaggagcccccgccggcgccgctgttcgagcccggggagctcaagtcctggtccttctaccgcgcgggcatcgccgagttcgtcgccaccttcctcttcctctacatcaccatcctcaccgtcatgggcgtctccaagtccacctccaagtgcgccaccgtcggcatccagggcatcgcctggtccttcggaggaatgatcttcgcgctcgtctactgcaccgccggcatctccggaggacacatcaacccagctgtgactttcgggctgttcttagccaggaagctgtccctgactagggccctcttctacatcatcatgcaatgcctgggtgccgtctgtggagctggagtggtgaagggcttccagcagggactttacatgggcaacggtggtggcgccaatgttgtcgcacctggctacaccaagggtgatggccttggcgctgagattgttggcaccttcatcctagtctacaccgtcttctcagccaccgatgccaagaggaatgccagggactcccatgttcctatccttgccccactgccaattgggttcgcggtgttcctggtccaccttgccaccatccccattactggcactggcatcaacccagctaggagccttggcgctgccatcatctacaacagggatcacgcctggaacgaccattggatcttctgggtcggccccttcattggcgctgccctggctgccatctaccaccaggtgatcatcagagccatcccgttcaagagcaggtcttaagctgccgtggccgtgccgagacatgccagtccgaagaacgggcgtcttcctgtgatgtcttcttgtctgcccacgcctagtttctctgtcgattcctattcgtcgtctcttcagggctggtgctcactgctgcgccgttctgttaaccgaaacaagaactctgtgtattcctgtaccgagctgtgcatgttttttttttctttccattgtggagaatttaagttattatccatttgctgcaaggtttgccgtctcattttatgcgttgggatgttggcaagaaagggcagatgtcatgtgagaatttaagttaagtgaaatcgattcagggttttcttgatttcagtttc

SEQ ID NO: 2594 - protein, 289 aa, Zea mays subsp. mays
  peptide (1)..(289): Ceres Seq. ID no. 13589376
MEGKEEDVRLGANKFSERQPIGTAAQGAADDKDYKEPPPAPLFEPGELKSWSFYRAGIAEFVATFLFLYITILTVMGVSKSTSKCATVGIQGIAWSFGGMIFALVYCTAGISGGHINPAVTFGLFLARKLSLTRALFYIIMQCLGAVCGAGVVKGFQQGLYMGNGGGANVVAPGYTKGDGLGAEIVGTFILVYTVFSATDAKRNARDSHVPILAPLPIGFAVFLVHLATIPITGTGINPARSLGAAIIYNRDHAWNDHWIFWVGPFIGAALAAIYHQVIIRAIPFKSRS

SEQ ID NO: 2595 - protein, 214 aa, Zea mays subsp. mays
  peptide (1)..(214): Ceres Seq. ID no. 13589377
MGVSKSTSKCATVGIQGIAWSFGGMIFALVYCTAGISGGHINPAVTFGLFLARKLSLTRALFYIIMQCLGAVCGAGVVKGFQQGLYMGNGGGANVVAPGYTKGDGLGAEIVGTFILVYTVFSATDAKRNARDSHVPILAPLPIGFAVFLVHLATIPITGTGINPARSLGAAIIYNRDHAWNDHWIFWVGPFIGAALAAIYHQVIIRAIPFKSRS

SEQ ID NO: 2596 - protein, 190 aa, Zea mays subsp. mays
  peptide (1)..(190): Ceres Seq. ID no. 13589378
MIFALVYCTAGISGGHINPAVTFGLFLARKLSLTRALFYIIMQCLGAVCGAGVVKGFQQGLYMGNGGGANVVAPGYTKGDGLGAEIVGTFILVYTVFSATDAKRNARDSHVPILAPLPIGFAVFLVHLATIPITGTGINPARSLGAAIIYNRDHAWNDHWIFWVGPFIGAALAAIYHQVIIRAIPFKSRS

SEQ ID NO: 2597 - DNA, 1839 bp, Zea mays subsp. mays
  misc_feature (1)..(1839): Ceres Seq. ID no. 12362107
  misc_feature (1)..(1839): Ortholog of  Ceres SEQ ID NO 13663419 as cited in SEQ ID NO 66561
gactggtcactgtgccattgccgccgtccgtcctaggctcctagctagctagctagcaagctccgccgacgacggtacgtcaatcgagctagccctgcccatccactacactaccgcagcggcaagcaatggcgtgcggctctgctaccgccgctcgaccagcagcccgcctctggctgctggcggcggtggtggtggcgacctccttcctcgccgtcgcggcgccgccgggcgcgctggtgacgagcgtcccggggttcggcaacaagcagcagctgccgtcgaagcactacgccgggtacgtgacggtggacgagcggcacggcaggcggctgttctactacctggtggagtcggagcgcgacccggcccgggaccccgtcgtgctctggctcaacggcgggcccggctgctccagcttcgacggcttcgtctacgagcacgggccattcagctttgagccatcaggagggtcagctgggagcctgccaaagcttcatctcaacccttatagctggtctaaggtgtcgagtgtgatatacttggactcccctgccggcgtcgggctttcctactcaaacaacgtttcggactacgagactggcgacttcaagaccgccgccgattcgcacactttcctgctcaagtggttccagctctaccctgagttcttggcaaatccgttctacatagccggagagtcgtacgctggcgtttatgtccctaccctttcaagcgaagtcgtcaaaggaatccacaaaggagtgaagccagttataaactttaagggctacatggtcggcaatggtgtgtgcgacaccgtctttgatggtaatgctcttgtgccgtttgcgcacgggatggctctcatttcagagagtatatacaaggaagccagcactgcatgtcaagggaattactggaactctagcagtgcaaaatgcgacgaggcgctgtcaaaagtcgagacagaaatcgacggattaaatatctacgacatccttgagccatgttaccacgccccagctgataccaaacaagcagcagtgaccccacaggcacagagtactagcgagctgcctcagagtttcaaagacctcggcgtgaccagcaacaagcctctccctgtaaggacaagaatgcacggacgggcgtggcctttgagagctccggtaagagacggccgcgttccgtcgtggcaggagctggcggctgatgtagcttcgacttccagtggagttccgtgtatgagcgatgaggttgcgacagcgtggctaaacaacaatagcgtcagatccgctatccatgccgaaccagtcagttcaatcggaccctgggaattatgcacggataaactggattttgatcatgatgccggcagcatgatcatctatcacaagaacctcacgagtcagggctaccgtgctttcatctacagcggcgaccatgacatgtgtgtaccttacaccgggactgaagcatggactgcgtctttaggctacgccgtcgttgatccgtggcgacagtggattgtcgacgaacaagttgccgggtacacccaaggatatgaaaagggccttacttttgccactattaagggtgctgggcacacagttcctgagtacaaaccacaggaagcactagctttctacagccgttggcttgccggtgctaaactgtgaggaggcctattttgtgtgcaaaggtcatgcagtactgaatcaaacagaagttggataaagcatgcagcaataaggcagtcgaaggatcaaagtatccaacgcgccaactacaatgttgcattcattttcacatgttataccaatgcagttgctaatt

SEQ ID NO: 2598 - protein, 517 aa, Zea mays subsp. mays
  peptide (1)..(517): Ceres Seq. ID no. 12362108
MACGSATAARPAARLWLLAAVVVATSFLAVAAPPGALVTSVPGFGNKQQLPSKHYAGYVTVDERHGRRLFYYLVESERDPARDPVVLWLNGGPGCSSFDGFVYEHGPFSFEPSGGSAGSLPKLHLNPYSWSKVSSVIYLDSPAGVGLSYSNNVSDYETGDFKTAADSHTFLLKWFQLYPEFLANPFYIAGESYAGVYVPTLSSEVVKGIHKGVKPVINFKGYMVGNGVCDTVFDGNALVPFAHGMALISESIYKEASTACQGNYWNSSSAKCDEALSKVETEIDGLNIYDILEPCYHAPADTKQAAVTPQAQSTSELPQSFKDLGVTSNKPLPVRTRMHGRAWPLRAPVRDGRVPSWQELAADVASTSSGVPCMSDEVATAWLNNNSVRSAIHAEPVSSIGPWELCTDKLDFDHDAGSMIIYHKNLTSQGYRAFIYSGDHDMCVPYTGTEAWTASLGYAVVDPWRQWIVDEQVAGYTQGYEKGLTFATIKGAGHTVPEYKPQEALAFYSRWLAGAKL

SEQ ID NO: 2599 - protein, 295 aa, Zea mays subsp. mays
  peptide (1)..(295): Ceres Seq. ID no. 12362109
MVGNGVCDTVFDGNALVPFAHGMALISESIYKEASTACQGNYWNSSSAKCDEALSKVETEIDGLNIYDILEPCYHAPADTKQAAVTPQAQSTSELPQSFKDLGVTSNKPLPVRTRMHGRAWPLRAPVRDGRVPSWQELAADVASTSSGVPCMSDEVATAWLNNNSVRSAIHAEPVSSIGPWELCTDKLDFDHDAGSMIIYHKNLTSQGYRAFIYSGDHDMCVPYTGTEAWTASLGYAVVDPWRQWIVDEQVAGYTQGYEKGLTFATIKGAGHTVPEYKPQEALAFYSRWLAGAKL

SEQ ID NO: 2600 - protein, 273 aa, Zea mays subsp. mays
  peptide (1)..(273): Ceres Seq. ID no. 12362110
MALISESIYKEASTACQGNYWNSSSAKCDEALSKVETEIDGLNIYDILEPCYHAPADTKQAAVTPQAQSTSELPQSFKDLGVTSNKPLPVRTRMHGRAWPLRAPVRDGRVPSWQELAADVASTSSGVPCMSDEVATAWLNNNSVRSAIHAEPVSSIGPWELCTDKLDFDHDAGSMIIYHKNLTSQGYRAFIYSGDHDMCVPYTGTEAWTASLGYAVVDPWRQWIVDEQVAGYTQGYEKGLTFATIKGAGHTVPEYKPQEALAFYSRWLAGAKL

SEQ ID NO: 2601 - DNA, 1706 bp, Zea mays subsp. mays
  misc_feature (1)..(1706): Ceres Seq. ID no. 12408837
  misc_feature (1)..(1706): Ortholog of  Ceres SEQ ID NO 14312212 as cited in SEQ ID NO 54399
  misc_feature (1)..(1706): Ortholog of  Ceres SEQ ID NO 14311755 as cited in SEQ ID NO 57271
  misc_feature (1)..(1706): Ortholog of  Ceres SEQ ID NO 15171156 as cited in SEQ ID NO 58259
  misc_feature (1)..(1706): Ortholog of  Ceres SEQ ID NO 14302212 as cited in SEQ ID NO 66507
  misc_feature (1)..(1706): Ortholog of  Ceres SEQ ID NO 13653980 as cited in SEQ ID NO 69253
gcacgagaccattacctagaacatcctaatcgaaaaacaaacccttcttatcctatcgtcgcgcgcgcctgcctctcccacacactccacagcgcccgcgcaggctcgctgcaagcgcaaagcagccacagcaccccctgcacctgcagactgcaaccgcaatgtcggctctcgggacgctctccggcggcgctgccggtgtctccggcctcctccgcctccgccgccgggccgccccagcccccgcgatcgcggcgccgtcgcacctccccgctgggaccgtcaagtgcgcggccgccgtgcccgatgccgccccgatcgtctggggccgtcagctccgcccggcgctcctcctacccgcggcgctgctcccttcgttgcagcccgccaggaggcacacgctgcagccgcccgccgcagccgccgagtccgcaggggaggccaagtctgtgggtttcctggagaagtacccggccctggtcaccggcttcttcttcttcatgtggtacttcctcaacgtcatattcaacatcctcaacaagaagatctacaactacttcccatacccatactttgtgtccttgatccatctagtagtgggtgtcgtatactgcctcatcagctggagtgtcggtctccccaagcgagcgcctatcaatggcacgctcctcaagcttctctttccagtcgccctgtgccatggtattggtcacatcactagcaatgtgtccttcgctgctgttgcagtctcatttgctcacactatcaaagctctggagcccttcttcagcgcagcggctactcagtttatccttggacagcaagttcccttctctctgtggctttctcttgcccctgtggtcattggtgtttcaatggcatcccttactgagctttcattcaactggactggcttcatcaatgccatgatatcaaacatctcattcacttacaggagcatttattccaagaaagctatgactgacatggatagcaccaacgtgtatgcttacatctcaataatcgctctaattgtttgcattccacctgcattgatctttgaagggcccaagctaatgcagcatggatttagtgatgccattgcaaaagtaggtttgacaaagtttgtcagtgacctattcttggttggactgttctaccatctgtataaccagattgctacaaacaccttggagcgagtggctcctctgacacatgctgtcggcaatgtgttgaaacgtgtttttgtcatcggtttctcaatcattgtttttggtaacaaaattagcacacaaactggaattggcacgtccattgccatagctggtgttgctatgtactcttacattaaggctaagattgaagaggagaaaaggaaaaagagcgcatgactgctgtgaataatattatcggaccttcctcggacacaacatcgtcgacaatcacgacctacttctataccttgttttgttttcatcttgagtcagtcggtccattgtttgttcccagtctggtgattaaaagtctgcaaattctgtttgtggaattggcagcgatacaaatttggcttctttaagtaaatccggttggcggtacacagcggtattaattcacctgtaactgaatggaataccgtaatgcaaagggcacaacactctgcctgactaaaataaaatggtgaaggttcacccttgttgtggttgctg

SEQ ID NO: 2602 - protein, 409 aa, Zea mays subsp. mays
  peptide (1)..(409): Ceres Seq. ID no. 12408838
MSALGTLSGGAAGVSGLLRLRRRAAPAPAIAAPSHLPAGTVKCAAAVPDAAPIVWGRQLRPALLLPAALLPSLQPARRHTLQPPAAAAESAGEAKSVGFLEKYPALVTGFFFFMWYFLNVIFNILNKKIYNYFPYPYFVSLIHLVVGVVYCLISWSVGLPKRAPINGTLLKLLFPVALCHGIGHITSNVSFAAVAVSFAHTIKALEPFFSAAATQFILGQQVPFSLWLSLAPVVIGVSMASLTELSFNWTGFINAMISNISFTYRSIYSKKAMTDMDSTNVYAYISIIALIVCIPPALIFEGPKLMQHGFSDAIAKVGLTKFVSDLFLVGLFYHLYNQIATNTLERVAPLTHAVGNVLKRVFVIGFSIIVFGNKISTQTGIGTSIAIAGVAMYSYIKAKIEEEKRKKSA

SEQ ID NO: 2603 - protein, 296 aa, Zea mays subsp. mays
  peptide (1)..(296): Ceres Seq. ID no. 12408839
MWYFLNVIFNILNKKIYNYFPYPYFVSLIHLVVGVVYCLISWSVGLPKRAPINGTLLKLLFPVALCHGIGHITSNVSFAAVAVSFAHTIKALEPFFSAAATQFILGQQVPFSLWLSLAPVVIGVSMASLTELSFNWTGFINAMISNISFTYRSIYSKKAMTDMDSTNVYAYISIIALIVCIPPALIFEGPKLMQHGFSDAIAKVGLTKFVSDLFLVGLFYHLYNQIATNTLERVAPLTHAVGNVLKRVFVIGFSIIVFGNKISTQTGIGTSIAIAGVAMYSYIKAKIEEEKRKKSA

SEQ ID NO: 2604 - DNA, 1266 bp, Zea mays subsp. mays
  misc_feature (1)..(1266): Ceres Seq. ID no. 12366644
  misc_feature (1)..(1266): Ortholog of  Ceres SEQ ID NO 13594727 as cited in SEQ ID NO 52169
  misc_feature (1)..(1266): Ortholog of  Ceres SEQ ID NO 13596969 as cited in SEQ ID NO 63375
  misc_feature (1)..(1266): Ortholog of  Ceres SEQ ID NO 13584480 as cited in SEQ ID NO 64751
  misc_feature (1)..(1266): Ortholog of  Ceres SEQ ID NO 13597519 as cited in SEQ ID NO 64759
  misc_feature (1)..(1266): Ortholog of  Ceres SEQ ID NO 15170183 as cited in SEQ ID NO 65667
  misc_feature (1)..(1266): Ortholog of  Ceres SEQ ID NO 13596362 as cited in SEQ ID NO 67877
  misc_feature (1)..(1266): Ortholog of  Ceres SEQ ID NO 13587054 as cited in SEQ ID NO 0
acacactcgctctgctactagctactagcagtagagcagtagaggagagagcatctacctagcgccgtcggacggatcggagctacctcaccgccgaccgcgcgcgaagagatcgatggctcatgctgctacgctcgctgctgcagccgcggtcgtcgtcctcatcgtcgtctgctgctgctcctcttcggaggccgccagccacagcgccaacgcgaggcagccgccgctggcgcccggcctgtccttggacttctacaagcggagctgcgcccagggcggagtccgtcgtgcggaggttcgtgcaggacgccgtgcgcagggacgccggcctcgccgccggcctcctccgcctccacttccacgactgcttcgtccagggctgcgacgcgtccgtgctcctggacggctcagccaccggccccgggcgagcagcaggcgccgcccaacctcacgctgcgccccaccgcgttcaaggccatcaacgacatccacgaccgcctccagaaggagtgcggtggcgcagtcgtgtcctgctccgacgtcctcgcgctcgccgccagggactcagtcgtcgtgtccggaggtcccagctacaaggtgccgctgggtcggcgcgacagcgcgagcttcgcgacgcgagaggacgtcctgagcgggctcccgccgccgacggccgccgtgccggcgcttctcgccgtgctgtcaacctggacgcgacggacctggtggcgctgtcgggcggccacaccatcgggctgggccactgcgcgtccttcgagagccgcctgttcccgcgccaggacccgacgctgaacgccaccttcgccggccacctgcgccggacctgcccggccaagggcaccgaccgccggacgccgctggacgtgcgcacgcccgacgcgttcgacaacaagtactacgtcaacctggtgaaccgtgaggggctcttcacctccgaccaggacctcttcagcaaccccggcaccaggcccctcgtcgagaagttcgcgcgcagccagagagacttcttcgaccagttcgccttctccgtggtgaagatggggcagatcaaggtgctcacgggcgcgcaggggcagatccgcaggaactgctccgcccgcaacgcaggcatgacgtggtccgtcgtcgacgaggctgcacagcagagcttcgtgttctagactttgtacgtactagctggctactgtgtgggcggcggtgtcctgtcaacagaacagatagctagcagtagcactggacggc

SEQ ID NO: 2605 - protein, 353 aa, Zea mays subsp. mays
  peptide (1)..(353): Ceres Seq. ID no. 12366645
MLLRSLLQPRSSSSSSSAAAPLRRPPATAPTRGSRRWRPACPWTSTSGAAPRAESVVRRFVQDAVRRDAGLAAGLLRLHFHDCFVQGCDASVLLDGSATGPGRAAGAAQPHAAPHRVQGHQRHPRPPPEGVRWRSRVLLRRPRARRQGLSRRVRRSQLQGAAGSARQRELRDARGRPERAPAADGRRAGASRRAVNLDATDLVALSGGHTIGLGHCASFESRLFPRQDPTLNATFAGHLRRTCPAKGTDRRTPLDVRTPDAFDNKYYVNLVNREGLFTSDQDLFSNPGTRPLVEKFARSQRDFFDQFAFSVVKMGQIKVLTGAQGQIRRNCSARNAGMTWSVVDEAAQQSFVF

SEQ ID NO: 2606 - protein, 179 aa, Zea mays subsp. mays
  peptide (1)..(179): Ceres Seq. ID no. 12366646
MAHAATLAAAAAVVVLIVVCCCSSSEAASHSANARQPPLAPGLSLDFYKRSCAQGGVRRAEVRAGRRAQGRRPRRRPPPPPLPRLLRPGLRRVRAPGRLSHRPRASSRRRPTSRCAPPRSRPSTTSTTASRRSAVAQSCPAPTSSRSPPGTQSSCPEVPATRCRWVGATARASRRERTS

SEQ ID NO: 2607 - DNA, 1075 bp, Zea mays subsp. mays
  misc_feature (1)..(1075): Ceres Seq. ID no. 12365239
  misc_feature (1)..(1075): Ortholog of  Ceres SEQ ID NO 13656460 as cited in SEQ ID NO 65861
aatcagctaagatagctgcaaaacaagcgagttacttacaaccaaacagaagggtagaaaccacctgaagccatgtgcattgctgcatggatttggcaggctcaccctgtgcaccaactcctcctgcttctcaacagagatgagttccacagcaggcctacaaaagcagtaggatggtggggtgaaggctcaaagaagatccttggtggcagggatgtgcttggtggaggaacatggatggggtgcaccaaggatggaaggcttgccttcctgaccaatgtgcttgaaccagatgccatgcccggtgcacggactaggggagatctgcctctcaaattcctgcagagcaacaagagcccactcgaagttgcaactgaagtggcagaagaagctgatgaatacaatggcttcaacctcatactagctgatctaacaacaaatatcatggtttatgtgtcaaaccggcctaagggtcagcctgcaacaattcaactcgtgtcaccaggactccatgtgctgtccaatgcaaggctagatagcccttggcagaaggcaattctcctcggtaaaaacttcagggagcttcttagggagcatggtgctgatgaggttgaagtgaaggatatagttgagaggctaatgactgacaccacaaaggctgacaaagatagactgccaaacactggttgtgatcccaactgggagcatggtctgagctccatcttcattgaggtgcaaactgaccaagggccctatgggacacggagcacagccgttttatcagtgaactatgatggcgaagctagcttgtacgagaagtatcttgagagtggtatatggaaggatcacacagtgagttaccagatagagtagtaggcattgcacaggaaaagttggcgacctcaaataaatagaaatatgaagcagacacaattgtgaatttcattatttccctgatctctagtcatcttcgtgattatctaagatcctaccataatgccaattacattattcactgtaagcagatttttcacttgacgataaaatgtcaaccaaaactttggttttcttcgtc

SEQ ID NO: 2608 - protein, 266 aa, Zea mays subsp. mays
  peptide (1)..(266): Ceres Seq. ID no. 12365240
MCIAAWIWQAHPVHQLLLLLNRDEFHSRPTKAVGWWGEGSKKILGGRDVLGGGTWMGCTKDGRLAFLTNVLEPDAMPGARTRGDLPLKFLQSNKSPLEVATEVAEEADEYNGFNLILADLTTNIMVYVSNRPKGQPATIQLVSPGLHVLSNARLDSPWQKAILLGKNFRELLREHGADEVEVKDIVERLMTDTTKADKDRLPNTGCDPNWEHGLSSIFIEVQTDQGPYGTRSTAVLSVNYDGEASLYEKYLESGIWKDHTVSYQIE

SEQ ID NO: 2609 - protein, 211 aa, Zea mays subsp. mays
  peptide (1)..(211): Ceres Seq. ID no. 12365241
MGCTKDGRLAFLTNVLEPDAMPGARTRGDLPLKFLQSNKSPLEVATEVAEEADEYNGFNLILADLTTNIMVYVSNRPKGQPATIQLVSPGLHVLSNARLDSPWQKAILLGKNFRELLREHGADEVEVKDIVERLMTDTTKADKDRLPNTGCDPNWEHGLSSIFIEVQTDQGPYGTRSTAVLSVNYDGEASLYEKYLESGIWKDHTVSYQIE

SEQ ID NO: 2610 - protein, 191 aa, Zea mays subsp. mays
  peptide (1)..(191): Ceres Seq. ID no. 12365242
MPGARTRGDLPLKFLQSNKSPLEVATEVAEEADEYNGFNLILADLTTNIMVYVSNRPKGQPATIQLVSPGLHVLSNARLDSPWQKAILLGKNFRELLREHGADEVEVKDIVERLMTDTTKADKDRLPNTGCDPNWEHGLSSIFIEVQTDQGPYGTRSTAVLSVNYDGEASLYEKYLESGIWKDHTVSYQIE

SEQ ID NO: 2611 - DNA, 1174 bp, Zea mays subsp. mays
  misc_feature (1)..(1174): Ceres Seq. ID no. 12414814
  misc_feature (1)..(1174): Ortholog of  Ceres SEQ ID NO 14313397 as cited in SEQ ID NO 58774
gactctatcccgttcccttccgtccctcgtcacgctcacgaagcacgctgtcgtcttgcgggntctcgcccgtcgccccccgagccccgaaaccaaagccgagccgagagcccgagccccgccccggacctcatcttctcctcgtcggtttcacccctccaccacctccatggggtcgtcggaggccgacgaggaccagctcctcaagagcttcctcgcggaggtcagcgaggccgagcgggacaacgaagtgctgaggatacttggttgcttcaagttaaaccccttcgagcatcttaagttgtcttttgattcatcaccagatgaggtgaaaaagcaatataggaagttgtcattgctggtccatcctgataaatgcaagcatcctcaggcacaagaagcttttgcagctctggcgaaagcacaacagctcctgcttgatccacaggaaagaggctacattcttgaccaagttactgctgcaaaagaagaattgagggcaaaacggaaaaaggagctgaagaaagacagtgcgtccaagataaaatctcttgtagatgagggaaaatatgaagagcagtttgaacgatcggatggatttcagcagcaattaataattaaagtacgtgaaattttgaccgacaaagaatggcgtaggagaaaaatgcaaatgaggatatcagaggaagaaggaagacttaagaaggatgaggaggaaacaaaagagatgtggaagaggaagagagagcatgaagagaagtgggaggagaccagagacaagcgggtctccagctggagggatttcatgaagacaggaaagaagggacggaaaggtgaaatcaagcccccaaaactgaagactgaagatccgaacaaatcttatgtgcaaaggccagtaaagcgaaactgagtggaatgtcagcaatcaaagaacatccggtagcggcctttcatctcaccagattagagctgcaacccttcaatgttgtacttgtcctgaatgtggtaaggttcaattacgcccgctggggaaacagaacggaacagagcagattttacccgtattgctagctagagtgatttggtttgatgtactcatcatccgtctgaagattttactgggaaaaaaagtacaaacttttccgttggaaaagaacctaatgaagtgaatgtt

SEQ ID NO: 2612 - protein, 302 aa, Zea mays subsp. mays
  peptide (1)..(302): Ceres Seq. ID no. 12414815
  misc_feature (21)..(21): Xaa is any aa, unknown or other
TLSRSLPSLVTLTKHAVVLRXLARRPPSPETKAEPRARAPPRTSSSPRRFHPSTTSMGSSEADEDQLLKSFLAEVSEAERDNEVLRILGCFKLNPFEHLKLSFDSSPDEVKKQYRKLSLLVHPDKCKHPQAQEAFAALAKAQQLLLDPQERGYILDQVTAAKEELRAKRKKELKKDSASKIKSLVDEGKYEEQFERSDGFQQQLIIKVREILTDKEWRRRKMQMRISEEEGRLKKDEEETKEMWKRKREHEEKWEETRDKRVSSWRDFMKTGKKGRKGEIKPPKLKTEDPNKSYVQRPVKRN

SEQ ID NO: 2613 - protein, 246 aa, Zea mays subsp. mays
  peptide (1)..(246): Ceres Seq. ID no. 12414816
MGSSEADEDQLLKSFLAEVSEAERDNEVLRILGCFKLNPFEHLKLSFDSSPDEVKKQYRKLSLLVHPDKCKHPQAQEAFAALAKAQQLLLDPQERGYILDQVTAAKEELRAKRKKELKKDSASKIKSLVDEGKYEEQFERSDGFQQQLIIKVREILTDKEWRRRKMQMRISEEEGRLKKDEEETKEMWKRKREHEEKWEETRDKRVSSWRDFMKTGKKGRKGEIKPPKLKTEDPNKSYVQRPVKRN

SEQ ID NO: 2614 - DNA, 903 bp, Zea mays subsp. mays
  misc_feature (1)..(903): Ceres Seq. ID no. 12343059
  misc_feature (1)..(903): Ortholog of  Ceres SEQ ID NO 12612272 as cited in SEQ ID NO 55946
  misc_feature (1)..(903): Ortholog of  Ceres SEQ ID NO 15169960 as cited in SEQ ID NO 57591
acagcggcgtcgggtctatccgggtctatccgcgaacacgtgagaactctccagaaactgctttctcctccacttcatctctctcgctttccctctataaaaagaccccttctaggaattgagggagacagcaagcagcgatccgaagctcaatcaattcactcaaacctcttccccaaatcttcgattagattctcgttgacaagaagactagaaccgaacctgaccatgtcgctgatccgccgcagcaacgtgttcgatcccttctccctcgacctctgggacccctttgagggcttccccttcggctccggcaacagcagcagtctcttcccctcgttcccgcggaccagctcggagaccgcggccttcgctggcgcgcggatcgactggaaggagactccagaggcgcacgtgttcaaggccgacgtaccggggctgaagaaggaggaggtcaaggtggaggtcgaggacggcaacgtccttcagatcagcggcgagcgcaacaaggagcaggaggagaagacggacaccctggcaccgcgtggagcggagcagcgggaggttcctgcgcaggttccgactgcccgagaacgccaagacggagcagatcacggccgccatggagaacggcgtgcttacagtcactgtgccgaaggaggacgccaagaagcctgaagtgaagtccattcagatctccggctagacctcggtctgcggtcgtcgtacctgcgtggtttgaggaacggcagttcgcctcggtcgttctgtgaaataaaattgggttacaagaattatggcgtttgtcaatatggtcgtaatgtcgtaggatggtggaatgtggtcacaaactttgcgtatgttgggtctacttgtggtgtctgaatctatgtatggatgtcg

SEQ ID NO: 2615 - protein, 225 aa, Zea mays subsp. mays
  peptide (1)..(225): Ceres Seq. ID no. 12343060
TAASGLSGSIREHVRTLQKLLSPPLHLSRFPSIKRPLLGIEGDSKQRSEAQSIHSNLFPKSSIRFSLTRRLEPNLTMSLIRRSNVFDPFSLDLWDPFEGFPFGSGNSSSLFPSFPRTSSETAAFAGARIDWKETPEAHVFKADVPGLKKEEVKVEVEDGNVLQISGERNKEQEEKTDTLAPRGAEQREVPAQVPTARERQDGADHGRHGERRAYSHCAEGGRQEA

SEQ ID NO: 2616 - protein, 149 aa, Zea mays subsp. mays
  peptide (1)..(149): Ceres Seq. ID no. 12343061
MSLIRRSNVFDPFSLDLWDPFEGFPFGSGNSSSLFPSFPRTSSETAAFAGARIDWKETPEAHVFKADVPGLKKEEVKVEVEDGNVLQISGERNKEQEEKTDTLAPRGAEQREVPAQVPTARERQDGADHGRHGERRAYSHCAEGGRQEA

SEQ ID NO: 2617 - DNA, 1341 bp, Zea mays subsp. mays
  misc_feature (1)..(1341): Ceres Seq. ID no. 12352079
  misc_feature (1)..(1341): Ortholog of  Ceres SEQ ID NO 13595919 as cited in SEQ ID NO 67751
actgcaactctgcgagtgccagaaaaaaaatactgccacccaccaccgcgccgccgcgccatggcttccccatccccttcctcgcccctccacccgcaccagcacccacctcctccgaatgttcaccaccaattccaatccctaccgccttcgatgccgccaccgccgccgtcaacggcgctgccaaaggcgctcgaccttgaggttaccgtcgtctgcgggaagcacctgaagaatgtcaactggcgccgtggcgacctccgtgcctacgtcgtggtgtaccttgacccctcccgccgcgccgctacccgccccgacgacggcggcgggtgcaaaccaacctggaacgagcgcctcgtcctcccgcttccgccccacctctccccgcacgacccctccatcctcctgtccctcgacgttttccactctaagccctccgattcgcccaagccgctcgtcggatccgcccgctctcctctccgcgacctcctcttccccgcaaaccctaaccctagccacgatcccgcagcctccgctctcgtcagcctgccactcctccgcccttccggccgcccacaggggaagatccggatccgcgtcgccatccgcgagcgctcgccgccgcctccggagccgcaataccctccgccttccagctccccgtactactttccaccgcctcctcccgcctactcggccccgcctcagtacggatctgaccagtactatcgccctagtggatactactctgcacctgcacctccaccacatccgtatgagtacaccggagggccctctgcaccggtggactacaacaggcaatatgagcagagagggaggactggggcccgctggtagtggcagtgggaacggaaggtatggagcaggcactgggcttgcggtgggtgctgtggctggagccctcgggggtctagcaattgatgaagcggtgaagtacaaggaggataagggtgcagaacgggtggaagagaaggtggtacctgctgggagggatgattacagcgagtatcgtggcgactattgaaccgaagtttgtgtgagtgtggaagaaagcgctgtgagttgattcttcttccatgcctatgtgggaataaatccagtgttagtctatggctttccccatgtatgtatatatatttgtgatgttgtgaattattctgatacctataaactactccttcggttcttgtttatttgtcgctgtttagttcaaaaatgaactagcgggcgacaaatattcgagaacggaggtagtacaatgttttatgatgacagatttggtgtgtaacataaatatctcatggcttgctttgatggtgc

SEQ ID NO: 2618 - protein, 285 aa, Zea mays subsp. mays
  peptide (1)..(285): Ceres Seq. ID no. 12352080
TATLRVPEKKYCHPPPRRRAMASPSPSSPLHPHQHPPPPNVHHQFQSLPPSMPPPPPSTALPKALDLEVTVVCGKHLKNVNWRRGDLRAYVVVYLDPSRRAATRPDDGGGCKPTWNERLVLPLPPHLSPHDPSILLSLDVFHSKPSDSPKPLVGSARSPLRDLLFPANPNPSHDPAASALVSLPLLRPSGRPQGKIRIRVAIRERSPPPPEPQYPPPSSSPYYFPPPPPAYSAPPQYGSDQYYRPSGYYSAPAPPPHPYEYTGGPSAPVDYNRQYEQRGRTGARW

SEQ ID NO: 2619 - protein, 269 aa, Zea mays subsp. mays
  peptide (1)..(269): Ceres Seq. ID no. 12352081
MSTGAVATSVPTSWCTLTPPAAPLPAPTTAAGANQPGTSASSSRFRPTSPRTTPPSSCPSTFSTLSPPIRPSRSSDPPALLSATSSSPQTLTLATIPQPPLSSACHSSALPAAHRGRSGSASPSASARRRLRSRNTLRLPAPRTTFHRLLPPTRPRLSTDLTSTIALVDTTLHLHLHHIRMSTPEGPLHRWTTTGNMSREGGLGPAGSGSGNGRYGAGTGLAVGAVAGALGGLAIDEAVKYKEDKGAERVEEKVVPAGRDDYSEYRGDY

SEQ ID NO: 2620 - protein, 265 aa, Zea mays subsp. mays
  peptide (1)..(265): Ceres Seq. ID no. 12352082
MASPSPSSPLHPHQHPPPPNVHHQFQSLPPSMPPPPPSTALPKALDLEVTVVCGKHLKNVNWRRGDLRAYVVVYLDPSRRAATRPDDGGGCKPTWNERLVLPLPPHLSPHDPSILLSLDVFHSKPSDSPKPLVGSARSPLRDLLFPANPNPSHDPAASALVSLPLLRPSGRPQGKIRIRVAIRERSPPPPEPQYPPPSSSPYYFPPPPPAYSAPPQYGSDQYYRPSGYYSAPAPPPHPYEYTGGPSAPVDYNRQYEQRGRTGARW

SEQ ID NO: 2621 - DNA, 1571 bp, Zea mays subsp. mays
  misc_feature (1)..(1571): Ceres Seq. ID no. 12345899
  misc_feature (1)..(1571): Ortholog of  Ceres SEQ ID NO 14307257 as cited in SEQ ID NO 54628
aacacatcacaagagagccaagggctagccgatcaacaacaccactagcctctcctatcctagctagctagcttccaccggccggaagaaaaaaaaatggtggcgagcaaggccgccccgttcgacgaggtgtcctcggtggaggcgggggcctacgggggccgcgacgacgacgggcggccgcgccggacgggcacggtgtggacggccagcgcccacattatcacggccgtcatcggctccggggtgctctcgctggcgtgggccatcgcgcagctgggctgggccgcgggccccgccgtcatgctgctcttcgccgtcgtcatctactacacctccacgctgctcgccgagtgctaccgctccggcgacccagtggcggggaagcgcaactacacctacatggacgccgtccgcgcaagcctcggcggcgccaagcgccatcaagagggcggactgcttccacgccaagggccacaagcacgcgtgccgcagctccagcaacccctacatgatcctcttcggcgtcgccgaggtcgtcttctcgcagataccggacttcgaccagatttggtggctctccatcgtcgccgccgtcatgtccttcacctacgccaccatcggcctcgtcctcggcatcatgcagaccgtcgccaacgggggcttccagggcagcctcaccgggatcagcatcggcgccggcgtcaccccgacggagaaggtctggcggagcctgcaggccttcggcaacatcgccttcgcctattcctactccatcatcctcatcgagatccaggacacggtcaaggcgccgccgccatccgaggccaaggtgatgaagagggcgaccatggtgagcgtggccaccacaacggtgttctacatgctgtgcgggtgcatgggctacgccgccttcggcgacgccgcgccggacaacctcctcaccggcttcggcttctacgagcccttctggctgctggacatcgccaacgtcgccatcgtcgtgcacctcgtcggcgcctaccaggtcttctgccagccgctcttcgccttcgtcgagaagtgggcagcggccacgtggcccgacagcgccttcatcgcccgggagttccgcgtgggccccttcgcgctcagcctgttccgcctcacctggcgcacggcgttcgtgtgcctcaccaccgtcgccgccatgctgctccccttcttcggcgacgtcgtcggcctgctcggcgccgtctccttctggccgctcaccgtctacttccccatcgagatgtacgtcgtgcagcgcgccgtgcgcaggtggagcacgcactggatctgcctccagatgctcagcgctgcgtgcctcctcgtgtccgtcgccgccgcagcgggctccatcgccgacgtcatcggcgcgctcaaggtgtaccgcccgttcagcggctagttcagataggggcccaacgaggcgtgtgccgtgcacatgagtagtgccagtggtatctctactggtcggggtgctacattgactgtggggtcccgggttgttgtaacttgtaagatatagccaaatgaaaaacaaagct

SEQ ID NO: 2622 - protein, 459 aa, Zea mays subsp. mays
  peptide (1)..(459): Ceres Seq. ID no. 12345900
MVASKAAPFDEVSSVEAGAYGGRDDDGRPRRTGTVWTASAHIITAVIGSGVLSLAWAIAQLGWAAGPAVMLLFAVVIYYTSTLLAECYRSGDPVAGKRNYTYMDAVRASLGGAKRHQEGGLLPRQGPQARVPQLQQPLHDPLRRRRGRLLADTGLRPDLVALHRRRRHVLHLRHHRPRPRHHADRRQRGLPGQPHRDQHRRRRHPDGEGLAEPAGLRQHRLRLFLLHHPHRDPGHGQGAAAIRGQGDEEGDHGERGHHNGVLHAVRVHGLRRLRRRRAGQPPHRLRLLRALLAAGHRQRRHRRAPRRRLPGLLPAALRLRREVGSGHVARQRLHRPGVPRGPLRAQPVPPHLAHGVRVPHHRRRHAAPLLRRRRRPARRRLLLAAHRLLPHRDVRRAARRAQVEHALDLPPDAQRCVPPRVRRRRSGLHRRRHRRAQGVPPVQRLVQIGAQRGVCRAHE

SEQ ID NO: 2623 - protein, 390 aa, Zea mays subsp. mays
  peptide (1)..(390): Ceres Seq. ID no. 12345901
MLLFAVVIYYTSTLLAECYRSGDPVAGKRNYTYMDAVRASLGGAKRHQEGGLLPRQGPQARVPQLQQPLHDPLRRRRGRLLADTGLRPDLVALHRRRRHVLHLRHHRPRPRHHADRRQRGLPGQPHRDQHRRRRHPDGEGLAEPAGLRQHRLRLFLLHHPHRDPGHGQGAAAIRGQGDEEGDHGERGHHNGVLHAVRVHGLRRLRRRRAGQPPHRLRLLRALLAAGHRQRRHRRAPRRRLPGLLPAALRLRREVGSGHVARQRLHRPGVPRGPLRAQPVPPHLAHGVRVPHHRRRHAAPLLRRRRRPARRRLLLAAHRLLPHRDVRRAARRAQVEHALDLPPDAQRCVPPRVRRRRSGLHRRRHRRAQGVPPVQRLVQIGAQRGVCRAHE

SEQ ID NO: 2624 - protein, 357 aa, Zea mays subsp. mays
  peptide (1)..(357): Ceres Seq. ID no. 12345902
MDAVRASLGGAKRHQEGGLLPRQGPQARVPQLQQPLHDPLRRRRGRLLADTGLRPDLVALHRRRRHVLHLRHHRPRPRHHADRRQRGLPGQPHRDQHRRRRHPDGEGLAEPAGLRQHRLRLFLLHHPHRDPGHGQGAAAIRGQGDEEGDHGERGHHNGVLHAVRVHGLRRLRRRRAGQPPHRLRLLRALLAAGHRQRRHRRAPRRRLPGLLPAALRLRREVGSGHVARQRLHRPGVPRGPLRAQPVPPHLAHGVRVPHHRRRHAAPLLRRRRRPARRRLLLAAHRLLPHRDVRRAARRAQVEHALDLPPDAQRCVPPRVRRRRSGLHRRRHRRAQGVPPVQRLVQIGAQRGVCRAHE

SEQ ID NO: 2625 - protein, 306 aa, Zea mays subsp. mays
  peptide (1)..(306): Ceres Seq. ID no. 12345903
MILFGVAEVVFSQIPDFDQIWWLSIVAAVMSFTYATIGLVLGIMQTVANGGFQGSLTGISIGAGVTPTEKVWRSLQAFGNIAFAYSYSIILIEIQDTVKAPPPSEAKVMKRATMVSVATTTVFYMLCGCMGYAAFGDAAPDNLLTGFGFYEPFWLLDIANVAIVVHLVGAYQVFCQPLFAFVEKWAAATWPDSAFIAREFRVGPFALSLFRLTWRTAFVCLTTVAAMLLPFFGDVVGLLGAVSFWPLTVYFPIEMYVVQRAVRRWSTHWICLQMLSAACLLVSVAAAAGSIADVIGALKVYRPFSG

SEQ ID NO: 2626 - DNA, 1601 bp, Zea mays subsp. mays
  misc_feature (1)..(1601): Ceres Seq. ID no. 12358266
  misc_feature (1)..(1601): Ortholog of  Ceres SEQ ID NO 14313038 as cited in SEQ ID NO 59520
  misc_feature (1)..(1601): Ortholog of  Ceres SEQ ID NO 13595464 as cited in SEQ ID NO 59792
  misc_feature (1)..(1601): Ortholog of  Ceres SEQ ID NO 14316416 as cited in SEQ ID NO 60078
atccacttcgcccgcccgcccgctgcctgactgccattattgcctcccggtcttcgctgtccatccgaccgtccgtggcttctccctccggtccccgctacccgccccgccccgccgagaagcttcgggctagctagcaagctagctagccacctacccgtgctttggttcggttggttggcgccatagccattgccgaggagcgagggagcagccgggcgggcagtcaggaggcggtgagtaagcatgctgggagcgagccccaggggcaggaaggccgccgcgccgccggtgaagctggggtcggcgaaggaggcgccggcggccggtggagctggaggagggagcggcggcaaggtgctggcggaggaggtgtgggaggtgcggcccggcgggatgctggtgcagaagaggggcggcggcgacgacgagccgtcgcccaacgtgaagcccgtgcccaccatccgggtcaaggtcaagcacgccggcgtcacgcacgagatctacatcagttccgaggcctccttcggggagctgaagaagctggtggccgccaagacggggctgcaccccgacgaccagaaggtgctgtacaaggacagggagcgtgactccaaggcgttcctggacacggccggcgtcagggaccgctccaaggtggtggtgctggaggaccccgaggcccgcgcgcgccgcctcatcggggagcgccgcagcggccacctccagaaggccgccagggccgtcgccgcggtcaccgccgaggtcgacaagctggcacccaaggtggcggcgttggacgcgtcggtgcgcaggggggagaaggtcgcggagaaggatgtggtgcaggtgacggagctgctaatgaacgagctgctcaggctcgacgccgtggtcgcggacggcgacgtcaaggcgcagaggcggatgcaggtgaagcgcgtccagaagtacgtggagacgctggacgcggtggcggccaagaacgccgccctcgtcggcaagtccggcgagaaggccgcggccaagccggcgccggcgccggcgccggccccggccccgccgccgcggcagcagggacaggggcagacgcggtgggagatgttcgacctgctgtcgtcgctgccgtccacgtcctcggcctcgtcaacgacgaccgtgagctccacggcgtcctccggcgcgccgccgccgagccgcccggactggatgctcttctgacgagggagggacggcggccccgcaccggccggccaccggcgcgaaagcgaaaggcgagtgcttgatgcggtgcgatgcttgtgtgccaaaaattgcaccccaaatctggtagctcgtcgagtgtcctgatgaggccatgattgggcaggcggggggctatctagctttgggccacacagctgcattgcgttgggctgcatggtaccgtaccagccaattcgagttcatcaatcatgtggtgtgagagtattttttttcttcttcacctctcctttttctttccttccttttgagtttttttttccttctcctcctcctcctcttcttcttcttgttcatggaaggtttgggattcttttggagtgcatactatactattc

SEQ ID NO: 2627 - protein, 324 aa, Zea mays subsp. mays
  peptide (1)..(324): Ceres Seq. ID no. 12358267
MLGASPRGRKAAAPPVKLGSAKEAPAAGGAGGGSGGKVLAEEVWEVRPGGMLVQKRGGGDDEPSPNVKPVPTIRVKVKHAGVTHEIYISSEASFGELKKLVAAKTGLHPDDQKVLYKDRERDSKAFLDTAGVRDRSKVVVLEDPEARARRLIGERRSGHLQKAARAVAAVTAEVDKLAPKVAALDASVRRGEKVAEKDVVQVTELLMNELLRLDAVVADGDVKAQRRMQVKRVQKYVETLDAVAAKNAALVGKSGEKAAAKPAPAPAPAPAPPPRQQGQGQTRWEMFDLLSSLPSTSSASSTTTVSSTASSGAPPPSRPDWMLF

SEQ ID NO: 2628 - protein, 274 aa, Zea mays subsp. mays
  peptide (1)..(274): Ceres Seq. ID no. 12358268
MLVQKRGGGDDEPSPNVKPVPTIRVKVKHAGVTHEIYISSEASFGELKKLVAAKTGLHPDDQKVLYKDRERDSKAFLDTAGVRDRSKVVVLEDPEARARRLIGERRSGHLQKAARAVAAVTAEVDKLAPKVAALDASVRRGEKVAEKDVVQVTELLMNELLRLDAVVADGDVKAQRRMQVKRVQKYVETLDAVAAKNAALVGKSGEKAAAKPAPAPAPAPAPPPRQQGQGQTRWEMFDLLSSLPSTSSASSTTTVSSTASSGAPPPSRPDWMLF

SEQ ID NO: 2629 - DNA, 1325 bp, Zea mays subsp. mays
  misc_feature (1)..(1325): Ceres Seq. ID no. 12410620
  misc_feature (1)..(1325): Ortholog of  Ceres SEQ ID NO 14303263 as cited in SEQ ID NO 1224
  misc_feature (1)..(1325): Ortholog of  Ceres SEQ ID NO 13593955 as cited in SEQ ID NO 54278
  misc_feature (1)..(1325): Ortholog of  Ceres SEQ ID NO 14316263 as cited in SEQ ID NO 55294
  misc_feature (1)..(1325): Ortholog of  Ceres SEQ ID NO 13595567 as cited in SEQ ID NO 56760
  misc_feature (1)..(1325): Ortholog of  Ceres SEQ ID NO 15176751 as cited in SEQ ID NO 59719
  misc_feature (1)..(1325): Ortholog of  Ceres SEQ ID NO 14314092 as cited in SEQ ID NO 62788
  misc_feature (1)..(1325): Ortholog of  Ceres SEQ ID NO 13655302 as cited in SEQ ID NO 63307
  misc_feature (1)..(1325): Ortholog of  Ceres SEQ ID NO 13597380 as cited in SEQ ID NO 64054
  misc_feature (1)..(1325): Ortholog of  Ceres SEQ ID NO 12625474 as cited in SEQ ID NO 64169
  misc_feature (1)..(1325): Ortholog of  Ceres SEQ ID NO 13597502 as cited in SEQ ID NO 64681
actacaccagggcacgacgagcgttgcgtcgtgagtgtttgtgtttcagagctgagactgagagagagagagagaggtggtgatggctctgcaggcgcaggggacgcgggtgccgctggtcctggcgctcttcctcctcctggccggttgtggcagcgaggcgcagccgctggtgccggcgctgtttacgttcggtgactcgtcggtggacgtcgggaacaacgactacctccacaccatcatcaaggccaacttcccgccctacggcagggacttcgccaaccacgtcgccaccgggaggttctgcaacggcaagctggcgaccgacatcaccgccgacacgctggggttcactacctatcctgccgtgtacctcagcccacaggcgtcggggcagaacctcctcatcggcgccaacttcgcgtccgcggggtctgggtactacgaccacacggcacttatgtatcacgcgatcccgctgtcccagcagctggagtacttcagggagtaccagacgaagctggcggcggtggccggcgcggggcaggcgcgctccatcctcagcggcgcgctgtacatcgtcagcgccggcgccagcgacttcgtgcagaactactacataaacccgctgctgttcaagacgcagacggccgaccagttctccgaccgcctcgtggccatcttcggccgcaccgtgcaggagctctacggcatgggggcgcgccgcgtcggcgtcacgtcgctgccgccgctgggctgcctgccggcgtccatcacgctgttcgggcacggcgccgccgggtgcgtgtccaggctcaacagcgacgcgcagagcttcaaccggaagatgaacgccaccgtggacgcgctggcgcggcggtacccggacctcaagatcgccgtcttcgacatctacacgccgctgtacgacctggccacggacccccagtcgcagggcttcgcggaggcccggcggggatgctgcgggacgggcacggtggagaccaccgtgctcctctgcaaccccaagtccgtcgggacgtgccccaacgccacgtcctacgtcttctgggacgccgtccacccgtccgaggcggccaaccaggtcatcgctgactcgctcatcaccgagggcctcatcctcgtcacgtaatcatgcttttgttttggcttcaaatcgatcagactacacaaaagtcgtcgttcctaaacgtatactatgcctgtaaatttattcctcttgtttttcttatttgcgttgattaatgttttcggaagtataagcaacaacatgaatgaatgaatgaatgaatgaatggactcct

SEQ ID NO: 2630 - protein, 356 aa, Zea mays subsp. mays
  peptide (1)..(356): Ceres Seq. ID no. 12410621
MALQAQGTRVPLVLALFLLLAGCGSEAQPLVPALFTFGDSSVDVGNNDYLHTIIKANFPPYGRDFANHVATGRFCNGKLATDITADTLGFTTYPAVYLSPQASGQNLLIGANFASAGSGYYDHTALMYHAIPLSQQLEYFREYQTKLAAVAGAGQARSILSGALYIVSAGASDFVQNYYINPLLFKTQTADQFSDRLVAIFGRTVQELYGMGARRVGVTSLPPLGCLPASITLFGHGAAGCVSRLNSDAQSFNRKMNATVDALARRYPDLKIAVFDIYTPLYDLATDPQSQGFAEARRGCCGTGTVETTVLLCNPKSVGTCPNATSYVFWDAVHPSEAANQVIADSLITEGLILVT

SEQ ID NO: 2631 - protein, 230 aa, Zea mays subsp. mays
  peptide (1)..(230): Ceres Seq. ID no. 12410622
MYHAIPLSQQLEYFREYQTKLAAVAGAGQARSILSGALYIVSAGASDFVQNYYINPLLFKTQTADQFSDRLVAIFGRTVQELYGMGARRVGVTSLPPLGCLPASITLFGHGAAGCVSRLNSDAQSFNRKMNATVDALARRYPDLKIAVFDIYTPLYDLATDPQSQGFAEARRGCCGTGTVETTVLLCNPKSVGTCPNATSYVFWDAVHPSEAANQVIADSLITEGLILVT

SEQ ID NO: 2632 - DNA, 1360 bp, Zea mays subsp. mays
  misc_feature (1)..(1360): Ceres Seq. ID no. 12410616
  misc_feature (1)..(1360): Ortholog of  Ceres SEQ ID NO 14303631 as cited in SEQ ID NO 62864
aattactgtgcctttatcttcaacccaaaccatccattaccatattcctaagctatcatggtgcaccggacttccatagccgatgtgcatgtgatgtgcatggatctaagcccaaagaaacccaacaaggccagcgccagcgacggcggagcctactacgactggtcccccgccgatctgcccatgctcggcgttgcctccattggtgccgccaagctctgcctcaccgccggaggtcttgccctacccagctactccgactctgccaagatcgcctacgtcctccaaggcaaaggtatattcggcgtggttctcccggaggcgaccaaggagaaggtcatctccgtcaaggaaggcgacgcgctggcgctccccttcggcgtcgtcacctggtggcacaacaacgccgacgccgctatctccgacctcgtggtgctcttcctcggcgacacctccacgggccacaagccgggccagttcacaaacttccagctcaccggctccacgggcatcttcacgggcttctccacagagttcgttgcccgcgcatgggacctcacccaggacgacgccgccaagctcgtctccacccagcccggatccggcattgtcagggtcaaggacgggcacaagatgcccgaggcgcgcgacgaggacaggcagggcctggtcctcaactgcctagaggcgccgcttgacgtcgacatcaagaacggagggcgcgtcgtggtcctcaacacccagaacctgccgctcgtcaaggaggtcgggctcggtgctgaccttgtcaggatcgacgcccactccatgtgctcgcccggcttctcctgcgactccgcctaccaggtcacctacatcgtgcgcggcagtggccgcgtccaggttgttgggatcgacggcacgcgagtgctcgagactcgcgccgagggaggctgcctcttcatcgtgccaaggttcttcgttgtctcaaagatcgccgacgaaaccggcatggagtggttctccatcatcaccacccccaacccaatctttagccacttggcgggccggacatcggtgtggaaggcaatatctccggcggtcttgcagtcgtcgttcaacaccacgccggagatggagaagctgttccgtagcaagaggcttgactcggagatcttctttgcgccttcaaactgattcattcgccggtggaaattggtccatccatctcgagtaaacttggtgtcctgggtgtgttcttagcagcttcagtttagaataatcatgttatgtcttcatcatcagttttttagatcgcttcatgtaataataaacttgagatggtacacatgtttcttaattagttctcttggtatttttt

SEQ ID NO: 2633 - protein, 372 aa, Zea mays subsp. mays
  peptide (1)..(372): Ceres Seq. ID no. 12410617
MVHRTSIADVHVMCMDLSPKKPNKASASDGGAYYDWSPADLPMLGVASIGAAKLCLTAGGLALPSYSDSAKIAYVLQGKGIFGVVLPEATKEKVISVKEGDALALPFGVVTWWHNNADAAISDLVVLFLGDTSTGHKPGQFTNFQLTGSTGIFTGFSTEFVARAWDLTQDDAAKLVSTQPGSGIVRVKDGHKMPEARDEDRQGLVLNCLEAPLDVDIKNGGRVVVLNTQNLPLVKEVGLGADLVRIDAHSMCSPGFSCDSAYQVTYIVRGSGRVQVVGIDGTRVLETRAEGGCLFIVPRFFVVSKIADETGMEWFSIITTPNPIFSHLAGRTSVWKAISPAVLQSSFNTTPEMEKLFRSKRLDSEIFFAPSN

SEQ ID NO: 2634 - protein, 360 aa, Zea mays subsp. mays
  peptide (1)..(360): Ceres Seq. ID no. 12410618
MCMDLSPKKPNKASASDGGAYYDWSPADLPMLGVASIGAAKLCLTAGGLALPSYSDSAKIAYVLQGKGIFGVVLPEATKEKVISVKEGDALALPFGVVTWWHNNADAAISDLVVLFLGDTSTGHKPGQFTNFQLTGSTGIFTGFSTEFVARAWDLTQDDAAKLVSTQPGSGIVRVKDGHKMPEARDEDRQGLVLNCLEAPLDVDIKNGGRVVVLNTQNLPLVKEVGLGADLVRIDAHSMCSPGFSCDSAYQVTYIVRGSGRVQVVGIDGTRVLETRAEGGCLFIVPRFFVVSKIADETGMEWFSIITTPNPIFSHLAGRTSVWKAISPAVLQSSFNTTPEMEKLFRSKRLDSEIFFAPSN

SEQ ID NO: 2635 - protein, 358 aa, Zea mays subsp. mays
  peptide (1)..(358): Ceres Seq. ID no. 12410619
MDLSPKKPNKASASDGGAYYDWSPADLPMLGVASIGAAKLCLTAGGLALPSYSDSAKIAYVLQGKGIFGVVLPEATKEKVISVKEGDALALPFGVVTWWHNNADAAISDLVVLFLGDTSTGHKPGQFTNFQLTGSTGIFTGFSTEFVARAWDLTQDDAAKLVSTQPGSGIVRVKDGHKMPEARDEDRQGLVLNCLEAPLDVDIKNGGRVVVLNTQNLPLVKEVGLGADLVRIDAHSMCSPGFSCDSAYQVTYIVRGSGRVQVVGIDGTRVLETRAEGGCLFIVPRFFVVSKIADETGMEWFSIITTPNPIFSHLAGRTSVWKAISPAVLQSSFNTTPEMEKLFRSKRLDSEIFFAPSN

SEQ ID NO: 2636 - DNA, 1626 bp, Zea mays subsp. mays
  misc_feature (1)..(1626): Ceres Seq. ID no. 12358604
  misc_feature (1)..(1626): Ortholog of  Ceres SEQ ID NO 13600071 as cited in SEQ ID NO 0
acccaaaatttccccatctccgacctcccccttcctctccccctgccgctccccgcgccgagaaggagaaccccagccgccgcgcagcgcgccgcccatggcctcctcgtcggagaacgcggctgtgccgccggaggaggagccccaggccccgccgccgccggacacagagcctaccgaggcggcgcccggcgaggcggaggatgagccgcaaaccctagagcgggcgcagaagctcttcgacaggggttccaaggccatcgaggatgaggacttcgtcgacgccgtagactgtctcagccgagcgctcgagatcagggcttcacattatggagagctcgcaccggagtgtgccagcacatacttcaaatatggatgtgccctgctatacaaagctcaggaggagagtgatgttttgggaaatgttcccaagagcttgccaaatgaagactcagtgaagagtacagctactaaagatgacagtggaacctcaaaggtctctggtaccgatgcggaggatgctgcgtcatcagaaaaagttgatgctgaagaaggtcacaactcaaatggcaaaaatcaggagaatgggaatggtgaagttgagaaagatgatgacgacgtcgacgatgatgagaagatgggagatgaagaggataatgatttggatctttcttggaaaatgttggacattgctagggcaatagttgagaagagccaagataacactatggagaaagtaaaaatatattctgctcttgctgaagtggcaacggaaagagaggacatggacaactcactcagtgactatatgaaagctttatccatgttggagcatttggttgagcctgaccatcgtcgagttgtggaattaaacttccgcatttgtttggtttatgaactagtttccaagatcggagaagcaatttcatactgtgcaaaagcaatttcgctatgcaagtcacgcatacagagcctgaaaagttccaaggatgctttgttggctggtatagatggtgatgcatctgctgctgaagctgaaggaggctcagaaaaatctgccattgaaaaagagctagagcagcttactagcatattgcctgatcttgagaagaagcttgaggacctgtctgaagcaaacccaagcgctgacatggatgagatggtgaaggcaatcgtgtccagggtaactgatgtgatgccaaaagctgcatcttttacttcttcccagatggcaacctcaagcaatggattcgactcctcggttatgtctacggcagcgacaaccggaagctctggaagcaccgtgactgaccttggggttgtaggcagaggcgtcaaacgagctagcatcaagccgatctctgctgaacctgctgctaagaaacctgcacttgattcaccatctcaacaaggtgacagcagcatcaactctgaggttgttcctgcaacgcagactggagacgagtcagtatctaagtaaattacaatttcattagccctactgtaatgttaacttgctggaacatattagctgctatgtaaacgcttaagaagggactgctggggccatagactcatcgtgagctgaccattgaaatgttaaattgctgagatcatcatggcggt

SEQ ID NO: 2637 - protein, 492 aa, Zea mays subsp. mays
  peptide (1)..(492): Ceres Seq. ID no. 12358605
PKISPSPTSPFLSPCRSPRREGEPQPPRSAPPMASSSENAAVPPEEEPQAPPPPDTEPTEAAPGEAEDEPQTLERAQKLFDRGSKAIEDEDFVDAVDCLSRALEIRASHYGELAPECASTYFKYGCALLYKAQEESDVLGNVPKSLPNEDSVKSTATKDDSGTSKVSGTDAEDAASSEKVDAEEGHNSNGKNQENGNGEVEKDDDDVDDDEKMGDEEDNDLDLSWKMLDIARAIVEKSQDNTMEKVKIYSALAEVATEREDMDNSLSDYMKALSMLEHLVEPDHRRVVELNFRICLVYELVSKIGEAISYCAKAISLCKSRIQSLKSSKDALLAGIDGDASAAEAEGGSEKSAIEKELEQLTSILPDLEKKLEDLSEANPSADMDEMVKAIVSRVTDVMPKAASFTSSQMATSSNGFDSSVMSTAATTGSSGSTVTDLGVVGRGVKRASIKPISAEPAAKKPALDSPSQQGDSSINSEVVPATQTGDESVSK

SEQ ID NO: 2638 - protein, 460 aa, Zea mays subsp. mays
  peptide (1)..(460): Ceres Seq. ID no. 12358606
MASSSENAAVPPEEEPQAPPPPDTEPTEAAPGEAEDEPQTLERAQKLFDRGSKAIEDEDFVDAVDCLSRALEIRASHYGELAPECASTYFKYGCALLYKAQEESDVLGNVPKSLPNEDSVKSTATKDDSGTSKVSGTDAEDAASSEKVDAEEGHNSNGKNQENGNGEVEKDDDDVDDDEKMGDEEDNDLDLSWKMLDIARAIVEKSQDNTMEKVKIYSALAEVATEREDMDNSLSDYMKALSMLEHLVEPDHRRVVELNFRICLVYELVSKIGEAISYCAKAISLCKSRIQSLKSSKDALLAGIDGDASAAEAEGGSEKSAIEKELEQLTSILPDLEKKLEDLSEANPSADMDEMVKAIVSRVTDVMPKAASFTSSQMATSSNGFDSSVMSTAATTGSSGSTVTDLGVVGRGVKRASIKPISAEPAAKKPALDSPSQQGDSSINSEVVPATQTGDESVSK

SEQ ID NO: 2639 - protein, 280 aa, Zea mays subsp. mays
  peptide (1)..(280): Ceres Seq. ID no. 12358607
MGDEEDNDLDLSWKMLDIARAIVEKSQDNTMEKVKIYSALAEVATEREDMDNSLSDYMKALSMLEHLVEPDHRRVVELNFRICLVYELVSKIGEAISYCAKAISLCKSRIQSLKSSKDALLAGIDGDASAAEAEGGSEKSAIEKELEQLTSILPDLEKKLEDLSEANPSADMDEMVKAIVSRVTDVMPKAASFTSSQMATSSNGFDSSVMSTAATTGSSGSTVTDLGVVGRGVKRASIKPISAEPAAKKPALDSPSQQGDSSINSEVVPATQTGDESVSK

SEQ ID NO: 2640 - DNA, 1271 bp, Zea mays subsp. mays
  misc_feature (1)..(1271): Ceres Seq. ID no. 12343984
  misc_feature (1)..(1271): Ortholog of  Ceres SEQ ID NO 13596891 as cited in SEQ ID NO 62868
  misc_feature (1)..(1271): Ortholog of  Ceres SEQ ID NO 12617235 as cited in SEQ ID NO 63990
  misc_feature (1)..(1271): Ortholog of  Ceres SEQ ID NO 13655371 as cited in SEQ ID NO 68945
atccaaacaaaagtactacactgaactcaatcatcctcagcggaggaaagcagagcacggcacagcgagtcgcagagggatagatccgagcacaagcaggccccgatggcgacgacggcgacgaaccggcgggtgatcctcaaggagtacgtggagggatacccacgcgaggagcacatggagctgctccggggcgccgaggttcccctccgcctgacgggcgccgagccggccgggtccgtcctcgtcaggaacctctacctctcctgcgacccctacatgcggcccaagatgtcgcgcccgctgcgggagtcctacacggccgccttcgtcccgggcgacaccatcacgggctacggcgtcgcgcgcgtggtcgactcctccgacccgcgcctcgcgcccggggacctcgtctggggcatcaccggctgggaggactacagcgtcgtgacgccgcccgccaccaggctcctctccaagatctcccaccacggggccggggagggggcgggcgtgccgctgtcctactacaccggcatcctcggcatgccggggctcaccgcgtacgtgggcttccacgagatctgcgcgccgaagaagggcgagaccgtgttcgtgtccgccgcgtccggcgccgtcggccagctggtgggccagttcgccaggctcgccggctgccacgtcgtcggcagcgccgggtcccgggagaaggtggagctgctcaagaccaggttcggcttccacgacgccttcaactacaaggaggagcccgacctcggcgccgcgctcaagcgctgcttccccgacggcatcgacatctacttcgagaacgtcggcggcgccatgctcgacgccgtcctgctcaacatgcgcgtgcacggacggatcgccgtctgcgggctcatctcgcagtacaacctggcggacggggagaaggacgccgtgcgcaacctcgccgccgtcatctccaagcgcctccgcctgcaggggttcatcgagcccgaccacaagcacctctacccgcagtacgaggcgtgggtgctgccgtacatcagggacggcacgctcgcctacgtcgaggacgtcgccgaggggctcgagagcgcgcccaaggcgctcataggactcttccacggtcgcaacgtcggaaagcagctcgtccgcgtcgccgacgacgagtgagacgcgcctcacttcgattggaccagacgatccatgtgtcgctgttgctatgtttcgattccccattttcatgaataattaattgtgcc

SEQ ID NO: 2641 - protein, 358 aa, Zea mays subsp. mays
  peptide (1)..(358): Ceres Seq. ID no. 12343985
MATTATNRRVILKEYVEGYPREEHMELLRGAEVPLRLTGAEPAGSVLVRNLYLSCDPYMRPKMSRPLRESYTAAFVPGDTITGYGVARVVDSSDPRLAPGDLVWGITGWEDYSVVTPPATRLLSKISHHGAGEGAGVPLSYYTGILGMPGLTAYVGFHEICAPKKGETVFVSAASGAVGQLVGQFARLAGCHVVGSAGSREKVELLKTRFGFHDAFNYKEEPDLGAALKRCFPDGIDIYFENVGGAMLDAVLLNMRVHGRIAVCGLISQYNLADGEKDAVRNLAAVISKRLRLQGFIEPDHKHLYPQYEAWVLPYIRDGTLAYVEDVAEGLESAPKALIGLFHGRNVGKQLVRVADDE

SEQ ID NO: 2642 - protein, 334 aa, Zea mays subsp. mays
  peptide (1)..(334): Ceres Seq. ID no. 12343986
MELLRGAEVPLRLTGAEPAGSVLVRNLYLSCDPYMRPKMSRPLRESYTAAFVPGDTITGYGVARVVDSSDPRLAPGDLVWGITGWEDYSVVTPPATRLLSKISHHGAGEGAGVPLSYYTGILGMPGLTAYVGFHEICAPKKGETVFVSAASGAVGQLVGQFARLAGCHVVGSAGSREKVELLKTRFGFHDAFNYKEEPDLGAALKRCFPDGIDIYFENVGGAMLDAVLLNMRVHGRIAVCGLISQYNLADGEKDAVRNLAAVISKRLRLQGFIEPDHKHLYPQYEAWVLPYIRDGTLAYVEDVAEGLESAPKALIGLFHGRNVGKQLVRVADDE

SEQ ID NO: 2643 - protein, 300 aa, Zea mays subsp. mays
  peptide (1)..(300): Ceres Seq. ID no. 12343987
MRPKMSRPLRESYTAAFVPGDTITGYGVARVVDSSDPRLAPGDLVWGITGWEDYSVVTPPATRLLSKISHHGAGEGAGVPLSYYTGILGMPGLTAYVGFHEICAPKKGETVFVSAASGAVGQLVGQFARLAGCHVVGSAGSREKVELLKTRFGFHDAFNYKEEPDLGAALKRCFPDGIDIYFENVGGAMLDAVLLNMRVHGRIAVCGLISQYNLADGEKDAVRNLAAVISKRLRLQGFIEPDHKHLYPQYEAWVLPYIRDGTLAYVEDVAEGLESAPKALIGLFHGRNVGKQLVRVADDE

SEQ ID NO: 2644 - DNA, 1411 bp, Zea mays subsp. mays
  misc_feature (1)..(1411): Ceres Seq. ID no. 12406802
  misc_feature (1)..(1411): Ortholog of  Ceres SEQ ID NO 15170956 as cited in SEQ ID NO 55034
gaagcatccgactaaaaagggccagggccagggccttcgcttgcttactactcctgcttaccacactctaccttgtctcttcacgtgcacacgacgcctcccccaatggctgcggtggcggaggaggaggtgatcgtcgtcggcgcggggcagtcggggctagcggtggcggcgtgcctgtccctgcgcggcgtgcgggcgctggtcctggagcgcgacgactgcgtggggtcgctgtggcggaagcgcgcctacgaccgcctccacctccacctcaccaagaagtactgcgcgctgccgcacgcgccgcacccggccgaggcccccgcgtacctgcaccgcgacgacttcgcgcggtacctggacgggtacgccgcgcggttcgccgtccgcccgcgcctccgccgcgaggtccggtcggcgcggtacgaccccgcgagcgcgcggtgggaggtggaggccgtggacctcggcacgggccaggccgagcggtacgcggcgaggttcctggtggtcgcgtccggggagaacgccgagaagttcctgccggaggtgcctgggctggaggcgttccccggccaggtgatgcacgcagtggagtaccggtcggccgaggggatgcgcgggaaggccgtgctcgtcgtggggtcgggcaactccggcatggagatcgcctacgacctcgccgccgccggcgccgtcacctccatcgtcgtccgaggcgagctccacctggtgaccaaggagatctggaacgtggcgatgacgctgtacccgtacctgcccgtgtgggttcatagacaagctggtgctgctcatgtgcgccgtggtgttcggcgacacgtcccggcacggcctccgccgccccgccatcgggcccttcaccatgaagctcaccaccccgggctaccccgtcgtggacgtcggcacctacgccaagatcaggagcggcgagatccgggtgctccccgccgccgtcaagagcgtccgcgggaacgtcgtcgagttcggggacggcagccgccaccctttcgacgccatcgtcttcgccaccggctaccggagcactgtcaggcggtggctcaagagcgaggacgggctggtcggtgacgacgggatggcggcgcggagctacccggagcactggaagggggaccacgggctgtactgcgcggggatggtgcggaggggcatctacggcagctgcgaggacgcggagctcatcgccgccgacatcagcaagctgctgcaccccaagcaggagcagggcaacggcgtctagctgcagctagcatttcgctttgttggttgcgatggaaacaagctctattgttgttgggttggttgataataatggttgcgtgaataattaaacgtgcttaattgagatggcctggcccagcctattcgt

SEQ ID NO: 2645 - protein, 334 aa, Zea mays subsp. mays
  peptide (1)..(334): Ceres Seq. ID no. 12406803
MAAVAEEEVIVVGAGQSGLAVAACLSLRGVRALVLERDDCVGSLWRKRAYDRLHLHLTKKYCALPHAPHPAEAPAYLHRDDFARYLDGYAARFAVRPRLRREVRSARYDPASARWEVEAVDLGTGQAERYAARFLVVASGENAEKFLPEVPGLEAFPGQVMHAVEYRSAEGMRGKAVLVVGSGNSGMEIAYDLAAAGAVTSIVVRGELHLVTKEIWNVAMTLYPYLPVWVHRQAGAAHVRRGVRRHVPARPPPPRHRALHHEAHHPGLPRRGRRHLRQDQERRDPGAPRRRQERPRERRRVRGRQPPPFRRHRLRHRLPEHCQAVAQERGRAGR

SEQ ID NO: 2646 - protein, 265 aa, Zea mays subsp. mays
  peptide (1)..(265): Ceres Seq. ID no. 12406804
SIRLKRARARAFACLLLLLTTLYLVSSRAHDASPNGCGGGGGGDRRRRGAVGASGGGVPVPARRAGAGPGARRLRGVAVAEARLRPPPPPPHQEVLRAAARAAPGRGPRVPAPRRLRAVPGRVRRAVRRPPAPPPRGPVGAVRPRERAVGGGGRGPRHGPGRAVRGEVPGGRVRGERREVPAGGAWAGGVPRPGDARSGVPVGRGDAREGRARRGVGQLRHGDRLRPRRRRRRHLHRRPRRAPPGDQGDLERGDDAVPVPARVGS

SEQ ID NO: 2647 - protein, 174 aa, Zea mays subsp. mays
  peptide (1)..(174): Ceres Seq. ID no. 12406805
MHAVEYRSAEGMRGKAVLVVGSGNSGMEIAYDLAAAGAVTSIVVRGELHLVTKEIWNVAMTLYPYLPVWVHRQAGAAHVRRGVRRHVPARPPPPRHRALHHEAHHPGLPRRGRRHLRQDQERRDPGAPRRRQERPRERRRVRGRQPPPFRRHRLRHRLPEHCQAVAQERGRAGR

SEQ ID NO: 2648 - DNA, 1734 bp, Zea mays subsp. mays
  misc_feature (1)..(1734): Ceres Seq. ID no. 12410608
  misc_feature (1)..(1734): Ortholog of  Ceres SEQ ID NO 13596509 as cited in SEQ ID NO 62004
  misc_feature (1)..(1734): Ortholog of  Ceres SEQ ID NO 13659971 as cited in SEQ ID NO 67565
  misc_feature (1)..(1734): Ortholog of  Ceres SEQ ID NO 13500385 as cited in SEQ ID NO 67583
atagaagaagagcaggcaggagctataagtaccccgcccccttccaccctctccttccacctccctcccttgctgcctcatccattccagagctgcgaagacagacagacagagagaaagagggatcgacggagcaaggcggggccgtgtccggtcacacacgagcgagccctctcggccgcgcgtttgtgaatggtgaacggcgagcggcgggcggacgcggagtgcacgcgggcgtcgctgctggggaggtatgagatcgggcggaccctcggcgagggcaacttcggcaaggtgaagtacgcgcgccacatcgccagcggcggccacttcgccatcaagatcctcgaccgcagcaagatcctctccctccgcatcgacgaccagatcaggagggagatcgggacgctcaagctgctcaagcacccgaatgtcgtccgcttgcacgaggttgctgccagtaaaacgaagatctacatggtgcttgagtttgtcaacggcggcgagctcttcgacaagatcgctatcaaggggaaactgtccgaacacgagggcaggaggctcttccagcagctaatcgacggcgtcagctattgccatgacagaggtgtctaccaccgagacctcaagccagagaatgtccttgttgatcggaagggcaccatcaagatctctgacttcggcctcagcgctctacctcaacatctcgggagtgacggacttctgcacacaacatgtggcagccccaactacatagctcctgaggttctgcaaaacagaggctatgacggctccttgtcagatctctggtcgtgtggggtgatcctctacgtgatgcttgttggctgccttcccctcgacgacaggaacctcgtcgttctttatcagaagattttcaagggagactgtcagatccccaagtggctttcgcctgccgcgcaggaccttctcaagaggatcctccaaccgaatccgatgaagaggatcaacgtcgcggggatcagggagcacgagtggttcaagaaggactacgtgcctgctgttccgcacgatgatgacgaagacgtccttcctagtccagctccctcgataaagccaatcgatgagccggcgcaagagaagtgttctcctatcaacgcttttcagttgatcgggatggcctcttcccttgacctttctggtttcttcgaggaagaggatgcagcgcaaagaaagattcggttcacttcgacgcacccacccaaggatctatttgacaagatcgagagcgttgtcatggagatgggattcaaagtccataggggggcaggcaagctcaaggtcttgaagaatagcaagtgttccaggaacccgtcatcattgttggtgtgcaccgaggtgtttgagctcggtccatcattatatgtcgtagagcttaggaaatcccacggagactctacgttgtatagacagctgtgcgaaaggctctccgatgagctaggtgcctgcaagacagaccagatcgcgaggactgaatcatcgagtgacgacctctcgagcgtcgatggcgaagcgttccctctatctgggttctgatcatattgctttccctgtgttgttttgggaacaggggatgaggaacatgctcgttcctgatgcaattctagattaggatcatgaatatagtgtacaaagccagcggcggcggcggtgcaaattagccaccgggttgaatataaataatatatatatatg

SEQ ID NO: 2649 - protein, 460 aa, Zea mays subsp. mays
  peptide (1)..(460): Ceres Seq. ID no. 12410609
MVNGERRADAECTRASLLGRYEIGRTLGEGNFGKVKYARHIASGGHFAIKILDRSKILSLRIDDQIRREIGTLKLLKHPNVVRLHEVAASKTKIYMVLEFVNGGELFDKIAIKGKLSEHEGRRLFQQLIDGVSYCHDRGVYHRDLKPENVLVDRKGTIKISDFGLSALPQHLGSDGLLHTTCGSPNYIAPEVLQNRGYDGSLSDLWSCGVILYVMLVGCLPLDDRNLVVLYQKIFKGDCQIPKWLSPAAQDLLKRILQPNPMKRINVAGIREHEWFKKDYVPAVPHDDDEDVLPSPAPSIKPIDEPAQEKCSPINAFQLIGMASSLDLSGFFEEEDAAQRKIRFTSTHPPKDLFDKIESVVMEMGFKVHRGAGKLKVLKNSKCSRNPSSLLVCTEVFELGPSLYVVELRKSHGDSTLYRQLCERLSDELGACKTDQIARTESSSDDLSSVDGEAFPLSGF

SEQ ID NO: 2650 - protein, 365 aa, Zea mays subsp. mays
  peptide (1)..(365): Ceres Seq. ID no. 12410610
MVLEFVNGGELFDKIAIKGKLSEHEGRRLFQQLIDGVSYCHDRGVYHRDLKPENVLVDRKGTIKISDFGLSALPQHLGSDGLLHTTCGSPNYIAPEVLQNRGYDGSLSDLWSCGVILYVMLVGCLPLDDRNLVVLYQKIFKGDCQIPKWLSPAAQDLLKRILQPNPMKRINVAGIREHEWFKKDYVPAVPHDDDEDVLPSPAPSIKPIDEPAQEKCSPINAFQLIGMASSLDLSGFFEEEDAAQRKIRFTSTHPPKDLFDKIESVVMEMGFKVHRGAGKLKVLKNSKCSRNPSSLLVCTEVFELGPSLYVVELRKSHGDSTLYRQLCERLSDELGACKTDQIARTESSSDDLSSVDGEAFPLSGF

SEQ ID NO: 2651 - protein, 246 aa, Zea mays subsp. mays
  peptide (1)..(246): Ceres Seq. ID no. 12410611
MLVGCLPLDDRNLVVLYQKIFKGDCQIPKWLSPAAQDLLKRILQPNPMKRINVAGIREHEWFKKDYVPAVPHDDDEDVLPSPAPSIKPIDEPAQEKCSPINAFQLIGMASSLDLSGFFEEEDAAQRKIRFTSTHPPKDLFDKIESVVMEMGFKVHRGAGKLKVLKNSKCSRNPSSLLVCTEVFELGPSLYVVELRKSHGDSTLYRQLCERLSDELGACKTDQIARTESSSDDLSSVDGEAFPLSGF

SEQ ID NO: 2652 - DNA, 1366 bp, Zea mays subsp. mays
  misc_feature (1)..(1366): Ceres Seq. ID no. 12342621
  misc_feature (1)..(1366): Ortholog of  Ceres SEQ ID NO 12609394 as cited in SEQ ID NO 52095
ctgatgtcacctgctgcctctctccaattctttcttcttctctccatgtaaaattatgtccaaacccaccctactcccgcgagcgcatttataaaataaagggcactgatgcctgctgtcttgttctgcccccctgttttccttttattctgctccgctctgttctcctgcgggcctggctgcgccggggaggcaaatgcttagcacaggacttggccttctggaatcccccgctaaaccataggcgtgttctattggaagttggaacaaaaccatggagagtgaaatcatggcctcctatgaaacaaagcagaattgcgaaattagggtatttgagagttcagacgagatggcaacagatctggcagagtttatttcacaagcttcagaaatttcagttaaggaaagaggatgctttgctattgccctttctggaggtcctcttgttagacatatgcggaagctctgtgaagcaccatacaacaagacccttgattggtctaaatggtacatcttctgggctgaagaacgtgcagttgcaaagaaccatgcagagagtaactacaaattaacaaaggaagaatttctctccaaggtgcctatccttaacggccacgtctactccatcaacgacaacgcgacggtggaagaggcagcgagcgactacgagttcgtgatgcggcagctggtgaaggtccggacggtgggagtctcggagagcaacgactgccccagattcgacctggtccttctgaacatcgggcctgacgggcacgtagcctcgctgttccccaaccacccagcgctggagctgaaaggcgactgggtgacctacatcaccgactccccggagcctccgcccgagaggatcaccttcacccttcccgtcataaactcggcgtccagcgtcgccattgttgccaccggagaggacagggcgagagccgtgtccttctccgtctctgcctgccaggaccaggaggaggaaggcccagcagacgacgacgctggaacgacgatgataccgccggctagcatggttcagccaaccgatgggaagttggtatggttcctggacgaggcggctgcttcgtctcttgaggcttcgaatggcgcttgcgagcatcaagaagggtactgagaacagactggatgctacctctgcgaacgccgcctacagtactctctggtttcttcagagtcgaaagtttgcatgcagttggatgtgggcaattaagagtgaagcggtttgtgtgtttttatgtcaagacctcacgcatatcgcgcggagtagctaagctcgaccgtatattggttgcgacgtatgatccttgttttatttaagtgtgttggcggttttatcctg

SEQ ID NO: 2653 - protein, 288 aa, Zea mays subsp. mays
  peptide (1)..(288): Ceres Seq. ID no. 12342622
MESEIMASYETKQNCEIRVFESSDEMATDLAEFISQASEISVKERGCFAIALSGGPLVRHMRKLCEAPYNKTLDWSKWYIFWAEERAVAKNHAESNYKLTKEEFLSKVPILNGHVYSINDNATVEEAASDYEFVMRQLVKVRTVGVSESNDCPRFDLVLLNIGPDGHVASLFPNHPALELKGDWVTYITDSPEPPPERITFTLPVINSASSVAIVATGEDRARAVSFSVSACQDQEEEGPADDDAGTTMIPPASMVQPTDGKLVWFLDEAAASSLEASNGACEHQEGY

SEQ ID NO: 2654 - protein, 283 aa, Zea mays subsp. mays
  peptide (1)..(283): Ceres Seq. ID no. 12342623
MASYETKQNCEIRVFESSDEMATDLAEFISQASEISVKERGCFAIALSGGPLVRHMRKLCEAPYNKTLDWSKWYIFWAEERAVAKNHAESNYKLTKEEFLSKVPILNGHVYSINDNATVEEAASDYEFVMRQLVKVRTVGVSESNDCPRFDLVLLNIGPDGHVASLFPNHPALELKGDWVTYITDSPEPPPERITFTLPVINSASSVAIVATGEDRARAVSFSVSACQDQEEEGPADDDAGTTMIPPASMVQPTDGKLVWFLDEAAASSLEASNGACEHQEGY

SEQ ID NO: 2655 - protein, 263 aa, Zea mays subsp. mays
  peptide (1)..(263): Ceres Seq. ID no. 12342624
MATDLAEFISQASEISVKERGCFAIALSGGPLVRHMRKLCEAPYNKTLDWSKWYIFWAEERAVAKNHAESNYKLTKEEFLSKVPILNGHVYSINDNATVEEAASDYEFVMRQLVKVRTVGVSESNDCPRFDLVLLNIGPDGHVASLFPNHPALELKGDWVTYITDSPEPPPERITFTLPVINSASSVAIVATGEDRARAVSFSVSACQDQEEEGPADDDAGTTMIPPASMVQPTDGKLVWFLDEAAASSLEASNGACEHQEGY

SEQ ID NO: 2656 - DNA, 1212 bp, Zea mays subsp. mays
  misc_feature (1)..(1212): Ceres Seq. ID no. 12352091
  misc_feature (1)..(1212): Ortholog of  Ceres SEQ ID NO 13598179 as cited in SEQ ID NO 61439
gttgacatcggttcaccgtccgcccaggtaccttccgtacgtacaagaggcggtcgcgacgctctagcttgcattgcaccagcgcgcagagcggaaggaggtggaaagcgcccagagagatctcgagagagaggctggtcggcacagactagttcattccgtttggatagagacgcacgcaacgcaggccaccacaacgtgaggagcgggaggagggagagggaggatgcaggcgcatcaccgtcagtcgtactacgcggtgctcggcgtgcagccgggcgccaccgctgccgagatccgcgcctcctaccaccgcctcgccatgaggtggcacccggacaagatcgccagcggcggcggcgccggcgccgatccggcgcgcgcggaggaggccaagagcaggttccagcagatacacgaggcgtaccaagtgctgtcggatgacaagaggagggcgctgtacgacgccggcatgtacgacccgctggacgacgacgacgaccaggaggacgtcgagggattccacgacttcgtgcaggagatggtctcgctcatggccagagaggagcccgtgtacagcttggccgagctgcaatccatgctggacgggatgatcaaggatttcaccgcgccacagccttggcctagcggcttcttctacactggtggtggcggtggcggtggcggtggggcgtcgtcgccgtcgccgctcggcaaaccaagcagccaagagcagagtacggcttcgtcacgcttgcatccctacgggttcggggacgcgccgtgcttcagccgcacggcgttctcacaatgatggcgatgatgaataaattgatacatggatcgagcttttattcttctggcagcaatgggggtttcctcgctcgtgctcgtggaggtggagggatagtaggaacccgtgaccgtgaaagccatcgtccgccagggccagactctgattggcagttgcaattgctttggactgtggggatgaaagaaggtgaggtgggaagatagaccacaaggagagcacgtagtcgcctagaatcgccacccatcagcaaaagaaggggtgtttgtttgtttgtactgtttggtttggtttggttttcgtctcttgcctgccatggtagagatgagttatgccagagcatttgtatacaagggtatgccatcaagaataagttacgtcaatacaatttgtacataaat

SEQ ID NO: 2657 - protein, 195 aa, Zea mays subsp. mays
  peptide (1)..(195): Ceres Seq. ID no. 12352092
MQAHHRQSYYAVLGVQPGATAAEIRASYHRLAMRWHPDKIASGGGAGADPARAEEAKSRFQQIHEAYQVLSDDKRRALYDAGMYDPLDDDDDQEDVEGFHDFVQEMVSLMAREEPVYSLAELQSMLDGMIKDFTAPQPWPSGFFYTGGGGGGGGGASSPSPLGKPSSQEQSTASSRLHPYGFGDAPCFSRTAFSQ

SEQ ID NO: 2658 - protein, 163 aa, Zea mays subsp. mays
  peptide (1)..(163): Ceres Seq. ID no. 12352093
MRWHPDKIASGGGAGADPARAEEAKSRFQQIHEAYQVLSDDKRRALYDAGMYDPLDDDDDQEDVEGFHDFVQEMVSLMAREEPVYSLAELQSMLDGMIKDFTAPQPWPSGFFYTGGGGGGGGGASSPSPLGKPSSQEQSTASSRLHPYGFGDAPCFSRTAFSQ

SEQ ID NO: 2659 - protein, 147 aa, Zea mays subsp. mays
  peptide (1)..(147): Ceres Seq. ID no. 12352094
VDIGSPSAQVPSVRTRGGRDALACIAPARRAEGGGKRPERSRERGWSAQTSSFRLDRDARNAGHHNVRSGRREREDAGASPSVVLRGARRAAGRHRCRDPRLLPPPRHEVAPGQDRQRRRRRRRSGARGGGQEQVPADTRGVPSAVG

SEQ ID NO: 2660 - DNA, 1594 bp, Zea mays subsp. mays
  misc_feature (1)..(1594): Ceres Seq. ID no. 12387222
  misc_feature (1)..(1594): Ortholog of  Ceres SEQ ID NO 13598234 as cited in SEQ ID NO 63461
  misc_feature (1)..(1594): Ortholog of  Ceres SEQ ID NO 13597254 as cited in SEQ ID NO 63858
  misc_feature (1)..(1594): Ortholog of  Ceres SEQ ID NO 12622778 as cited in SEQ ID NO 67562
agatctggatccaaacggcggctctgtttcgtgcgctgtcccgtctccctccgtctcgtcagcttcgtgccgtgcccgtgcgagccgctgccaacccgctccagctttgcccgttgccttggccgtcccgtccggccgtccctagaaaaggccgcgtcccacgttgccttggttcccccaccctgctgtctccctccctccttccttccttccccgccactgcgcagcgcgagtgcggcgacagccagtcacacactcacactccctcgaccgctctcggccccgtccgcgtcgccgcagggcgaggaggcaatggcggcaggcgggaatggcgccggcggggacaccagggcggccttcgcgcggatctacaagacgctcaaggaggagctgctcaccgacccggccttcgagttcaccgaggagtcacgccagtggatcgaccgcatggttgactacaatgtactcggaggcaagtgtaaccgtgggctctctgtggtcgacagctacaagctgctcaagggcgctgatgctctgggcgaggaggaaacgttccttgcttgcaccctcggctggtgcattgaatggcttcaggctttctttcttgtgcttgatgatatcatggatgactctcacactcgtcgcggccagccttgctggttcagggtgcctcaggttggcttaattgctgcgaatgacgggatcatccttcgcaaccatatctcacggatccttcggcgccactttaagggcaaaccttactatgctgatctccttgatttgttcaatgaggttgagttcaagacagcttcaggtcagctgctggaccttatcactacccatgagggagaaaaagatctaacaaagtataacataacagttcacggtcgaattgttcaatacaagacagcctattattcattttatctgccggttgcatgtgccctgctgctctctggcgagaatttggacaattatggtgatgtagagaacatccttgttgaaatgggaacatactttcaagtccaggatgactatctggattgttacggtgatcctgaatttatcggcaagattggaacggacattgaagattacaagtgctcatggctagttgtgcaagcccttgagcgtgctgatgagagccaaaagcgcattctatttgaaaattatggcaagaaagatccagcctgtgtggcaaaagtgaagaacctctacaaagaacttgacctagaggcggtatttcaggagtacgagaatgagagctacaagaagctgattgcagacattgaagcccagccaagcattgcggttcagaaagtgctgaaatccttcttgcacaagatctacaagaggcagaagtagggtgctcttggataaacgagctcaggagtcgttactccttcgcatgcttgacataaccggacttcctcacctggttgctctagtatgatgtggagcgtctagttaaaaaaatcgatgtagtatgaagcaccttgctgctctgaatattaacaggcaattaaggcaaggtgctgtttcggtttggtggaccgcatgttgcagataataaattagttgttttgtcatgcgg

SEQ ID NO: 2661 - protein, 454 aa, Zea mays subsp. mays
  peptide (1)..(454): Ceres Seq. ID no. 12387223
RSGSKRRLCFVRCPVSLRLVSFVPCPCEPLPTRSSFARCLGRPVRPSLEKAASHVALVPPPCCLPPSFLPSPPLRSASAATASHTLTLPRPLSAPSASPQGEEAMAAGGNGAGGDTRAAFARIYKTLKEELLTDPAFEFTEESRQWIDRMVDYNVLGGKCNRGLSVVDSYKLLKGADALGEEETFLACTLGWCIEWLQAFFLVLDDIMDDSHTRRGQPCWFRVPQVGLIAANDGIILRNHISRILRRHFKGKPYYADLLDLFNEVEFKTASGQLLDLITTHEGEKDLTKYNITVHGRIVQYKTAYYSFYLPVACALLLSGENLDNYGDVENILVEMGTYFQVQDDYLDCYGDPEFIGKIGTDIEDYKCSWLVVQALERADESQKRILFENYGKKDPACVAKVKNLYKELDLEAVFQEYENESYKKLIADIEAQPSIAVQKVLKSFLHKIYKRQK

SEQ ID NO: 2662 - protein, 350 aa, Zea mays subsp. mays
  peptide (1)..(350): Ceres Seq. ID no. 12387224
MAAGGNGAGGDTRAAFARIYKTLKEELLTDPAFEFTEESRQWIDRMVDYNVLGGKCNRGLSVVDSYKLLKGADALGEEETFLACTLGWCIEWLQAFFLVLDDIMDDSHTRRGQPCWFRVPQVGLIAANDGIILRNHISRILRRHFKGKPYYADLLDLFNEVEFKTASGQLLDLITTHEGEKDLTKYNITVHGRIVQYKTAYYSFYLPVACALLLSGENLDNYGDVENILVEMGTYFQVQDDYLDCYGDPEFIGKIGTDIEDYKCSWLVVQALERADESQKRILFENYGKKDPACVAKVKNLYKELDLEAVFQEYENESYKKLIADIEAQPSIAVQKVLKSFLHKIYKRQK

SEQ ID NO: 2663 - protein, 305 aa, Zea mays subsp. mays
  peptide (1)..(305): Ceres Seq. ID no. 12387225
MVDYNVLGGKCNRGLSVVDSYKLLKGADALGEEETFLACTLGWCIEWLQAFFLVLDDIMDDSHTRRGQPCWFRVPQVGLIAANDGIILRNHISRILRRHFKGKPYYADLLDLFNEVEFKTASGQLLDLITTHEGEKDLTKYNITVHGRIVQYKTAYYSFYLPVACALLLSGENLDNYGDVENILVEMGTYFQVQDDYLDCYGDPEFIGKIGTDIEDYKCSWLVVQALERADESQKRILFENYGKKDPACVAKVKNLYKELDLEAVFQEYENESYKKLIADIEAQPSIAVQKVLKSFLHKIYKRQK

SEQ ID NO: 2664 - DNA, 1614 bp, Zea mays subsp. mays; identical to SEQ ID NO: 1798
  misc_feature (1)..(1614): Ceres Seq. ID no. 12410981
  misc_feature (1)..(1614): Ortholog of  Ceres SEQ ID NO 13598492 as cited in SEQ ID NO 63882
  misc_feature (1)..(1614): Ortholog of  Ceres SEQ ID NO 13654367 as cited in SEQ ID NO 67993

SEQ ID NO: 2665 - protein, 352 aa, Zea mays subsp. mays; identical to SEQ ID NO: 1799
  peptide (1)..(352): Ceres Seq. ID no. 12410982
  misc_feature (108)..(108): Xaa is any aa, unknown or other
  misc_feature (109)..(109): Xaa is any aa, unknown or other

SEQ ID NO: 2666 - protein, 344 aa, Zea mays subsp. mays; identical to SEQ ID NO: 1800
  peptide (1)..(344): Ceres Seq. ID no. 12410983
  misc_feature (77)..(77): Xaa is any aa, unknown or other
  misc_feature (78)..(78): Xaa is any aa, unknown or other

SEQ ID NO: 2667 - DNA, 1242 bp, Zea mays subsp. mays
  misc_feature (1)..(1242): Ceres Seq. ID no. 12410601
  misc_feature (1)..(1242): Ortholog of  Ceres SEQ ID NO 14308171 as cited in SEQ ID NO 58912
aaccctgaactgggccggccgtcgctgcattcccccttccgctgcccaacgacccttcccgtccgctggcaaccctcgcctccgcgtggcactccagggctccagaccccgccgccgccctaagccagacgctgaggcttgtggtctcttcgccggagacgagcaccaaccaggatgcaatgtttggtccggaatgtctgccgagccggaagccgtggagcggcggcgaggctcctggagcttgccgcggctggtccgggtgcgacgcagccatccgtggccgtcaaactcctcaggccgccttacgagttcacacgtccgatcggggtagttcaacccgtacgtgtgcagagccgggccgtttcgcgtgatggcctcgttcctgccgcggccacctccggttttggtctctgcgcacaagttatcgtcgcgatgaggggtctgtcgacggtggggagtgcggccgaggtcgtttctgattcggacgattccacctcccctgcggttgagcaccccccgcgcatcaagttcaagaggcccgacaagaccgccaggcacattatgaatatcctaaacaaagaggcggtcgaaaaggtccgctcggaaagggagattcctgatgtgcagcctggatgcatcattcagatgagattgcaagttcctgagaacaaacggcgtgagtcgacgctgaaggggattgtgataggaaggcgcaacgccgggatcaatacaaccttcagattgcgtagattagtggctggtgtcggagtcgagtctgtctttccactttactcgccaaacatcaaagaaatcaaggtattggacaggaagaaagtcaggagagctaagctgtattacctgagggacaggatgaacgcacttagaaaatgagtctttcagcttgtttcaaggaatttcgccgtgcggatcagcacggtttctgaagtgcaacggttgcagccctgagaattgcattgtctggttccacatcgttgcaaagccatagcctgtagttgtcgattgccatgcttggttttgagctgcaagtgctagcagatatatgttttccgacacaataaaaaattgcggttattcccttttcgatttacgacactgtagcttcatagcacaaaataacgtgctcagatctattacttccctccgcacctttactatctaggatgtatgtgttttttgacataagcaagctggaaagtgaaaactcttatgtgatgcttcctg

SEQ ID NO: 2668 - protein, 238 aa, Zea mays subsp. mays
  peptide (1)..(238): Ceres Seq. ID no. 12410602
MQCLVRNVCRAGSRGAAARLLELAAAGPGATQPSVAVKLLRPPYEFTRPIGVVQPVRVQSRAVSRDGLVPAAATSGFGLCAQVIVAMRGLSTVGSAAEVVSDSDDSTSPAVEHPPRIKFKRPDKTARHIMNILNKEAVEKVRSEREIPDVQPGCIIQMRLQVPENKRRESTLKGIVIGRRNAGINTTFRLRRLVAGVGVESVFPLYSPNIKEIKVLDRKKVRRAKLYYLRDRMNALRK

SEQ ID NO: 2669 - protein, 152 aa, Zea mays subsp. mays
  peptide (1)..(152): Ceres Seq. ID no. 12410603
MRGLSTVGSAAEVVSDSDDSTSPAVEHPPRIKFKRPDKTARHIMNILNKEAVEKVRSEREIPDVQPGCIIQMRLQVPENKRRESTLKGIVIGRRNAGINTTFRLRRLVAGVGVESVFPLYSPNIKEIKVLDRKKVRRAKLYYLRDRMNALRK

SEQ ID NO: 2670 - DNA, 1435 bp, Zea mays subsp. mays
  misc_feature (1)..(1435): Ceres Seq. ID no. 12352690
  misc_feature (1)..(1435): Ortholog of  Ceres SEQ ID NO 15178873 as cited in SEQ ID NO 1103
  misc_feature (1)..(1435): Ortholog of  Ceres SEQ ID NO 15173557 as cited in SEQ ID NO 60031
accaaacccactcgcaacaacggataacgctctcttccttcggctcctcccctctcgctcctatcctctcccctccaatggcgaccgccatttcctctctagtaactcctccgaccctccaccgccgctgcctgggccctgcctgcgtctccgtctccgtgtgcacccctatccgcatctccttccggcccgccgccgcgcctcaggtgtcgcgccggggctcggcgctgcgggtgtccgcctcctcggcggtgctcgaggcgccagaggcggtggcggcgcggaagctctacgtggggaatatccccaggaccgttacaaacgacgagctccgcgacatgttcgctgcgcacggcaccgtcgagcgggccgaggttatgtacgacaagtatacgaatcgcagccggcggtttgggtttgtcacgatgagcacagcggaagaggccaatgctgcagttgaggctctcaatgggactgaggttggtgatagaaaaattaaagtgaacgtcacagagagcttcttaccgaacattgaccgatcagcaccagaaccagaggctctgtttgtagatagtcagtacaaggtttatgttggtaatcttgcgaagactgtaacaaccgaagttcttaaaaacttcttctccgaaaaggggaatatcctcagtgcaacagtctcccacattccggggacctccaagtcaaaggggtatggctttgtcacattctcttctgaggaagaagttgaagctgctgttgctactttcaataacgcggtaagcttctcttgcaaattttatgcatttctgccatttctttccaacctcataaaatagtagtcaccatttggctattgccaaacaaaagaaaaacgttgtgctacaatcttctatgttatcatttaggtgtcaaatagatggaaatatggaattaacatattgactgttaattgtacagatgagttagaattacatcatctcaactacgtcaactggtgccatattgttctgacatatcattcccacagaaacttatttgctgatattaataacattgcccgttcttcaaccgtacttcagcacacatcaagaccataatctcctatatttgctattcaaaagatttctgaagccttgaaagttggcatgcttttgatatcaaactttggaacataacctgtcgctaatgttttatattgttctacaattaaatgtggtgtcaggaattggaaggacaactcattcgtgtgaatagagcttagattagcagaaatttgcaggggcaccggaggagggggaatatcttggcgaatacatgtagtaggagggatgttttgaggctagattttgataacaaagtgatcaagaccttcaatgtgatttcgatatgtcatacaatttttgtaccataacagtatatttttcttaacggcacttct

SEQ ID NO: 2671 - protein, 276 aa, Zea mays subsp. mays
  peptide (1)..(276): Ceres Seq. ID no. 12352691
QTHSQQRITLSSFGSSPLAPILSPPMATAISSLVTPPTLHRRCLGPACVSVSVCTPIRISFRPAAAPQVSRRGSALRVSASSAVLEAPEAVAARKLYVGNIPRTVTNDELRDMFAAHGTVERAEVMYDKYTNRSRRFGFVTMSTAEEANAAVEALNGTEVGDRKIKVNVTESFLPNIDRSAPEPEALFVDSQYKVYVGNLAKTVTTEVLKNFFSEKGNILSATVSHIPGTSKSKGYGFVTFSSEEEVEAAVATFNNAVSFSCKFYAFLPFLSNLIK

SEQ ID NO: 2672 - protein, 251 aa, Zea mays subsp. mays
  peptide (1)..(251): Ceres Seq. ID no. 12352692
MATAISSLVTPPTLHRRCLGPACVSVSVCTPIRISFRPAAAPQVSRRGSALRVSASSAVLEAPEAVAARKLYVGNIPRTVTNDELRDMFAAHGTVERAEVMYDKYTNRSRRFGFVTMSTAEEANAAVEALNGTEVGDRKIKVNVTESFLPNIDRSAPEPEALFVDSQYKVYVGNLAKTVTTEVLKNFFSEKGNILSATVSHIPGTSKSKGYGFVTFSSEEEVEAAVATFNNAVSFSCKFYAFLPFLSNLIK

SEQ ID NO: 2673 - protein, 164 aa, Zea mays subsp. mays
  peptide (1)..(164): Ceres Seq. ID no. 12352693
MFAAHGTVERAEVMYDKYTNRSRRFGFVTMSTAEEANAAVEALNGTEVGDRKIKVNVTESFLPNIDRSAPEPEALFVDSQYKVYVGNLAKTVTTEVLKNFFSEKGNILSATVSHIPGTSKSKGYGFVTFSSEEEVEAAVATFNNAVSFSCKFYAFLPFLSNLIK

SEQ ID NO: 2674 - DNA, 1881 bp, Zea mays subsp. mays
  misc_feature (1)..(1881): Ceres Seq. ID no. 12341608
  misc_feature (1)..(1881): Ortholog of  Ceres SEQ ID NO 15175785 as cited in SEQ ID NO 56970
  misc_feature (1)..(1881): Ortholog of  Ceres SEQ ID NO 15178157 as cited in SEQ ID NO 57481
  misc_feature (1)..(1881): Ortholog of  Ceres SEQ ID NO 13597407 as cited in SEQ ID NO 64106
  misc_feature (1)..(1881): Ortholog of  Ceres SEQ ID NO 14303309 as cited in SEQ ID NO 67739
aggcagagcactgcacgccaccttatctctaaccggagatcaaagaagtagccgttaacgatggcttccgacgagctcgcaaaggccgtcgagcccaggaagaagggcaacgtcaagtatgcctccatatgtgccatcctggcctccatggcctctgtcatccttggctatgacattggggtgatgagtggagcggccatgtacatcaagaaggacctgaatatcacggacgtgcagctggagatcctgatcgggatcctcagtctctactcgctgttcggatccttcgctggcgcgcggacgtccgacaggatcgggcgccgcttgaccgtcgtgttcgccgctgtcatcttcttcgtgggctcgttgctcatgggtttcgccgtcaactacggcatgctcatggcgggccgcttcgtggccggagtcggtgtgggctacgggggcatgatcgcgcccgtgtacacggccgagatctcgcctgcggcgtcccgtggcttcctgaccaccttcccggaggtgttcatcaacatcggcatcctgcttggctacctgtccaacttcgcgttcgcgcgcctcccgctccacctcggctggcgcgtcatgctcgccattggcgcagttccgtccggcctgctcgcgctcctggtgttctgcatgcccgagtcgcctcggtggctggtcttgaagggccgcctcgcggacgccagggctgtgctagagaagacctctgccacgccagaggaggccgccgagcggctggccgacatcaaggccgcggcggggattccgaagggcctcgacggggacgtagtcaccgtacccggcaaggagcaaggcggcggtgagttgcaggtgtggaagaagctcatcctgtccccgaccccggctgtccgacgcatactgctctcggccgtgggtctccacttcttccagcaggcttctggcagcgactccgtcgtccagtacagcgcccgcctgttcaagagcgcggggatcaccgacgacaacaagctcctgggcgtcacctgcgcggtgggcgtgaccaagacgttcttcatcctggtggccacgttcctgctggaccgcgcggggcgtcggcctctgctgctgatcagcacgggcgggatgatcgtctcgctcatctgcctcgggtcggggctcaccgtcgcggggcatcacccggacaccaaggtcgcgtgggccgtcgccctgtgcatcgcgtccaccctgtcctacatcgccttcttctccatcggcctcgggcccatcacgggcgtgtacacctcggaaatattcccgctgcaggtgcgcgcgctgggcttcgcggtgggtgtggcgagcaaccgcgtcaccagcgccgtcatctccatgaccttcctgtccctctccaaggccatcaccatcggcggcagcttcttcctctactccggcatcgccgcggtcgcttgggttttcttcttcacgtgcctcccggagacacgcggccggacgctggaggagatgggcaagctgttcggcatgccagacacgggcatggctgaagaagcagaagacgccgcagccaaggagaaggtggtggaactgcctagcagcaagtaggtggctatcccagagcacaggtcaagtgaagtagatggacaagatcattgtcttttcaactaattagatgggcaagaataactaagactgccctatgaggtgtcgtggttcaaccagagatcattctgctccttttcttttcccttcctttttcgagtaccattcccattcgtcgtggtcagtacgatgttgggtcgttgggagttagtggtgtcagagtccgcgtgtgctttgcaagccagggctgaacccacaatcatcagtaacaaaaattcttcc

SEQ ID NO: 2675 - protein, 513 aa, Zea mays subsp. mays
  peptide (1)..(513): Ceres Seq. ID no. 12341609
MASDELAKAVEPRKKGNVKYASICAILASMASVILGYDIGVMSGAAMYIKKDLNITDVQLEILIGILSLYSLFGSFAGARTSDRIGRRLTVVFAAVIFFVGSLLMGFAVNYGMLMAGRFVAGVGVGYGGMIAPVYTAEISPAASRGFLTTFPEVFINIGILLGYLSNFAFARLPLHLGWRVMLAIGAVPSGLLALLVFCMPESPRWLVLKGRLADARAVLEKTSATPEEAAERLADIKAAAGIPKGLDGDVVTVPGKEQGGGELQVWKKLILSPTPAVRRILLSAVGLHFFQQASGSDSVVQYSARLFKSAGITDDNKLLGVTCAVGVTKTFFILVATFLLDRAGRRPLLLISTGGMIVSLICLGSGLTVAGHHPDTKVAWAVALCIASTLSYIAFFSIGLGPITGVYTSEIFPLQVRALGFAVGVASNRVTSAVISMTFLSLSKAITIGGSFFLYSGIAAVAWVFFFTCLPETRGRTLEEMGKLFGMPDTGMAEEAEDAAAKEKVVELPSSK

SEQ ID NO: 2676 - protein, 484 aa, Zea mays subsp. mays
  peptide (1)..(484): Ceres Seq. ID no. 12341610
MASVILGYDIGVMSGAAMYIKKDLNITDVQLEILIGILSLYSLFGSFAGARTSDRIGRRLTVVFAAVIFFVGSLLMGFAVNYGMLMAGRFVAGVGVGYGGMIAPVYTAEISPAASRGFLTTFPEVFINIGILLGYLSNFAFARLPLHLGWRVMLAIGAVPSGLLALLVFCMPESPRWLVLKGRLADARAVLEKTSATPEEAAERLADIKAAAGIPKGLDGDVVTVPGKEQGGGELQVWKKLILSPTPAVRRILLSAVGLHFFQQASGSDSVVQYSARLFKSAGITDDNKLLGVTCAVGVTKTFFILVATFLLDRAGRRPLLLISTGGMIVSLICLGSGLTVAGHHPDTKVAWAVALCIASTLSYIAFFSIGLGPITGVYTSEIFPLQVRALGFAVGVASNRVTSAVISMTFLSLSKAITIGGSFFLYSGIAAVAWVFFFTCLPETRGRTLEEMGKLFGMPDTGMAEEAEDAAAKEKVVELPSSK

SEQ ID NO: 2677 - protein, 472 aa, Zea mays subsp. mays
  peptide (1)..(472): Ceres Seq. ID no. 12341611
MSGAAMYIKKDLNITDVQLEILIGILSLYSLFGSFAGARTSDRIGRRLTVVFAAVIFFVGSLLMGFAVNYGMLMAGRFVAGVGVGYGGMIAPVYTAEISPAASRGFLTTFPEVFINIGILLGYLSNFAFARLPLHLGWRVMLAIGAVPSGLLALLVFCMPESPRWLVLKGRLADARAVLEKTSATPEEAAERLADIKAAAGIPKGLDGDVVTVPGKEQGGGELQVWKKLILSPTPAVRRILLSAVGLHFFQQASGSDSVVQYSARLFKSAGITDDNKLLGVTCAVGVTKTFFILVATFLLDRAGRRPLLLISTGGMIVSLICLGSGLTVAGHHPDTKVAWAVALCIASTLSYIAFFSIGLGPITGVYTSEIFPLQVRALGFAVGVASNRVTSAVISMTFLSLSKAITIGGSFFLYSGIAAVAWVFFFTCLPETRGRTLEEMGKLFGMPDTGMAEEAEDAAAKEKVVELPSSK

SEQ ID NO: 2678 - DNA, 1230 bp, Zea mays subsp. mays
  misc_feature (1)..(1230): Ceres Seq. ID no. 12410593
  misc_feature (1)..(1230): Ortholog of  Ceres SEQ ID NO 14305540 as cited in SEQ ID NO 60089
aacactatcccctttcgccggcgccgctcccgctccatcccacccgcgctctccagtctccacggatcgatcgaagcttccgtcttccggcgcgatgttcccgtgccgccccctggctccgccgcacctgccgcgtgccccttccctcgcgcggcttccactgtcgtcgctgcggccgccgtcgtcgtcgctgcgcgtggtgcggtgcatggcgaaggagcggcgggtacggatggtggcgaagcagatccagcgggagctcgccgacatgctcacccgcgaccccgtgctgcagcgcgccgtgctccccgaagccgcgctcggcgctgaccgctacctctcgtcgctcaccaccatcgccgacgtcgagctctccaacgacctccaggtgtgcaaagtgtacgtgtccgtgtttggggacgagagggggaagaaggtggccatcgaggggctcaaggccaagaccaagtacgtcaggagccagataggcaggaggatgaagcttcgcctcacgccggagataaggttcatcgaggatgagtctatggagcgtggaagcaggatccttgctatacttgacaaactaaaggaggaaagggagcaacaagaaggaaaagatggggaggaagatgatgattcatatatatcagaagaagatgatggtgactgggatgcagatgagccagatgaggaggacatcatttacgtaaaatagcccattgtcttctaggaacttggccatcattcatccagaacacaacagtcctcttcagagtttaattcagtgaagttcactgctcgcctgcttgtcgaagcactccaaagtatatcagcacttgaagaggtctacagagacatctcttttgccaattgaagcaggacatatcacacccttgctgccatttagaagctggtcatgtccttttttatggcttttcaatgcgggggatatttcaaagaggaatttggaagagtatttttttccctgtccactggaatactggattatgatatctgaccattgacgcaagacagtttgggctgatgctcattcctctgttatgttaactagcacttgtttaatttgtacttgcctagttatcttgctgtatttcagtctccatttcttctatggttttggtacagtatttcgtctttctataagccattatgtaatagagtagcatcagtatgattttaatgataatttatcactctctcatctgatct

SEQ ID NO: 2679 - protein, 237 aa, Zea mays subsp. mays
  peptide (1)..(237): Ceres Seq. ID no. 12410594
TLSPFAGAAPAPSHPRSPVSTDRSKLPSSGAMFPCRPLAPPHLPRAPSLARLPLSSLRPPSSSLRVVRCMAKERRVRMVAKQIQRELADMLTRDPVLQRAVLPEAALGADRYLSSLTTIADVELSNDLQVCKVYVSVFGDERGKKVAIEGLKAKTKYVRSQIGRRMKLRLTPEIRFIEDESMERGSRILAILDKLKEEREQQEGKDGEEDDDSYISEEDDGDWDADEPDEEDIIYVK

SEQ ID NO: 2680 - protein, 206 aa, Zea mays subsp. mays
  peptide (1)..(206): Ceres Seq. ID no. 12410595
MFPCRPLAPPHLPRAPSLARLPLSSLRPPSSSLRVVRCMAKERRVRMVAKQIQRELADMLTRDPVLQRAVLPEAALGADRYLSSLTTIADVELSNDLQVCKVYVSVFGDERGKKVAIEGLKAKTKYVRSQIGRRMKLRLTPEIRFIEDESMERGSRILAILDKLKEEREQQEGKDGEEDDDSYISEEDDGDWDADEPDEEDIIYVK

SEQ ID NO: 2681 - protein, 168 aa, Zea mays subsp. mays
  peptide (1)..(168): Ceres Seq. ID no. 12410596
MAKERRVRMVAKQIQRELADMLTRDPVLQRAVLPEAALGADRYLSSLTTIADVELSNDLQVCKVYVSVFGDERGKKVAIEGLKAKTKYVRSQIGRRMKLRLTPEIRFIEDESMERGSRILAILDKLKEEREQQEGKDGEEDDDSYISEEDDGDWDADEPDEEDIIYVK

SEQ ID NO: 2682 - DNA, 1670 bp, Zea mays subsp. mays
  misc_feature (1)..(1670): Ceres Seq. ID no. 12353627
  misc_feature (1)..(1670): Ortholog of  Ceres SEQ ID NO 13581327 as cited in SEQ ID NO 51165
  misc_feature (1)..(1670): Ortholog of  Ceres SEQ ID NO 12610002 as cited in SEQ ID NO 55823
  misc_feature (1)..(1670): Ortholog of  Ceres SEQ ID NO 14308310 as cited in SEQ ID NO 58573
  misc_feature (1)..(1670): Ortholog of  Ceres SEQ ID NO 14308795 as cited in SEQ ID NO 59140
  misc_feature (1)..(1670): Ortholog of  Ceres SEQ ID NO 14313354 as cited in SEQ ID NO 61520
  misc_feature (1)..(1670): Ortholog of  Ceres SEQ ID NO 13596744 as cited in SEQ ID NO 62765
aaatttctgggcctctctcctccagcctgcatagccaacccttttgataaagaaacgggcctacactacacgggacacctgcctcctccccttctcccatctctccccctctccctctcgtggccacgactgccgctgccgccctacgccaggtgtccaggtcatctccggcccattcgccggcgacgagcaccccactagatcgaccgagatatggacggcctgtggcatctgggggacgagctccgcgggcagcccaaggtggtggaggaccgccagtggtcgctcatgacgtccaagctggcagagatcaccaggtccaggggcgagaggacgaacgacctcgactacgccaggatgaacgccgcccccgacgccaagcggtggggcaaggcggcgtcctaccagcaccatgacgagggcaggatggaccaccacgtcggcctcagcctcaagatgaacgatctcaagatgaacgaggccgccgctgccgccgtcatgaagctccccttccgcggcgtgccctacaacgtcaacccgatgtaccccaaggggagcaacgccaacgccaatgtcaacgcgttcaagatgaatgtcggggtgaacaagtactccagcagcgcgaacgggaaagacgccggcgggaaaagcagtggcggtggcagcaacaacaacagcggcggcggaggcaacggcaatgggaccgccaacggcagttccgcggtcgacaagcgcttcaagacgttgccgacgagcgagatgctgccaaagaacgaagtccttggtgggtacatctttgtctgcaacaacgataccatgcaggaggacctcaagaggcagctttttggattgccagcaagatatcgtgattcagtccgggcaattactcctggcctgcctcttttcctctataactacaccactcaccagcttcatggggtatttgaggctgccagtttcggtgggtctaatatcgatcccactgcatggggaggataagaagtgtaaaggtgaatctagattcccagcgcaggtgaggatccgcgttaggaagctctgcaagccgttggaagaggattccttcaggccagttttgcaccactatgatggcccaaagtttcgccttgagctctccatcgcggagaccctgtccctgctagacctatgcgagaaggaaggcatctgagctgttggctgcctcgtgaggttctagtaaatatcaatcatccttgtatgttctgtggatggtggttggcaatgttgtttatttttcaagcgcaagctgctgccggtctcgttttccctgtcctggatggaagcaaagggacctggtactttgaaggccccccctcaaacataagctgtgagcctgtcagtgcacgtgtccgccgttgtcgtcaagaaccaaaccaaatcatgaaatcttgcgccgacggagagttggagcgtgtatgttttgctatctctatctacatgtctcagtagagtggatataccctggggtccccaaaagatgggggcctgtatgtaacactacgtgtaatggttaaggtgaatgtgccgtgaggccccccaaaagttggagtgtgtattttttgttgtcaccttgaaccgactttgcgtatgctttttttagtgctgctaccttttgcgctgtgtttggcttctgg

SEQ ID NO: 2683 - protein, 261 aa, Zea mays subsp. mays
  peptide (1)..(261): Ceres Seq. ID no. 12353628
MDGLWHLGDELRGQPKVVEDRQWSLMTSKLAEITRSRGERTNDLDYARMNAAPDAKRWGKAASYQHHDEGRMDHHVGLSLKMNDLKMNEAAAAAVMKLPFRGVPYNVNPMYPKGSNANANVNAFKMNVGVNKYSSSANGKDAGGKSSGGGSNNNSGGGGNGNGTANGSSAVDKRFKTLPTSEMLPKNEVLGGYIFVCNNDTMQEDLKRQLFGLPARYRDSVRAITPGLPLFLYNYTTHQLHGVFEAASFGGSNIDPTAWGG

SEQ ID NO: 2684 - protein, 236 aa, Zea mays subsp. mays
  peptide (1)..(236): Ceres Seq. ID no. 12353629
MTSKLAEITRSRGERTNDLDYARMNAAPDAKRWGKAASYQHHDEGRMDHHVGLSLKMNDLKMNEAAAAAVMKLPFRGVPYNVNPMYPKGSNANANVNAFKMNVGVNKYSSSANGKDAGGKSSGGGSNNNSGGGGNGNGTANGSSAVDKRFKTLPTSEMLPKNEVLGGYIFVCNNDTMQEDLKRQLFGLPARYRDSVRAITPGLPLFLYNYTTHQLHGVFEAASFGGSNIDPTAWGG

SEQ ID NO: 2685 - protein, 213 aa, Zea mays subsp. mays
  peptide (1)..(213): Ceres Seq. ID no. 12353630
MNAAPDAKRWGKAASYQHHDEGRMDHHVGLSLKMNDLKMNEAAAAAVMKLPFRGVPYNVNPMYPKGSNANANVNAFKMNVGVNKYSSSANGKDAGGKSSGGGSNNNSGGGGNGNGTANGSSAVDKRFKTLPTSEMLPKNEVLGGYIFVCNNDTMQEDLKRQLFGLPARYRDSVRAITPGLPLFLYNYTTHQLHGVFEAASFGGSNIDPTAWGG

SEQ ID NO: 2686 - DNA, 862 bp, Zea mays subsp. mays
  misc_feature (1)..(862): Ceres Seq. ID no. 13499085
  misc_feature (1)..(862): Ortholog of  Ceres SEQ ID NO 13654155 as cited in SEQ ID NO 68352
aagcaagcgaagcatcgccagattggtatatcgatcgattgatcggtggcggaggaaggggaggacggggggcagatggcggcgtgccggggcttcttcgagtgcctgctcaggctgctcaacttcatcctcaccgtcgccggcctcgctatggttggttacgggatctacctgctcgtcgagtggatgaagatatccgaggacggcatcggcggggcttcgacggcggaggtgctcgtctctggccggccgttgttgggggctgtcattctcggtgacagcttcctcgacaatctacccaaagcatggtttatttatttgtttattggtgttggcaccatcgtcatcttggtgtctctgtttggctgcattggagcagggacaagaaacacctgctgtttgtgtttctatgctttcttggtcatattgttgatccttgctgaagctgcagctgctgcattcattttctttgaccatggctggaaagatgtaattccagtggacaaaacacataactttgatgttatgtatgactttctgaaggaaaactgggagattgcaagatgggtcgctctgggcgttgttgtttttgaggcagtgctcttgctgttagctctggctgtcagggcaatgaacaaacctgctgagtatgacagtgatgacgaaattatagcaattggccgaagccctaccatccggcagccactgatccatacccaaaatgttcctgccactggtgttcctgtcccaacacttgatcaacgtgcaagtagaaatgatgcctggagccaaaggatgcgagagaagtatggtctggacacgagccagttcacatacaacccttcagacccaagcaggtacc

SEQ ID NO: 2687 - protein, 262 aa, Zea mays subsp. mays
  peptide (1)..(262): Ceres Seq. ID no. 13499086
MAACRGFFECLLRLLNFILTVAGLAMVGYGIYLLVEWMKISEDGIGGASTAEVLVSGRPLLGAVILGDSFLDNLPKAWFIYLFIGVGTIVILVSLFGCIGAGTRNTCCLCFYAFLVILLILAEAAAAAFIFFDHGWKDVIPVDKTHNFDVMYDFLKENWEIARWVALGVVVFEAVLLLLALAVRAMNKPAEYDSDDEIIAIGRSPTIRQPLIHTQNVPATGVPVPTLDQRASRNDAWSQRMREKYGLDTSQFTYNPSDPSRY

SEQ ID NO: 2688 - protein, 237 aa, Zea mays subsp. mays
  peptide (1)..(237): Ceres Seq. ID no. 13499087
MVGYGIYLLVEWMKISEDGIGGASTAEVLVSGRPLLGAVILGDSFLDNLPKAWFIYLFIGVGTIVILVSLFGCIGAGTRNTCCLCFYAFLVILLILAEAAAAAFIFFDHGWKDVIPVDKTHNFDVMYDFLKENWEIARWVALGVVVFEAVLLLLALAVRAMNKPAEYDSDDEIIAIGRSPTIRQPLIHTQNVPATGVPVPTLDQRASRNDAWSQRMREKYGLDTSQFTYNPSDPSRY

SEQ ID NO: 2689 - protein, 225 aa, Zea mays subsp. mays
  peptide (1)..(225): Ceres Seq. ID no. 13499088
MKISEDGIGGASTAEVLVSGRPLLGAVILGDSFLDNLPKAWFIYLFIGVGTIVILVSLFGCIGAGTRNTCCLCFYAFLVILLILAEAAAAAFIFFDHGWKDVIPVDKTHNFDVMYDFLKENWEIARWVALGVVVFEAVLLLLALAVRAMNKPAEYDSDDEIIAIGRSPTIRQPLIHTQNVPATGVPVPTLDQRASRNDAWSQRMREKYGLDTSQFTYNPSDPSRY

SEQ ID NO: 2690 - DNA, 1421 bp, Zea mays subsp. mays
  misc_feature (1)..(1421): Ceres Seq. ID no. 12410589
  misc_feature (1)..(1421): Ortholog of  Ceres SEQ ID NO 13582619 as cited in SEQ ID NO 56520
  misc_feature (1)..(1421): Ortholog of  Ceres SEQ ID NO 13660872 as cited in SEQ ID NO 60830
  misc_feature (1)..(1421): Ortholog of  Ceres SEQ ID NO 12616221 as cited in SEQ ID NO 63291
aatatcatgcgcaggggctgaaagcctgaaactgctcaagacgccaccgtcttcctccgcgatcttcagttctctgtctctccctctctctttcctctagctcccaaccaagccaagagtacgtcgtcaagcgcgccgcgcgtgtgtgtgtcagtaggctacagggctcggaggaacgccgtcatgagcttgatcagcatgatggaggcgcggctgccgccgggggttccggttccacccgagggacgacgagctcgtgctcgactacctctgccgcaagctctccggcaaaggcggcggcggagcgtacggcggcatcgccatggtcgacgtcgacctcaacaagtgcgagccgtgggatcttccagacgaggcgtgcgtgggcggccgcgagtggtacttcttcagcctgcacgaccgcaagtacgccacggggcagcggaccaaccgcgccacgcgcaccgggtactggaaggccacgggcaaggaccgccccatctccgtctccggccgccgcggggccggcgacaccgccgcgctggtcgggatgcgcaagacgctggtgttctaccagggcagggcgccccgcgggagcaagaccgagtgggtcatgcacgagttccgcgtggacggcccgcccgttgccgaccgccccggctcacctctcctccagctccagctccaggaggattgggtcctgtgcagggtgttctacaagagccgaactgccagcacaagaccagcagcaggccccgacgaggccgggccgctgtccagccagctgatcggcggcctgccgatgccgcgaatggccgcccctgctgacgccgcctacctgtccttcgacgtcacacctgccgctggcggctactaccaccaccaagactccggccccgcggacgcgcgccaccacctgccgccgccgccggcgcagcctttcagcaggagtagcctgtccagcttgcgggacttgctcagcagcatggcctgaaggcagcgacgccgccgccgccgttcgggagacggagctccacctgcagctggagggctggaccgaggcggcctacgcgcagcagcagggcggcgccatgccggcgcacccgcagcagacgtggagcccgtttctgagctcgggatgacggcacgcggctgggggctcacgtgtgcgtggcgccctggcgcctggcgggcatcgcgtgcgtagtgaatagtcaacaatttgcttgtctttcttgcaatgtaacgttgacttggttagtgcatgcgatctctgccgtttgttaggcgtagggtaaaaacccacgcagcggataggtggaatgccttggtgattattggtgcagtaacttttgtacagttgattgttgcagaaaattactctctctttgtctgccttctaaaaaaaaaaaagaaannaaaaa

SEQ ID NO: 2691 - protein, 222 aa, Zea mays subsp. mays
  peptide (1)..(222): Ceres Seq. ID no. 12410590
MVDVDLNKCEPWDLPDEACVGGREWYFFSLHDRKYATGQRTNRATRTGYWKATGKDRPISVSGRRGAGDTAALVGMRKTLVFYQGRAPRGSKTEWVMHEFRVDGPPVADRPGSPLLQLQLQEDWVLCRVFYKSRTASTRPAAGPDEAGPLSSQLIGGLPMPRMAAPADAAYLSFDVTPAAGGYYHHQDSGPADARHHLPPPPAQPFSRSSLSSLRDLLSSMA

SEQ ID NO: 2692 - protein, 213 aa, Zea mays subsp. mays
  peptide (1)..(213): Ceres Seq. ID no. 12410591
MSLISMMEARLPPGVPVPPEGRRARARLPLPQALRQRRRRSVRRHRHGRRRPQQVRAVGSSRRGVRGRPRVVLLQPARPQVRHGAADQPRHAHRVLEGHGQGPPHLRLRPPRGRRHRRAGRDAQDAGVLPGQGAPREQDRVGHARVPRGRPARCRPPRLTSPPAPAPGGLGPVQGVLQEPNCQHKTSSRPRRGRAAVQPADRRPADAANGRPC

SEQ ID NO: 2693 - protein, 208 aa, Zea mays subsp. mays
  peptide (1)..(208): Ceres Seq. ID no. 12410592
MMEARLPPGVPVPPEGRRARARLPLPQALRQRRRRSVRRHRHGRRRPQQVRAVGSSRRGVRGRPRVVLLQPARPQVRHGAADQPRHAHRVLEGHGQGPPHLRLRPPRGRRHRRAGRDAQDAGVLPGQGAPREQDRVGHARVPRGRPARCRPPRLTSPPAPAPGGLGPVQGVLQEPNCQHKTSSRPRRGRAAVQPADRRPADAANGRPC

SEQ ID NO: 2694 - DNA, 1291 bp, Zea mays subsp. mays
  misc_feature (1)..(1291): Ceres Seq. ID no. 12365243
  misc_feature (1)..(1291): Ortholog of  Ceres SEQ ID NO 12466401 as cited in SEQ ID NO 20698
  misc_feature (1)..(1291): Ortholog of  Ceres SEQ ID NO 15224731 as cited in SEQ ID NO 63650
actgtccagccagccatccaggcccaggagcgcgagttctgtgcctgtgcctctgctccacctcccctgcccctgcgccccaagtccacgtccaccacttagcactcacgctgctcgctcgctcgctcgtacacgcgcccgcttcgcgcagggaaggaaccgtgggagggaagcggacggacatgatgcacgccaagtcggagtcggacgtgacgagcctggcggcgtcgtcgccgcctcggtcgccgaagcggggcggcggcgccgccggcaacggcggctactacgtgcagagcccgtcgcgggagtcgccacgacggcggctacaagtcctcgtcgatgcagccccacgccggtctacaacagccccaacgagtcgccgtcgcacccctcctacggccgccactcccgctcctcctccgtcagccgcttctccggcaacctccgcaagggcgccgccggggaccgcaaggtgctcaacgacaaggggtggcccgagtgcaacgtcatcgaggaggagggcccgtacgaggacctcgccggcgatagcggcctctcccgccgctgccagatcatactcggcttcctcaccttcgtcctcctcttcaccgtcttctgcctcatcatctggggcgccgcccggccgtacgagcccgaggtcatcgtcaagagcttggtgatggacgacttctacgcgggtgaaggcacggaccacagcggcgttccaacaaaattggtcacaacaaactgctctctgcacatagctgtctacaaccctgccacaatgtttggaattcatgtcacttctggccccatccacctgatgtattcagagatcccaatagcagtcggtcaggttcggaggtattaccagccgaggaagagccaccggatggtgacggcggtcatccacggcgagaaggtgccgctgtacggcgccgggggcagcctgatgctgtcgacaagcacgggcggggcggtgcccctgacgctggacttggacctgacctcgcggggctacgtgatcggcaagctcgtgcgggtgacgcacaaggtgcacgtgacgtgccccgtcgtcgtggacgccaagaagaccaagcccgtcaggttctccaagaaggcctgcgccgtgtacagggcctgaacttcaaatgcgttttcgtaggctgcgatccgacggcgcattagcaacgcgcgtaggatgccgtgcctgtatttagttatcgtattggtggtgaagaacaataagctgcacacacatatggtctgtttgagccttttggttctgccg

SEQ ID NO: 2695 - protein, 380 aa, Zea mays subsp. mays
  peptide (1)..(380): Ceres Seq. ID no. 12365244
LSSQPSRPRSASSVPVPLLHLPCPCAPSPRPPLSTHAARSLARTRARFAQGRNRGREADGHDARQVGVGRDEPGGVVAASVAEAGRRRRRQRRLLRAEPVAGVATTAATSPRRCSPTPVYNSPNESPSHPSYGRHSRSSSVSRFSGNLRKGAAGDRKVLNDKGWPECNVIEEEGPYEDLAGDSGLSRRCQIILGFLTFVLLFTVFCLIIWGAARPYEPEVIVKSLVMDDFYAGEGTDHSGVPTKLVTTNCSLHIAVYNPATMFGIHVTSGPIHLMYSEIPIAVGQVRRYYQPRKSHRMVTAVIHGEKVPLYGAGGSLMLSTSTGGAVPLTLDLDLTSRGYVIGKLVRVTHKVHVTCPVVVDAKKTKPVRFSKKACAVYRA

SEQ ID NO: 2696 - protein, 225 aa, Zea mays subsp. mays
  peptide (1)..(225): Ceres Seq. ID no. 12365245
CPASHPGPGARVLCLCLCSTSPAPAPQVHVHHLALTLLARSLVHAPASRREGTVGGKRTDMMHAKSESDVTSLAASSPPRSPKRGGGAAGNGGYYVQSPSRESPRRRLQVLVDAAPRRSTTAPTSRRRTPPTAATPAPPPSAASPATSARAPPGTARCSTTRGGPSATSSRRRARTRTSPAIAASPAAARSYSASSPSSSSSPSSASSSGAPPGRTSPRSSSRAW

SEQ ID NO: 2697 - DNA, 1431 bp, Zea mays subsp. mays
  misc_feature (1)..(1431): Ceres Seq. ID no. 12414588
  misc_feature (1)..(1431): Ortholog of  Ceres SEQ ID NO 15171430 as cited in SEQ ID NO 51500
  misc_feature (1)..(1431): Ortholog of  Ceres SEQ ID NO 15172476 as cited in SEQ ID NO 54945
  misc_feature (1)..(1431): Ortholog of  Ceres SEQ ID NO 13594213 as cited in SEQ ID NO 57038
  misc_feature (1)..(1431): Ortholog of  Ceres SEQ ID NO 15176106 as cited in SEQ ID NO 60324
  misc_feature (1)..(1431): Ortholog of  Ceres SEQ ID NO 13654989 as cited in SEQ ID NO 63117
  misc_feature (1)..(1431): Ortholog of  Ceres SEQ ID NO 13655640 as cited in SEQ ID NO 63844
  misc_feature (1)..(1431): Ortholog of  Ceres SEQ ID NO 14313228 as cited in SEQ ID NO 67057
  misc_feature (1)..(1431): Ortholog of  Ceres SEQ ID NO 13584744 as cited in SEQ ID NO 69137
agcgagaggatgacaccacgaggcaaataaacccagacgtagttcagctagccgcttctacctccctctcccccccccgcctgcgcgctgccgcgagagctcgttcctgatggggaactgcgccggcgtggaggggaacgccgagatcaacccttccttcagtgcccccaattcctcagggaccgccggttctaagagcgtcagcaagaacgcggccgacaccggcaccttcggcaccaagacgtccggctcgtcgtcgtcggtgccgccaacccctcgtacggaggcggagatcctggagtcgtcgaatgtccgcaagttcagcttcggcgagctcaaaggctccacgaggaacttcaggccggacagcctgctcggggaggggggcttcgggtccgtgttcaaggggtggatggatgagcgcacgctcgcgcccgtgaggccgggcgccgggatcatcgtcgccgtcaagaagctcaagctcgacagcttccaagggcaccgggaatggctggcggaggtcaattacctggggcagttatcccaccctaatctcgtgaaactcatcggctactgcttggaggacgaacagcggcttcttgtgtacgagtacatgccgagagggagcctggagcatcatcttttcaggaggggctcgaacttccagccgctcccatggaacttacgcatgaaggttgctctcgaggctgccagaggtcttgctttcctgcacggcgaccaggccaaagttatctaccgcgatttcaagacctccaatatccttctcgactcggagtacaacgcaaaactgtctgatttcggtttggcaaaggacggtccaagcggtgataagagccatgtttctactagggtcatggggacacaaggatacgctgcccctgaatatcttgcgacaggccatttgacagcgaagagcgatgtgtacagctacggtgtggttcttctggagctgctgtctgggcagcgcgctctggacaagaaccgcccgcccggtcagcacaatctggtggagtgggctagaccttacatcaccaacaagaggagggtcattcatgtcctggactcacggctgggttcccagtattcccttcccgcggctcagaaggtggcaaccctggcgctgcaatgcttatcgatggacgcacgatgcaggcctgccatggatcaggttgtgactgcattagaacaacttcaaaggccaagggctcactgaaaaagatgtccatctacctctgtggagtctggagcatcctcctgtaatactttaggggagtaaaaaacagagaacgggtgagggtttgaagggctacgtggcttgtgaagagaatataatattcccttgctttgtgtacagctagttgcttcgtcgttgtaacttgggtctctacttatatattttattagtcttcg

SEQ ID NO: 2698 - protein, 374 aa, Zea mays subsp. mays
  peptide (1)..(374): Ceres Seq. ID no. 12414589
MGNCAGVEGNAEINPSFSAPNSSGTAGSKSVSKNAADTGTFGTKTSGSSSSVPPTPRTEAEILESSNVRKFSFGELKGSTRNFRPDSLLGEGGFGSVFKGWMDERTLAPVRPGAGIIVAVKKLKLDSFQGHREWLAEVNYLGQLSHPNLVKLIGYCLEDEQRLLVYEYMPRGSLEHHLFRRGSNFQPLPWNLRMKVALEAARGLAFLHGDQAKVIYRDFKTSNILLDSEYNAKLSDFGLAKDGPSGDKSHVSTRVMGTQGYAAPEYLATGHLTAKSDVYSYGVVLLELLSGQRALDKNRPPGQHNLVEWARPYITNKRRVIHVLDSRLGSQYSLPAAQKVATLALQCLSMDARCRPAMDQVVTALEQLQRPRAH

SEQ ID NO: 2699 - protein, 273 aa, Zea mays subsp. mays
  peptide (1)..(273): Ceres Seq. ID no. 12414590
MDERTLAPVRPGAGIIVAVKKLKLDSFQGHREWLAEVNYLGQLSHPNLVKLIGYCLEDEQRLLVYEYMPRGSLEHHLFRRGSNFQPLPWNLRMKVALEAARGLAFLHGDQAKVIYRDFKTSNILLDSEYNAKLSDFGLAKDGPSGDKSHVSTRVMGTQGYAAPEYLATGHLTAKSDVYSYGVVLLELLSGQRALDKNRPPGQHNLVEWARPYITNKRRVIHVLDSRLGSQYSLPAAQKVATLALQCLSMDARCRPAMDQVVTALEQLQRPRAH

SEQ ID NO: 2700 - protein, 206 aa, Zea mays subsp. mays
  peptide (1)..(206): Ceres Seq. ID no. 12414591
MPRGSLEHHLFRRGSNFQPLPWNLRMKVALEAARGLAFLHGDQAKVIYRDFKTSNILLDSEYNAKLSDFGLAKDGPSGDKSHVSTRVMGTQGYAAPEYLATGHLTAKSDVYSYGVVLLELLSGQRALDKNRPPGQHNLVEWARPYITNKRRVIHVLDSRLGSQYSLPAAQKVATLALQCLSMDARCRPAMDQVVTALEQLQRPRAH

SEQ ID NO: 2701 - DNA, 749 bp, Zea mays subsp. mays
  misc_feature (1)..(749): Ceres Seq. ID no. 12414219
  misc_feature (1)..(749): Ortholog of  Ceres SEQ ID NO 15227150 as cited in SEQ ID NO 59837
gaaccctagctcccgcaactgccgccgccaccccacgcctgcagccatgccgcccaagctcgacccgtcgcaggtggtggaggtgttcgtccgtgtgaccggcggcgaggtaggcgcggcgtcttcgctggcccccaagatcggtccgctcggtctttctcccaagaagatcggagaggacatcgccaaggagacggccaaggactggaagggcctccgcgtcaccgtcaagctcactgtccagaaccgacaggccaaggtctccgtcgttccctctgccgcggccctcgtcatcaaggcgctcaaggagcccgagagggaccgcaagaaggtcaagaacatcaagcacagcggcaacatcagtctcgacgatgtcatcgagattgccaggaccatgaggcccaggtccatggccaaggaaatgtccggcagcgtcaaggagattctcggcacctgcgtcagcgtcggctgcaccgtcgacggcaaggaccccaaggacctgcagcaggagattgacgacggcgaggtggagatcccgtccgcttaagaagggattggagcctaggagggttgtcttggtctctgaagtaattctctctagctagatttgtctgttgaagtaattttctctagctagatttttgttaaaatgtatctctgctacccattgctatggttttctggtggatgcgtgctttttccttttatatatatatatatatatatatataaaaggaacagtgtctttc

SEQ ID NO: 2702 - protein, 181 aa, Zea mays subsp. mays
  peptide (1)..(181): Ceres Seq. ID no. 12414220
NPSSRNCRRHPTPAAMPPKLDPSQVVEVFVRVTGGEVGAASSLAPKIGPLGLSPKKIGEDIAKETAKDWKGLRVTVKLTVQNRQAKVSVVPSAAALVIKALKEPERDRKKVKNIKHSGNISLDDVIEIARTMRPRSMAKEMSGSVKEILGTCVSVGCTVDGKDPKDLQQEIDDGEVEIPSA

SEQ ID NO: 2703 - protein, 166 aa, Zea mays subsp. mays
  peptide (1)..(166): Ceres Seq. ID no. 12414221
MPPKLDPSQVVEVFVRVTGGEVGAASSLAPKIGPLGLSPKKIGEDIAKETAKDWKGLRVTVKLTVQNRQAKVSVVPSAAALVIKALKEPERDRKKVKNIKHSGNISLDDVIEIARTMRPRSMAKEMSGSVKEILGTCVSVGCTVDGKDPKDLQQEIDDGEVEIPSA

SEQ ID NO: 2704 - DNA, 1572 bp, Zea mays subsp. mays
  misc_feature (1)..(1572): Ceres Seq. ID no. 12405776
  misc_feature (1)..(1572): Ortholog of  Ceres SEQ ID NO 13622682 as cited in SEQ ID NO 0
agcagtcagcacgtctccgtccccgacgatgccggggagcaatgccaatggagggcgcagcctgtacggacacggccgaccggccatcttcacccccctctccttgccgccctcggttccggactctgctcccctgccccatacccccaccgctcctcacgcctcgcctgactgccgaggcaaccccggaagctcctcccgcgcgcgaacatgatttggcctgaacaacgcagaggaagtgatcttatgtagctacaaaagatagtaatggggatatccaaggtgacaggcattgccgccacagcttttcttgtcacatctgttagtctgtgccagttgggaatgaggattattatgcttccattcctagccaccggtattgttgcttccattgtcacggttgcatcgcatgatgccatcaacctaccgtggatcttggggaagaactcggtcggaagatttcctctttggtcgattatactgtttggtcctttcttgacgcttgctcggacatatgcgatggttaagagatacatgaggaaggaggccgtgtatgacaagatcgtggaaggcctatatctcggaggatggccgtttctcttgaaacatttgccccctggaaacccatctgtcatagattgcacttgtgagcttccaagaagttcattcgttccagcagacgagtatctttgccttgcaacttgggataccagagctccaacaccgcaccagatcgaaaaggctgcacgttgggcttgtgaaaagaaatctgaggggaagccagtttatgtccattgcgcatttggtcatggaagaagtgcctgtgttgtgtgtgcaattctagtagcgctgggtactgctgagaactggaaagatgctgagaacatcatccgtgaaagaagaaagataaaaatgaacgcccttcaccgtaaaaccttggaagagtggtccaaacaacgagttcgtcagaaaaaggataagtagttgtttgaccagatgcatggagttgccctggatatggtgttattgctgcaccaatttattttaatccaatattccatagctcatgtatagtcgagtggaatgaggaatatcatagggagcccagctcgtgtgtaggatctatctatggagtacctatgacactgtcatagtaacatattgatttgagattctagatttggtgagaaccccataacctgtatcacaaagccttcaaggttggccagcttgccgagggcaagagccatttggctcatgaagctcatgttggcgtcgtcagtcagagatccaccggccatggtgtcagcaagcgactgatgcagctgctccaagccctgcgagagagcttcctctgcctgctgtgatgactgctgaaggctgcatatgccgaccacttgctgctctgtcagtggatctagctggggcagcagtgtctgcaacagaatggaatttcgtatactttattattggaactgcaaattcttcttgtactaaggggaaatctgatttacattggaacagttcttgtgatctcagtaatgaaaaagtaacatcgcctgagttccctgc

SEQ ID NO: 2705 - protein, 238 aa, Zea mays subsp. mays
  peptide (1)..(238): Ceres Seq. ID no. 12405777
MGISKVTGIAATAFLVTSVSLCQLGMRIIMLPFLATGIVASIVTVASHDAINLPWILGKNSVGRFPLWSIILFGPFLTLARTYAMVKRYMRKEAVYDKIVEGLYLGGWPFLLKHLPPGNPSVIDCTCELPRSSFVPADEYLCLATWDTRAPTPHQIEKAARWACEKKSEGKPVYVHCAFGHGRSACVVCAILVALGTAENWKDAENIIRERRKIKMNALHRKTLEEWSKQRVRQKKDK

SEQ ID NO: 2706 - protein, 213 aa, Zea mays subsp. mays
  peptide (1)..(213): Ceres Seq. ID no. 12405778
MRIIMLPFLATGIVASIVTVASHDAINLPWILGKNSVGRFPLWSIILFGPFLTLARTYAMVKRYMRKEAVYDKIVEGLYLGGWPFLLKHLPPGNPSVIDCTCELPRSSFVPADEYLCLATWDTRAPTPHQIEKAARWACEKKSEGKPVYVHCAFGHGRSACVVCAILVALGTAENWKDAENIIRERRKIKMNALHRKTLEEWSKQRVRQKKDK

SEQ ID NO: 2707 - protein, 209 aa, Zea mays subsp. mays
  peptide (1)..(209): Ceres Seq. ID no. 12405779
MLPFLATGIVASIVTVASHDAINLPWILGKNSVGRFPLWSIILFGPFLTLARTYAMVKRYMRKEAVYDKIVEGLYLGGWPFLLKHLPPGNPSVIDCTCELPRSSFVPADEYLCLATWDTRAPTPHQIEKAARWACEKKSEGKPVYVHCAFGHGRSACVVCAILVALGTAENWKDAENIIRERRKIKMNALHRKTLEEWSKQRVRQKKDK

SEQ ID NO: 2708 - DNA, 1641 bp, Zea mays subsp. mays
  misc_feature (1)..(1641): Ceres Seq. ID no. 12352107
  misc_feature (1)..(1641): Ortholog of  Ceres SEQ ID NO 14311938 as cited in SEQ ID NO 51615
  misc_feature (1)..(1641): Ortholog of  Ceres SEQ ID NO 14302059 as cited in SEQ ID NO 68322
ttctctagactccccttcgtccctttctctctcttcacactcgcctcgccattaaagctccaaaaaagaaaaaaaggctgcgaaaaaaatcatcttctcttctcctaaaatcttccacctttaaccgtccctgtccgcgaatttctagatgccccgatcgcttccgattttttcctggatttctccgattttttgaagtatttttccttggggacggtttcattgccattcctcgacggggttagggtttgcggggatgagggtgcacggcgaggtgtcggacgatgaggcggccgtggctgtggttggggaaacggtgccctcctcgccgcctcccgcctccgtggtgcagccgctggtggtggggtacgccctcaccaagaagaaagtcaagagcttcctgcagcccaagctgctcgcgctggccaggaagaaaggcattcatttcgtatcaattgatgagacttgccccctctctgaacaaggtccatttgacatcattttgcacaagcttactagtaaggagtggcagcaagttttggaggactatcgtgaagagcatccagaagtgactgtcctcgacccaccaaatgctatccaacatttgcacaatcgccaatcaatgctacaagaagttgctgatttgaacctgtccaatggttatggagaggtttgcgctccacgacaactagtcatcatgaaagatccgtcttccatacctgatgcagttgccaaggctggactaaccttgcctttggttgccaaaccattggtcgctgatggtacatcaaaatctcatgagctatcccttgcatatgtggaagcatcattgcctttgcttgaccctcctttggttctccaggaatttgtcaatcatggtgggatcctatttaaggtatatattgttggtgaaacaatacaggtagtccgcaggttttcacttcctgatgttaatacgtatgacctgggaaacaatgacggtatctttcgattcccaagagtttcttgtgctacaaataatgcagaagatgcagatgttgacccttgtattgcagaacttcctccaaagccacttcttgagaaacttggccgggagcttcgacgccggctgggtcttagactgtttaacatagatatgattagagaacatggaagaaaggaccggtactatgtcattgacatcaactattttcctggatatggcaagatgccaggatatgagcacatattcactgacttcctgctaagcctcgtgcaaagcaagtacaagaggctaagtgggagctgaagcgtagagaagatttactttcgatggagactattaacagatgccagctagcctggccatataacagtggggcagctagaaaggtcttccaggttgtacatagcaagggggtgggtcttagcatgaatgcggtgtttgggccggggccttgactgaaggcgcatagcagaactaagacaaaaaatgcagtgtttgggccggggcagtatctgaagaaaggttttggctccgtgcccagcctactgtgtaattcgtttgaccgagtggccgacctgtgtaaatcgttttaccgagtgccgacctgggcttctttagtttcaaaaacaaacaaacaaaacctttgcttcgttttt

SEQ ID NO: 2709 - protein, 343 aa, Zea mays subsp. mays
  peptide (1)..(343): Ceres Seq. ID no. 12352108
MRVHGEVSDDEAAVAVVGETVPSSPPPASVVQPLVVGYALTKKKVKSFLQPKLLALARKKGIHFVSIDETCPLSEQGPFDIILHKLTSKEWQQVLEDYREEHPEVTVLDPPNAIQHLHNRQSMLQEVADLNLSNGYGEVCAPRQLVIMKDPSSIPDAVAKAGLTLPLVAKPLVADGTSKSHELSLAYVEASLPLLDPPLVLQEFVNHGGILFKVYIVGETIQVVRRFSLPDVNTYDLGNNDGIFRFPRVSCATNNAEDADVDPCIAELPPKPLLEKLGRELRRRLGLRLFNIDMIREHGRKDRYYVIDINYFPGYGKMPGYEHIFTDFLLSLVQSKYKRLSGS

SEQ ID NO: 2710 - protein, 221 aa, Zea mays subsp. mays
  peptide (1)..(221): Ceres Seq. ID no. 12352109
MLQEVADLNLSNGYGEVCAPRQLVIMKDPSSIPDAVAKAGLTLPLVAKPLVADGTSKSHELSLAYVEASLPLLDPPLVLQEFVNHGGILFKVYIVGETIQVVRRFSLPDVNTYDLGNNDGIFRFPRVSCATNNAEDADVDPCIAELPPKPLLEKLGRELRRRLGLRLFNIDMIREHGRKDRYYVIDINYFPGYGKMPGYEHIFTDFLLSLVQSKYKRLSGS

SEQ ID NO: 2711 - protein, 196 aa, Zea mays subsp. mays
  peptide (1)..(196): Ceres Seq. ID no. 12352110
MKDPSSIPDAVAKAGLTLPLVAKPLVADGTSKSHELSLAYVEASLPLLDPPLVLQEFVNHGGILFKVYIVGETIQVVRRFSLPDVNTYDLGNNDGIFRFPRVSCATNNAEDADVDPCIAELPPKPLLEKLGRELRRRLGLRLFNIDMIREHGRKDRYYVIDINYFPGYGKMPGYEHIFTDFLLSLVQSKYKRLSGS

SEQ ID NO: 2712 - DNA, 1769 bp, Zea mays subsp. mays
  misc_feature (1)..(1769): Ceres Seq. ID no. 12405773
  misc_feature (1)..(1769): Ortholog of  Ceres SEQ ID NO 13593968 as cited in SEQ ID NO 54626
aaaagcgaaacgactccttcagttccgtcccgttcgtgacgacctccggtcccgggagggggagggggagggggagggagaggcgaggtcatggcctccggcaccggctccggccagccgcaacccgcagcagctgatgctgacccgggagccggcgacaacaagctcgtcttcgagacgccgctgcagccgcagcccgtgagggaggactacgtcgagaacgccgtcaagttcctctcccacccaaaggtcaggggctcccccgtcgtctacagacgatccttcctcgagaagaagggcctcaccacacaggagatcgacgaggccctacgaagagtccctgatcctgaacccatcactacggctaccgcttctccacagcagcaggttggcagccagaatcaatcagctggggcgcaaacttatgcgccagcgcgatctatgcacccagcaaccgctggccctgtcgtccgaccccggttcagctggtaccaagcattcctcgctgcagggctcttgcttggttttggtgctagcacggctgtctttatcaagaaactgttccttcctaggctcaagtcttggatccgcaacgtcgtagcacaaggtgatggcgctgaaggcaaccaacttaagcacaggattgatgaggaaacggctgaggctgtaaaggcttctgcttcagctgtttctgctattgccaaaacaaaccagcagctgcttgcttcaaaggatgaagaaaagaagatactcgtgacattaacacaagctctagattcccaagccaaggagttaaaatccttgaccgagtcaatcaatcgtaccagggaacccataaacattaccagagacgataggttttctcagcaccgcccactggaagaccatgtccctcctgttacgaggaatggggcaattaacagttcatggagatcttctcagcaaactaacatgtatggtgtgtcacatggtgactttggttccgcaaggtctgcttcattcgtgccagcacctgctgaacctacagctggatcattttcaagatcttgtgccgagcagacgtccaccgctgcacaacgagcggataggtcctctggcggtaagccatgggagatgcagcagtattcgcagcagaggcctggttatggatccaactcccagttgaatgatgatggatcatactctgatgcccaggacagctatgctccttcctattaccagaatggaaaggcccctgattttcaatcagatgaacctaggtctttgacctacaacactgggattgaggagagaccgccgccgcctcagcgccgctgggtgccccctcagcctccaggtgttgcgatgccagaagcagctgctgctatacgtcaaccaaaggtccctccaaagcagccctccagcgatgcctctcgggcagctggagagatgcaggtgaatggtgcttcaagtgcatcaccggatgctgtgactgaggttcctgttaatagtgctaccacaagtgatgctggacacagcgagatcgaagaacaaccagtggccgtctaagtgaaaaaccgagaccagccaagaactgggaagcaatctaagagagatttggggtttctggtacatactggggtttgtcatacatttctgaataacatgtgtcagaacagcatgacgacaacatgtcaataagtagcagatagtttctgtatttagagtaatgctacttgtacacaggagaatgtcaagcattatctatggctgttcgatcgagggtgcct

SEQ ID NO: 2713 - protein, 485 aa, Zea mays subsp. mays
  peptide (1)..(485): Ceres Seq. ID no. 12405774
MASGTGSGQPQPAAADADPGAGDNKLVFETPLQPQPVREDYVENAVKFLSHPKVRGSPVVYRRSFLEKKGLTTQEIDEALRRVPDPEPITTATASPQQQVGSQNQSAGAQTYAPARSMHPATAGPVVRPRFSWYQAFLAAGLLLGFGASTAVFIKKLFLPRLKSWIRNVVAQGDGAEGNQLKHRIDEETAEAVKASASAVSAIAKTNQQLLASKDEEKKILVTLTQALDSQAKELKSLTESINRTREPINITRDDRFSQHRPLEDHVPPVTRNGAINSSWRSSQQTNMYGVSHGDFGSARSASFVPAPAEPTAGSFSRSCAEQTSTAAQRADRSSGGKPWEMQQYSQQRPGYGSNSQLNDDGSYSDAQDSYAPSYYQNGKAPDFQSDEPRSLTYNTGIEERPPPPQRRWVPPQPPGVAMPEAAAAIRQPKVPPKQPSSDASRAAGEMQVNGASSASPDAVTEVPVNSATTSDAGHSEIEEQPVAV

SEQ ID NO: 2714 - protein, 368 aa, Zea mays subsp. mays
  peptide (1)..(368): Ceres Seq. ID no. 12405775
MHPATAGPVVRPRFSWYQAFLAAGLLLGFGASTAVFIKKLFLPRLKSWIRNVVAQGDGAEGNQLKHRIDEETAEAVKASASAVSAIAKTNQQLLASKDEEKKILVTLTQALDSQAKELKSLTESINRTREPINITRDDRFSQHRPLEDHVPPVTRNGAINSSWRSSQQTNMYGVSHGDFGSARSASFVPAPAEPTAGSFSRSCAEQTSTAAQRADRSSGGKPWEMQQYSQQRPGYGSNSQLNDDGSYSDAQDSYAPSYYQNGKAPDFQSDEPRSLTYNTGIEERPPPPQRRWVPPQPPGVAMPEAAAAIRQPKVPPKQPSSDASRAAGEMQVNGASSASPDAVTEVPVNSATTSDAGHSEIEEQPVAV

SEQ ID NO: 2715 - DNA, 1509 bp, Zea mays subsp. mays
  misc_feature (1)..(1509): Ceres Seq. ID no. 13498540
  misc_feature (1)..(1509): Ortholog of  Ceres SEQ ID NO 14312324 as cited in SEQ ID NO 60453
  misc_feature (1)..(1509): Ortholog of  Ceres SEQ ID NO 12624791 as cited in SEQ ID NO 63574
  misc_feature (1)..(1509): Ortholog of  Ceres SEQ ID NO 12780574 as cited in SEQ ID NO 65624
gagccctcgacgagcacccgagagacacgagagtgaaggaaagaggaaaaagaagaagactacagccaaaaccctatctcactccggcgcgccaccggccgatggtttcgatgaacaccacgccgaatccgcttgactccgccgccggcagcgccgccgtcgccggcggaagcgtggacgagggaggaggaggaggcggcaggaagaagcggatgcgcggggcggtagcggcggcgatggtgccgccgccgatggcggtcccgctgccggccgcggcgcccgcggcgggggaggaggttcggaaggtcaggaagccgtacaccatcaccaaatcccgggagagctggacggagccggagcacgataagttcctcgaggccctgcagctttttgatcgtgattggaagaagattgaagcatatgtcggctcgaagactgttatacagataaggagccatgcacagaagtacttcttgaaggttcagaagaatggcacaggcgagcatctgcccccacccaggccaaaacggaaggcagctcatccatatccccagaaatcatctaaaaatgtttctcaaactattttattacaagaacaacctactcagcgggagcaaggttctgtcatgcctatggatactgctactgtgataaacacaaatgcgaatgtggcagtggcagtggcagtgccttcctgggacaatactcttgctcaatctctcagtgctggtcttgttccaggtgcaacaaataactgttcaagtagcatagagagtccatctggtacttggccaacttctgaagcagttgagcaagaaattgtggttccatcactccatgctatgccagattttgcccgagtatacagcttcctaggaagcatatttgatcctgatacaagtgggcatttgcagaggttaaaagtgatggatccaattgatattcaaacggtactactacttatgagaaatctttccacgaaccttaggagtcctgactttgagcaacatctatggtggtggggaccatgttaaacctgaaggcatggaaaatcatggatctcctcagagtggccatcttccattcctggtaacaagtgaatgagagcacactggcaatttgtggtcgaagctttggttgtttccacgagacacattcttgtgtgttctcagcaatcgagttgtggacggctggtctggcaatttatgaatgccatgtctgccaatctgtatagcttccaataatgggtctgaccctagactagttttgttttccacgttcatgtagatagctagttttgtgtgctcatgcaattttttactgggtggagcctagatcgatatgtttttgttgtatcacttgtgcacgcgtgtatgtaagtatgtggaaccttgtaatgcttgaggtacttgagagtcttcggttaagacaaagcatatatgcgcaataatcaggagatcaccatcgtcgactatataatgagaagtttttttagttgtggacctacct

SEQ ID NO: 2716 - protein, 343 aa, Zea mays subsp. mays
  peptide (1)..(343): Ceres Seq. ID no. 13498541
ALDEHPRDTRVKERGKRRRLQPKPYLTPARHRPMVSMNTTPNPLDSAAGSAAVAGGSVDEGGGGGGRKKRMRGAVAAAMVPPPMAVPLPAAAPAAGEEVRKVRKPYTITKSRESWTEPEHDKFLEALQLFDRDWKKIEAYVGSKTVIQIRSHAQKYFLKVQKNGTGEHLPPPRPKRKAAHPYPQKSSKNVSQTILLQEQPTQREQGSVMPMDTATVINTNANVAVAVAVPSWDNTLAQSLSAGLVPGATNNCSSSIESPSGTWPTSEAVEQEIVVPSLHAMPDFARVYSFLGSIFDPDTSGHLQRLKVMDPIDIQTVLLLMRNLSTNLRSPDFEQHLWWWGPC

SEQ ID NO: 2717 - protein, 310 aa, Zea mays subsp. mays
  peptide (1)..(310): Ceres Seq. ID no. 13498542
MVSMNTTPNPLDSAAGSAAVAGGSVDEGGGGGGRKKRMRGAVAAAMVPPPMAVPLPAAAPAAGEEVRKVRKPYTITKSRESWTEPEHDKFLEALQLFDRDWKKIEAYVGSKTVIQIRSHAQKYFLKVQKNGTGEHLPPPRPKRKAAHPYPQKSSKNVSQTILLQEQPTQREQGSVMPMDTATVINTNANVAVAVAVPSWDNTLAQSLSAGLVPGATNNCSSSIESPSGTWPTSEAVEQEIVVPSLHAMPDFARVYSFLGSIFDPDTSGHLQRLKVMDPIDIQTVLLLMRNLSTNLRSPDFEQHLWWWGPC

SEQ ID NO: 2718 - protein, 307 aa, Zea mays subsp. mays
  peptide (1)..(307): Ceres Seq. ID no. 13498543
MNTTPNPLDSAAGSAAVAGGSVDEGGGGGGRKKRMRGAVAAAMVPPPMAVPLPAAAPAAGEEVRKVRKPYTITKSRESWTEPEHDKFLEALQLFDRDWKKIEAYVGSKTVIQIRSHAQKYFLKVQKNGTGEHLPPPRPKRKAAHPYPQKSSKNVSQTILLQEQPTQREQGSVMPMDTATVINTNANVAVAVAVPSWDNTLAQSLSAGLVPGATNNCSSSIESPSGTWPTSEAVEQEIVVPSLHAMPDFARVYSFLGSIFDPDTSGHLQRLKVMDPIDIQTVLLLMRNLSTNLRSPDFEQHLWWWGPC

SEQ ID NO: 2719 - DNA, 1544 bp, Zea mays subsp. mays
  misc_feature (1)..(1544): Ceres Seq. ID no. 12410573
  misc_feature (1)..(1544): Ortholog of  Ceres SEQ ID NO 15176803 as cited in SEQ ID NO 52778
  misc_feature (1)..(1544): Ortholog of  Ceres SEQ ID NO 14302283 as cited in SEQ ID NO 68688
  misc_feature (1)..(1544): Ortholog of  Ceres SEQ ID NO 14302772 as cited in SEQ ID NO 69055
ctacgcgacacacacacaccatcactgcgctgcgctactctactccccaccaccgccgccacccaagagctttcctcgctgcacaagaaatggccacgaaccatctctcccaagggcagcacccgcaggcctggccctggggcgtggccatgtacaccaacctacactaccaccaccagcagcaccaccactacgagaaggagcacctgttcgagaagccgctgacgccgagcgacgtgggcaagctcaacaggctggtgatccccaagcagcacgccgagaggtacttccctctcagcagcagcggcgccggcgacaaaggcctcatcctgtgcttcgaggacgacgacgacgaggaggctgctgccgccaacaagccgtggcggttccgctactcgtactggaccagcagccagagctacgtgctcaccaagggctggagccgctacgtcaaggagaagcagcttgacgccggcgacgtcgtgcgcttccagaggatgcgtggtttcggcatgcccgaccgcctgttcatcagccacagccgccgcggcgagactactgctactgctgcaacaacagtgccaccgccacctgctgctgctgccgtgcgcgtagtagtggcacctgcacagagcgctggcttagagcaccagcagcagcagccgtcgccttggagcccaatgtgctacagcacatcgggctcgtactcgtacccccccaccagcagcccagccaattcccagcatgcctaccaccgccactcagctgaccatgaccacagcaacaacatgcaacatgcaggagaatctcagtccgacagagacaacaggagctgcagtgcagcttcggcaccgccgccgccgccgtcgcggcggctccggctgttcggcgtcaacctcgactgcgggccggggccggagccggagacaccaacggcgatgtacggctacatgcaccaaagcccctacgcttacaacaactggggcagtccataccagcatgacgaggagatttaagattatgcctgcagaatccaaacagccaaagtagtagcagactagtagttgctagcagcagcagcctagtactacttgcacacgaagtgacaggattgaattgacctgtacacggggagaaaaaaaaaggaaggaaggaagtggagagagatcccttgtttcccgggcaatcttccttccaagttccatccccgcccccagaagaatgctgctgcctttttgctgttccgttttttttaaaattttattttcttctccatggcttccagaaaaccctacttactgtaggggatctggtagcagggggccgggcatgcgtgggaggtttgcaggaagcatcaagctgcgaaggagctggaacgagagacaacagacagagagaaagatgtgtgtgtgtatgtatgtgtgtgtcatctgtacctatatgtcttaatttgtgggtccgatagagaacaaactgcgaagttgatgtgtgtgcctgcctgcctcctgaagaaacaatgcaatatccccatggggattttgttc

SEQ ID NO: 2720 - protein, 337 aa, Zea mays subsp. mays
  peptide (1)..(337): Ceres Seq. ID no. 12410574
TRHTHTITALRYSTPHHRRHPRAFLAAQEMATNHLSQGQHPQAWPWGVAMYTNLHYHHQQHHHYEKEHLFEKPLTPSDVGKLNRLVIPKQHAERYFPLSSSGAGDKGLILCFEDDDDEEAAAANKPWRFRYSYWTSSQSYVLTKGWSRYVKEKQLDAGDVVRFQRMRGFGMPDRLFISHSRRGETTATAATTVPPPPAAAAVRVVVAPAQSAGLEHQQQQPSPWSPMCYSTSGSYSYPPTSSPANSQHAYHRHSADHDHSNNMQHAGESQSDRDNRSCSAASAPPPPPSRRLRLFGVNLDCGPGPEPETPTAMYGYMHQSPYAYNNWGSPYQHDEEI

SEQ ID NO: 2721 - protein, 308 aa, Zea mays subsp. mays
  peptide (1)..(308): Ceres Seq. ID no. 12410575
MATNHLSQGQHPQAWPWGVAMYTNLHYHHQQHHHYEKEHLFEKPLTPSDVGKLNRLVIPKQHAERYFPLSSSGAGDKGLILCFEDDDDEEAAAANKPWRFRYSYWTSSQSYVLTKGWSRYVKEKQLDAGDVVRFQRMRGFGMPDRLFISHSRRGETTATAATTVPPPPAAAAVRVVVAPAQSAGLEHQQQQPSPWSPMCYSTSGSYSYPPTSSPANSQHAYHRHSADHDHSNNMQHAGESQSDRDNRSCSAASAPPPPPSRRLRLFGVNLDCGPGPEPETPTAMYGYMHQSPYAYNNWGSPYQHDEEI

SEQ ID NO: 2722 - protein, 288 aa, Zea mays subsp. mays
  peptide (1)..(288): Ceres Seq. ID no. 12410576
MYTNLHYHHQQHHHYEKEHLFEKPLTPSDVGKLNRLVIPKQHAERYFPLSSSGAGDKGLILCFEDDDDEEAAAANKPWRFRYSYWTSSQSYVLTKGWSRYVKEKQLDAGDVVRFQRMRGFGMPDRLFISHSRRGETTATAATTVPPPPAAAAVRVVVAPAQSAGLEHQQQQPSPWSPMCYSTSGSYSYPPTSSPANSQHAYHRHSADHDHSNNMQHAGESQSDRDNRSCSAASAPPPPPSRRLRLFGVNLDCGPGPEPETPTAMYGYMHQSPYAYNNWGSPYQHDEEI

SEQ ID NO: 2723 - DNA, 1532 bp, Zea mays subsp. mays
  misc_feature (1)..(1532): Ceres Seq. ID no. 12362073
  misc_feature (1)..(1532): Ortholog of  Ceres SEQ ID NO 14308430 as cited in SEQ ID NO 55350
  misc_feature (1)..(1532): Ortholog of  Ceres SEQ ID NO 15177799 as cited in SEQ ID NO 59221
  misc_feature (1)..(1532): Ortholog of  Ceres SEQ ID NO 13662846 as cited in SEQ ID NO 65519
gcgttattttgtttgccaacccacagaaaaaggcggcagttcatccgctgctgttcctagttctctccacccagaagtcgacctcgttttttcctccctcctgtcccaaatctcacctccttccagttccagctaccgctgctcgcgttgactcgcctcttcctccattcagtgactccttggatcggctcagggacacgcaccagcgtattgtgtcggcgccgaatcttgcgcgcatttcgcgctattgttgccccggaggagtggtttggatccaagaaagtgatcggccttcttggttggatctcctcccgcaatggcggcgctcctggagctgttcctgggctcctctcccacgccggtggactgggaggcagaggtctacccggcgtacggggacttcgccgtactccccttactcgtcgccttcttccccgccgtccggttcctcctcgaccgactcgtcttcgaggttttagcacgaaaatttatatttggaaagggacatgataagctttctgaaacagatgacagtagaaagaaaatcaataaatttaaggaatcagcatggaagtttgttttttttctttctggcgaactgctttcactatctgtaacatacaatgagccatggtttaagaacacaagatacttttggataggccctggtgaccagatctggcctgatcaaaagataaaactgaagctcaaagctgtctacatgtatgctgctggattttacacatattcaattttcgctctcctgttctgggaaacaagacgttcggactttggagtatcaatgtcccaccatatagcaactgttgttctgattattctttcctacattttccgattcgctcgtgttggcactgttgttttagcccttcatgatgcaagtgatatattcctagagattgggaagatggccaagtacagtagctgcgagtggctagcagttatggcatttcttctttttgtggcatcgtggatacttcttcggctcgttatgttccctttctggatcctaagaagcacaagctatgaagtgctgctgaccttggatagggagaagcatcgattttatggccccatatactactatgttttcaactgtcttctgttctcactcctagttcttcacatatatttgtgggtactgatatggcggatgctagttaaacagattcaatcgaaagggcgtgttggtgatgatgttcgatccgattctgaaggcgaagatgagcatgaagattaactttttaggttgaatgattaactgaagaactacattgtgtgatacctgcagcaaggcacaccttctgaaccttttttttttcttttacagaagatatccagatattgtaattcattaggtcatatcattcgttcagcatagaagatgacaaccatcatttgggagttgtcaatgaagccgcctatcggatgctttttatcaaaacagaagtgcattgtatttatttcactaaaccatcatttataagagatacagaatgatcccttgttcatcc

SEQ ID NO: 2724 - protein, 313 aa, Zea mays subsp. mays
  peptide (1)..(313): Ceres Seq. ID no. 12362074
MAALLELFLGSSPTPVDWEAEVYPAYGDFAVLPLLVAFFPAVRFLLDRLVFEVLARKFIFGKGHDKLSETDDSRKKINKFKESAWKFVFFLSGELLSLSVTYNEPWFKNTRYFWIGPGDQIWPDQKIKLKLKAVYMYAAGFYTYSIFALLFWETRRSDFGVSMSHHIATVVLIILSYIFRFARVGTVVLALHDASDIFLEIGKMAKYSSCEWLAVMAFLLFVASWILLRLVMFPFWILRSTSYEVLLTLDREKHRFYGPIYYYVFNCLLFSLLVLHIYLWVLIWRMLVKQIQSKGRVGDDVRSDSEGEDEHED

SEQ ID NO: 2725 - protein, 178 aa, Zea mays subsp. mays
  peptide (1)..(178): Ceres Seq. ID no. 12362075
MYAAGFYTYSIFALLFWETRRSDFGVSMSHHIATVVLIILSYIFRFARVGTVVLALHDASDIFLEIGKMAKYSSCEWLAVMAFLLFVASWILLRLVMFPFWILRSTSYEVLLTLDREKHRFYGPIYYYVFNCLLFSLLVLHIYLWVLIWRMLVKQIQSKGRVGDDVRSDSEGEDEHED

SEQ ID NO: 2726 - protein, 158 aa, Zea mays subsp. mays
  peptide (1)..(158): Ceres Seq. ID no. 12362076
VILFANPQKKAAVHPLLFLVLSTQKSTSFFPPSCPKSHLLPVPATAARVDSPLPPFSDSLDRLRDTHQRIVSAPNLARISRYCCPGGVVWIQESDRPSWLDLLPQWRRSWSCSWAPLPRRWTGRQRSTRRTGTSPYSPYSSPSSPPSGSSSTDSSSRF

SEQ ID NO: 2727 - DNA, 1442 bp, Zea mays subsp. mays
  misc_feature (1)..(1442): Ceres Seq. ID no. 12566169
  misc_feature (1)..(1442): Ortholog of  Ceres SEQ ID NO 15171279 as cited in SEQ ID NO 51378
  misc_feature (1)..(1442): Ortholog of  Ceres SEQ ID NO 13596816 as cited in SEQ ID NO 62287
ctcgcccgttgcctgctctgtgccttatataaacgcagcagagcacggcagccggaagggagttcagacatcaatcaggcggaggagagaaactcccggccatttccaagcacaagaagtgggaagagagaacaggagggcgctgagctctctgatcgctgttctgagtggtggcggctgcagctgcccgcgcggcgaagatggctgcgccatggcttcttgcttgcagcttgctgctgctctccctggcgacctttcacggagctgagggcgcgatcggcgtgaactacggcatgatcgccaacaacctgccggcgccggagcaggtcgtctccatgtacaaggccaagaatatcagctacgtgcgtctgttccacccggacacgaccgtgctgaacgcgctccgcggctccggcatcggtgtcatcctgggcacgctgaacgaggacctcccgcgcctggcgtccgacccgtccttcgccgcgtcgtgggtggccaccaacgtgcagcccttcgccggcgctgtccagttccggtacatcaacgcgggcaacgaggtcatcccgggggacccggcggcgcaggtgctcccggccatgaagaacctggagtcggcgctccggtccgcgggggtcgcgggcgtccccgtcacgacggccgtggccaccagcgtgctcggcgcgtcgtacccgccgtcccagggcgccttctccgaggcggccacgacggtgatggcgccgctcgtctcgtacctgtcgtccaggggcgcgccgctgctggtgaacgtgtacccgtacttcgcctactcgggcagcggcgggcaggtggcgctcgggtacgcgctgctgtcgggcgccggcgccggcgccgcgtcgacggtgacggacggcggggcggtgtacactaacatgttcgacgcgatcgtggacgcgacgcacgcggcggtggagaaggccggggtgcaggggctggagctggtggtgtcggagaccggctggccgtcggccggcggcgagggcgccagcgtggagaacgcggcggcgtacaacaacaacgtggtgcggcacgtcgacggcggcacccctcggcggcccgggaatgccctggagacctacctgttcgccatgttcaacgagaacggcaaggccgagggcgtggagcagcacttcggcctcttccagccggacatgagcgaggtctaccacgtcgacttcacggcgggatccccctagggaggctcacccgcttctgtgtttactttatttatgtagtaggaatgatcattcttcattcagagactgatcgacttcatcggagctgctcgatactcgagcggcgcggataggcttactgcgtactggtagtattgttggagacttggagtagcattactatcgacgtgattcattacagtgcatgtcgttacacggcgccatggattt

SEQ ID NO: 2728 - protein, 343 aa, Zea mays subsp. mays
  peptide (1)..(343): Ceres Seq. ID no. 12566170
MAAPWLLACSLLLLSLATFHGAEGAIGVNYGMIANNLPAPEQVVSMYKAKNISYVRLFHPDTTVLNALRGSGIGVILGTLNEDLPRLASDPSFAASWVATNVQPFAGAVQFRYINAGNEVIPGDPAAQVLPAMKNLESALRSAGVAGVPVTTAVATSVLGASYPPSQGAFSEAATTVMAPLVSYLSSRGAPLLVNVYPYFAYSGSGGQVALGYALLSGAGAGAASTVTDGGAVYTNMFDAIVDATHAAVEKAGVQGLELVVSETGWPSAGGEGASVENAAAYNNNVVRHVDGGTPRRPGNALETYLFAMFNENGKAEGVEQHFGLFQPDMSEVYHVDFTAGSP

SEQ ID NO: 2729 - protein, 312 aa, Zea mays subsp. mays
  peptide (1)..(312): Ceres Seq. ID no. 12566171
MIANNLPAPEQVVSMYKAKNISYVRLFHPDTTVLNALRGSGIGVILGTLNEDLPRLASDPSFAASWVATNVQPFAGAVQFRYINAGNEVIPGDPAAQVLPAMKNLESALRSAGVAGVPVTTAVATSVLGASYPPSQGAFSEAATTVMAPLVSYLSSRGAPLLVNVYPYFAYSGSGGQVALGYALLSGAGAGAASTVTDGGAVYTNMFDAIVDATHAAVEKAGVQGLELVVSETGWPSAGGEGASVENAAAYNNNVVRHVDGGTPRRPGNALETYLFAMFNENGKAEGVEQHFGLFQPDMSEVYHVDFTAGSP

SEQ ID NO: 2730 - protein, 298 aa, Zea mays subsp. mays
  peptide (1)..(298): Ceres Seq. ID no. 12566172
MYKAKNISYVRLFHPDTTVLNALRGSGIGVILGTLNEDLPRLASDPSFAASWVATNVQPFAGAVQFRYINAGNEVIPGDPAAQVLPAMKNLESALRSAGVAGVPVTTAVATSVLGASYPPSQGAFSEAATTVMAPLVSYLSSRGAPLLVNVYPYFAYSGSGGQVALGYALLSGAGAGAASTVTDGGAVYTNMFDAIVDATHAAVEKAGVQGLELVVSETGWPSAGGEGASVENAAAYNNNVVRHVDGGTPRRPGNALETYLFAMFNENGKAEGVEQHFGLFQPDMSEVYHVDFTAGSP

SEQ ID NO: 2731 - DNA, 1486 bp, Zea mays subsp. mays
  misc_feature (1)..(1486): Ceres Seq. ID no. 12352115
  misc_feature (1)..(1486): Ortholog of  Ceres SEQ ID NO 14311938 as cited in SEQ ID NO 51615
  misc_feature (1)..(1486): Ortholog of  Ceres SEQ ID NO 14302059 as cited in SEQ ID NO 68322
atctcctatctctctctctctctccactcgccgccgcctcgacctgcccggtgcccgcccgcacacaccacctgtccccgctccgctccgcgttcccttcccctcccggcattcccgatcgccgccgcccgcccgcctgacctcgacctcccctctcccctctcgcgccatccctcaggcccgggtttgtctcgccgccgctactggccttcgctcggtccgccgcgatggtgtctggcgggtgcgtgggggcggagggggaggcggaccgcgcggcggcgcctccggaggccgcggaggagccggtggtgccggcgcctcccgcgcgggaggtcgtggtggggtacgcgctcacgacgaagaaggccaagagcttcctccagcccaagctccgggggctcgccaggaaaaagggaatcttgtttgttgctattgatcagaaacgtccattgtctgatcaaggtccatttgacattgttcttcataagttgactggaaaggggtggcagcaattgctggaggaatatagggaggctcacccagaagttactgttcttgatccacctggcgcaatagcaaacttgctagatcgccaatctatgcttcaagaagtatctgaattggacctcaccgattgtcatggtaaagtacgcgtgcctaaacagctattcattaatactgatccctcatcaataccagctgcagttaggagggcgggtctctctctcccattggtggcaaaacccttggtggcgaagtcccatgagctatctctggcttatgatccaacttcactgaccaaacttgagccccctttagttcttcaggaatttgttaaccatggtggcgtcatgtttaaggtgtacattgttggggatgcaataagggttgtacgtcggttttcacttccaaatgttgatgaaggtgatctgtcgaataatgctggggtatttcggtttccaagggtctcttgtgctgcagccagtgcagatgatgcagatcttgaccctggtgttgctgaacttcctccgagaccattgcttgagatcttggcacgagagctgcggcgacgactgggtcttagactattcaacattgatatgattagggagcacggaacaagagaccggttttatgtcatagacatgaactactttcctgggtacggcaaaatgcccgggtacgagcacgtgttcaccgacttcctgctgagccttgcccagaaagagtacaagaggcgaccaagctatagctccctaggctcaggcgaagggtgacaagtgaggaggaggctacttggcgggggcgccctgtatatgtatagcatccgcaatgcgtgcgtacagatgtgctgcgtgacgggagatgatgggtcgtagagctggggcatcactgcatcacatcagtagccgcgataaaagaagcgaggacttttggcaggctgtaattaaattgttactttgcatgtgctaactgttcatgcttc

SEQ ID NO: 2732 - protein, 349 aa, Zea mays subsp. mays
  peptide (1)..(349): Ceres Seq. ID no. 12352116
MVSGGCVGAEGEADRAAAPPEAAEEPVVPAPPAREVVVGYALTTKKAKSFLQPKLRGLARKKGILFVAIDQKRPLSDQGPFDIVLHKLTGKGWQQLLEEYREAHPEVTVLDPPGAIANLLDRQSMLQEVSELDLTDCHGKVRVPKQLFINTDPSSIPAAVRRAGLSLPLVAKPLVAKSHELSLAYDPTSLTKLEPPLVLQEFVNHGGVMFKVYIVGDAIRVVRRFSLPNVDEGDLSNNAGVFRFPRVSCAAASADDADLDPGVAELPPRPLLEILARELRRRLGLRLFNIDMIREHGTRDRFYVIDMNYFPGYGKMPGYEHVFTDFLLSLAQKEYKRRPSYSSLGSGEG

SEQ ID NO: 2733 - protein, 225 aa, Zea mays subsp. mays
  peptide (1)..(225): Ceres Seq. ID no. 12352117
MLQEVSELDLTDCHGKVRVPKQLFINTDPSSIPAAVRRAGLSLPLVAKPLVAKSHELSLAYDPTSLTKLEPPLVLQEFVNHGGVMFKVYIVGDAIRVVRRFSLPNVDEGDLSNNAGVFRFPRVSCAAASADDADLDPGVAELPPRPLLEILARELRRRLGLRLFNIDMIREHGTRDRFYVIDMNYFPGYGKMPGYEHVFTDFLLSLAQKEYKRRPSYSSLGSGEG

SEQ ID NO: 2734 - DNA, 1923 bp, Zea mays subsp. mays
  misc_feature (1)..(1923): Ceres Seq. ID no. 12408064
  misc_feature (1)..(1923): Ortholog of  Ceres SEQ ID NO 14308019 as cited in SEQ ID NO 65849
  misc_feature (1)..(1923): Ortholog of  Ceres SEQ ID NO 14307960 as cited in SEQ ID NO 66187
  misc_feature (1)..(1923): Ortholog of  Ceres SEQ ID NO 13502874 as cited in SEQ ID NO 66298
  misc_feature (1)..(1923): Ortholog of  Ceres SEQ ID NO 12614124 as cited in SEQ ID NO 68392
  misc_feature (1)..(1923): Ortholog of  Ceres SEQ ID NO 14307980 as cited in SEQ ID NO 69214
aaataagatcagttagcttgtctttatttcttcctccgatcactgattatacacacgcacttgatgaggttagatcgctagttaagcaagaaattagaggaggagagaggggtagccatggaagagcagcagccccgcccccgcccaagcatcatgttcgtcctgtcgtcgctcgccaagaataacccagagtccgtgctggcgctcatcgcggtgctcaccgtcgtcgccctgcgccacttgatctcctcatggcggcagcaggcccggctgcccccgtcaccgacgagcctcccggtgatcggccacctgcacctgctccgcccgccagtgcaccgcaccttccaggagctggcgtcccggatcggtccgctgatgcacatccgcctcggctccacgcactgcgtggttgccagcaccccggaggtggccagcgagctcatccgcggccacgagggcagcatctcggagcggccgctcacggcggtggcccgccagttcgcgtacgactcggccggcttcgccttcgcgccctataacacgcactggcgcttcatgaagcgcctctgcatgtcggagctgctcggcccgcgcactgtcgagcagctgcgccccgtccgccgcgccggcaccgtgtccctgctcgccgacctgctggcgtcgtcggcgcggggggagacggtggacctcacccgccatctcatccgcctctccaacacctccatcatccggatggtggccagcaccgtgcccggaagcgtcaccgacgaggcgcaggaggtggtcaaggacgtggccgagctcgtgggcgccttcaacgtcgacgactacatctccctagtccgtggctgggatctccagggcctccgcaggagagccgctggcgtccaccgccgcttcgacgcgctgctggaggacatcctcaggcacaaggaggaggcgagggcggcgcgaaggctcgaccaagacgacgacggacgtggcagcagcaagcaggacaagaagcaggccacgcacagcaaggacctgctcgacatcctcatggacaaggcagacgacccggcggcggagatcaagctcacccgggaaaacatcaaggctttcatcatcgacgtggtgactgctggttcagacacgtcggccgccatggtagagtggatgctggcggagctgatgaaccacccggagacgctgcgtaaggtggcggaggagatcgacgcggtggtcggcggcgacaggatcgccagcgaagcggacctgccacagctgccgtacctgatggcggcgtacaaggagacgttgcgtctgcacccggcagcgcccatcgcgcaccgacagtcgagcgaggagatggtggtgcgcggcttcacggtgccgccgcagacggcggtgttcatcaacgtgtgggccatcgggcgcgacccggcgtactgggaggagcccctagcgttccggccggagcggttcatgcccggcggcgccgccgagagcctggagccccgtgggcagcactttcagtacatgcccttcggcagcggccgccggggatgccccggcatgggcctggcgctacagtccgtgccggccgtgctggcggcgctcgtgcagtgcttccactgggccacccgtcgacggcgacggcggggtgaacaagatcgacatgtcggagtcggacgggctggtgtgcgctcgcaagaagccgcttctgctccgccccacgcctcgcctcacccccttcccggccgtcgtctagcgtgtcttccatggcaataccgtctatgtctgtaccaacctctaccagtaccaccacgtacgtacggattcgaagaatgtggataccatgcattaattatatgtatcacattattatatatatgatatgcaagagtaatatgcatggcattgtcttgcatgctctttgtt

SEQ ID NO: 2735 - protein, 586 aa, Zea mays subsp. mays
  peptide (1)..(586): Ceres Seq. ID no. 12408065
MEEQQPRPRPSIMFVLSSLAKNNPESVLALIAVLTVVALRHLISSWRQQARLPPSPTSLPVIGHLHLLRPPVHRTFQELASRIGPLMHIRLGSTHCVVASTPEVASELIRGHEGSISERPLTAVARQFAYDSAGFAFAPYNTHWRFMKRLCMSELLGPRTVEQLRPVRRAGTVSLLADLLASSARGETVDLTRHLIRLSNTSIIRMVASTVPGSVTDEAQEVVKDVAELVGAFNVDDYISLVRGWDLQGLRRRAAGVHRRFDALLEDILRHKEEARAARRLDQDDDGRGSSKQDKKQATHSKDLLDILMDKADDPAAEIKLTRENIKAFIIDVVTAGSDTSAAMVEWMLAELMNHPETLRKVAEEIDAVVGGDRIASEADLPQLPYLMAAYKETLRLHPAAPIAHRQSSEEMVVRGFTVPPQTAVFINVWAIGRDPAYWEEPLAFRPERFMPGGAAESLEPRGQHFQYMPFGSGRRGCPGMGLALQSVPAVLAALVQCFHWATRRRRRRGEQDRHVGVGRAGVRSQEAASAPPHASPHPLPGRRLACLPWQYRLCLYQPLPVPPRTYGFEECGYHALIICITLLYI

SEQ ID NO: 2736 - protein, 574 aa, Zea mays subsp. mays
  peptide (1)..(574): Ceres Seq. ID no. 12408066
MFVLSSLAKNNPESVLALIAVLTVVALRHLISSWRQQARLPPSPTSLPVIGHLHLLRPPVHRTFQELASRIGPLMHIRLGSTHCVVASTPEVASELIRGHEGSISERPLTAVARQFAYDSAGFAFAPYNTHWRFMKRLCMSELLGPRTVEQLRPVRRAGTVSLLADLLASSARGETVDLTRHLIRLSNTSIIRMVASTVPGSVTDEAQEVVKDVAELVGAFNVDDYISLVRGWDLQGLRRRAAGVHRRFDALLEDILRHKEEARAARRLDQDDDGRGSSKQDKKQATHSKDLLDILMDKADDPAAEIKLTRENIKAFIIDVVTAGSDTSAAMVEWMLAELMNHPETLRKVAEEIDAVVGGDRIASEADLPQLPYLMAAYKETLRLHPAAPIAHRQSSEEMVVRGFTVPPQTAVFINVWAIGRDPAYWEEPLAFRPERFMPGGAAESLEPRGQHFQYMPFGSGRRGCPGMGLALQSVPAVLAALVQCFHWATRRRRRRGEQDRHVGVGRAGVRSQEAASAPPHASPHPLPGRRLACLPWQYRLCLYQPLPVPPRTYGFEECGYHALIICITLLYI

SEQ ID NO: 2737 - protein, 500 aa, Zea mays subsp. mays
  peptide (1)..(500): Ceres Seq. ID no. 12408067
MHIRLGSTHCVVASTPEVASELIRGHEGSISERPLTAVARQFAYDSAGFAFAPYNTHWRFMKRLCMSELLGPRTVEQLRPVRRAGTVSLLADLLASSARGETVDLTRHLIRLSNTSIIRMVASTVPGSVTDEAQEVVKDVAELVGAFNVDDYISLVRGWDLQGLRRRAAGVHRRFDALLEDILRHKEEARAARRLDQDDDGRGSSKQDKKQATHSKDLLDILMDKADDPAAEIKLTRENIKAFIIDVVTAGSDTSAAMVEWMLAELMNHPETLRKVAEEIDAVVGGDRIASEADLPQLPYLMAAYKETLRLHPAAPIAHRQSSEEMVVRGFTVPPQTAVFINVWAIGRDPAYWEEPLAFRPERFMPGGAAESLEPRGQHFQYMPFGSGRRGCPGMGLALQSVPAVLAALVQCFHWATRRRRRRGEQDRHVGVGRAGVRSQEAASAPPHASPHPLPGRRLACLPWQYRLCLYQPLPVPPRTYGFEECGYHALIICITLLYI

SEQ ID NO: 2738 - DNA, 1052 bp, Zea mays subsp. mays
  misc_feature (1)..(1052): Ceres Seq. ID no. 12340741
  misc_feature (1)..(1052): Ortholog of  Ceres SEQ ID NO 15171235 as cited in SEQ ID NO 52469
  misc_feature (1)..(1052): Ortholog of  Ceres SEQ ID NO 15172705 as cited in SEQ ID NO 56069
  misc_feature (1)..(1052): Ortholog of  Ceres SEQ ID NO 12627215 as cited in SEQ ID NO 60976
  misc_feature (1)..(1052): Ortholog of  Ceres SEQ ID NO 13654980 as cited in SEQ ID NO 63094
  misc_feature (1)..(1052): Ortholog of  Ceres SEQ ID NO 15178542 as cited in SEQ ID NO 65410
  misc_feature (1)..(1052): Ortholog of  Ceres SEQ ID NO 15174852 as cited in SEQ ID NO 67166
  misc_feature (1)..(1052): Ortholog of  Ceres SEQ ID NO 12589584 as cited in SEQ ID NO 0
  misc_feature (1)..(1052): Ortholog of  Ceres SEQ ID NO 12635657 as cited in SEQ ID NO 0
  misc_feature (1)..(1052): Ortholog of  Ceres SEQ ID NO 12635879 as cited in SEQ ID NO 0
  misc_feature (1)..(1052): Ortholog of  Ceres SEQ ID NO 13599649 as cited in SEQ ID NO 0
  misc_feature (1)..(1052): Ortholog of  Ceres SEQ ID NO 14309205 as cited in SEQ ID NO 0
  misc_feature (1)..(1052): Ortholog of  Ceres SEQ ID NO 14309404 as cited in SEQ ID NO 0
  misc_feature (1)..(1052): Ortholog of  Ceres SEQ ID NO 15177492 as cited in SEQ ID NO 0
atatatgtgaatcctaactgtacactgtctgaagtggacgaacggctctggcttcggcgtgttacgtgtatagtaggccccttttgaacgaacggcgcgggccggggccaccaccagcatctgcggcagggagaatcgcgttggttcgacgcaaacgctacccggcgcccccttgcccttggggccggctattttaccgcacccgttctcccctctctaccgcagatcagatcacactcgtagagagaaggaaaaatatccccaaaccctagctcccgatctcgatggcgaaccctcgcgtcttcttcgacatgaccgtcggcggcgccccggcgggccggatcgtgatggagctgtacgccaacgaggtgcccaagaccgcggagaacttccgcgcgctgtgcacgggcgagaagggcgtgggcaagtccgggaagccgctccactacaagggctccaccttccaccgcgtcatccccgagttcatgtgccagggcggcgacttcacccgcggcaacggcaccggcggcgagtccatctacggcgagaagttccccgacgagaagttcgtgcgcaagcaacccgcccccggtgtgctctccatggccaacgccgggcccaacaccaacggctcccagttcttcatctgcaccgtcgcgaccccttggctcgacggcaagcacgtcgtcttcggccaggtcgtcgagggcatggacgtcgtcaaggccatcgagaaggtgggcacccgcaacggctccacctccaaggtggtcaaggtcgctgactgcggacagctctcctagatctctctgatctggtctgttcggccgccctccctccgtcatcgtcgactccccctgcgtccgttcctttggatctgaataagatggtggtgatctgagtggtggtcttagtttatcatgtatcgctcgcagtttaatttagcggtttaggtgtggatctgtgaaccccatggcgcctctgcttgattcgtgtttcacctgttatgttctgagattcatgataatgctatgagaactgaaattcccgtt

SEQ ID NO: 2739 - protein, 172 aa, Zea mays subsp. mays
  peptide (1)..(172): Ceres Seq. ID no. 12340742
MANPRVFFDMTVGGAPAGRIVMELYANEVPKTAENFRALCTGEKGVGKSGKPLHYKGSTFHRVIPEFMCQGGDFTRGNGTGGESIYGEKFPDEKFVRKQPAPGVLSMANAGPNTNGSQFFICTVATPWLDGKHVVFGQVVEGMDVVKAIEKVGTRNGSTSKVVKVADCGQLS

SEQ ID NO: 2740 - protein, 163 aa, Zea mays subsp. mays
  peptide (1)..(163): Ceres Seq. ID no. 12340743
MTVGGAPAGRIVMELYANEVPKTAENFRALCTGEKGVGKSGKPLHYKGSTFHRVIPEFMCQGGDFTRGNGTGGESIYGEKFPDEKFVRKQPAPGVLSMANAGPNTNGSQFFICTVATPWLDGKHVVFGQVVEGMDVVKAIEKVGTRNGSTSKVVKVADCGQLS

SEQ ID NO: 2741 - protein, 151 aa, Zea mays subsp. mays
  peptide (1)..(151): Ceres Seq. ID no. 12340744
MELYANEVPKTAENFRALCTGEKGVGKSGKPLHYKGSTFHRVIPEFMCQGGDFTRGNGTGGESIYGEKFPDEKFVRKQPAPGVLSMANAGPNTNGSQFFICTVATPWLDGKHVVFGQVVEGMDVVKAIEKVGTRNGSTSKVVKVADCGQLS

SEQ ID NO: 2742 - DNA, 1416 bp, Zea mays subsp. mays
  misc_feature (1)..(1416): Ceres Seq. ID no. 12454754
  misc_feature (1)..(1416): Ortholog of  Ceres SEQ ID NO 13599520 as cited in SEQ ID NO 633
  misc_feature (1)..(1416): Ortholog of  Ceres SEQ ID NO 13595142 as cited in SEQ ID NO 56671
  misc_feature (1)..(1416): Ortholog of  Ceres SEQ ID NO 15168569 as cited in SEQ ID NO 58123
  misc_feature (1)..(1416): Ortholog of  Ceres SEQ ID NO 15226382 as cited in SEQ ID NO 63295
  misc_feature (1)..(1416): Ortholog of  Ceres SEQ ID NO 13598460 as cited in SEQ ID NO 63382
  misc_feature (1)..(1416): Ortholog of  Ceres SEQ ID NO 13597403 as cited in SEQ ID NO 64085
aaaagccaggattcctctgctcttcctgtttagggtttccccctctctctgctcctgccggatgcgatggcgattccgccgcggactccttccccgccgccatcgtggtcgcgctctgtaaccgagaccgttcgggggtcccaccagttcaccgtacggggctactccctcgccaagggcatgggccccggccgctacctcgccagcgacgtcttcgccgtcggaggataccactgggccgtctacctctaccccgacggcaagaacgccgaggacaactccaactacgtctccgttttcgtcgccctcgcttccgacggcatcgacgtccgagccctcttcgagctcaccctcctcgaccagtccggccgcggctgccacaaggttcactcgcactttgaccgctcgctcaagttcggcccatacaccctcaagtacaggggatccatgtggggttacaagcgcttctacaaaagaacactcttggaagaatctgatttcttaaagaatgattgcctagtgatgaactgcacagtaggtgttgtcaagaaccgtatagaaacaccaaaggacatccagattcatgttccacgatcagacatgggccgctgcttcaaggagctcctcagccgctgcattggatgtgacataacattcgaagtgcgagatgagaaagtcagggcacacaagtggattcttgctgctcgctccccagtatttaaagcccagttctttggtcctattggaaagcctgacctgcacacggttgttgtggaggatgtggaacctgttgtcttcaaggcaatggtgaacttcatttacgctgatgaactccccagcattcctgagctagctgggtctgcctcaacgtggacatcaacagtagtagtacagcatttgttggcagcagctgatagatatggactggtccgtctgcgtatcctgtgtgaatcaaagctctgtgatgaactgactcctgaaactgtcgcaacaactttagcccttgctgaacagcaccattgtgctgagctgaagtctgcatgtctaaagttcattgctttgcgaggaaatttgggagctgttatggagacggaaggctttgattacctggaggatacatgcccgtccctactatctgacttgttagctactgtggcagtcgtggacgacgatcttgcatcccttaaccgaaaaaggggagtcagcgggaaccaagtcatggctctagtgggaagcgttgaaaggcgcacccggaggaagctttagtagctggcttccctagagggagactgtagttgacaacgatttgatttggacgctggtagctgtgaataatatcgtatccagatgattttttttttttttttgcagaagcagaagttgtaaattttttgaattgaatgcctttttttttcc

SEQ ID NO: 2743 - protein, 399 aa, Zea mays subsp. mays
  peptide (1)..(399): Ceres Seq. ID no. 12454755
MAIPPRTPSPPPSWSRSVTETVRGSHQFTVRGYSLAKGMGPGRYLASDVFAVGGYHWAVYLYPDGKNAEDNSNYVSVFVALASDGIDVRALFELTLLDQSGRGCHKVHSHFDRSLKFGPYTLKYRGSMWGYKRFYKRTLLEESDFLKNDCLVMNCTVGVVKNRIETPKDIQIHVPRSDMGRCFKELLSRCIGCDITFEVRDEKVRAHKWILAARSPVFKAQFFGPIGKPDLHTVVVEDVEPVVFKAMVNFIYADELPSIPELAGSASTWTSTVVVQHLLAAADRYGLVRLRILCESKLCDELTPETVATTLALAEQHHCAELKSACLKFIALRGNLGAVMETEGFDYLEDTCPSLLSDLLATVAVVDDDLASLNRKRGVSGNQVMALVGSVERRTRRKL

SEQ ID NO: 2744 - protein, 361 aa, Zea mays subsp. mays
  peptide (1)..(361): Ceres Seq. ID no. 12454756
MGPGRYLASDVFAVGGYHWAVYLYPDGKNAEDNSNYVSVFVALASDGIDVRALFELTLLDQSGRGCHKVHSHFDRSLKFGPYTLKYRGSMWGYKRFYKRTLLEESDFLKNDCLVMNCTVGVVKNRIETPKDIQIHVPRSDMGRCFKELLSRCIGCDITFEVRDEKVRAHKWILAARSPVFKAQFFGPIGKPDLHTVVVEDVEPVVFKAMVNFIYADELPSIPELAGSASTWTSTVVVQHLLAAADRYGLVRLRILCESKLCDELTPETVATTLALAEQHHCAELKSACLKFIALRGNLGAVMETEGFDYLEDTCPSLLSDLLATVAVVDDDLASLNRKRGVSGNQVMALVGSVERRTRRKL

SEQ ID NO: 2745 - protein, 272 aa, Zea mays subsp. mays
  peptide (1)..(272): Ceres Seq. ID no. 12454757
MWGYKRFYKRTLLEESDFLKNDCLVMNCTVGVVKNRIETPKDIQIHVPRSDMGRCFKELLSRCIGCDITFEVRDEKVRAHKWILAARSPVFKAQFFGPIGKPDLHTVVVEDVEPVVFKAMVNFIYADELPSIPELAGSASTWTSTVVVQHLLAAADRYGLVRLRILCESKLCDELTPETVATTLALAEQHHCAELKSACLKFIALRGNLGAVMETEGFDYLEDTCPSLLSDLLATVAVVDDDLASLNRKRGVSGNQVMALVGSVERRTRRKL

SEQ ID NO: 2746 - DNA, 1392 bp, Zea mays subsp. mays
  misc_feature (1)..(1392): Ceres Seq. ID no. 12381199
  misc_feature (1)..(1392): Ortholog of  Ceres SEQ ID NO 13658590 as cited in SEQ ID NO 66762
aaaacacccccaatcccacccagaatccggcggaagtcaagccaacctccgtcctccatccatgggcgagcaatccctctcccagcccaaggcccagcctctctccccgttcccgtcgcctcccgcctccgccgcgttgccgccccccgcctctgcctcatgcctcatgcctctgctgcctccacctcccgcaccaccagcgccgcggcctcgcgccccaagaagaaggtgacgaacccatcgcccgaccgtaacccggcaaagaagccccgcctgacgttctcgatcccgggccggcccctgtccgcagtcggcgaggtgggcgtggccatccgctacctgcgcgccgcggaccccgtcctcgccgccgtcatcgacgcgcacgagccccccgtgttccagtgcccgcaccgcccgttccactccctcgtccgatccatcctgtaccagcagctcgccttcaaggccgccgcctccgtctactcccgcttcctcgcgcttctcggcggcgagtcctgcgtggcccccgatgccgtcctcgcgctcaccccgcaccagctccgccagatcggggtctccccgcgcaaggcttcctacctccacgacctcgcccgcaagtatgcctccgggatcctctccgacgccgccatcgtcaacatggacgaccgctccctcgccgccatgcttaccatggtcaagggcatcggctcctggagcgtccacatgttcatgatcttctctctcgcgcgccccgacgtgctcccctccgccgacctcggcgtgcgcaagggcgtgcagatgctctacgccctcgaggacgtgcctcgtccgtcgcagatggacaagctgtgcgagcggtggcgcccctatcgctcagttggggcttggtacatgtggcggctcattgaatccaaggtgccccagccagcgccggccatccctgttggatcacttgctttcccttcgccggacggcgcagagtatgctacagcagcaagaacaacagcaacagcagactgtcatccaaatgatcgacccccttcagatgctcccagggatggggtgaattcggtatcacgtctactaattagttactctactccgtcttagatcaatcaatggttactctgtgcatctgatagtcagctccacacgttgttgttctggaatggaaccgcaggagggtagaattggatatgaaatgaggtttgggcccaacttattaagttgtcaatttggtttgtgttgtttatctgtgtcaagaatctgtgaagatgatggttggctgttgtttacattgtaaaatccacctagcagtattttagaaccttctggaattgttccatgcttgtagttcacctgtgataaaatgattaagaccatgcttaacgc

SEQ ID NO: 2747 - protein, 369 aa, Zea mays subsp. mays
  peptide (1)..(369): Ceres Seq. ID no. 12381200
KTPPIPPRIRRKSSQPPSSIHGRAIPLPAQGPASLPVPVASRLRRVAAPRLCLMPHASAASTSRTTSAAASRPKKKVTNPSPDRNPAKKPRLTFSIPGRPLSAVGEVGVAIRYLRAADPVLAAVIDAHEPPVFQCPHRPFHSLVRSILYQQLAFKAAASVYSRFLALLGGESCVAPDAVLALTPHQLRQIGVSPRKASYLHDLARKYASGILSDAAIVNMDDRSLAAMLTMVKGIGSWSVHMFMIFSLARPDVLPSADLGVRKGVQMLYALEDVPRPSQMDKLCERWRPYRSVGAWYMWRLIESKVPQPAPAIPVGSLAFPSPDGAEYATAARTTATADCHPNDRPPSDAPRDGVNSVSRLLISYSTPS

SEQ ID NO: 2748 - protein, 316 aa, Zea mays subsp. mays
  peptide (1)..(316): Ceres Seq. ID no. 12381201
MPHASAASTSRTTSAAASRPKKKVTNPSPDRNPAKKPRLTFSIPGRPLSAVGEVGVAIRYLRAADPVLAAVIDAHEPPVFQCPHRPFHSLVRSILYQQLAFKAAASVYSRFLALLGGESCVAPDAVLALTPHQLRQIGVSPRKASYLHDLARKYASGILSDAAIVNMDDRSLAAMLTMVKGIGSWSVHMFMIFSLARPDVLPSADLGVRKGVQMLYALEDVPRPSQMDKLCERWRPYRSVGAWYMWRLIESKVPQPAPAIPVGSLAFPSPDGAEYATAARTTATADCHPNDRPPSDAPRDGVNSVSRLLISYSTPS

SEQ ID NO: 2749 - DNA, 1159 bp, Zea mays subsp. mays
  misc_feature (1)..(1159): Ceres Seq. ID no. 13492677
  misc_feature (1)..(1159): Ortholog of  Ceres SEQ ID NO 15179926 as cited in SEQ ID NO 57010
  misc_feature (1)..(1159): Ortholog of  Ceres SEQ ID NO 14316075 as cited in SEQ ID NO 60059
ggccacaccttccgtcccccggcctccgctcgcctcgccgcccgcctgtccctgtctgtctctctctctcctcgctgagtcgccgccagccatgaacaacctcctcacggattcctttgagctcccccggcgggactcctcaagagatgcagacattgaaatgggaatgcatcaagctgatgcttcagacaacttaaaagatttcttgaagaaggtcgatacaattgagagtttaattgcaaagctgacaaatctattgaataagctacagactgcaaatgaggaatccaaagcagttacaaaagcaagttccatgaaagcaattaagcagcggatggagaaagatattgatgaagtggggaaaattgctcgtcaggcgaagacaaaagttgatgaattggaaaaagacaacttatcaaataggcaaaaacctggatgtggaaaaggttctgccgtggaccgatcaagagagcaaactactggagcagtgaaaaagaaattgaaggagcggatggatgactttcagaccttgagagaagcaatcaggcaagagtatcgggaggttgttgaaagaagggtttttactgtaactggtaatcgtcctgatgaagagacaattgatgacttgatagagaccggaaaaagtgagcaaatattcaaagatgctatccaacatcagggaagaggccagatactagacactgttgctgaaatacaggagcgacatgatgctgtaagggatctagagaggaagcttctggagttgcaacagatattcatggacatggcagttcttgttgaggcgcaaggagacatgatcaacaacatcgagacccatgtctcgaacgccaccaaccacatacagcaaggtgtgagcgcgctccagaacgcgaagaaactgcagaggaattcgaggaagtggatgtgctacgccatcatcatactgctggtgatagtcgtggtcattgtcgtcgcagtcatccagccatggaagaagggcacctagcgtggtggtgccttttttcctgtttgtgtaatatgtgtgcagttttttttgtgggtgattcgtgatttgttgttgtacctatagtcgacgcaacaggagctctggcatttcgattcattctgtctagtgaaaggacactgccatcatatgccg

SEQ ID NO: 2750 - protein, 334 aa, Zea mays subsp. mays
  peptide (1)..(334): Ceres Seq. ID no. 13492678
ATPSVPRPPLASPPACPCLSLSLLAESPPAMNNLLTDSFELPRRDSSRDADIEMGMHQADASDNLKDFLKKVDTIESLIAKLTNLLNKLQTANEESKAVTKASSMKAIKQRMEKDIDEVGKIARQAKTKVDELEKDNLSNRQKPGCGKGSAVDRSREQTTGAVKKKLKERMDDFQTLREAIRQEYREVVERRVFTVTGNRPDEETIDDLIETGKSEQIFKDAIQHQGRGQILDTVAEIQERHDAVRDLERKLLELQQIFMDMAVLVEAQGDMINNIETHVSNATNHIQQGVSALQNAKKLQRNSRKWMCYAIIILLVIVVVIVVAVIQPWKKGT

SEQ ID NO: 2751 - protein, 304 aa, Zea mays subsp. mays
  peptide (1)..(304): Ceres Seq. ID no. 13492679
MNNLLTDSFELPRRDSSRDADIEMGMHQADASDNLKDFLKKVDTIESLIAKLTNLLNKLQTANEESKAVTKASSMKAIKQRMEKDIDEVGKIARQAKTKVDELEKDNLSNRQKPGCGKGSAVDRSREQTTGAVKKKLKERMDDFQTLREAIRQEYREVVERRVFTVTGNRPDEETIDDLIETGKSEQIFKDAIQHQGRGQILDTVAEIQERHDAVRDLERKLLELQQIFMDMAVLVEAQGDMINNIETHVSNATNHIQQGVSALQNAKKLQRNSRKWMCYAIIILLVIVVVIVVAVIQPWKKGT

SEQ ID NO: 2752 - protein, 281 aa, Zea mays subsp. mays
  peptide (1)..(281): Ceres Seq. ID no. 13492680
MGMHQADASDNLKDFLKKVDTIESLIAKLTNLLNKLQTANEESKAVTKASSMKAIKQRMEKDIDEVGKIARQAKTKVDELEKDNLSNRQKPGCGKGSAVDRSREQTTGAVKKKLKERMDDFQTLREAIRQEYREVVERRVFTVTGNRPDEETIDDLIETGKSEQIFKDAIQHQGRGQILDTVAEIQERHDAVRDLERKLLELQQIFMDMAVLVEAQGDMINNIETHVSNATNHIQQGVSALQNAKKLQRNSRKWMCYAIIILLVIVVVIVVAVIQPWKKGT

SEQ ID NO: 2753 - DNA, 1352 bp, Zea mays subsp. mays
  misc_feature (1)..(1352): Ceres Seq. ID no. 13493446
  misc_feature (1)..(1352): Ortholog of  Ceres SEQ ID NO 15172958 as cited in SEQ ID NO 51206
  misc_feature (1)..(1352): Ortholog of  Ceres SEQ ID NO 15171139 as cited in SEQ ID NO 60093
tcggcaaatatacactgcgcccgtccgcctccgcaatcgacaacgaaccactgggcaccggccgcggctcgcaagtngcctgcgttcctcttccacgctccgcccacccgtcccggggcccgccgcaacccgatccctccccgcgcccaacgatgccggccggccagccgcacgcgcacgaagccgctgccgccgcctgcgtcggcagcggcgcgaaccactccaaccaccgagtgccggcgcactcgccaccgccgctccccgcggaggtggtgccggcgtacccgcccccggagtcggaggacgacgagacctgggtgtggacgcagatcaaggcggaggcccgccgcgacgcggacgcggagccggcgctcgcctccttcctctacgccaccgtgttgtcccacccgtccctgccccgctccctctccttccacctcgccaacaagctctgctcctccacgctcctctccacgctcctctacgacctcttcctcgccacgctcaccgcgcacccctctctccgcgccgccgtcgtcgccgacctcctcgcggcccactcccgcgaccccgcctgcgtcggcttctcccactgcctcctcaactacaagggcttcctcgccatccaggcccaccgcgtcgcgcacgtgctctgggcgcagcagcgacggcccctcgcgctcgcgctccagtcccgcgtcgccgacgtcttcgccgttgacatccaccccgccgccgtcgtcgggaagggaatcctcctcgaccacgccaccggcgtcgtcatcggtgagacggccgtcgtcggcgacaacgtctccatcctccaccacgtcaccttgggcgggaccgggaaggcggtgggtgaccggcaccccaagattggggatggcgtgctgattggagcaggggccaccattcttggtaacgtgaaaattggtgccggggctaagattggagccggatccgtggtgctgatagatgtgccggcgaggagcacggcggttggaaccctgccaggctgatggtggaagaaggccgaggtgcgaatgaggaggacatgccaggggagtccatggatcacacgtccttcatacgtcaatggtcggactacaccatttgagagcggttatccaaggtctattgctcttcttttgtatcactagtaatggtgatgtaccaaataccgagtacttgctctttgttgtgtgtctatggtttgtgtattgtacttagaagcctagtggtgtttatgatcattgtcagctgagtgtgccatgcctgaatactggtaaatttcgattgatggatggacaaatctgtatgagagttggttggaatttgtcacattcctt

SEQ ID NO: 2754 - protein, 339 aa, Zea mays subsp. mays
  peptide (1)..(339): Ceres Seq. ID no. 13493447
  misc_feature (25)..(25): Xaa is any aa, unknown or other
GKYTLRPSASAIDNEPLGTGRGSQXACVPLPRSAHPSRGPPQPDPSPRPTMPAGQPHAHEAAAAACVGSGANHSNHRVPAHSPPPLPAEVVPAYPPPESEDDETWVWTQIKAEARRDADAEPALASFLYATVLSHPSLPRSLSFHLANKLCSSTLLSTLLYDLFLATLTAHPSLRAAVVADLLAAHSRDPACVGFSHCLLNYKGFLAIQAHRVAHVLWAQQRRPLALALQSRVADVFAVDIHPAAVVGKGILLDHATGVVIGETAVVGDNVSILHHVTLGGTGKAVGDRHPKIGDGVLIGAGATILGNVKIGAGAKIGAGSVVLIDVPARSTAVGTLPG

SEQ ID NO: 2755 - protein, 298 aa, Zea mays subsp. mays
  peptide (1)..(298): Ceres Seq. ID no. 13493448
  misc_feature (26)..(26): Xaa is any aa, unknown or other
SANIHCARPPPQSTTNHWAPAAARKXPAFLFHAPPTRPGARRNPIPPRAQRCRPASRTRTKPLPPPASAAARTTPTTECRRTRHRRSPRRWCRRTRPRSRRTTRPGCGRRSRRRPAATRTRSRRSPPSSTPPCCPTRPCPAPSPSTSPTSSAPPRSSPRSSTTSSSPRSPRTPLSAPPSSPTSSRPTPATPPASASPTASSTTRASSPSRPTASRTCSGRSSDGPSRSRSSPASPTSSPLTSTPPPSSGRESSSTTPPASSSVRRPSSATTSPSSTTSPWAGPGRRWVTGTPRLGMAC

SEQ ID NO: 2756 - protein, 289 aa, Zea mays subsp. mays
  peptide (1)..(289): Ceres Seq. ID no. 13493449
MPAGQPHAHEAAAAACVGSGANHSNHRVPAHSPPPLPAEVVPAYPPPESEDDETWVWTQIKAEARRDADAEPALASFLYATVLSHPSLPRSLSFHLANKLCSSTLLSTLLYDLFLATLTAHPSLRAAVVADLLAAHSRDPACVGFSHCLLNYKGFLAIQAHRVAHVLWAQQRRPLALALQSRVADVFAVDIHPAAVVGKGILLDHATGVVIGETAVVGDNVSILHHVTLGGTGKAVGDRHPKIGDGVLIGAGATILGNVKIGAGAKIGAGSVVLIDVPARSTAVGTLPG

SEQ ID NO: 2757 - DNA, 1589 bp, Zea mays subsp. mays
  misc_feature (1)..(1589): Ceres Seq. ID no. 12410562
  misc_feature (1)..(1589): Ortholog of  Ceres SEQ ID NO 15178096 as cited in SEQ ID NO 52497
  misc_feature (1)..(1589): Ortholog of  Ceres SEQ ID NO 13656138 as cited in SEQ ID NO 65492
gtcgatttggattcgcagcggcggcggcggccaatcaaagcaatcatcacccagtcgcccagccccaacagacgctccagtccccagccctcccacccgcatcgatcgatgcgaggcacaatgccggccaccgactcctcctcctcgtcgtcgccggcggcggcgccgctgtcctctatcggccgctccatccgctcgctccgccgtgaccagaaccagatccactccttcccgccgccgccagacgccacagacgccttccagcgccgcgccgcccaactcctggccgacctcccggcagccgacgacgtcctctccctcgcctggacgcgccgcctcctcgaatccttcctcctctgcctcgaggagttccgcgccctgctcttcggctccggggactcgcccgccgctcgccccccgctcgaccgcctcgtcgccgacttctccgaccgcgccgtcaaggcgctcgacctctgcaacgccgtccgcgacggcctcgacctcgtccgccagtggcgcaagcacctcgccatcgccgcagccgtcctcgcctcgtcctctgattcctcctcgccgctcggggaggcccagatccgccgcgcccgcaaggcgctcaccgacctcaccatcctcatgctcgacgacagggacggcgggggcgtcgtcggccagcgcaaccgatccttcggccgcgccaacgagaagccccctcgccaccaccgccggagcagcagcggcgggagctccggctccggctccggctcccacctcaggtccctctcctggagcgtgtcccgggcctggtccgccgcgcgccagctgcaggccatcgggggaggactccccgtgccccgcccgcacgacaacgctgccacgggaggcctcgcctccgccgtctacaccatgggcgccgtcctcttcatcgtcgccttcgcgctcgtcgccgcaatcccgtgccaggaccgcggcctccacgcgcatttctccgtcatcaggaacctcccctgctcggcccccatcacaacgctctacgagcgcatcctcgacgagtccaagaagaaggaccgcaagaactcgtgcggcctgctcaaggagatccaccagattgagctctgctccaggcacctcatggagatcactgacgccgccgacttcccgttgcgcgaggacaaggacgccgtcttgcgggaggccgcgcaggacctagtgcacctgtgcgaatccatcaaggaagggctcgacccgctcgagcgccaggtcagagagatgttccacaggattgtgcgcacccgcacagaaatccttgactgcttgagtaagccacatggcaccgggtgatgggatacaggagattgccagcccgtttgcttgctgtgatgccccttaaccaaacattcttgtgaaatgcagcagcggtgttcagatgaggtagccttttctctgcataagttagcaactactgcatcatacaaatgcgtcttcatagaggcttgtccttctgtttgatataaattggtttgtttattatttttatttcatttcctcatctgtgtagattgtgaatccatacttggcagtgcttcgtagtc

SEQ ID NO: 2758 - protein, 445 aa, Zea mays subsp. mays
  peptide (1)..(445): Ceres Seq. ID no. 12410563
VDLDSQRRRRPIKAIITQSPSPNRRSSPQPSHPHRSMRGTMPATDSSSSSSPAAAPLSSIGRSIRSLRRDQNQIHSFPPPPDATDAFQRRAAQLLADLPAADDVLSLAWTRRLLESFLLCLEEFRALLFGSGDSPAARPPLDRLVADFSDRAVKALDLCNAVRDGLDLVRQWRKHLAIAAAVLASSSDSSSPLGEAQIRRARKALTDLTILMLDDRDGGGVVGQRNRSFGRANEKPPRHHRRSSSGGSSGSGSGSHLRSLSWSVSRAWSAARQLQAIGGGLPVPRPHDNAATGGLASAVYTMGAVLFIVAFALVAAIPCQDRGLHAHFSVIRNLPCSAPITTLYERILDESKKKDRKNSCGLLKEIHQIELCSRHLMEITDAADFPLREDKDAVLREAAQDLVHLCESIKEGLDPLERQVREMFHRIVRTRTEILDCLSKPHGTG

SEQ ID NO: 2759 - protein, 409 aa, Zea mays subsp. mays
  peptide (1)..(409): Ceres Seq. ID no. 12410564
MRGTMPATDSSSSSSPAAAPLSSIGRSIRSLRRDQNQIHSFPPPPDATDAFQRRAAQLLADLPAADDVLSLAWTRRLLESFLLCLEEFRALLFGSGDSPAARPPLDRLVADFSDRAVKALDLCNAVRDGLDLVRQWRKHLAIAAAVLASSSDSSSPLGEAQIRRARKALTDLTILMLDDRDGGGVVGQRNRSFGRANEKPPRHHRRSSSGGSSGSGSGSHLRSLSWSVSRAWSAARQLQAIGGGLPVPRPHDNAATGGLASAVYTMGAVLFIVAFALVAAIPCQDRGLHAHFSVIRNLPCSAPITTLYERILDESKKKDRKNSCGLLKEIHQIELCSRHLMEITDAADFPLREDKDAVLREAAQDLVHLCESIKEGLDPLERQVREMFHRIVRTRTEILDCLSKPHGTG

SEQ ID NO: 2760 - protein, 405 aa, Zea mays subsp. mays
  peptide (1)..(405): Ceres Seq. ID no. 12410565
MPATDSSSSSSPAAAPLSSIGRSIRSLRRDQNQIHSFPPPPDATDAFQRRAAQLLADLPAADDVLSLAWTRRLLESFLLCLEEFRALLFGSGDSPAARPPLDRLVADFSDRAVKALDLCNAVRDGLDLVRQWRKHLAIAAAVLASSSDSSSPLGEAQIRRARKALTDLTILMLDDRDGGGVVGQRNRSFGRANEKPPRHHRRSSSGGSSGSGSGSHLRSLSWSVSRAWSAARQLQAIGGGLPVPRPHDNAATGGLASAVYTMGAVLFIVAFALVAAIPCQDRGLHAHFSVIRNLPCSAPITTLYERILDESKKKDRKNSCGLLKEIHQIELCSRHLMEITDAADFPLREDKDAVLREAAQDLVHLCESIKEGLDPLERQVREMFHRIVRTRTEILDCLSKPHGTG

SEQ ID NO: 2761 - DNA, 1299 bp, Zea mays subsp. mays
  misc_feature (1)..(1299): Ceres Seq. ID no. 13498950
  misc_feature (1)..(1299): Ortholog of  Ceres SEQ ID NO 14310358 as cited in SEQ ID NO 54582
  misc_feature (1)..(1299): Ortholog of  Ceres SEQ ID NO 15176085 as cited in SEQ ID NO 69305
aaaggatgctgagggctcatctcgctgcttctgaactgcaagtggatggaaatcggcccctgcacaagaaaactaccttccaactgaaagaggttagaggtcctaatcactcgcaaactctcaacaactacgcacgccttcctctgcctccgccggccggcacgatggcgtcaggcggcgagcccggggctccgaaggtcgtcctcctcctcgtcccccacgtggacgagtccttccacgccgctctgcgggcgcgcttccgcgtcctcgacttcttcgcctccccctcctcaggtgagccgctgccagccttcctcgvhgcggcggcggccgctccggagccccctcgcgccgccgtcgtggtgggcgcgggcccggcccgcgtgracrccgcgttcctcgacgccgtgccgtcgctccgctgcgtcttgtccctggcggcgggcgtggacttcatcgacctcggcgagtgcgcgcgccgcggcgtggccgtcgccaactccggcagcgtgttctcggccagacgtcgccgaccacgccgtcggcctgctcatcgacgtgctccgccgcgtgtcggccgccgagcggttcagtccgccgcggcctctggccggtgcagggtgaccacccgctcggctccaaggtcggtggcaggcgtgtgggcgtcgttggcttggggaacatcggctcgcagatcgcaaagaggctccaggctctcggctgcaccgtctgctaccactctagaacgcccagggactcggtcccttacagatacttcgccaacgtccgcgacctcgcggcggattccgacgtgctcgtcgtggcgtgcgcgctgaacgaggcgacgcggcacatcgtckgcagggacgtcctggaggcgctagggacggacggggtcgtcgtgaacatcagcaggggcgccaacgtcgacgaggccgagctggtcagggcgctcaaggagggcaggatcgccggcgccggcctcgatgtcttcgagagcgagcccggagcgcgccgcgagttcttctccatggacaacgtggtcatgacgcctcatgtggcggttttcacggcggagtccatgtcggacctgcgagaccacgccatcgccaacctcgaagcattcttctccggtcagccgttsttacgccggtgcctccctactcaccggtcaagtaggctgccaacgtgattgaagccagcggattattggctctgtttgtaacttcgcatcgtttaaaatgtctcgtataatacttgatttgttttttactgtcaatagatcgaaggtgaaaatcc

SEQ ID NO: 2762 - protein, 277 aa, Zea mays subsp. mays
  peptide (1)..(277): Ceres Seq. ID no. 15223055
  misc_feature (106)..(106): Xaa is any aa, unknown or other
  misc_feature (129)..(129): Xaa is any aa, unknown or other
  misc_feature (130)..(130): Xaa is any aa, unknown or other
RMLRAHLAASELQVDGNRPLHKKTTFQLKEVRGPNHSQTLNNYARLPLPPPAGTMASGGEPGAPKVVLLLVPHVDESFHAALRARFRVLDFFASPSSGEPLPAFLXAAAAAPEPPRAAVVVGAGPARVXXAFLDAVPSLRCVLSLAAGVDFIDLGECARRGVAVANSGSVFSARRRRPRRRPAHRRAPPRVGRRAVQSAAASGRCRVTTRSAPRSVAGVWASLAWGTSARRSQRGSRLSAAPSATTLERPGTRSLTDTSPTSATSRRIPTCSSWRAR

SEQ ID NO: 2763 - protein, 276 aa, Zea mays subsp. mays
  peptide (1)..(276): Ceres Seq. ID no. 15223056
  misc_feature (105)..(105): Xaa is any aa, unknown or other
  misc_feature (128)..(128): Xaa is any aa, unknown or other
  misc_feature (129)..(129): Xaa is any aa, unknown or other
MLRAHLAASELQVDGNRPLHKKTTFQLKEVRGPNHSQTLNNYARLPLPPPAGTMASGGEPGAPKVVLLLVPHVDESFHAALRARFRVLDFFASPSSGEPLPAFLXAAAAAPEPPRAAVVVGAGPARVXXAFLDAVPSLRCVLSLAAGVDFIDLGECARRGVAVANSGSVFSARRRRPRRRPAHRRAPPRVGRRAVQSAAASGRCRVTTRSAPRSVAGVWASLAWGTSARRSQRGSRLSAAPSATTLERPGTRSLTDTSPTSATSRRIPTCSSWRAR

SEQ ID NO: 2764 - protein, 223 aa, Zea mays subsp. mays
  peptide (1)..(223): Ceres Seq. ID no. 15223057
  misc_feature (52)..(52): Xaa is any aa, unknown or other
  misc_feature (75)..(75): Xaa is any aa, unknown or other
  misc_feature (76)..(76): Xaa is any aa, unknown or other
MASGGEPGAPKVVLLLVPHVDESFHAALRARFRVLDFFASPSSGEPLPAFLXAAAAAPEPPRAAVVVGAGPARVXXAFLDAVPSLRCVLSLAAGVDFIDLGECARRGVAVANSGSVFSARRRRPRRRPAHRRAPPRVGRRAVQSAAASGRCRVTTRSAPRSVAGVWASLAWGTSARRSQRGSRLSAAPSATTLERPGTRSLTDTSPTSATSRRIPTCSSWRAR

SEQ ID NO: 2765 - DNA, 1522 bp, Zea mays subsp. mays
  misc_feature (1)..(1522): Ceres Seq. ID no. 12363287
  misc_feature (1)..(1522): Ortholog of  Ceres SEQ ID NO 15168509 as cited in SEQ ID NO 57909
  misc_feature (1)..(1522): Ortholog of  Ceres SEQ ID NO 13594429 as cited in SEQ ID NO 58006
  misc_feature (1)..(1522): Ortholog of  Ceres SEQ ID NO 13661403 as cited in SEQ ID NO 61549
gcacgagaccattacctagaacatcctaatcgaaaaaccactcgctgcctggttatggactccaccaggagcaaccaggtcgccggcagatgcaacagcaccatcgcgtcaagggctgccacggtcccgccgtcgctgaccatgccgcgcggcgaactcgctgacgccatcgtgggcggaggcggaggaggaggagcggacggggacccccgggccgccctcctccgtctgtctgctctcggggaccgcatggccgccgtccggggccgtatctgcgcctctatctcgggcgaagcccggcctctctcctacgccgacatccaatctgtctcctccgagatctccgccgctgcccagctcgtcgtcctcaacgccgccgagctcctcgcttcctccgtcccctttcccgccccacctccacctcctccttccgccgctccctctcccgctcccgtccgagagatcccagttgtggccgcttccgcccaagagcaacccctggaggccgccaaggacgacggtggctacgaggtcgtggagctcgacgccgccgagctgctagcggagcacgtccacttctgcgagatctgcggcaagggcttccgccgcgacgccaacctcaggatgcacatgcgcgcccacggcgaccgcttcaagaccctagacgcgctctcccgccctggtcacggccagccgaagccgcccgttggcagcaacgtgcgcttctcctgcccctttgcgggctgcaacaggaaccgcacacaccgccgcttccggccgctcaagtcggcggtgtgcgcgcggaaccacttccggcgcagccactgccccaagctctacgcctgcgagcgatgtggcggcaagaagcgcttcactgtcctggcggacctccgcagccacctccgccactgcggcgaggaggcacagtggcgctgctcctgcggcaccaccttctcccgcaaggacaagctcttcggtcatctagcgctctttgaaggccacacgccagcagttactaagccaaacaaggatgtggtgacagggcctacagagtccaccattgatgctatggaggaagggggatttgaagaaggcattcctgaccgggaggaggatgaagagggcggttatgatccagagttcttcaaggagtggatggatgagctcagaggtggtgctggtggctccaattggcctggaccagcagcagatggacattagcaatgttgcgagggttaataggatggtttgacaagggacatctgcttacatcaagtgaccaggaggatcaataaagactgaataaaggtgatagtaaagaaaagaggtgctttgggatagtttgtaggatttctctttaccattgtgtttgtgcgttcgttctaaccagtagcttgtatggtatggtgtgcgtgtgttgtttagttgctgttcactgggcctctcccttgccattctcggttgctttcatgttatcctgtgaatttgtgatctaccaggtaatacagtggagaaatgtgtc

SEQ ID NO: 2766 - protein, 406 aa, Zea mays subsp. mays
  peptide (1)..(406): Ceres Seq. ID no. 12363288
ARDHYLEHPNRKTTRCLVMDSTRSNQVAGRCNSTIASRAATVPPSLTMPRGELADAIVGGGGGGGADGDPRAALLRLSALGDRMAAVRGRICASISGEARPLSYADIQSVSSEISAAAQLVVLNAAELLASSVPFPAPPPPPPSAAPSPAPVREIPVVAASAQEQPLEAAKDDGGYEVVELDAAELLAEHVHFCEICGKGFRRDANLRMHMRAHGDRFKTLDALSRPGHGQPKPPVGSNVRFSCPFAGCNRNRTHRRFRPLKSAVCARNHFRRSHCPKLYACERCGGKKRFTVLADLRSHLRHCGEEAQWRCSCGTTFSRKDKLFGHLALFEGHTPAVTKPNKDVVTGPTESTIDAMEEGGFEEGIPDREEDEEGGYDPEFFKEWMDELRGGAGGSNWPGPAADGH

SEQ ID NO: 2767 - protein, 388 aa, Zea mays subsp. mays
  peptide (1)..(388): Ceres Seq. ID no. 12363289
MDSTRSNQVAGRCNSTIASRAATVPPSLTMPRGELADAIVGGGGGGGADGDPRAALLRLSALGDRMAAVRGRICASISGEARPLSYADIQSVSSEISAAAQLVVLNAAELLASSVPFPAPPPPPPSAAPSPAPVREIPVVAASAQEQPLEAAKDDGGYEVVELDAAELLAEHVHFCEICGKGFRRDANLRMHMRAHGDRFKTLDALSRPGHGQPKPPVGSNVRFSCPFAGCNRNRTHRRFRPLKSAVCARNHFRRSHCPKLYACERCGGKKRFTVLADLRSHLRHCGEEAQWRCSCGTTFSRKDKLFGHLALFEGHTPAVTKPNKDVVTGPTESTIDAMEEGGFEEGIPDREEDEEGGYDPEFFKEWMDELRGGAGGSNWPGPAADGH

SEQ ID NO: 2768 - protein, 359 aa, Zea mays subsp. mays
  peptide (1)..(359): Ceres Seq. ID no. 12363290
MPRGELADAIVGGGGGGGADGDPRAALLRLSALGDRMAAVRGRICASISGEARPLSYADIQSVSSEISAAAQLVVLNAAELLASSVPFPAPPPPPPSAAPSPAPVREIPVVAASAQEQPLEAAKDDGGYEVVELDAAELLAEHVHFCEICGKGFRRDANLRMHMRAHGDRFKTLDALSRPGHGQPKPPVGSNVRFSCPFAGCNRNRTHRRFRPLKSAVCARNHFRRSHCPKLYACERCGGKKRFTVLADLRSHLRHCGEEAQWRCSCGTTFSRKDKLFGHLALFEGHTPAVTKPNKDVVTGPTESTIDAMEEGGFEEGIPDREEDEEGGYDPEFFKEWMDELRGGAGGSNWPGPAADGH

SEQ ID NO: 2769 - DNA, 1409 bp, Zea mays subsp. mays
  misc_feature (1)..(1409): Ceres Seq. ID no. 12373843
  misc_feature (1)..(1409): Ortholog of  Ceres SEQ ID NO 15177750 as cited in SEQ ID NO 57772
  misc_feature (1)..(1409): Ortholog of  Ceres SEQ ID NO 13596581 as cited in SEQ ID NO 62420
  misc_feature (1)..(1409): Ortholog of  Ceres SEQ ID NO 13591273 as cited in SEQ ID NO 65904
  misc_feature (1)..(1409): Ortholog of  Ceres SEQ ID NO 13623086 as cited in SEQ ID NO 0
gaaaaaaaaaggcaccaagggagaatcagcaagacgacaccatggcagcggcgctctacggcaacggcagctcgacgagcggcggtggcggcgcccgtggccgcgggaagcccatcacatgcaaagcggcggtggcgtggggtcccggagtgccgctgtcgctggaggaggtcgaggtggcgccgcctggtcccatggaggtccgcgtcaaggtgctcttcacctccatctgccacaccgacctcagcgcctggaagggagagtgcgaggcgcagcgcaaataccctcgcatcttgggccatgaggcagccggagtggtagagagcgtgggcgaaggagtagaaggcctcgcccctggagaccacgtcgttccgatcttcaccggggagtgcgagaaatgcgtgtactgcaagtcggacaagacaaacctgtgtggaacctaccgtgtggatcctttgaagagcagcatggtctacgacgacggcacgaggttctccgtggtggaccagccgtcaggccagcggcggccggtgtaccacttcctcaacacctccaccttcaccgagtacaccgtgcttgacgcggcatgtgccgtcaaaatcaaccctgaggccccgctgcagaggatgtgcctcctcagctgcggcatctccacaggagtgggagctgcgtggaacactgcaaacgtttctgctcggtccaccgttgcagtgtttggactcggcgctgttggtcttgctgtagctgaaggtgccaggctacgaggggcaactcggatcatcggcgtggacgtaaacccttcaaagttcaccaaaggtaaagagatggggataacagacttcatcgaccctaacgacatctgtgacaaaccggtccatgaggtgatcagggagatgactgacggaggtgtcgactacagcttcgagtgtaccgggataaatgatgtgctgagagaggccttcttgtccacgcatgatggttggggcctgacggtggtgctagggatccattcaacgcccaagatggtgccgctgcacccgatggagctctacagccgtaggatcaccggctgcgtctttggcgacttcaagggcaagtcccagctgcccgacctcgtcgataagtgcgtcaacggggaggtcaatataaacttcgatggcttcataacacacaagatgccattctcgtacatcaacaaggctttccggttactcgaggaaggcaagtcgctgaggtgcctgctcagtctctgatcgacaatacttcatcagcgaggacagttttggattattgagtagcaaaataaatgtacaaggaaagtttttccctagtacattcgcttcttataaaacgaatgcatgcaacttctttcgttctttgaagaagacaaaagggcacaattattctgg

SEQ ID NO: 2770 - protein, 416 aa, Zea mays subsp. mays
  peptide (1)..(416): Ceres Seq. ID no. 12373844
KKKAPRENQQDDTMAAALYGNGSSTSGGGGARGRGKPITCKAAVAWGPGVPLSLEEVEVAPPGPMEVRVKVLFTSICHTDLSAWKGECEAQRKYPRILGHEAAGVVESVGEGVEGLAPGDHVVPIFTGECEKCVYCKSDKTNLCGTYRVDPLKSSMVYDDGTRFSVVDQPSGQRRPVYHFLNTSTFTEYTVLDAACAVKINPEAPLQRMCLLSCGISTGVGAAWNTANVSARSTVAVFGLGAVGLAVAEGARLRGATRIIGVDVNPSKFTKGKEMGITDFIDPNDICDKPVHEVIREMTDGGVDYSFECTGINDVLREAFLSTHDGWGLTVVLGIHSTPKMVPLHPMELYSRRITGCVFGDFKGKSQLPDLVDKCVNGEVNINFDGFITHKMPFSYINKAFRLLEEGKSLRCLLSL

SEQ ID NO: 2771 - protein, 403 aa, Zea mays subsp. mays
  peptide (1)..(403): Ceres Seq. ID no. 12373845
MAAALYGNGSSTSGGGGARGRGKPITCKAAVAWGPGVPLSLEEVEVAPPGPMEVRVKVLFTSICHTDLSAWKGECEAQRKYPRILGHEAAGVVESVGEGVEGLAPGDHVVPIFTGECEKCVYCKSDKTNLCGTYRVDPLKSSMVYDDGTRFSVVDQPSGQRRPVYHFLNTSTFTEYTVLDAACAVKINPEAPLQRMCLLSCGISTGVGAAWNTANVSARSTVAVFGLGAVGLAVAEGARLRGATRIIGVDVNPSKFTKGKEMGITDFIDPNDICDKPVHEVIREMTDGGVDYSFECTGINDVLREAFLSTHDGWGLTVVLGIHSTPKMVPLHPMELYSRRITGCVFGDFKGKSQLPDLVDKCVNGEVNINFDGFITHKMPFSYINKAFRLLEEGKSLRCLLSL

SEQ ID NO: 2772 - protein, 352 aa, Zea mays subsp. mays
  peptide (1)..(352): Ceres Seq. ID no. 12373846
MEVRVKVLFTSICHTDLSAWKGECEAQRKYPRILGHEAAGVVESVGEGVEGLAPGDHVVPIFTGECEKCVYCKSDKTNLCGTYRVDPLKSSMVYDDGTRFSVVDQPSGQRRPVYHFLNTSTFTEYTVLDAACAVKINPEAPLQRMCLLSCGISTGVGAAWNTANVSARSTVAVFGLGAVGLAVAEGARLRGATRIIGVDVNPSKFTKGKEMGITDFIDPNDICDKPVHEVIREMTDGGVDYSFECTGINDVLREAFLSTHDGWGLTVVLGIHSTPKMVPLHPMELYSRRITGCVFGDFKGKSQLPDLVDKCVNGEVNINFDGFITHKMPFSYINKAFRLLEEGKSLRCLLSL

SEQ ID NO: 2773 - DNA, 1170 bp, Zea mays subsp. mays
  misc_feature (1)..(1170): Ceres Seq. ID no. 13498830
  misc_feature (1)..(1170): Ortholog of  Ceres SEQ ID NO 13581804 as cited in SEQ ID NO 51424
  misc_feature (1)..(1170): Ortholog of  Ceres SEQ ID NO 13663874 as cited in SEQ ID NO 67003
gccatttttggtgagtgcgccctttcccttcctccccagatccccgtccccgttttccacttttgcctccgccccaattcggataacaaacccctccgcctcgtcgcgtctcctcccagccgagccgatccggtagagagagggagagggagggactgagggaggaggagctgggttccggtcccggccgcccggccggctgcgcgattcgattgcagctctcgtccccgggcggcgtccaggatggtgcggggcaagacgcagatgaagcggatagagaacccgaccagccgccaggtcaccttctccaagcgccgcaacggcctgctcaagaaggcgttcgagctctccgtcctctgcgacgccgaggtcgccctcgtcgtcttctccccgcgcggcaagctctacgaattcgccagcggaagtgcgcagaaaacgattgaacgttatagaacatacacaaaggataatgtcagcaacaagacagtgcagcaggatattgagcgagtaaaagctgatgcggatggcctgtcaaagagactcgaagcacttgaagcttacaaaaggaaacttttgggtgagaggttggaagactgctccattgaagagctgcacagtttggaagtcaagcttgagaagagcctgcattgcatcaggggaagaaagactgagctgctggaggagcaagtccgtaagctgaagcagaaggagatgagtctgcgcaagagcaacgaagatttgcgtgaaaagtgcaagaagcagccgcctgtgccgatggcttcggcgccgcctcgtgcgccggcagtcgacaacgtggaggacggtcaccgggagccgaaggacgacgggatggacgtggagacggagctgtacataggattgcccggcagagactaccgctcaagcaaagacaaggctgcagtggcggtcaggtcaggctagcagctacctcagccacgcacaggcccaatcaacgcaagctagctagctgagaataatcttttagatctctggtagtgtggagatcgagatgcaagccaagcaatgtgatatcgcgttgtgtgttaccaacctgtcagtctgtgtatcatcccgtcccgtccgtcagagtctcagagaacgaacacttcttctccttctccctgtagctagctgctcctgcttgtgtcc

SEQ ID NO: 2774 - protein, 232 aa, Zea mays subsp. mays
  peptide (1)..(232): Ceres Seq. ID no. 13498831
MVRGKTQMKRIENPTSRQVTFSKRRNGLLKKAFELSVLCDAEVALVVFSPRGKLYEFASGSAQKTIERYRTYTKDNVSNKTVQQDIERVKADADGLSKRLEALEAYKRKLLGERLEDCSIEELHSLEVKLEKSLHCIRGRKTELLEEQVRKLKQKEMSLRKSNEDLREKCKKQPPVPMASAPPRAPAVDNVEDGHREPKDDGMDVETELYIGLPGRDYRSSKDKAAVAVRSG

SEQ ID NO: 2775 - protein, 225 aa, Zea mays subsp. mays
  peptide (1)..(225): Ceres Seq. ID no. 13498832
MKRIENPTSRQVTFSKRRNGLLKKAFELSVLCDAEVALVVFSPRGKLYEFASGSAQKTIERYRTYTKDNVSNKTVQQDIERVKADADGLSKRLEALEAYKRKLLGERLEDCSIEELHSLEVKLEKSLHCIRGRKTELLEEQVRKLKQKEMSLRKSNEDLREKCKKQPPVPMASAPPRAPAVDNVEDGHREPKDDGMDVETELYIGLPGRDYRSSKDKAAVAVRSG

SEQ ID NO: 2776 - DNA, 1017 bp, Zea mays subsp. mays
  misc_feature (1)..(1017): Ceres Seq. ID no. 12402465
  misc_feature (1)..(1017): Ortholog of  Ceres SEQ ID NO 13647648 as cited in SEQ ID NO 20346
  misc_feature (1)..(1017): Ortholog of  Ceres SEQ ID NO 15179852 as cited in SEQ ID NO 66623
aacccggctggagctcagcctcagctagcctggggaccgctgcacgaacagtagtccttcctcctcctataaagtaaccacacgacccgcctcctacccatccaccagcagctgaggtcgtcggccatggcggagcgggagcagcaagagcaggtggctagcgacgacgcggcggagtggaagcaggtggcggagctgagggccgtcacccaggcccaggacccttcctgcaaggatgaggacgactacacgctccggcgcttcctccgcgcgcgggaccacaacatcggcaaggcgtcggcgatgctgctcaagtacctcaagtggaagcccgcggccaagccccacggcgccatcgcagcggcggaggtggcgcgggaggcggcgcaggggaagctctacctgcagggccacgaccgggagggccgccccctcatctacggcttcggcgcgcgccaccacccggcgcgcagggacctcgacgagttcaagcgctacgtcgtccacgtcctcgacgccaccgtcgcgcgcctgccccctccccctccgggagatggtcgccaggagaagttcgccgccgtcgccgacctcgccggctggggctacgccaactgcgacatccgaggctacctggcggcgctcgacatcatgcagagctactacccggagcgcctcgcccgcgtcttcctcgtccacgtgccctacgtcttcatggccgcctggaagatcgtctacccttttatcgacgacaacaccaagaagaagttcgtcttcgtgccggacaaggacctggacaggacgctccgcgaggccatcgacgactcccagctgccggagatctatggtggcaagctcaagctcgtcacgccggccgcaaaattaccaagccactagctagggggcccggtgcatgacgattgtacgagttcttaactctcactggtatatcaccatccctagccggccgcattgattggggatgcaaaacctaccaaaagataagttcacaagttacat

SEQ ID NO: 2777 - protein, 255 aa, Zea mays subsp. mays
  peptide (1)..(255): Ceres Seq. ID no. 12402466
MAEREQQEQVASDDAAEWKQVAELRAVTQAQDPSCKDEDDYTLRRFLRARDHNIGKASAMLLKYLKWKPAAKPHGAIAAAEVAREAAQGKLYLQGHDREGRPLIYGFGARHHPARRDLDEFKRYVVHVLDATVARLPPPPPGDGRQEKFAAVADLAGWGYANCDIRGYLAALDIMQSYYPERLARVFLVHVPYVFMAAWKIVYPFIDDNTKKKFVFVPDKDLDRTLREAIDDSQLPEIYGGKLKLVTPAAKLPSH

SEQ ID NO: 2778 - protein, 220 aa, Zea mays subsp. mays
  peptide (1)..(220): Ceres Seq. ID no. 12402467
MRTTTRSGASSARGTTTSARRRRCCSSTSSGSPRPSPTAPSQRRRWRGRRRRGSSTCRATTGRAAPSSTASARATTRRAGTSTSSSATSSTSSTPPSRACPLPLREMVARRSSPPSPTSPAGATPTATSEATWRRSTSCRATTRSASPASSSSTCPTSSWPPGRSSTLLSTTTPRRSSSSCRTRTWTGRSARPSTTPSCRRSMVASSSSSRRPQNYQATS

SEQ ID NO: 2779 - protein, 196 aa, Zea mays subsp. mays
  peptide (1)..(196): Ceres Seq. ID no. 12402468
MLLKYLKWKPAAKPHGAIAAAEVAREAAQGKLYLQGHDREGRPLIYGFGARHHPARRDLDEFKRYVVHVLDATVARLPPPPPGDGRQEKFAAVADLAGWGYANCDIRGYLAALDIMQSYYPERLARVFLVHVPYVFMAAWKIVYPFIDDNTKKKFVFVPDKDLDRTLREAIDDSQLPEIYGGKLKLVTPAAKLPSH

SEQ ID NO: 2780 - DNA, 1367 bp, Zea mays subsp. mays
  misc_feature (1)..(1367): Ceres Seq. ID no. 12366910
  misc_feature (1)..(1367): Ortholog of  Ceres SEQ ID NO 13659033 as cited in SEQ ID NO 66372
  misc_feature (1)..(1367): Ortholog of  Ceres SEQ ID NO 13655724 as cited in SEQ ID NO 68973
  misc_feature (1)..(1367): Ortholog of  Ceres SEQ ID NO 12625899 as cited in SEQ ID NO 69079
aaatcatacgtgtagtgatagccatgaggtctcttctccacaccaccaatagcagtagcccgccccctggcagcagcaggaagcagcagcactgcggcagcagatgcttcgtcgtatcccttctcctggtcctgctagctcttgtagcctcggacgtgtatctcagcttcccaaaccgacgacgggttcttccattgttcccccagcagcttttgtctcgcagacagcagcgaggcggcgagggcggctgtgacattttcaggggcgagtgggtgccggacccggacgcgccctactacaccaacgacacctgcaaggtgatccacgagcactacgactgtatggggtacggcaagccggacctgggctttgtcaactggaggtggcagcctgacggctgcgaccttccccgcttcaacccatggcgcttcctccacatgatgaggggcaagacccttgccttcgttggcgactccctcggcaggaaccacaaggactcgctcatctgcctcttgaccacagtcgcggagcctacgacgagctggccgagcagcaagcacaccgtgtactactacgccgactacaacttcaccgtggcccacttctgggcgccgtaccttgtccggcacgagcagatcgacgaggacgggccagcgcacacgggcgtctggaacctctacctggacgagccggacggcgtgtgggcggcgcacgtcgcggagttcgactacgccgtcgtgtccgcgtccagctggttctaccgcccctccatgctgtacgaggccggccggctcgtcggctgccactactgccggctgcccaacgtcaccgacctcacgctgcgctacgcgctgcgcatggccacgcgggccgcgctgcgggcgctgtccggcgccgacggccgcttccgcggcacggccctgctgcgcaccgtggacccgtcgcagtacgagggcggggagtggaacgaggacggcaactgcatccggacggcgccgttccggcgtggccagaacgcggtccagggcctcgagcgtgagttccgcacgctgcagctggaggagttcgcgtcggtggcgaaggcggcgacggacagtggcggtaaggtgaggatgctgctgatggacaccacggaagccatgatactgcgtgcggacgcgcacccgagcaagtaccgggggtggacgccggagaagcacttcaccctgcacaacgactgcgtgcactggtgcctgcccggggccattgatgcgtggaacgacatgctgcttcatatgttgaaatgatcatcagtaattttaattaataatgccaaaccagtgtggctgtgtagtgtgtacaatatggtgctccctccgttgacaagt

SEQ ID NO: 2781 - protein, 427 aa, Zea mays subsp. mays
  peptide (1)..(427): Ceres Seq. ID no. 12366911
IIRVVIAMRSLLHTTNSSSPPPGSSRKQQHCGSRCFVVSLLLVLLALVASDVYLSFPNRRRVLPLFPQQLLSRRQQRGGEGGCDIFRGEWVPDPDAPYYTNDTCKVIHEHYDCMGYGKPDLGFVNWRWQPDGCDLPRFNPWRFLHMMRGKTLAFVGDSLGRNHKDSLICLLTTVAEPTTSWPSSKHTVYYYADYNFTVAHFWAPYLVRHEQIDEDGPAHTGVWNLYLDEPDGVWAAHVAEFDYAVVSASSWFYRPSMLYEAGRLVGCHYCRLPNVTDLTLRYALRMATRAALRALSGADGRFRGTALLRTVDPSQYEGGEWNEDGNCIRTAPFRRGQNAVQGLEREFRTLQLEEFASVAKAATDSGGKVRMLLMDTTEAMILRADAHPSKYRGWTPEKHFTLHNDCVHWCLPGAIDAWNDMLLHMLK

SEQ ID NO: 2782 - protein, 420 aa, Zea mays subsp. mays
  peptide (1)..(420): Ceres Seq. ID no. 12366912
MRSLLHTTNSSSPPPGSSRKQQHCGSRCFVVSLLLVLLALVASDVYLSFPNRRRVLPLFPQQLLSRRQQRGGEGGCDIFRGEWVPDPDAPYYTNDTCKVIHEHYDCMGYGKPDLGFVNWRWQPDGCDLPRFNPWRFLHMMRGKTLAFVGDSLGRNHKDSLICLLTTVAEPTTSWPSSKHTVYYYADYNFTVAHFWAPYLVRHEQIDEDGPAHTGVWNLYLDEPDGVWAAHVAEFDYAVVSASSWFYRPSMLYEAGRLVGCHYCRLPNVTDLTLRYALRMATRAALRALSGADGRFRGTALLRTVDPSQYEGGEWNEDGNCIRTAPFRRGQNAVQGLEREFRTLQLEEFASVAKAATDSGGKVRMLLMDTTEAMILRADAHPSKYRGWTPEKHFTLHNDCVHWCLPGAIDAWNDMLLHMLK

SEQ ID NO: 2783 - protein, 314 aa, Zea mays subsp. mays
  peptide (1)..(314): Ceres Seq. ID no. 12366913
MGYGKPDLGFVNWRWQPDGCDLPRFNPWRFLHMMRGKTLAFVGDSLGRNHKDSLICLLTTVAEPTTSWPSSKHTVYYYADYNFTVAHFWAPYLVRHEQIDEDGPAHTGVWNLYLDEPDGVWAAHVAEFDYAVVSASSWFYRPSMLYEAGRLVGCHYCRLPNVTDLTLRYALRMATRAALRALSGADGRFRGTALLRTVDPSQYEGGEWNEDGNCIRTAPFRRGQNAVQGLEREFRTLQLEEFASVAKAATDSGGKVRMLLMDTTEAMILRADAHPSKYRGWTPEKHFTLHNDCVHWCLPGAIDAWNDMLLHMLK

SEQ ID NO: 2784 - DNA, 1312 bp, Zea mays subsp. mays
  misc_feature (1)..(1312): Ceres Seq. ID no. 12406486
  misc_feature (1)..(1312): Ortholog of  Ceres SEQ ID NO 14316043 as cited in SEQ ID NO 68538
  misc_feature (1)..(1312): Ortholog of  Ceres SEQ ID NO 14309361 as cited in SEQ ID NO 0
agttgttctttggcttctgatttcaacaaaaaaaatggtgtttctctaaaacccacaaagccctcctctgctctccatccctgtctctcgctttccctaacccacaccagaataccagatcgagcaccgatctagggttgcacctcttctgctagccggctggcgaggagccgttcggcatctggacgcggccaagggagatgaagctcgcggggctcaagtctgtggacggcgctcacgaggagtccatctgggcggcggcgtgggcgcccgccgctgaccaccgccccacggcggtgctcctcactggcgcgctcgacgagaccgtccgcgcttggctccccgacgacctcgctgccttggggtcccccacacggggccacgcgctcggagtcgtctccctcgccgcccaccccgccggctcgctcgccgccgccgtgtcgctcgacagcttcatccgcgtctttgacgtcgacacgggggcatccgtcgccacgctggaggcgccgccgtccgagatttggggcgtccagttccatcccaagggtaatgctctggccgcagccggtggtggcagtggatcagtgaagctgtgggacacggagaagtggaaggcgatcaccagcctcgccgtcccacgcccggagggagctcgccccgacaagacaggcagcggcaagttcgtcctgtcagtcgcctggagccccgacggaaggctcctagcatgcgggtccatggacggcacgatcgccgtctacgacgcggtccgcatgaagttcctgcaccacctggagggccaccacatgccggtgcggtccatggtgttctccccggtggacccgcacgtgcttttcacggcctgcgacgactgccacgtccacatctacgacgccagggagaagggcctcgtcggggccatgtcgggccacgcgagctgggtgctgagcatcgacgcgagccccgacggcctggcggtggccacggggtcgagcgaccgcaccgtccggctctgggacctcaacatgaggacctcggtgcagaccatgagcaaccactccgatcaggtgtgggccgtggccttcaggccaccaggcggtgccggagtccgagcagggcgtctggctagcgcgtcggatgacaagagcgtctccctgtacgattactcgtaggtttttgtttccttataaaccgttgcaaatgcctctgttgtaccgaccagagatttgaattcgggcatggtggttggaagaattgttgtacgcagcacagtagtcgaggtgttaaattgcaaggaaagagtttatttcgtgct

SEQ ID NO: 2785 - protein, 322 aa, Zea mays subsp. mays
  peptide (1)..(322): Ceres Seq. ID no. 12406487
MKLAGLKSVDGAHEESIWAAAWAPAADHRPTAVLLTGALDETVRAWLPDDLAALGSPTRGHALGVVSLAAHPAGSLAAAVSLDSFIRVFDVDTGASVATLEAPPSEIWGVQFHPKGNALAAAGGGSGSVKLWDTEKWKAITSLAVPRPEGARPDKTGSGKFVLSVAWSPDGRLLACGSMDGTIAVYDAVRMKFLHHLEGHHMPVRSMVFSPVDPHVLFTACDDCHVHIYDAREKGLVGAMSGHASWVLSIDASPDGLAVATGSSDRTVRLWDLNMRTSVQTMSNHSDQVWAVAFRPPGGAGVRAGRLASASDDKSVSLYDYS

SEQ ID NO: 2786 - DNA, 491 bp, Zea mays subsp. mays
  misc_feature (1)..(491): Ceres Seq. ID no. 5758056
  misc_feature (1)..(491): Ortholog of  Ceres SEQ ID NO 12582736 as cited in SEQ ID NO 51489
aaaaacgaacccgcccggagcagcaaagcatatgcgctctgcaccaagaacatggtcccgggagaktccgtgtacgagagaagcgtgtctccgttcagaatgaggatggaacaaaggtcgaatacagggtgtggaaccccttccgttccaagctggctgctgctgtgcttggtggtgttgacaacatctggattgctcctggtacccgtgtgctgtatcttggtgctgcttctggcacaaccgtatctcatgtgtctgatattgtagggccggatggtttggtctacgctgttgagttctctcacaggagcggaagagaccttgtcaacatggcaaagaagaggaccaatgtgatccccattattgaggatgccaggcatccgncaaggtaccggatgttggtaggcatggttgatgttatcttctctgatgttgcacagccagaccaggctaggatcttagcacttaatgcttcatacttcttgaagaac

SEQ ID NO: 2787 - protein, 163 aa, Zea mays subsp. mays
  peptide (1)..(163): Ceres Seq. ID no. 5758057
  misc_feature (22)..(22): Xaa is any aa, unknown or other
  misc_feature (128)..(128): Xaa is any aa, unknown or other
KRTRPEQQSICALHQEHGPGRXRVREKRVSVQNEDGTKVEYRVWNPFRSKLAAAVLGGVDNIWIAPGTRVLYLGAASGTTVSHVSDIVGPDGLVYAVEFSHRSGRDLVNMAKKRTNVIPIIEDARHPXRYRMLVGMVDVIFSDVAQPDQARILALNASYFLKN

SEQ ID NO: 2788 - protein, 88 aa, Zea mays subsp. mays
  peptide (1)..(88): Ceres Seq. ID no. 5758058
  misc_feature (22)..(22): Xaa is any aa, unknown or other
KNEPARSSKAYALCTKNMVPGXSVYERSVSPFRMRMEQRSNTGCGTPSVPSWLLLCLVVLTTSGLLLVPVCCILVLLLAQPYLMCLIL

SEQ ID NO: 2789 - DNA, 1366 bp, Zea mays subsp. mays
  misc_feature (1)..(1366): Ceres Seq. ID no. 12407332
  misc_feature (1)..(1366): Ortholog of  Ceres SEQ ID NO 13656856 as cited in SEQ ID NO 65788
aagcgcaaggaagcaatcgggaagagacaacggcaagcgacgggactcgggaggaagcaagtgcaaagcagcattcttgtaggagagtgagtgagtttcttcgtaccgagctaagagaaacaaaagaacagcaagaaccggcagtgcaacataagactacgtagctgctaatcgaacctggcgtctactgtttcctcttccttttgcccaaaatcacagcgcctggggttcaatccaaactacttgcattgctatccaagtttttagttacaggatcggcgagctactcggattcctctcccacggcgttgcctgcgcgccacgcccggcgccgaacgtctcggctgcgccggccccggtcccggccatgccgccgatgggctggacgaacgcggggaggcctcgtcctgccgacgcgcccgacgggctcatcccgagccccaggaagtccagcgtcgccgggcttcccgctgaacagagacgactggcccatcatgagctccggcaggctcacctgagccccggtggagtcgtacggcagcccaaggccgagcccggccgacagcattggcgccggctccagctccagccgcggcggccattgctgcagcgaggcgtccgggagtgacacccgcatggcctcctggtgctggtgctgctggcctgacgacgaggcgcccggcgacgacgaggagacgtccaggcccagcccgcgcaggaacgaggagctcgacgaggtggcgcccatctgcgcggccttctgcagcagcgcggtggccgacatgtgtgcggacggggacggggacggaggcggcggcgcgaactgctggcgctcggcggtcaccgccggcgccgccgagaagatcgacgacgatgcgtccgtggcgaggcacagcggcgggggcttggcgggatgggcgcgctccggccggccgccgaggtccgcgtactgcggcgctgacgccatcgacgacggcgcgaacataccgccgagcaggctctgcgacgtccccgcgacgctgctgctgctgctgctggcgccaacgttggcagcagcgctcaccgaatcttgcgaaagcaccggtacctgtaactgcggcggcggcggtggcggaggcggcggcggtggcggaggcggcggcgcgaactggacggcctcagtcgcattcgtgtcagtctctgcatgcattgcaacgaagcattagcgaatcgggggcatggattagattcagactagattgattagtgtaaaaggcgctaaaagctcgggagatgcagaaagcaacgagaggccatgatggcgtccttttcatgttgctcgtgggcgtgcttttgtcatcggatttcaatgctctgagaagttctg

SEQ ID NO: 2790 - protein, 189 aa, Zea mays subsp. mays
  peptide (1)..(189): Ceres Seq. ID no. 12407333
MASWCWCCWPDDEAPGDDEETSRPSPRRNEELDEVAPICAAFCSSAVADMCADGDGDGGGGANCWRSAVTAGAAEKIDDDASVARHSGGGLAGWARSGRPPRSAYCGADAIDDGANIPPSRLCDVPATLLLLLLAPTLAAALTESCESTGTCNCGGGGGGGGGGGGGGGANWTASVAFVSVSACIATKH

SEQ ID NO: 2791 - protein, 140 aa, Zea mays subsp. mays
  peptide (1)..(140): Ceres Seq. ID no. 12407334
MCADGDGDGGGGANCWRSAVTAGAAEKIDDDASVARHSGGGLAGWARSGRPPRSAYCGADAIDDGANIPPSRLCDVPATLLLLLLAPTLAAALTESCESTGTCNCGGGGGGGGGGGGGGGANWTASVAFVSVSACIATKH

SEQ ID NO: 2792 - protein, 122 aa, Zea mays subsp. mays
  peptide (1)..(122): Ceres Seq. ID no. 12407335
MRPWRGTAAGAWRDGRAPAGRRGPRTAALTPSTTARTYRRAGSATSPRRCCCCCWRQRWQQRSPNLAKAPVPVTAAAAVAEAAAVAEAAARTGRPQSHSCQSLHALQRSISESGAWIRFRLD

SEQ ID NO: 2793 - DNA, 1572 bp, Zea mays subsp. mays
  misc_feature (1)..(1572): Ceres Seq. ID no. 12410547
  misc_feature (1)..(1572): Ortholog of  Ceres SEQ ID NO 13660394 as cited in SEQ ID NO 66895
gcacaaccaagaggcaacagagcaacgccagccacacacgacacgaaccaggtaaccagctgccgaggaaccctagcggaacactgtgcaggtgacggcggcgcgctaccggtgacggggtataccgtatacggcggcatcgtccccctcggcccctcctccatcccggcgcggcggcgcaggcagccagccttcaggggttaaacctgatgccaatccgcaggggttaaacctaatgccaatccgaagggccttgctgagctcgcctccatcgcccaggacctcgccgcctcctctgtgtcgttgcccagaacctcacagccaacacacgcatcctcttatcgtgcctcatcctccaagacgatgggctgctccccctacgtgcctcctcctccacgccgacaagcatctccccccgacacgcatcctcctccacgccgtgcttggtggtggcggcggacggtggttacctggggctgcggtgggccgtgcctggcatgcaaggtgagcagtccagcatcgagtggtcagtgtagggtgtgccgcggtctgccattgcgctgattgaagcagagtcagtgagttactgccgtgcgctgattggagccttcgtagccggctggagcgccgccgagaggtgaaggccacacgcgattgctgattagagattagagcagatccattgagccaccactccacctctgttcaccggcacgagtgaattgaattgggttttctgactcagattacttgttcactgtggggtgcaagcttaatcggccaccatggatgttgataagcaagaaacaatggaggagaccatccttgttggtgatgatctcatgcgtgggccgccatcccctgtcataccgaaagagatcgcatcacatgtccttgaagatgttgagctttgtgatggtatactcaagaaccttttcttatgcctacagatcaatgatattgagccattctgccaagatgaaattgtgctatatcgacagtgtgctgagaaaagggacaaggaaataagagagcggatgcaaaatagtgaatataaattgggtttttcaatgcccctggaagaagcgaaagagagagctactcaactccaatcagaagtaacactgctagaaaggcgcatgattcttgctagtggacttgagggtatggaaggatttcgccagagatggagcttgcatggacagcttgaagacacaaggaaaaggctagaagcactgaaccatggcatggcaaaacgagagaaccaaagttctacggcggagaggacaaaatctccagctaggaagaagtggttcttttggtaggttagtatcattgtcagacttgagaaatattgtagcttgagttgtattagcggcaatgctacacactttttaacttccacagcactctgcctccaactagccacttaatttgctaacaagtaacaagcgatttgcttatatatagctgcagttttaaatgtttaaatcatgtattaaaccttgtaactgcaggtgatggtacggttgcattccattttgtgatttatgacagccacttgccctcctc

SEQ ID NO: 2794 - protein, 179 aa, Zea mays subsp. mays
  peptide (1)..(179): Ceres Seq. ID no. 12410548
MDVDKQETMEETILVGDDLMRGPPSPVIPKEIASHVLEDVELCDGILKNLFLCLQINDIEPFCQDEIVLYRQCAEKRDKEIRERMQNSEYKLGFSMPLEEAKERATQLQSEVTLLERRMILASGLEGMEGFRQRWSLHGQLEDTRKRLEALNHGMAKRENQSSTAERTKSPARKKWFFW

SEQ ID NO: 2795 - protein, 171 aa, Zea mays subsp. mays
  peptide (1)..(171): Ceres Seq. ID no. 12410549
MEETILVGDDLMRGPPSPVIPKEIASHVLEDVELCDGILKNLFLCLQINDIEPFCQDEIVLYRQCAEKRDKEIRERMQNSEYKLGFSMPLEEAKERATQLQSEVTLLERRMILASGLEGMEGFRQRWSLHGQLEDTRKRLEALNHGMAKRENQSSTAERTKSPARKKWFFW

SEQ ID NO: 2796 - protein, 160 aa, Zea mays subsp. mays
  peptide (1)..(160): Ceres Seq. ID no. 12410550
MRGPPSPVIPKEIASHVLEDVELCDGILKNLFLCLQINDIEPFCQDEIVLYRQCAEKRDKEIRERMQNSEYKLGFSMPLEEAKERATQLQSEVTLLERRMILASGLEGMEGFRQRWSLHGQLEDTRKRLEALNHGMAKRENQSSTAERTKSPARKKWFFW

SEQ ID NO: 2797 - DNA, 1415 bp, Zea mays subsp. mays
  misc_feature (1)..(1415): Ceres Seq. ID no. 12352133
  misc_feature (1)..(1415): Ortholog of  Ceres SEQ ID NO 14308615 as cited in SEQ ID NO 58538
  misc_feature (1)..(1415): Ortholog of  Ceres SEQ ID NO 13585342 as cited in SEQ ID NO 63601
  misc_feature (1)..(1415): Ortholog of  Ceres SEQ ID NO 15177459 as cited in SEQ ID NO 0
aatacttgcttgcattgcctcccgtttgccccgatccaacgacgacgttcgctggccgtagccaagaaggtatctcgcccaaacaaaggccgtcaagccaccatatggccgtgtccggcgagaagccgccaccgccaccgccaccggccacggcgtccggcggaacggcaaggaagctcatcctagcgctgcttacatgtctgtcgtcggcgctgctgtacaggcagattcagccgctaccgcccaagatccccggcacgccgggcggcccgccggtgacggcgaccaggacgaggctcagcgacggcaggtacctggcctatctggaaaccggcgtcccgagggagaaggccaagcacaggctcgtctttgtccatgggttcgactcctgcagacacgacgcgcttccgatctccacggagcttgcgcaagagctgggcgtttacatgttgtccttcgatcgccccgggtacgccgagagcgacccgcacccggccaggaccgaggagagcatcgccctcgacatcgccgagctcgccgacaacctgcagctgggtcgcaagttctaccttgctggcttctccatgggcggcgagatcatgtggagctgcctcaagtacatcccacacaggctctccggcgtggccattctcggccccgtaggcaactactggtggcccggcttgccgtcgaacgtgtcgcgggacgcctggtaccagcagctccctcgggaccagtgggcggtctgggtcgcgcatcacctgccgtggctcacctactggtggaacacccagaagctcttcccggcctccagcgtcatcgcctacaaccctgccctcctgtcccaagaggacgagatgctcatggccaagtttggctatagagcctacatgccgcagatcaggcaacagggggagcacgagtgcctgcaccgggacatgatggtcgggttcggcaagtggagctggagccccgctgcagctggagaacccgttcgccgacgccgacgccgacgatggccagggggcggggaaggtgcacctgtggcacggcgccgaggacctcatcgtgccggtcagcctgtccaggtacatcagccagaagctgccgtgggtcgtctaccacgagctccccaagtcgggacatctcttcccgatcgccgaggggatggctgacatcattgtcaagtccctgctgctcggagacgatcatccgtcgtcgtcggcctcacagcgtcctcattctccatgaatccaggtcgtcacgtagtccgttcgcatctcgtggcccgtctctcactgtttctgtaaagggaccgatggtgcagctttctctagcgtgtagctaggatgctcttttttttttgaaaaataatggaactaagttttagcctatatatatcatctgataatgtt

SEQ ID NO: 2798 - protein, 390 aa, Zea mays subsp. mays
  peptide (1)..(390): Ceres Seq. ID no. 12352134
YLLALPPVCPDPTTTFAGRSQEGISPKQRPSSHHMAVSGEKPPPPPPPATASGGTARKLILALLTCLSSALLYRQIQPLPPKIPGTPGGPPVTATRTRLSDGRYLAYLETGVPREKAKHRLVFVHGFDSCRHDALPISTELAQELGVYMLSFDRPGYAESDPHPARTEESIALDIAELADNLQLGRKFYLAGFSMGGEIMWSCLKYIPHRLSGVAILGPVGNYWWPGLPSNVSRDAWYQQLPRDQWAVWVAHHLPWLTYWWNTQKLFPASSVIAYNPALLSQEDEMLMAKFGYRAYMPQIRQQGEHECLHRDMMVGFGKWSWSPAAAGEPVRRRRRRRWPGGGEGAPVARRRGPHRAGQPVQVHQPEAAVGRLPRAPQVGTSLPDRRGDG

SEQ ID NO: 2799 - protein, 356 aa, Zea mays subsp. mays
  peptide (1)..(356): Ceres Seq. ID no. 12352135
MAVSGEKPPPPPPPATASGGTARKLILALLTCLSSALLYRQIQPLPPKIPGTPGGPPVTATRTRLSDGRYLAYLETGVPREKAKHRLVFVHGFDSCRHDALPISTELAQELGVYMLSFDRPGYAESDPHPARTEESIALDIAELADNLQLGRKFYLAGFSMGGEIMWSCLKYIPHRLSGVAILGPVGNYWWPGLPSNVSRDAWYQQLPRDQWAVWVAHHLPWLTYWWNTQKLFPASSVIAYNPALLSQEDEMLMAKFGYRAYMPQIRQQGEHECLHRDMMVGFGKWSWSPAAAGEPVRRRRRRRWPGGGEGAPVARRRGPHRAGQPVQVHQPEAAVGRLPRAPQVGTSLPDRRGDG

SEQ ID NO: 2800 - protein, 242 aa, Zea mays subsp. mays
  peptide (1)..(242): Ceres Seq. ID no. 12352136
MLSFDRPGYAESDPHPARTEESIALDIAELADNLQLGRKFYLAGFSMGGEIMWSCLKYIPHRLSGVAILGPVGNYWWPGLPSNVSRDAWYQQLPRDQWAVWVAHHLPWLTYWWNTQKLFPASSVIAYNPALLSQEDEMLMAKFGYRAYMPQIRQQGEHECLHRDMMVGFGKWSWSPAAAGEPVRRRRRRRWPGGGEGAPVARRRGPHRAGQPVQVHQPEAAVGRLPRAPQVGTSLPDRRGDG

SEQ ID NO: 2801 - DNA, 497 bp, Zea mays subsp. mays
  misc_feature (1)..(497): Ceres Seq. ID no. 1351195
  misc_feature (1)..(497): Ortholog of  Ceres SEQ ID NO 13596261 as cited in SEQ ID NO 67817
gatgaactgtagcgcgtgayagtgaggggatttggttggatccaatgtttggtcggtctgcttgcatcacctggtttcctggctataaagcgacggggcccttgckctgggcsggagactggagagggcgagagtcctcccatccacaagttcttagcttttgctgagattgagatccggctggggacagaccgacagaggaaggaggacagaaaaatggggattggagatggatcttcaaatgggaaccagcaaccggtgcataaggaaatacgagatgagaccacaccacttcttccagtcaaggtggaggaggacgaggggtttcatgagttcaatggagcttcattctctggggcagttttcaatctgtcgaccaccatagttggggctggaattatggctcttccagcaagtatcaagatgctgggcatcatcccggggattctgttgatcatccttgtggcactgctcacagaggcatccatcgacatgct

SEQ ID NO: 2802 - protein, 93 aa, Zea mays subsp. mays
  peptide (1)..(93): Ceres Seq. ID no. 1351196
MGIGDGSSNGNQQPVHKEIRDETTPLLPVKVEEDEGFHEFNGASFSGAVFNLSTTIVGAGIMALPASIKMLGIIPGILLIILVALLTEASIDM

SEQ ID NO: 2803 - protein, 51 aa, Zea mays subsp. mays
  peptide (1)..(51): Ceres Seq. ID no. 1351197
MDLQMGTSNRCIRKYEMRPHHFFQSRWRRTRGFMSSMELHSLGQFSICRPP

SEQ ID NO: 2804 - protein, 47 aa, Zea mays subsp. mays
  peptide (1)..(47): Ceres Seq. ID no. 1351198
MGTSNRCIRKYEMRPHHFFQSRWRRTRGFMSSMELHSLGQFSICRPP

SEQ ID NO: 2805 - DNA, 1033 bp, Zea mays subsp. mays
  misc_feature (1)..(1033): Ceres Seq. ID no. 12455198
  misc_feature (1)..(1033): Ortholog of  Ceres SEQ ID NO 13582893 as cited in SEQ ID NO 62081
gtgtctcttatttctttgtgtgtttggttgctggaaagggagtggacttttacaacttctcatgtccctattgttgggagggttcggagtccggatcgggatttgccacaaccagattgttcaacactcggaaggctcaccaaatcgtcctacgcttctgcttcctcctccacgaggtgaggaaaccctagcgactgaccatggcgttgctcccgcgcaccgcacggttggccttcctctctaccccgcggtcgtactccgccgccgccgctgcgggcgcctccccgacctccccagcgccatacgggggcgcgcccccaccggcgatgtcgaagacggccgagttcgtggtctccaaggttgatgacctgatgaactgggcgcgtaagggctcgatttggcccatgacctttgggctcgcctgctgcgcggtcgagatgatgcacgccggcgcgtcccgctacgacttcgaccggttcggcgtcatcttccgtccctcgccgcgccagtccgattgcatgatcgtcgccggcacgctcaccaacaaaatggctccagccctccgcaaggtttatgaccaaatgcctgagcctagatgggttatttcaatgggcagctgtgccaacggtggtggatactaccattactcctactctgttgtacgtggatgtgaccgtatagtccccgtggacatctacgtccctgggtgcccaccaactgctgaggcactgctgtacggtgttcttcagctccaaaagaagatcaacaggcgtaaggatttccttcactggtggaccaagtgaagcatgcttctgctgttgctcgcttgctacgtttctttgcactcgacctacctgtcttatctgaaataaggacggactttgctcggattcacaaatttgttgtgcctggaaggatgtatgcccaggttgtgacgaacatataacttgtgtacttggagtcagttcgcctgtaatggacaccagacctgctgtgaatctgtttttaagcttccattgtaatacagcaatac

SEQ ID NO: 2806 - protein, 200 aa, Zea mays subsp. mays
  peptide (1)..(200): Ceres Seq. ID no. 12455199
MALLPRTARLAFLSTPRSYSAAAAAGASPTSPAPYGGAPPPAMSKTAEFVVSKVDDLMNWARKGSIWPMTFGLACCAVEMMHAGASRYDFDRFGVIFRPSPRQSDCMIVAGTLTNKMAPALRKVYDQMPEPRWVISMGSCANGGGYYHYSYSVVRGCDRIVPVDIYVPGCPPTAEALLYGVLQLQKKINRRKDFLHWWTK

SEQ ID NO: 2807 - protein, 158 aa, Zea mays subsp. mays
  peptide (1)..(158): Ceres Seq. ID no. 12455200
MSKTAEFVVSKVDDLMNWARKGSIWPMTFGLACCAVEMMHAGASRYDFDRFGVIFRPSPRQSDCMIVAGTLTNKMAPALRKVYDQMPEPRWVISMGSCANGGGYYHYSYSVVRGCDRIVPVDIYVPGCPPTAEALLYGVLQLQKKINRRKDFLHWWTK

SEQ ID NO: 2808 - protein, 143 aa, Zea mays subsp. mays
  peptide (1)..(143): Ceres Seq. ID no. 12455201
MNWARKGSIWPMTFGLACCAVEMMHAGASRYDFDRFGVIFRPSPRQSDCMIVAGTLTNKMAPALRKVYDQMPEPRWVISMGSCANGGGYYHYSYSVVRGCDRIVPVDIYVPGCPPTAEALLYGVLQLQKKINRRKDFLHWWTK

SEQ ID NO: 2809 - DNA, 1669 bp, Zea mays subsp. mays
  misc_feature (1)..(1669): Ceres Seq. ID no. 12410539
  misc_feature (1)..(1669): Ortholog of  Ceres SEQ ID NO 14313170 as cited in SEQ ID NO 20674
gtctgcgtcatctcatttccgtttccgtctctccctctcctcgcccacacgtccaaaaccgaagggagcaaacgaacaaaacccggccgagtaacgcaggagacgaagctgcggaaggcgagcaagcacgatggaggcggcagcgtcagccgagtacgggtactacggcggaggcgcgggcccacacgagacgaagaccgccgggtgcggggaccacttcgtcgtggacgacctcctcgcgctgccgccgtacgacgaggaggaggagggggcgacaggcgagaccccgctgtgcctgcagcctgtcaaggaggagggcggcctcgggaatttctcggccgactcttccatcgtcacagcaatcgacagctgcagcaactccttctgtaggctagccgatgacgacttcccgggggaattctacgagccgtacgaccaactggtggagctagaatggttatcaaactacatgggcgagggcgaggaaactttcgcggcggaggacctggagaagctgaagctcatttccggtgggttctccccggcggctgtgaacgtgtcagcaccagctccagtgggcgtagcttcagccgcctctgcgacacagtccggtatgttcctgccggtcccggcaaaggcccgtagcaagcggtcccgcgcagctccgggcaactggtcgtcacggttggtcgtgctcccgccgaccccggcctcaccaccggcccctgcagcgtccatggccatttcgccctcggagtccggcatctcggcgcagcaggcgttccgcgccaagaagccgccgccgtcgaagaagaaagacgcggcggcaccggcagaagggcgacggtgcgtgcactgcgacacggacaagacgccgcagtggaggacggggcccatgggccccaagacgctgtgcaacgcgtgcggggtgcggtacaagtcggggcggctggtgccggagtacaggcccgcggcgagccccaccttcgtgatgtccaagcactccaactcccaccgaaaggtgctggagctgcgccgccagaaggaggtggtggtgcagcagccgccgcacgtgatggccggcgccggcggtcctgcaggcgggctgatgcgcatgcagagcgcgatgctgttggacgggccggtggcggcggtgtcgtcgtcgtcccccatcgtcggcggcgacgagtttttgatccaccagcacttagggacggcagactaccggcagcgcatctaactagatgagtttttgatcagttagcctactagcccagtaataatcaatatgcgcaccagcttaaatccaagtaccctccttaaaaacatgaaagaactaataatcttgccttaattaattaattaggagttatttttcctcttcactatattttgtttattaattagttgctgtgttccggttcagatccttggaaattttttcgtggcgactttcgtatggttttgtatctctctttttttttattttttgctagactctcctaattaacatgcctatgagaactctacgagagagagagagagagagagagttttcctatctattttcttcctttgtttcttagcattatatatgtaatttaaggggctagctctcgttctgcttccggtccggagcacgcatgaaaagaagactggaaattttggt

SEQ ID NO: 2810 - protein, 369 aa, Zea mays subsp. mays
  peptide (1)..(369): Ceres Seq. ID no. 12410540
MEAAASAEYGYYGGGAGPHETKTAGCGDHFVVDDLLALPPYDEEEEGATGETPLCLQPVKEEGGLGNFSADSSIVTAIDSCSNSFCRLADDDFPGEFYEPYDQLVELEWLSNYMGEGEETFAAEDLEKLKLISGGFSPAAVNVSAPAPVGVASAASATQSGMFLPVPAKARSKRSRAAPGNWSSRLVVLPPTPASPPAPAASMAISPSESGISAQQAFRAKKPPPSKKKDAAAPAEGRRCVHCDTDKTPQWRTGPMGPKTLCNACGVRYKSGRLVPEYRPAASPTFVMSKHSNSHRKVLELRRQKEVVVQQPPHVMAGAGGPAGGLMRMQSAMLLDGPVAAVSSSSPIVGGDEFLIHQHLGTADYRQRI

SEQ ID NO: 2811 - protein, 256 aa, Zea mays subsp. mays
  peptide (1)..(256): Ceres Seq. ID no. 12410541
MGEGEETFAAEDLEKLKLISGGFSPAAVNVSAPAPVGVASAASATQSGMFLPVPAKARSKRSRAAPGNWSSRLVVLPPTPASPPAPAASMAISPSESGISAQQAFRAKKPPPSKKKDAAAPAEGRRCVHCDTDKTPQWRTGPMGPKTLCNACGVRYKSGRLVPEYRPAASPTFVMSKHSNSHRKVLELRRQKEVVVQQPPHVMAGAGGPAGGLMRMQSAMLLDGPVAAVSSSSPIVGGDEFLIHQHLGTADYRQRI

SEQ ID NO: 2812 - protein, 208 aa, Zea mays subsp. mays
  peptide (1)..(208): Ceres Seq. ID no. 12410542
MFLPVPAKARSKRSRAAPGNWSSRLVVLPPTPASPPAPAASMAISPSESGISAQQAFRAKKPPPSKKKDAAAPAEGRRCVHCDTDKTPQWRTGPMGPKTLCNACGVRYKSGRLVPEYRPAASPTFVMSKHSNSHRKVLELRRQKEVVVQQPPHVMAGAGGPAGGLMRMQSAMLLDGPVAAVSSSSPIVGGDEFLIHQHLGTADYRQRI

SEQ ID NO: 2813 - DNA, 1591 bp, Zea mays subsp. mays
  misc_feature (1)..(1591): Ceres Seq. ID no. 12344661
  misc_feature (1)..(1591): Ortholog of  Ceres SEQ ID NO 13595321 as cited in SEQ ID NO 56260
  misc_feature (1)..(1591): Ortholog of  Ceres SEQ ID NO 14312270 as cited in SEQ ID NO 59086
  misc_feature (1)..(1591): Ortholog of  Ceres SEQ ID NO 14303177 as cited in SEQ ID NO 66365
gtctacgatgccgttgcgcacctcttctctctcgccgccccgagacccccacgcttccctctccgcccccgaactgtggcgcctccccccgccgccgcagcgatgccactcgcggcagagcccgacgacgctcatgaggaaagggagaatcagcagctgctaattacgacgaagggagggcccgggcttgagggactggtggtggggagctactgccacgatgtgctaatccggggcgggcgcatagtgggggagacgctcggcggggctgcggccttcgtgtccaacgtgctcgacgccgcttcgccccagggcgccgcgctcaacgagacatccccctttgtcgttgtggccaaggtgggtcacgacttcatctacgcccgcgcgccggcgtccgcgcggcatccgcctctgctctgctcgtccccaaccacctccttccacgcccagttctcggagaccgccgcctcggcgcacgcccccgaccgggagctccggcgcatgcgcgcctgcgacccgatctaccccgccgaccttcccgaccgccgcttcgcctacggcctcgctgtcggcgtcgccggggaggtgctaccggagacgctcgagcagatgatcaggctctgccgcacggtgctcgtggacgcgcaggcgctgatccgggcgttcgacggtgacggcgccgtcggtcacgtggcgcttggcgataccccgtacgcgcggcttctgccccgagtggcgttcgttaaggcgtcgtcggaggaggcgccatacgttggggtggaaacgacgaggcggcagtgctgtgtgatcgtcacggaggggagggacggctgccggctgtactgggacggtggggaggcgcacgttgcgccgttccccgccgtacaggtggaccctactggcgccggagacagttttctcgcgggctttgcagccggattgctgtgggggttgtcggcgacggacgccgcgctgctggggaacttctttggcgccgctgctgtatcgcaggtcggcgtgcccaccttccatcccaagatgttgcaggcagttaaagaaatacttgaagagaagacaaggaaacgatctagtccatgtatgaacggcgctagttttaccttggagaagtcaaatatgcacaacgagttacacgcagctctccaagaagctgcggtgctgatgtctgaacagcagcaggctgatccggcgaacggcagtggcggtgatatttgctcggcataggtacctcacagtgaagctgaagcagtcgaacgccaaactgaagtttgtggcaaaataaccagcactgcagtcctgaactcctgatctcacattgagatctgtaaacatggtgccaacaagtggaggaagtttgtacatacgctctctccggcctttacactactattctgctggcaaggccgtcagggatcgtttctaccttgctatcgctgacgaggaaatgaagacaactgaacagttgagctgtggcgcttgcacgcaccatgttttctccgctgaacaagtgcgcatttttgagctttcgggcattcgtgctgttaactttttaccattctatatgtcgacttct

SEQ ID NO: 2814 - protein, 413 aa, Zea mays subsp. mays
  peptide (1)..(413): Ceres Seq. ID no. 12344662
VYDAVAHLFSLAAPRPPRFPLRPRTVAPPPAAAAMPLAAEPDDAHEERENQQLLITTKGGPGLEGLVVGSYCHDVLIRGGRIVGETLGGAAAFVSNVLDAASPQGAALNETSPFVVVAKVGHDFIYARAPASARHPPLLCSSPTTSFHAQFSETAASAHAPDRELRRMRACDPIYPADLPDRRFAYGLAVGVAGEVLPETLEQMIRLCRTVLVDAQALIRAFDGDGAVGHVALGDTPYARLLPRVAFVKASSEEAPYVGVETTRRQCCVIVTEGRDGCRLYWDGGEAHVAPFPAVQVDPTGAGDSFLAGFAAGLLWGLSATDAALLGNFFGAAAVSQVGVPTFHPKMLQAVKEILEEKTRKRSSPCMNGASFTLEKSNMHNELHAALQEAAVLMSEQQQADPANGSGGDICSA

SEQ ID NO: 2815 - protein, 379 aa, Zea mays subsp. mays
  peptide (1)..(379): Ceres Seq. ID no. 12344663
MPLAAEPDDAHEERENQQLLITTKGGPGLEGLVVGSYCHDVLIRGGRIVGETLGGAAAFVSNVLDAASPQGAALNETSPFVVVAKVGHDFIYARAPASARHPPLLCSSPTTSFHAQFSETAASAHAPDRELRRMRACDPIYPADLPDRRFAYGLAVGVAGEVLPETLEQMIRLCRTVLVDAQALIRAFDGDGAVGHVALGDTPYARLLPRVAFVKASSEEAPYVGVETTRRQCCVIVTEGRDGCRLYWDGGEAHVAPFPAVQVDPTGAGDSFLAGFAAGLLWGLSATDAALLGNFFGAAAVSQVGVPTFHPKMLQAVKEILEEKTRKRSSPCMNGASFTLEKSNMHNELHAALQEAAVLMSEQQQADPANGSGGDICSA

SEQ ID NO: 2816 - protein, 246 aa, Zea mays subsp. mays
  peptide (1)..(246): Ceres Seq. ID no. 12344664
MRACDPIYPADLPDRRFAYGLAVGVAGEVLPETLEQMIRLCRTVLVDAQALIRAFDGDGAVGHVALGDTPYARLLPRVAFVKASSEEAPYVGVETTRRQCCVIVTEGRDGCRLYWDGGEAHVAPFPAVQVDPTGAGDSFLAGFAAGLLWGLSATDAALLGNFFGAAAVSQVGVPTFHPKMLQAVKEILEEKTRKRSSPCMNGASFTLEKSNMHNELHAALQEAAVLMSEQQQADPANGSGGDICSA

SEQ ID NO: 2817 - DNA, 1444 bp, Zea mays subsp. mays
  misc_feature (1)..(1444): Ceres Seq. ID no. 13498822
  misc_feature (1)..(1444): Ortholog of  Ceres SEQ ID NO 13646499 as cited in SEQ ID NO 20565
aaccacaccactcgagcgcgcgcgcggcccaccgctccgccgctgcccgcccgccgccatgcgagggatcctctcctcttcctccgctctcctccggcgagccggcgcccagctctcgcgcacggactgcagtagcccctcagcgtccgcgacctctcctctccgccgctcccctcttcagaatgggaaaagagacacattttgttcgctttggttcaaaggtcgttcggtatcaaccacagttgatatgcagttagactatgagagtgatccccctcttgacgatacaaaagctattgagaaggagtcatcacttaatgttgctgtttctcaactcgcaattgacttcgatagagactctaatttatgtttggagcgattttcccgtgcaaggaaagcatctgtagtctctactggttctcttaagcttgacctcgctctcggcgttggaggattaccgaagggtagaatggtggagatatatgggaaagaagcatctgggaagacaacactcgcgcttcatgttattaaggaagctcaaaagaatggaggttattgtgcttatattgatgcagaaaatgccttcaacccttcatttgctgaatctattggcgtagacagtgaaaggctcttgatagcccaacctgattctgctgaaaattctctaagcattgtaaacactcttgttggtggttctgttgctgttgttgttgtggacagtgtggcagcacttattcccaaatgtgaaattgaaggtgaaatatacacaaattgtggagacatccaatcccatttgatgactcgggcccttagaaaaattcagtacactttatgtcgatctgaaacacttattatttttgtgaatcaggttagaacaaagaggacatcaagtaatcctgggatctacaaggaggtgccttgcggtggtaatgcactaggattctatgctgcagtcagaatgaggacttcaaggagagaactgcgctatagtgaagatgaggctaccggcgtaggtatatcagtgcagatcatcaagaacaaattggctccagcgaacctgaagaaggaagccggcatcgacatcacattcggtaaggggatctgccacgagtcggagatcctggagacggcttcctccgtcggagtgatcctgaaagacgggtgtgggtattggatcaacaacgagttcctggcaggcaaggtggaagcggagaagttcctgcgtgaaaacgctgcagtggcagatgagatctgcaataccgtgaggaacgagttcttgcaaaggtgacatagggcgaccgattagagaggctaatgcattgttagtcggaaatgttgtaccgtcatgtattcatagaagaagatttatgtaggatgttgctgtgcctgtcgtgtaactttgactcgcaacagttcattgagtttaccagggccattccctcgc

SEQ ID NO: 2818 - protein, 428 aa, Zea mays subsp. mays
  peptide (1)..(428): Ceres Seq. ID no. 13498823
TTPLERARGPPLRRCPPAAMRGILSSSSALLRRAGAQLSRTDCSSPSASATSPLRRSPLQNGKRDTFCSLWFKGRSVSTTVDMQLDYESDPPLDDTKAIEKESSLNVAVSQLAIDFDRDSNLCLERFSRARKASVVSTGSLKLDLALGVGGLPKGRMVEIYGKEASGKTTLALHVIKEAQKNGGYCAYIDAENAFNPSFAESIGVDSERLLIAQPDSAENSLSIVNTLVGGSVAVVVVDSVAALIPKCEIEGEIYTNCGDIQSHLMTRALRKIQYTLCRSETLIIFVNQVRTKRTSSNPGIYKEVPCGGNALGFYAAVRMRTSRRELRYSEDEATGVGISVQIIKNKLAPANLKKEAGIDITFGKGICHESEILETASSVGVILKDGCGYWINNEFLAGKVEAEKFLRENAAVADEICNTVRNEFLQR

SEQ ID NO: 2819 - protein, 409 aa, Zea mays subsp. mays
  peptide (1)..(409): Ceres Seq. ID no. 13498824
MRGILSSSSALLRRAGAQLSRTDCSSPSASATSPLRRSPLQNGKRDTFCSLWFKGRSVSTTVDMQLDYESDPPLDDTKAIEKESSLNVAVSQLAIDFDRDSNLCLERFSRARKASVVSTGSLKLDLALGVGGLPKGRMVEIYGKEASGKTTLALHVIKEAQKNGGYCAYIDAENAFNPSFAESIGVDSERLLIAQPDSAENSLSIVNTLVGGSVAVVVVDSVAALIPKCEIEGEIYTNCGDIQSHLMTRALRKIQYTLCRSETLIIFVNQVRTKRTSSNPGIYKEVPCGGNALGFYAAVRMRTSRRELRYSEDEATGVGISVQIIKNKLAPANLKKEAGIDITFGKGICHESEILETASSVGVILKDGCGYWINNEFLAGKVEAEKFLRENAAVADEICNTVRNEFLQR

SEQ ID NO: 2820 - protein, 346 aa, Zea mays subsp. mays; identical to SEQ ID NO: 1573
  peptide (1)..(346): Ceres Seq. ID no. 13498825

SEQ ID NO: 2821 - DNA, 750 bp, Zea mays subsp. mays
  misc_feature (1)..(750): Ceres Seq. ID no. 12414205
  misc_feature (1)..(750): Ortholog of  Ceres SEQ ID NO 13590940 as cited in SEQ ID NO 68653
agccgactgggactgagaagaaacctccaaacacctacctctctacgaactacctgccgccggaaaaccctagagcgctcgaccatggatccgcagcagccggagcctgtcagttacctctgcggagattgcggacgtgagaacaccctgaagcccggagatgtcatccagtgccgtgaatgtggctaccgcatcctctacaagaagcggtagccacattcacggcactggaagacctctgagggtgaactgcgggccaccgccacctagagatggatccgcaccaagagcaccaaggggtggtggtggtggcggcggcggcagcagctttgtcgattcagggaacaaggtatacgtggggaaccttgcatggggcgttgacaactcgactctggagaacctattcagtgagcaaggacaggtgctggatgctaaggtcatctacgacagggatagcggcaggtcaagggggtttggtttcgtcacctatggctctgccgaggaggtcaacaatgccatatcaaaccttgatggcatagacttggatggtagacagatccgagtcacggttgcagaatcaaagcccaggcgtgaattttgagattttgttaaggtggtttagaggtcaatagcgtgtgttcacaagttctagtttgtagcgtctattctttcttccgtatgagtaacaagaagatgctgataatgagagactggaagtgaaactgctgtccacaggaagatatttttccc

SEQ ID NO: 2822 - protein, 146 aa, Zea mays subsp. mays
  peptide (1)..(146): Ceres Seq. ID no. 12414206
MSSSAVNVATASSTRSGSHIHGTGRPLRVNCGPPPPRDGSAPRAPRGGGGGGGGSSFVDSGNKVYVGNLAWGVDNSTLENLFSEQGQVLDAKVIYDRDSGRSRGFGFVTYGSAEEVNNAISNLDGIDLDGRQIRVTVAESKPRREF

SEQ ID NO: 2823 - protein, 88 aa, Zea mays subsp. mays
  peptide (1)..(88): Ceres Seq. ID no. 12414207
MDPHQEHQGVVVVAAAAAALSIQGTRYTWGTLHGALTTRLWRTYSVSKDRCWMLRSSTTGIAAGQGGLVSSPMALPRRSTMPYQTLMA

SEQ ID NO: 2824 - DNA, 1170 bp, Zea mays subsp. mays
  misc_feature (1)..(1170): Ceres Seq. ID no. 12407328
  misc_feature (1)..(1170): Ortholog of  Ceres SEQ ID NO 15179499 as cited in SEQ ID NO 0
gtgtttaggtgtttagagactaaaagagactgaaaaataaggattaaaaattactccataaaaccaaataccctaactttttcctttccgcatgtaacgacgcaatcgacatcccctcgcctaccccagctctacccgcgacgaagcatcaccagtaaggatgacgggctcaatggatctcccggccaagggcgggttcagcttcgacctgtgccgccgcaacagcatgctggagaagaacgggctcaaactcccgggattcaggaagaccggaacaaccatcgtcggcctcgtctttcaggatggggttgttcttggggcagacacaagagcaactgaggggcctatagttgctgataagaattgtgagaagatccactttatggcgccaaacatttattgttgtggagcaggaactgctgctgacactgaggctgttacagacatggtcagctcacagctacagctgcaccgttatgcaacgggtcgcgaatctagagtcgtaactgctcttacactgctgaagtcacatctctttaggtatcaaggccatgtcagtgctgcccttgttcttggtggagtggattgtactggaccacatcttcacactgcttatccacacggctccactgatactcttccttttgccacgatgggttctggatcccttgctgcaatgtcagtgtttgaatcgaagtataaagaaggcctcactagggaagagggaatacaactggtgtcagaagcaatatgtgcaggtatcttcaatgacttgggtagtggaagcaatgtggatgtctgcgtgataaccaaggggaagacagaatacttgagaaatcaccagttgccgaatcccagaacttatgttagttcaaagggatatagcttcaccaaggggcagactgaggtgctgtccgcaaagatcacacatctcaagcagaaggttgaggtcactgagggcggtgatgctatggaggagtgatcctgtatgcttgcattcaggtaaaacagtcatactcttttttatattattttacttagtgtaggagctaggacaagacagaatggagatctttgttgtactttcttgactgaatccggactttcatgtgaaaggtgtttccaattaaatgcttgtttctgaatgtttaaactgcaatggtatgttac

SEQ ID NO: 2825 - protein, 273 aa, Zea mays subsp. mays
  peptide (1)..(273): Ceres Seq. ID no. 12407329
MTGSMDLPAKGGFSFDLCRRNSMLEKNGLKLPGFRKTGTTIVGLVFQDGVVLGADTRATEGPIVADKNCEKIHFMAPNIYCCGAGTAADTEAVTDMVSSQLQLHRYATGRESRVVTALTLLKSHLFRYQGHVSAALVLGGVDCTGPHLHTAYPHGSTDTLPFATMGSGSLAAMSVFESKYKEGLTREEGIQLVSEAICAGIFNDLGSGSNVDVCVITKGKTEYLRNHQLPNPRTYVSSKGYSFTKGQTEVLSAKITHLKQKVEVTEGGDAMEE

SEQ ID NO: 2826 - protein, 269 aa, Zea mays subsp. mays
  peptide (1)..(269): Ceres Seq. ID no. 12407330
MDLPAKGGFSFDLCRRNSMLEKNGLKLPGFRKTGTTIVGLVFQDGVVLGADTRATEGPIVADKNCEKIHFMAPNIYCCGAGTAADTEAVTDMVSSQLQLHRYATGRESRVVTALTLLKSHLFRYQGHVSAALVLGGVDCTGPHLHTAYPHGSTDTLPFATMGSGSLAAMSVFESKYKEGLTREEGIQLVSEAICAGIFNDLGSGSNVDVCVITKGKTEYLRNHQLPNPRTYVSSKGYSFTKGQTEVLSAKITHLKQKVEVTEGGDAMEE

SEQ ID NO: 2827 - protein, 251 aa, Zea mays subsp. mays
  peptide (1)..(251): Ceres Seq. ID no. 12407331
MLEKNGLKLPGFRKTGTTIVGLVFQDGVVLGADTRATEGPIVADKNCEKIHFMAPNIYCCGAGTAADTEAVTDMVSSQLQLHRYATGRESRVVTALTLLKSHLFRYQGHVSAALVLGGVDCTGPHLHTAYPHGSTDTLPFATMGSGSLAAMSVFESKYKEGLTREEGIQLVSEAICAGIFNDLGSGSNVDVCVITKGKTEYLRNHQLPNPRTYVSSKGYSFTKGQTEVLSAKITHLKQKVEVTEGGDAMEE

SEQ ID NO: 2828 - DNA, 1520 bp, Zea mays subsp. mays
  misc_feature (1)..(1520): Ceres Seq. ID no. 12373839
  misc_feature (1)..(1520): Ortholog of  Ceres SEQ ID NO 13594345 as cited in SEQ ID NO 58043
  misc_feature (1)..(1520): Ortholog of  Ceres SEQ ID NO 12614112 as cited in SEQ ID NO 60891
  misc_feature (1)..(1520): Ortholog of  Ceres SEQ ID NO 14302832 as cited in SEQ ID NO 64926
  misc_feature (1)..(1520): Ortholog of  Ceres SEQ ID NO 12617417 as cited in SEQ ID NO 65089
  misc_feature (1)..(1520): Ortholog of  Ceres SEQ ID NO 13662880 as cited in SEQ ID NO 65422
  misc_feature (1)..(1520): Ortholog of  Ceres SEQ ID NO 13656166 as cited in SEQ ID NO 66015
  misc_feature (1)..(1520): Ortholog of  Ceres SEQ ID NO 13596089 as cited in SEQ ID NO 68373
attttcgtagtgcactctctagtctctccacacaccacagtcgagcgagcactcctctccatggcccacggcgagggacgacgccagcatttcctggtggtggccctcggcgtccaaagccacgtcaacccggggcgcgccctcgcccaccgcctcgcacggctacgcgccgacggctccatcacggccacgctctccgtgccggtaaccacctaccggcgcatgttccctcggtcggcggattccgccccagcgacggcggagaccagcgacggggtcatctcgtacgtggcgcactcagacggcctcgacgacggctcgtcgtcgtcctgggccgcggacgccgaggacagggcgcgcaggcgccgcgcgagcgccgacagcctctccgccgtggccgcccgcctggccggccgcggccgcccggtgacgtgcatcgcgtgcacgatggtgtcgcctccggcgctcgacgtcgcgcgggagcacgccatccctctcgccgtcttctggctccagccggccaccgtcctcgccctctgctaccactacttccacggccacggcgcgagcgtggccgcccacgccgcggacccggcgcacgaggtgcgcgtgcccgggctgcgccgccccctccgcatgcgctgcctcccgtcgttcctcaccgacacgtcgggcagcgacagggccacggccctcaccgacgtgttccgagagctgttcgagttcttggaccgctggcggcccacggtgctggtcaacacgttcgacgagctggagccggacccgctcgcggaggtgaggcgccacctggacgtggtcgccgttggccccatggtcgggcccgccacggacgccccgcatccacctgttcgaccacgacgacgacgccggcaagaagaggtacacggagtggcttcacgctcacccggacggctcggtggtgtacgcgtcgttcgggagcgtcacgaagctcgccaagcggcagatgcaggagatcgccggagggttgcgccagtgcgggcggccgtacttgctggtcgtgcgcagggacggggtcgacgacgacgaaggcggcatccatggcctggagaacgacaccgagatgcaggggatggtcgtggactggtgcgaccagctggaggtgctgtcgcacccggcggtcggctgcttcgtctcgcattgcgggtggaactcggcgacggaggccatggcgtccggcgtgcccatcgtcggtgtgcccaacatgttcgaccagccgacgaacatgtacttggtcgaggaagagtggggggtcggcgtcagaggagagcgagacgccgatggcgtgctgacaggggcggagctggcaaggtgcattgagctggtcatgggtgatggcgcaggagcagtggtgatcagggaaagggcaaaggccttgcaagagacagcgcaggcggcggccagtgcagcaggcgggcccgccgagagaaacctttgtcacctcgtcaagacgatgtcaaaataattatcaaagctgtcgt

SEQ ID NO: 2829 - protein, 452 aa, Zea mays subsp. mays
  peptide (1)..(452): Ceres Seq. ID no. 12373840
IFVVHSLVSPHTTVERALLSMAHGEGRRQHFLVVALGVQSHVNPGRALAHRLARLRADGSITATLSVPVTTYRRMFPRSADSAPATAETSDGVISYVAHSDGLDDGSSSSWAADAEDRARRRRASADSLSAVAARLAGRGRPVTCIACTMVSPPALDVAREHAIPLAVFWLQPATVLALCYHYFHGHGASVAAHAADPAHEVRVPGLRRPLRMRCLPSFLTDTSGSDRATALTDVFRELFEFLDRWRPTVLVNTFDELEPDPLAEVRRHLDVVAVGPMVGPATDAPHPPVRPRRRRRQEEVHGVASRSPGRLGGVRVVRERHEARQAADAGDRRRVAPVRAAVLAGRAQGRGRRRRRRHPWPGERHRDAGDGRGLVRPAGGAVAPGGRLLRLALRVELGDGGHGVRRAHRRCAQHVRPADEHVLGRGRVGGRRQRRARRRWRADRGGAGKVH

SEQ ID NO: 2830 - protein, 442 aa, Zea mays subsp. mays
  peptide (1)..(442): Ceres Seq. ID no. 12373841
FRSALSSLSTHHSRASTPLHGPRRGTTPAFPGGGPRRPKPRQPGARPRPPPRTATRRRLHHGHALRAGNHLPAHVPSVGGFRPSDGGDQRRGHLVRGALRRPRRRLVVVLGRGRRGQGAQAPRERRQPLRRGRPPGRPRPPGDVHRVHDGVASGARRRAGARHPSRRLLAPAGHRPRPLLPLLPRPRRERGRPRRGPGARGARARAAPPPPHALPPVVPHRHVGQRQGHGPHRRVPRAVRVLGPLAAHGAGQHVRRAGAGPARGGEAPPGRGRRWPHGRARHGRPASTCSTTTTTPARRGTRSGFTLTRTARWCTRRSGASRSSPSGRCRRSPEGCASAGGRTCWSCAGTGSTTTKAASMAWRTTPRCRGWSWTGATSWRCCRTRRSAASSRIAGGTRRRRPWRPACPSSVCPTCSTSRRTCTWSRKSGGSASEESETPMAC

SEQ ID NO: 2831 - protein, 432 aa, Zea mays subsp. mays
  peptide (1)..(432): Ceres Seq. ID no. 12373842
MAHGEGRRQHFLVVALGVQSHVNPGRALAHRLARLRADGSITATLSVPVTTYRRMFPRSADSAPATAETSDGVISYVAHSDGLDDGSSSSWAADAEDRARRRRASADSLSAVAARLAGRGRPVTCIACTMVSPPALDVAREHAIPLAVFWLQPATVLALCYHYFHGHGASVAAHAADPAHEVRVPGLRRPLRMRCLPSFLTDTSGSDRATALTDVFRELFEFLDRWRPTVLVNTFDELEPDPLAEVRRHLDVVAVGPMVGPATDAPHPPVRPRRRRRQEEVHGVASRSPGRLGGVRVVRERHEARQAADAGDRRRVAPVRAAVLAGRAQGRGRRRRRRHPWPGERHRDAGDGRGLVRPAGGAVAPGGRLLRLALRVELGDGGHGVRRAHRRCAQHVRPADEHVLGRGRVGGRRQRRARRRWRADRGGAGKVH

SEQ ID NO: 2832 - DNA, 1620 bp, Zea mays subsp. mays
  misc_feature (1)..(1620): Ceres Seq. ID no. 12372917
  misc_feature (1)..(1620): Ortholog of  Ceres SEQ ID NO 14306667 as cited in SEQ ID NO 52925
  misc_feature (1)..(1620): Ortholog of  Ceres SEQ ID NO 15177522 as cited in SEQ ID NO 0
aaactcccgcggtgccgcgcctcgctttcgcatccccccgcggagaggagaggaagaagaacccagccaaatcctcagtcctcaggcagtcaggctgctcgcagctcgtgccgtccactctcccccgaggcagtctcttgcgttcgctgctcgacatggcgctccaggcggcgacgtccttcctcccctctgccctctccgcgcgcaaggaggggtcggtgaaggactcggcgtcgttcttgggtgttcgtctcgcggcggatggcctcaagctggacaccaccgctctgggcctacgcaccgtgagggtgagcaggtcggcggacatccgcgcgcagacggcagcggtgtcctccccgtcagtgacccccgcgtcgccgtctggcaagaagaccctccgcaagggcacggcggtcatcaccggcgcgtcgtccggcctcggcctcgccacggcgaaggccctggcggagacaggcaagtggcacgtcatcatggcctgccgcgacttcctcaaggcgtcgcgcgcggccaaggcggccggcatggacaaggacagcttcaccgtcgtgcacctggacctcgcctccctggacagcgtccgccagttcgtcaggaacgtgcgccagctggagatgcccatcgacgtggtggtctgcaacgccgccgtgtaccagcccaccgccaaggagccgtcctacaccgccgacggcttcgagatgagcgtcggcgtcaaccacctcggccacttcctcctcgcgcgcgagctcctcagcgacctccagtcctccgactacccctctaagcgcctcatcatcgtcggctccatcaccgggaacacgaacacgctggcggggaacgtgcccccgaaggcgaacctgggcgacctgcgcggcctcgccggcggcctcaacggcgttggcagctcggtgatgatcgacggcggggagttcgacggcgccaaggcatacaaggacagcaaggtgtggcaacatgctgacgatgcaggagttccaccgccggtaccacgaggagacgggcgtgaccttcgcgtcgctctacccgggctgcatcgccaccacgggcctgttccgcgagcacatcccgctgttccgcctgctcttccccccgttccagaagtacatcaccaaggggtacgtctccgaggaggaggccgggaagcggctggcgcaggtggtgagcgaccccagcctgaccaagtccggcgtgtactggagctggaacaagaactccgcgtccttcgagaaccagctctctgaggaggccagcgacgccgacaaggccaagaagctctgggagatcagcgagaagctcgtcggcttggcgtgatgcccaccgtggccggcgtcggcagccggcgacagtttttcctacctaggacatgctcattagttggtctcagtcgagtagtcgacgtgtggtgcgcccgtgtcagagtgccaagccaagacagaaagtgagtacaaacgtgtaaaatatgtgctactgcgacgtgatggtttgggcagtggactgtatgtatctctactctctaggcttctgctttgctttgcatatttaattttctgctaataagaggacagcaaatgcctttcgagcttc

SEQ ID NO: 2833 - protein, 424 aa, Zea mays subsp. mays
  peptide (1)..(424): Ceres Seq. ID no. 12372918
TPAVPRLAFASPRGEERKKNPAKSSVLRQSGCSQLVPSTLPRGSLLRSLLDMALQAATSFLPSALSARKEGSVKDSASFLGVRLAADGLKLDTTALGLRTVRVSRSADIRAQTAAVSSPSVTPASPSGKKTLRKGTAVITGASSGLGLATAKALAETGKWHVIMACRDFLKASRAAKAAGMDKDSFTVVHLDLASLDSVRQFVRNVRQLEMPIDVVVCNAAVYQPTAKEPSYTADGFEMSVGVNHLGHFLLARELLSDLQSSDYPSKRLIIVGSITGNTNTLAGNVPPKANLGDLRGLAGGLNGVGSSVMIDGGEFDGAKAYKDSKVWQHADDAGVPPPVPRGDGRDLRVALPGLHRHHGPVPRAHPAVPPALPPVPEVHHQGVRLRGGGREAAGAGGERPQPDQVRRVLELEQELRVLREPAL

SEQ ID NO: 2834 - protein, 373 aa, Zea mays subsp. mays
  peptide (1)..(373): Ceres Seq. ID no. 12372919
MALQAATSFLPSALSARKEGSVKDSASFLGVRLAADGLKLDTTALGLRTVRVSRSADIRAQTAAVSSPSVTPASPSGKKTLRKGTAVITGASSGLGLATAKALAETGKWHVIMACRDFLKASRAAKAAGMDKDSFTVVHLDLASLDSVRQFVRNVRQLEMPIDVVVCNAAVYQPTAKEPSYTADGFEMSVGVNHLGHFLLARELLSDLQSSDYPSKRLIIVGSITGNTNTLAGNVPPKANLGDLRGLAGGLNGVGSSVMIDGGEFDGAKAYKDSKVWQHADDAGVPPPVPRGDGRDLRVALPGLHRHHGPVPRAHPAVPPALPPVPEVHHQGVRLRGGGREAAGAGGERPQPDQVRRVLELEQELRVLREPAL

SEQ ID NO: 2835 - protein, 266 aa, Zea mays subsp. mays
  peptide (1)..(266): Ceres Seq. ID no. 12372920
NSRGAAPRFRIPPRRGEEEEPSQILSPQAVRLLAARAVHSPPRQSLAFAARHGAPGGDVLPPLCPLRAQGGVGEGLGVVLGCSSRGGWPQAGHHRSGPTHREGEQVGGHPRADGSGVLPVSDPRVAVWQEDPPQGHGGHHRRVVRPRPRHGEGPGGDRQVARHHGLPRLPQGVARGQGGRHGQGQLHRRAPGPRLPGQRPPVRQERAPAGDAHRRGGLQRRRVPAHRQGAVLHRRRLRDERRRQPPRPLPPRARAPQRPPVLRLPL

SEQ ID NO: 2836 - DNA, 1574 bp, Zea mays subsp. mays
  misc_feature (1)..(1574): Ceres Seq. ID no. 12362111
  misc_feature (1)..(1574): Ortholog of  Ceres SEQ ID NO 15174879 as cited in SEQ ID NO 53786
  misc_feature (1)..(1574): Ortholog of  Ceres SEQ ID NO 14313336 as cited in SEQ ID NO 55501
  misc_feature (1)..(1574): Ortholog of  Ceres SEQ ID NO 15176941 as cited in SEQ ID NO 55559
  misc_feature (1)..(1574): Ortholog of  Ceres SEQ ID NO 12583314 as cited in SEQ ID NO 56435
  misc_feature (1)..(1574): Ortholog of  Ceres SEQ ID NO 13597268 as cited in SEQ ID NO 63929
  misc_feature (1)..(1574): Ortholog of  Ceres SEQ ID NO 13659840 as cited in SEQ ID NO 66970
  misc_feature (1)..(1574): Ortholog of  Ceres SEQ ID NO 13660544 as cited in SEQ ID NO 67401
  misc_feature (1)..(1574): Ortholog of  Ceres SEQ ID NO 15180683 as cited in SEQ ID NO 0
gtcgatggaggaacaacacatggctgggccgccgtaccgctaccggcttcggcatctccggctgatggacatagcacccgcaagcgcgagcaacgacgattcagggcatcacggctccaacgggatggccatcatggtgtcgatcctggtggtggtcatcgtctgcaccctcttctactgcgtctactgctggagatggaggaagcgcaacgctgtcaggagagcgcagatagagaggctgaggccgatgtccagctcggacctgccgctcatggacctgtcctccatccacgaggccaccaacagcttctccaaggagaacaagctcggcgaaggcggtttcgggcccgtctatcggggcgtgatgggcggcggcgcggagatcgccgtgaagcggctgtcggctcggtcgcggcagggcgcggcggagttccgcaacgaggtggagctgatcgccaagctgcagcaccggaacctggtccgcctgctgggatgctgcgtcgagagggacgagaagatgctcgtctacgagtacctccccaaccgaagcctcgactccttcctcttcgatagcaggaagagcgggcagctggactggaagacgaggcagagcatcgtcctggggatcgcccgcggcatgctgtacctgcacgaggactcgtgcctcaaggtcatccacagggacctcaaggccagcaacgtgctcctggacaacaggatgaaccctaagatctccgacttcggcatggccaagatcttcgaggaggagggcaacgagcctaacacgggccccgtggtcggcacctacgggtacatggctccggagtacgccatggagggcgtcttctcggtgaagtcagacgtcttcagcttcggggtgctggtgctagagatcctcagcgggcagcggaacggctccatgtacctccaggagcaccagcacaccctgattcaagatgcctggaagctgtggaacgaggacagggcggcggagttcatggacgcggcgctggcggggtcgtacccgcgggacgaggcgtggcggtgcttccacgtggggctgctgtgcgtgcaggagagcccggacctccggcccaccatgtccagcgtggtgctcatgctcatcagcgaccagacggcgcagcagatgccggcgccggcgcagccgccgctgttcgccagcaggctcggcaggaaggcgtccgcgtcggacttgtcgctggccatgaagacggagacgaccaagacgcagtccgtcaacgaggtgtccatctccatgatggagccacggtgagacgaggggggccttgcttgatcgtcaaccaacaagtgtccgtctccgtcccatccgcatgagaaacccttactcggggagccgtcgtgatttgcttggttctttgatcagcaacgggatacgctgtgcgtcgtcgtagtcggtgcgcgcgtgtatgtgtgtgatggttacggatgtcttgcgagccgtaatcgcgctgggaaagtcccaggccccagcctttgtcgcgggaaaaatcttgtagccgtgacatgtgcagcgagaaaaacgctttgagact

SEQ ID NO: 2837 - protein, 430 aa, Zea mays subsp. mays
  peptide (1)..(430): Ceres Seq. ID no. 12362112
SMEEQHMAGPPYRYRLRHLRLMDIAPASASNDDSGHHGSNGMAIMVSILVVVIVCTLFYCVYCWRWRKRNAVRRAQIERLRPMSSSDLPLMDLSSIHEATNSFSKENKLGEGGFGPVYRGVMGGGAEIAVKRLSARSRQGAAEFRNEVELIAKLQHRNLVRLLGCCVERDEKMLVYEYLPNRSLDSFLFDSRKSGQLDWKTRQSIVLGIARGMLYLHEDSCLKVIHRDLKASNVLLDNRMNPKISDFGMAKIFEEEGNEPNTGPVVGTYGYMAPEYAMEGVFSVKSDVFSFGVLVLEILSGQRNGSMYLQEHQHTLIQDAWKLWNEDRAAEFMDAALAGSYPRDEAWRCFHVGLLCVQESPDLRPTMSSVVLMLISDQTAQQMPAPAQPPLFASRLGRKASASDLSLAMKTETTKTQSVNEVSISMMEPR

SEQ ID NO: 2838 - protein, 429 aa, Zea mays subsp. mays
  peptide (1)..(429): Ceres Seq. ID no. 12362113
MEEQHMAGPPYRYRLRHLRLMDIAPASASNDDSGHHGSNGMAIMVSILVVVIVCTLFYCVYCWRWRKRNAVRRAQIERLRPMSSSDLPLMDLSSIHEATNSFSKENKLGEGGFGPVYRGVMGGGAEIAVKRLSARSRQGAAEFRNEVELIAKLQHRNLVRLLGCCVERDEKMLVYEYLPNRSLDSFLFDSRKSGQLDWKTRQSIVLGIARGMLYLHEDSCLKVIHRDLKASNVLLDNRMNPKISDFGMAKIFEEEGNEPNTGPVVGTYGYMAPEYAMEGVFSVKSDVFSFGVLVLEILSGQRNGSMYLQEHQHTLIQDAWKLWNEDRAAEFMDAALAGSYPRDEAWRCFHVGLLCVQESPDLRPTMSSVVLMLISDQTAQQMPAPAQPPLFASRLGRKASASDLSLAMKTETTKTQSVNEVSISMMEPR

SEQ ID NO: 2839 - protein, 424 aa, Zea mays subsp. mays
  peptide (1)..(424): Ceres Seq. ID no. 12362114
MAGPPYRYRLRHLRLMDIAPASASNDDSGHHGSNGMAIMVSILVVVIVCTLFYCVYCWRWRKRNAVRRAQIERLRPMSSSDLPLMDLSSIHEATNSFSKENKLGEGGFGPVYRGVMGGGAEIAVKRLSARSRQGAAEFRNEVELIAKLQHRNLVRLLGCCVERDEKMLVYEYLPNRSLDSFLFDSRKSGQLDWKTRQSIVLGIARGMLYLHEDSCLKVIHRDLKASNVLLDNRMNPKISDFGMAKIFEEEGNEPNTGPVVGTYGYMAPEYAMEGVFSVKSDVFSFGVLVLEILSGQRNGSMYLQEHQHTLIQDAWKLWNEDRAAEFMDAALAGSYPRDEAWRCFHVGLLCVQESPDLRPTMSSVVLMLISDQTAQQMPAPAQPPLFASRLGRKASASDLSLAMKTETTKTQSVNEVSISMMEPR

SEQ ID NO: 2840 - DNA, 1432 bp, Zea mays subsp. mays
  misc_feature (1)..(1432): Ceres Seq. ID no. 12387277
  misc_feature (1)..(1432): Ortholog of  Ceres SEQ ID NO 14311870 as cited in SEQ ID NO 51574
  misc_feature (1)..(1432): Ortholog of  Ceres SEQ ID NO 15174583 as cited in SEQ ID NO 53693
  misc_feature (1)..(1432): Ortholog of  Ceres SEQ ID NO 13581563 as cited in SEQ ID NO 58942
  misc_feature (1)..(1432): Ortholog of  Ceres SEQ ID NO 13658707 as cited in SEQ ID NO 66286
  misc_feature (1)..(1432): Ortholog of  Ceres SEQ ID NO 13654528 as cited in SEQ ID NO 68080
actctcacagccacgccacgccacgagagaagaatgccgccgacgctgggcctgctcctcgcggcggcggcggcggtcctgctgctgctgctgccgccgccaccatcgacgggggcgcaggagacgtgctggtcggggccggcgccgcggcgcggggcgtggatgtccgtggccagcttcggggcgcgcggggacgggcagacgctcaacacgggcgcgttcgcgcgcgccgtggcgcgcatcgcgcgtcgccggggcgcgcggggcggcacgctgctgtacgtgccgcccggggtgtggctcacgggccccttcaacctcacctcccacatgacgctcttcctcgcccgcggcgccatcgtccgcgccacccaggacacgtcgagctggccgctcatcgacccgctgccgtcgtacgggagagggcgcgagctgcctggcgggagatacatgagcttgatccacggccacggtctgcaggacgtcttcatcacaggtgagaacggcaccatcgacggccaaggcggcgtgtggtgggacatgtggaagaagcgcacgctgcccttcacgaggccgcacctgctggagctcatgtactccaccgacgtcgtcgtctccaacctcgtcttccaggactcgccgttctggaacatccacccggtttactgcagcaacgtagtgatagcaaacctgactgtgttggcgccgcacgactcccccaacaccgacgggatcgatctagattcaagcagcaacgtgtgcgtcgaggactgctacatctccgccggcgacgacctgatttccatcaagagcgggtgggacgagtacggcgtggccttcggccgcccaagctccggcatcacggtccggaggataaccgggtcgggcccgttcgccggcttcgcggtcgggagcgagacctcgggcggcgtggaggacgtcgtggccgagcacctgagcttctccggcgtgggcgtcggggtccacgtgaagaccaactcgggcaggggcggcttcatccggaacgtcaccgtctcccaggtgaccctggacggcgcccgctacggcctgaggatcgccggcgacgtcgggggccaccccggcgcgtcctacaacgcgagcctgctccccgtcgtcgacggcgtggcggtcaggaacgtctggggccggaacgtccggcaggccgggctcatacggggcatcagggactcggtcttcagtaacatttgcctctccaacgtgaagctctatggcattggcagcgactccatcgggccgtggagatgccgagccgtcagtggcagcgcactcgacgtgcaaccgtcgccatgtgcggagctggctagtacgtccgggacaggtttctgtacctgaatcagtttttccgcctcctatagcagcaataaagacgtcagcatttctcaaaaaacag

SEQ ID NO: 2841 - protein, 457 aa, Zea mays subsp. mays
  peptide (1)..(457): Ceres Seq. ID no. 12387278
TLTATPRHERRMPPTLGLLLAAAAAVLLLLLPPPPSTGAQETCWSGPAPRRGAWMSVASFGARGDGQTLNTGAFARAVARIARRRGARGGTLLYVPPGVWLTGPFNLTSHMTLFLARGAIVRATQDTSSWPLIDPLPSYGRGRELPGGRYMSLIHGHGLQDVFITGENGTIDGQGGVWWDMWKKRTLPFTRPHLLELMYSTDVVVSNLVFQDSPFWNIHPVYCSNVVIANLTVLAPHDSPNTDGIDLDSSSNVCVEDCYISAGDDLISIKSGWDEYGVAFGRPSSGITVRRITGSGPFAGFAVGSETSGGVEDVVAEHLSFSGVGVGVHVKTNSGRGGFIRNVTVSQVTLDGARYGLRIAGDVGGHPGASYNASLLPVVDGVAVRNVWGRNVRQAGLIRGIRDSVFSNICLSNVKLYGIGSDSIGPWRCRAVSGSALDVQPSPCAELASTSGTGFCT

SEQ ID NO: 2842 - protein, 446 aa, Zea mays subsp. mays
  peptide (1)..(446): Ceres Seq. ID no. 12387279
MPPTLGLLLAAAAAVLLLLLPPPPSTGAQETCWSGPAPRRGAWMSVASFGARGDGQTLNTGAFARAVARIARRRGARGGTLLYVPPGVWLTGPFNLTSHMTLFLARGAIVRATQDTSSWPLIDPLPSYGRGRELPGGRYMSLIHGHGLQDVFITGENGTIDGQGGVWWDMWKKRTLPFTRPHLLELMYSTDVVVSNLVFQDSPFWNIHPVYCSNVVIANLTVLAPHDSPNTDGIDLDSSSNVCVEDCYISAGDDLISIKSGWDEYGVAFGRPSSGITVRRITGSGPFAGFAVGSETSGGVEDVVAEHLSFSGVGVGVHVKTNSGRGGFIRNVTVSQVTLDGARYGLRIAGDVGGHPGASYNASLLPVVDGVAVRNVWGRNVRQAGLIRGIRDSVFSNICLSNVKLYGIGSDSIGPWRCRAVSGSALDVQPSPCAELASTSGTGFCT

SEQ ID NO: 2843 - protein, 403 aa, Zea mays subsp. mays
  peptide (1)..(403): Ceres Seq. ID no. 12387280
MSVASFGARGDGQTLNTGAFARAVARIARRRGARGGTLLYVPPGVWLTGPFNLTSHMTLFLARGAIVRATQDTSSWPLIDPLPSYGRGRELPGGRYMSLIHGHGLQDVFITGENGTIDGQGGVWWDMWKKRTLPFTRPHLLELMYSTDVVVSNLVFQDSPFWNIHPVYCSNVVIANLTVLAPHDSPNTDGIDLDSSSNVCVEDCYISAGDDLISIKSGWDEYGVAFGRPSSGITVRRITGSGPFAGFAVGSETSGGVEDVVAEHLSFSGVGVGVHVKTNSGRGGFIRNVTVSQVTLDGARYGLRIAGDVGGHPGASYNASLLPVVDGVAVRNVWGRNVRQAGLIRGIRDSVFSNICLSNVKLYGIGSDSIGPWRCRAVSGSALDVQPSPCAELASTSGTGFCT

SEQ ID NO: 2844 - DNA, 1398 bp, Zea mays subsp. mays
  misc_feature (1)..(1398): Ceres Seq. ID no. 13498659
  misc_feature (1)..(1398): Ortholog of  Ceres SEQ ID NO 15176130 as cited in SEQ ID NO 1136
  misc_feature (1)..(1398): Ortholog of  Ceres SEQ ID NO 15171728 as cited in SEQ ID NO 57131
  misc_feature (1)..(1398): Ortholog of  Ceres SEQ ID NO 14308198 as cited in SEQ ID NO 59072
  misc_feature (1)..(1398): Ortholog of  Ceres SEQ ID NO 13654213 as cited in SEQ ID NO 60614
  misc_feature (1)..(1398): Ortholog of  Ceres SEQ ID NO 12617527 as cited in SEQ ID NO 64697
actttcgcccatttcatttcaaaccaaaaccctctctccccttgccttccacggttccaccacaccccggatcaaatcgccacagaaaattcccagaaaaataacaagcacttgttcatcatcaaagtaaacgcggcagaaccctagcgagccgttcctccaacgactcacctcccacccactcacccaccccatggcgaccaacccctccaacggcgccggcgccgacgtccctgcaagccccggcggcggtgcggctctcggttgcggcgcaggcggccgcgatccagccctcgtccccgcgcttcttcttctcctcgcttgccgggaccaacccggcctccccgcaccgtcgcatcgccatcgccgttgatctctccgacgagtccgccttcgcagtcaagtgggccgtgcagaactacgtccgccccggggacgccgtcgtgctgctccacgtgcgccccacctccgtcctctacggcgccgactgggggttccatcccggtctccgtcgctgacgaggacgacgctgccgaggacgccgccgccgccgccgagggcgatccctcggaggaggagctgcagaagaaacgggaggaggactacgacgccttcacctccaccaaggcgcaggacctcgcgcaaccgctggtcgacgcccagatccccttcaagatccacgtcgtcaaggaccacgacatgaaggagcgcctctgcctcgaggctgagcgccttggcctctccgccatgatcatggggagccgcggtttcggggcctcccggaaaggcagcaaggggcggcttgggagtgttagtgattactgcgtacaccactgtgtatgccctgttgtggttgttcgctaccctgatgatgctgcagatgcccggtggagatgcatcaggggtgacagatgagttgcacactgtaccagaggacgaacctgtttatcacgatgcacctgaggtgcagaaagaaaactgaggcaacggccacatgcagctgaagaacgaaggaaaacacgaggcttatagtgaggcaatcctgtgtatctggaagatgggaccggatgtttatctttgcttctatatatcaactgcgtatcatgatcagctgtctgcttcccgttgagtttcatatcggcgtcgtagatcatctgagttttttgttggtttgcttgtgagatgtagagtactcttcccgtgggtcgaaggtgtcttgcagatgcttgagctttatgttgtcgaacggtagttatctacacggtatcatctgctctgttaagcctgtttagtgtttactgtattggatactcgttaatagagaaccgctacttttcagtatttattatcacctgtatattggataaaattattgcttagcttatgcttgcatgctcc

SEQ ID NO: 2845 - protein, 71 aa, Zea mays subsp. mays
  peptide (1)..(71): Ceres Seq. ID no. 13498660
MKERLCLEAERLGLSAMIMGSRGFGASRKGSKGRLGSVSDYCVHHCVCPVVVVRYPDDAADARWRCIRGDR

SEQ ID NO: 2846 - protein, 59 aa, Zea mays subsp. mays
  peptide (1)..(59): Ceres Seq. ID no. 13498661
MATNPSNGAGADVPASPGGGAALGCGAGGRDPALVPALLLLLACRDQPGLPAPSHRHRR

SEQ ID NO: 2847 - protein, 55 aa, Zea mays subsp. mays
  peptide (1)..(55): Ceres Seq. ID no. 13498662
MIMGSRGFGASRKGSKGRLGSVSDYCVHHCVCPVVVVRYPDDAADARWRCIRGDR

SEQ ID NO: 2848 - DNA, 886 bp, Zea mays subsp. mays
  misc_feature (1)..(886): Ceres Seq. ID no. 12386765
  misc_feature (1)..(886): Ortholog of  Ceres SEQ ID NO 14305682 as cited in SEQ ID NO 59267
  misc_feature (1)..(886): Ortholog of  Ceres SEQ ID NO 13597809 as cited in SEQ ID NO 64598
  misc_feature (1)..(886): Ortholog of  Ceres SEQ ID NO 14313544 as cited in SEQ ID NO 68424
  misc_feature (1)..(886): Ortholog of  Ceres SEQ ID NO 12617960 as cited in SEQ ID NO 69051
  misc_feature (1)..(886): Ortholog of  Ceres SEQ ID NO 13589401 as cited in SEQ ID NO 0
  misc_feature (1)..(886): Ortholog of  Ceres SEQ ID NO 15179361 as cited in SEQ ID NO 0
tttctatggaggaacaagaggatctctggtggggtgctcgcaggcgcaactgccttctggctgctgtttgaggtcatggattaccacctcctcaccctgctatgccactgcctcatcctcaccctggccatcctgttcctctggtccaatgccacgactttcatcaacaagtctcctcctaacatccccgaggtgaagatcccagatgacctggctgtgaatgttgcacgttccctgagatatgagatcaacaggggttttgctaccttgagggagattggccaaggccatgacctcaagaaatttctgattgtgattgcaggactgtggatcctttctgttcttgggagctgctgcaatttcctcaccttgtcttacatagtttttatggtactgtacactgtaccggtcctgtatgagaaacatgaggataaggttgatgcttttggtgagaaggccatggtcgagctgaagaagtactacgccatcttcgacgagaaatgtctatcaaagattccgaagggcccattaaaagacaagaagcaacattagaagcgtagaatcagataagggtctgcggtgatttatcatctcttttgaccattactcgtcggttttggaggatggatgtgattccatgtctaaatacctggacgtgctctagtgttttagtgtggtcagtatcaatgttctaaattatctgagattacgctgaatcatgttctgaagtccacgtttaactttgctctccctatcctttggaagtggcaatttcctaaatgtctgtaatatatctagtctagtgctatttcttaatctgacctagcgtcatgatgaaccttcttggatatttatttatatgtgccaccggacatggtaactatag

SEQ ID NO: 2849 - protein, 183 aa, Zea mays subsp. mays
  peptide (1)..(183): Ceres Seq. ID no. 12386766
FLWRNKRISGGVLAGATAFWLLFEVMDYHLLTLLCHCLILTLAILFLWSNATTFINKSPPNIPEVKIPDDLAVNVARSLRYEINRGFATLREIGQGHDLKKFLIVIAGLWILSVLGSCCNFLTLSYIVFMVLYTVPVLYEKHEDKVDAFGEKAMVELKKYYAIFDEKCLSKIPKGPLKDKKQH

SEQ ID NO: 2850 - protein, 158 aa, Zea mays subsp. mays
  peptide (1)..(158): Ceres Seq. ID no. 12386767
MDYHLLTLLCHCLILTLAILFLWSNATTFINKSPPNIPEVKIPDDLAVNVARSLRYEINRGFATLREIGQGHDLKKFLIVIAGLWILSVLGSCCNFLTLSYIVFMVLYTVPVLYEKHEDKVDAFGEKAMVELKKYYAIFDEKCLSKIPKGPLKDKKQH

SEQ ID NO: 2851 - DNA, 1413 bp, Zea mays subsp. mays; identical to SEQ ID NO: 2169
  misc_feature (1)..(1413): Ceres Seq. ID no. 12410874
  misc_feature (1)..(1413): Ortholog of  Ceres SEQ ID NO 14310524 as cited in SEQ ID NO 58840
  misc_feature (1)..(1413): Ortholog of  Ceres SEQ ID NO 15169541 as cited in SEQ ID NO 67500

SEQ ID NO: 2852 - protein, 357 aa, Zea mays subsp. mays; identical to SEQ ID NO: 2170
  peptide (1)..(357): Ceres Seq. ID no. 12410875

SEQ ID NO: 2853 - protein, 267 aa, Zea mays subsp. mays; identical to SEQ ID NO: 2171
  peptide (1)..(267): Ceres Seq. ID no. 12410876

SEQ ID NO: 2854 - DNA, 1408 bp, Zea mays subsp. mays
  misc_feature (1)..(1408): Ceres Seq. ID no. 12406456
  misc_feature (1)..(1408): Ortholog of  Ceres SEQ ID NO 13597269 as cited in SEQ ID NO 63932
gaagttctggacgggctcctgggcccgtactggaaggcggccgggctggcgttcaactgcactttcctgctcttcggcacggtcatccagctgatcgcctgcgcaagcaacatctactacatcaacgaccggctggacaagcggacgtggacgtacatcttcggcgcctgctgcgccaccaccgtcttcatcccctcgtaccacaactaccgcgtctggtccttcctcggcctcggcatgaccacctacaccgcctggtacctcaccatcgccgcggccgtccacggccaggtcccaggcgtcacccactctgggccccagcaagctcgtgccctacttcaccggcgccaccaacatcctctacaccttcggcggccacgcgatcactgtggagatcatgcacgcgatgtggaagcctcgcaagttcaagtacatctacctgctgggcgacgctgtacgtgttcacgctgacgcttccgtcggcggcggccatgtactgggcgttcggcgaccagctgctgacgcactccaacgccttctcgctgctgccgaggacgccgtggcgcgacgcggcggtggtgctgatgctggtccaccagttcatcaccttcggcttcgcgtgcacgccgctctacttcgtgtgggagaaggcggtggggatgcacgtcacccggagcgtcttcctccgcgcgctggtccgcctccccatcgtcgtccccgtctggttcctcgccatcatcttccccttcttcgggcccatcaactccgccgtcggcgcgctcctcgtcagcttcaccgtctacgtcatcccggccctcgcccacatgctcacgtaccgctccgcgtccgccagattgaacgcagcggagaagccgccgtccttcttgccgagctggtcggggatgttcgtgctgaacgcgttcgtggtggcgtggatgctggtggttggattcggcctcggcggctgggccagcgtcaccaacttcatcaagcagatcgatacgttcgggctcttcgccaagtgctaccagtgcccgacgaagccacaccccgggtcgccgctgccggcgccgccgcatcactgaagcagcgagcgagtgccaaaggctaacgaccgtaaaccgagacattcccgggtggtttcggtcgtcttgttatatgcagcctttctaggagtgtacaacacagcggagcagcttgtgagttcactgacccgagatacctagactggactcgcatgtgtcgcgtggctttgatacattagtgggcctcagtgtcacttcctttgtcttggttgtttgcacatggttgttttaggttgttcggttcatggtacgtgccatctagtacaagacttgatacaatgatacacagtggtgtctattcttatcttttgcatccttaatct

SEQ ID NO: 2855 - protein, 360 aa, Zea mays subsp. mays
  peptide (1)..(360): Ceres Seq. ID no. 12406457
SSGRAPGPVLEGGRAGVQLHFPALRHGHPADRLRKQHLLHQRPAGQADVDVHLRRLLRHHRLHPLVPQLPRLVLPRPRHDHLHRLVPHHRRGRPRPGPRRHPLWAPASSCPTSPAPPTSSTPSAATRSLWRSCTRCGSLASSSTSTCWATLYVFTLTLPSAAAMYWAFGDQLLTHSNAFSLLPRTPWRDAAVVLMLVHQFITFGFACTPLYFVWEKAVGMHVTRSVFLRALVRLPIVVPVWFLAIIFPFFGPINSAVGALLVSFTVYVIPALAHMLTYRSASARLNAAEKPPSFLPSWSGMFVLNAFVVAWMLVVGFGLGGWASVTNFIKQIDTFGLFAKCYQCPTKPHPGSPLPAPPHH

SEQ ID NO: 2856 - protein, 237 aa, Zea mays subsp. mays
  peptide (1)..(237): Ceres Seq. ID no. 12406458
MHAMWKPRKFKYIYLLGDAVRVHADASVGGGHVLGVRRPAADALQRLLAAAEDAVARRGGGADAGPPVHHLRLRVHAALLRVGEGGGDARHPERLPPRAGPPPHRRPRLVPRHHLPLLRAHQLRRRRAPRQLHRLRHPGPRPHAHVPLRVRQIERSGEAAVLLAELVGDVRAERVRGGVDAGGWIRPRRLGQRHQLHQADRYVRALRQVLPVPDEATPRVAAAGAAASLKQRASAKG

SEQ ID NO: 2857 - protein, 234 aa, Zea mays subsp. mays
  peptide (1)..(234): Ceres Seq. ID no. 12406459
MWKPRKFKYIYLLGDAVRVHADASVGGGHVLGVRRPAADALQRLLAAAEDAVARRGGGADAGPPVHHLRLRVHAALLRVGEGGGDARHPERLPPRAGPPPHRRPRLVPRHHLPLLRAHQLRRRRAPRQLHRLRHPGPRPHAHVPLRVRQIERSGEAAVLLAELVGDVRAERVRGGVDAGGWIRPRRLGQRHQLHQADRYVRALRQVLPVPDEATPRVAAAGAAASLKQRASAKG

SEQ ID NO: 2858 - DNA, 880 bp, Zea mays subsp. mays
  misc_feature (1)..(880): Ceres Seq. ID no. 12578653
  misc_feature (1)..(880): Ortholog of  Ceres SEQ ID NO 14306355 as cited in SEQ ID NO 1268
  misc_feature (1)..(880): Ortholog of  Ceres SEQ ID NO 15176321 as cited in SEQ ID NO 52814
  misc_feature (1)..(880): Ortholog of  Ceres SEQ ID NO 12563124 as cited in SEQ ID NO 57104
  misc_feature (1)..(880): Ortholog of  Ceres SEQ ID NO 12617639 as cited in SEQ ID NO 65219
  misc_feature (1)..(880): Ortholog of  Ceres SEQ ID NO 15175556 as cited in SEQ ID NO 0
  misc_feature (1)..(880): Ortholog of  Ceres SEQ ID NO 15179982 as cited in SEQ ID NO 0
gttcggacttccgccgcgcttcgccctctcgctccagccgcttcacagcgccgccgctcgcctctccgaccgccgcgagaatgccgttcaagaggttcgtggagatcgggcgcgtggccctggtgaactacggcaaagactatggccgcctcgtcgtcatcgtctttgccgtagttcacctgggcacggacgaccactccctccacaacgccttcagcacctacggcgaggtcctcgagtccaagatcatcctcgatcgggagangcagaggtcccgcggcttcggcttcgtcaccttctccacggaggaggcgatgcggaacgcatcgagggcatgaacggcaaggagctggacggccgcaacatcaccgtcanngaggcccagtcccgcgncggccgtggaggcggcggcggcggcgggtacggtggtggccgtggaggcggcggctacggcggtggcgggccccgtgatggcggcggcggctacggcggtggcggcggctacggtggtggcggcggcggctacggtggtggtggcggcggctacggcggtggcaaccgtggcggcggctacggcaactccgacgggaactggaggaactgagcggtggggcccgcgcggccaagttatcctgttcgctaccgtgttgtttaccctagtccagagtgtttatcttcgttcgtctcgtgtttgttgttgcccatctgtgtttttgattgaaggtcgctctgtgtcagttgttagtgctgtgttcatcctcggctccagcagacccatgcatcaaccagcatggactgcggatcgatgggtgctgttacccccgtcaggctttattctaagttaaatcctaaggaaaaaaatggtgcttcttggtgctgc

SEQ ID NO: 2859 - protein, 200 aa, Zea mays subsp. mays
  peptide (1)..(200): Ceres Seq. ID no. 12578654
  misc_feature (88)..(88): Xaa is any aa, unknown or other
  misc_feature (125)..(125): Xaa is any aa, unknown or other
  misc_feature (131)..(131): Xaa is any aa, unknown or other
FGLPPRFALSLQPLHSAAARLSDRRENAVQEVRGDRARGPGELRQRLWPPRRHRLCRSSPGHGRPLPPQRLQHLRRGPRVQDHPRSGXAEVPRLRLRHLLHGGGDAERIEGMNGKELDGRNITVXEAQSRXGRGGGGGGGYGGGRGGGGYGGGGPRDGGGGYGGGGGYGGGGGGYGGGGGGYGGGNRGGGYGNSDGNWRN

SEQ ID NO: 2860 - protein, 124 aa, Zea mays subsp. mays
  peptide (1)..(124): Ceres Seq. ID no. 12578655
MAAAATAVAAATVVAAAATVVVAAATAVATVAAATATPTGTGGTERWGPRGQVILFATVLFTLVQSVYLRSSRVCCCPSVFLIEGRSVSVVSAVFILGSSRPMHQPAWTADRWVLLPPSGFILS

SEQ ID NO: 2861 - protein, 111 aa, Zea mays subsp. mays
  peptide (1)..(111): Ceres Seq. ID no. 12578656
  misc_feature (88)..(88): Xaa is any aa, unknown or other
SDFRRASPSRSSRFTAPPLASPTAARMPFKRFVEIGRVALVNYGKDYGRLVVIVFAVVHLGTDDHSLHNAFSTYGEVLESKIILDREXQRSRGFGFVTFSTEEAMRNASRA

SEQ ID NO: 2862 - DNA, 1805 bp, Zea mays subsp. mays
  misc_feature (1)..(1805): Ceres Seq. ID no. 13579576
  misc_feature (1)..(1805): Ortholog of  Ceres SEQ ID NO 13596392 as cited in SEQ ID NO 62136
  misc_feature (1)..(1805): Ortholog of  Ceres SEQ ID NO 13654360 as cited in SEQ ID NO 67980
  misc_feature (1)..(1805): Ortholog of  Ceres SEQ ID NO 13596394 as cited in SEQ ID NO 68561
taatcgaaaaaattgggcacagaagaggagacagagagacggagaggggagacccggtcactgccaatgccaagaacaagaaaccagagaggacagtcgtcaatccaatccgagtctcctccaaaaacccatcaatctgcaggaacgagagcagcaggagagcatcctaggaaaaaagttaggaccaactgaccgagcaaaaaaggtagcatctctgtatcaccaaggcaccgccgatcacagaccaaatccctcccccctcctctggtccatcccacacgtagagcagccggtatttcttcgatccgtgcttgcgctttttttttctctttgtaaagatttcgtttccctcccttttaactgttgtcgagaagtttcgacaagagtggtgtgagtgttgaagagctcctcaacatgatggatccggccttgcttgacgacgtcatacgccggctgctggaggtgaagaatctcaagcctgggaagaacgcgcagttgtcggagtcggagatcaagcagctctgcgctgccgccaaggagatcttcctgcaccagcccaacctgctggagctcgaggcgcccatcaaaatctgcggtgatgtccatggccagtactctgatctcctgaggctattcgattatggtggctatccgcctcaggccaactaccttttcttgggtgattatgtggatcgtggaaagcaaagcttggaaacaatatgtcttcttttggcctacaaggtcaagtacccagagaacttctttcttctaaggggaaaccatgaatgcgcatcagtaaatcgcatctatggtttttatgacgagtgcaaacgcagattcagtgtaaagctgtggaaaacattcactgactgttttaactgcttgccagtgtcagcattgatagacgaaaagatcctctgtatgcatggtggtctatctccagagttgaacaagctcgaacaaatacttaatctgagtcgccccacagacgtgcctgatactggattgctctgtgaccttctttggtctgatccttctaatgaagcaacaggatgggccataaatgatcgaggtgtttcatatacatttggtcctgataaagtttctgaattccttgagaagcatgatttggacctcatctgccgagcccatcaggttgtcgaagatggatatgagtttttcgctagccgccaactcgtaacaatgttttcagcccctaactactgtggagaatttgataacgctggtgccatgatgagtgtagatgagacattgatgtgctccttccaaatactgaaacctgcgaggaaggtgttgggtggttcaactaataacaaatcaggcttcaagtcatcgagaggatggtgacaatggcaagcctgatatcaggttggttggtgagcagcacgccagtggtcgacggggggttgttccatcataatcatattacagcggctgcaactgacaggcccaatgcatcttctcttccatgttggatcaacactcttgtaatgtattatttactgtgcggatctgagaggatgtgaatgatttcatttgcgtcctcaagttcaaaagattcaggaaggcatgcttgaaataaaaatagccagaaacatgcaaggtgctccacgacgcagcacggcatttccagtgttttctttttgctgtctagttctgaatatattttaccgccagaccagcacgtaagcttgcctggcaatggtttttatttgttgctatgccatctcaaaagtcaaaaccatggatttatatcaaaagtcaaaagactttgagaagtattt

SEQ ID NO: 2863 - protein, 317 aa, Zea mays subsp. mays
  peptide (1)..(317): Ceres Seq. ID no. 13579577
MMDPALLDDVIRRLLEVKNLKPGKNAQLSESEIKQLCAAAKEIFLHQPNLLELEAPIKICGDVHGQYSDLLRLFDYGGYPPQANYLFLGDYVDRGKQSLETICLLLAYKVKYPENFFLLRGNHECASVNRIYGFYDECKRRFSVKLWKTFTDCFNCLPVSALIDEKILCMHGGLSPELNKLEQILNLSRPTDVPDTGLLCDLLWSDPSNEATGWAINDRGVSYTFGPDKVSEFLEKHDLDLICRAHQVVEDGYEFFASRQLVTMFSAPNYCGEFDNAGAMMSVDETLMCSFQILKPARKVLGGSTNNKSGFKSSRGW

SEQ ID NO: 2864 - protein, 316 aa, Zea mays subsp. mays
  peptide (1)..(316): Ceres Seq. ID no. 13579578
MDPALLDDVIRRLLEVKNLKPGKNAQLSESEIKQLCAAAKEIFLHQPNLLELEAPIKICGDVHGQYSDLLRLFDYGGYPPQANYLFLGDYVDRGKQSLETICLLLAYKVKYPENFFLLRGNHECASVNRIYGFYDECKRRFSVKLWKTFTDCFNCLPVSALIDEKILCMHGGLSPELNKLEQILNLSRPTDVPDTGLLCDLLWSDPSNEATGWAINDRGVSYTFGPDKVSEFLEKHDLDLICRAHQVVEDGYEFFASRQLVTMFSAPNYCGEFDNAGAMMSVDETLMCSFQILKPARKVLGGSTNNKSGFKSSRGW

SEQ ID NO: 2865 - DNA, 1807 bp, Zea mays subsp. mays
  misc_feature (1)..(1807): Ceres Seq. ID no. 12566732
  misc_feature (1)..(1807): Ortholog of  Ceres SEQ ID NO 12583469 as cited in SEQ ID NO 51031
  misc_feature (1)..(1807): Ortholog of  Ceres SEQ ID NO 13597389 as cited in SEQ ID NO 63426
  misc_feature (1)..(1807): Ortholog of  Ceres SEQ ID NO 15180463 as cited in SEQ ID NO 0
atcgaaaatttggtcgaaataaacaagcagagcagaaaacccccacacgcttttagttggccgtccgtccgtccgtctctgaggagcacacagcagtcgattttaaactgcagctacagtctacagaggtcaggtcaggggacacagcctgagcggctggctagcgggggctagcgagcggcgccacagcgcagcacgcagagagccagggcggcggccatggcgagcgcggcgagtggcggcggcgggtcgctgaagcggatgggcccgctccgggtacagtactacatcgtgatgggcgcggtggcagcggctgtggtgctggccacgctgcgctacatgccggggccagccgtcccggcgaccaccgcccgtaccagcggaggcggcgtcgtgcgctcggccccagcagccgcggccgtccccgtgcccgtgcccgccgtggaggaagaaacgggggaggatgagcaggcgcagaggaggaggaggagaaggaagaagaagggggacggggtcgtgctcttcaacttcggcgactccaacagcgacacgggcggcgtggcggcggtcatggggatccgcatcgcaccgccggagggcagggcctacttccaccaccccacggggcggctctccgacggacgcgtcatcctcgacttcatctgtgagagccctgggcacgccgcacctgagtccgttcatgaagccgctgggctccaacttctccaacggcgtcaacttcgccattgcagggtccacggccatgccgggagtaaccaccttctcgctggacgtgcaggtggatcagttcgtcttcttcaaggagagatgcctcgactccatcgagagaggtgagagtgccccgattgttgagaaggcgttcccagatgctatatacaccatggacatcgggcacaacgatataaacggtgttctccacttgccctatcatacaatgctcgaaaatctccccccagtaattgctgaaatcaagaaagccatcgagaggttgcacgagaatggagccaggaagttctggatacatggaacgggagcattagggtgcatgcctcagaagctttctatgccgagggatgacgacagcggcctcgatgagcatggatgcatcgcaagcattaataatgtctgcaagaagttcaattccttgctgagtgaagccttggacgagctgcgtttgacactgaaaagttcgactatcgtctttgtggatatgttcgctatcaagtatgatcttgttgccaaccacacgaaatatgggattgagaagccattgatgacatgttgtggtcatggaggccccccttacaactatgaccccaaggagagctgcatgacttcggacaaatacctgtgcaagcttggcgaaaagttcataagctgggacggggttcacttcaccgatgctgcaaatggcattgtggcttccaaagtactcagtggtgagtacaacattcccagggtcaagctggccagcctcgtccccgttccaaaatctgacgattaatggtgatgcagcatcttaattagcctttagtttggcctatcaaggatgatgaagatgaaactactaacaaaactgacaccaccaaagtttaattattttgaggttcttacgttacatccattgtagaagaagacttttcttttgtttccttctctttttgtacaatcggcgcatatgtatatcctaggggttaatatatggcgatgcatgtgtctgtaccatgtataattcttttcttttgaattttgggtctgttggtgcgatttagtcgccaaacacttg

SEQ ID NO: 2866 - protein, 353 aa, Zea mays subsp. mays
  peptide (1)..(353): Ceres Seq. ID no. 12566733
MSRRRGGGGEGRRRGTGSCSSTSATPTATRAAWRRSWGSASHRRRAGPTSTTPRGGSPTDASSSTSSVRALGTPHLSPFMKPLGSNFSNGVNFAIAGSTAMPGVTTFSLDVQVDQFVFFKERCLDSIERGESAPIVEKAFPDAIYTMDIGHNDINGVLHLPYHTMLENLPPVIAEIKKAIERLHENGARKFWIHGTGALGCMPQKLSMPRDDDSGLDEHGCIASINNVCKKFNSLLSEALDELRLTLKSSTIVFVDMFAIKYDLVANHTKYGIEKPLMTCCGHGGPPYNYDPKESCMTSDKYLCKLGEKFISWDGVHFTDAANGIVASKVLSGEYNIPRVKLASLVPVPKSDD

SEQ ID NO: 2867 - protein, 274 aa, Zea mays subsp. mays
  peptide (1)..(274): Ceres Seq. ID no. 12566734
MKPLGSNFSNGVNFAIAGSTAMPGVTTFSLDVQVDQFVFFKERCLDSIERGESAPIVEKAFPDAIYTMDIGHNDINGVLHLPYHTMLENLPPVIAEIKKAIERLHENGARKFWIHGTGALGCMPQKLSMPRDDDSGLDEHGCIASINNVCKKFNSLLSEALDELRLTLKSSTIVFVDMFAIKYDLVANHTKYGIEKPLMTCCGHGGPPYNYDPKESCMTSDKYLCKLGEKFISWDGVHFTDAANGIVASKVLSGEYNIPRVKLASLVPVPKSDD

SEQ ID NO: 2868 - protein, 253 aa, Zea mays subsp. mays
  peptide (1)..(253): Ceres Seq. ID no. 12566735
MPGVTTFSLDVQVDQFVFFKERCLDSIERGESAPIVEKAFPDAIYTMDIGHNDINGVLHLPYHTMLENLPPVIAEIKKAIERLHENGARKFWIHGTGALGCMPQKLSMPRDDDSGLDEHGCIASINNVCKKFNSLLSEALDELRLTLKSSTIVFVDMFAIKYDLVANHTKYGIEKPLMTCCGHGGPPYNYDPKESCMTSDKYLCKLGEKFISWDGVHFTDAANGIVASKVLSGEYNIPRVKLASLVPVPKSDD

SEQ ID NO: 2869 - DNA, 1875 bp, Zea mays subsp. mays
  misc_feature (1)..(1875): Ceres Seq. ID no. 12364204
  misc_feature (1)..(1875): Ortholog of  Ceres SEQ ID NO 14307534 as cited in SEQ ID NO 55715
  misc_feature (1)..(1875): Ortholog of  Ceres SEQ ID NO 14307548 as cited in SEQ ID NO 58859
gcacgagaccattacctagaacatcctaatcgaaaaaaaccctaatcctcccccgctacacgttcgcttgatctttacggccgccgctactcgttcgccatggctgcctgctcctccaggctcctatacctcactctgagctcctctttcctccgctcctgccgcctcgcgtccagctccctacttcccaccgcctcccgctgccacccggggtcgctccactccctccgcttctgctctgctgtccccgagtttgtcgatgtcgccgccgaccctgccgaggcggctgtatcctccggacacccgtggccggagtggggcaacttccttgataagctgcgggccaaggggtacttcgagcaaggtttgccctccagcgtgagttctggcgagggagccgccggagatggggatccagcaactgcatctgagaacgcagcaacggctgcttccggtaatacggtggtggatgcggaggatagcgcggtgacctcggaagatatctatcattttctcaaggacgagaacagggtgaagaatgcgtgcctcaaatttgggcgagaccgcttcgatctcctcagcttgcttcccaagcaggatattcaagctattgttatgtctggctgtcctaataacaatcggaagcccgtctattctgcaaaaaggttgagagagtacgtgcaggtcaaagaagaagatgcatgcagcatttgcaaatttaaggcatcttgtgatagagcttatgtcactccaaagggtgaggttgaagttaggactgttgatgttgttcgtatactgttaagttatgcaatggataaaaaccattcaggagataactctgttatcgaagaaagtgtgcaagaatctgcaaaaaagcttctctcaaagcttactgaatttagtgacacaacaatcgatccatctcttccgaaacctgcatttcaagttgctaggaaggctcagggctcagtggggaaggggagagaaacgactgcagttgaaatgaagaagggtgactggttgtgcactaactgtaacttcttaaattttgctcgcaatcgtcactgtctcgaatgcaaagcagatggaccaaagaagatagaagcggccgtggatgcaatgaaaatgggcgattggatctgcacacagtgtcagtttatgaacttctctcgcaacaagatatgttttaaatgtgaagaacctcacccgaagaggcaactcaatcctggagagtgggagtgcccctcatgcgactttgttaacttccgacgcaacgctatctgcaagaagtgcaatcaggaccgccccgaggatgatacccgagatagtcagcggggactgagaaaaaccagaggggctggcaagtttagaagattcgactatattgatcagaagagcgatgacgatgatgacaatgcctggttccagaagcgtggggcaagcatgaggtcgaaaccggaccagagaaccaccactgccaagagcagaggctctgacggtctggatgatattcttgttaccaccaagcgtagaagcaccaagcaagacgaggacgacgaggtcttgccgtacgagggtgcgcgcaagcatgttgtgagcagaagggcaacgccttcccagaggaggttcacggctgcccgtaaccagtaataatacccgagcttggagctttgatgactccgttctgtgaacaaatttcacagcgtcgctcgctctgctgctgtgatgcagacgaatagatgatggacataacacataagcgtgttcgatctgtagtgttattatacaaactagtaactatcgcgcgcaccgcgcgcctacgaaaacagacaatataaatgataatactattataaagtatttgtcattgtgatt

SEQ ID NO: 2870 - protein, 516 aa, Zea mays subsp. mays
  peptide (1)..(516): Ceres Seq. ID no. 12364205
MAACSSRLLYLTLSSSFLRSCRLASSSLLPTASRCHPGSLHSLRFCSAVPEFVDVAADPAEAAVSSGHPWPEWGNFLDKLRAKGYFEQGLPSSVSSGEGAAGDGDPATASENAATAASGNTVVDAEDSAVTSEDIYHFLKDENRVKNACLKFGRDRFDLLSLLPKQDIQAIVMSGCPNNNRKPVYSAKRLREYVQVKEEDACSICKFKASCDRAYVTPKGEVEVRTVDVVRILLSYAMDKNHSGDNSVIEESVQESAKKLLSKLTEFSDTTIDPSLPKPAFQVARKAQGSVGKGRETTAVEMKKGDWLCTNCNFLNFARNRHCLECKADGPKKIEAAVDAMKMGDWICTQCQFMNFSRNKICFKCEEPHPKRQLNPGEWECPSCDFVNFRRNAICKKCNQDRPEDDTRDSQRGLRKTRGAGKFRRFDYIDQKSDDDDDNAWFQKRGASMRSKPDQRTTTAKSRGSDGLDDILVTTKRRSTKQDEDDEVLPYEGARKHVVSRRATPSQRRFTAARNQ

SEQ ID NO: 2871 - protein, 344 aa, Zea mays subsp. mays
  peptide (1)..(344): Ceres Seq. ID no. 12364206
MSGCPNNNRKPVYSAKRLREYVQVKEEDACSICKFKASCDRAYVTPKGEVEVRTVDVVRILLSYAMDKNHSGDNSVIEESVQESAKKLLSKLTEFSDTTIDPSLPKPAFQVARKAQGSVGKGRETTAVEMKKGDWLCTNCNFLNFARNRHCLECKADGPKKIEAAVDAMKMGDWICTQCQFMNFSRNKICFKCEEPHPKRQLNPGEWECPSCDFVNFRRNAICKKCNQDRPEDDTRDSQRGLRKTRGAGKFRRFDYIDQKSDDDDDNAWFQKRGASMRSKPDQRTTTAKSRGSDGLDDILVTTKRRSTKQDEDDEVLPYEGARKHVVSRRATPSQRRFTAARNQ

SEQ ID NO: 2872 - protein, 279 aa, Zea mays subsp. mays
  peptide (1)..(279): Ceres Seq. ID no. 12364207
MDKNHSGDNSVIEESVQESAKKLLSKLTEFSDTTIDPSLPKPAFQVARKAQGSVGKGRETTAVEMKKGDWLCTNCNFLNFARNRHCLECKADGPKKIEAAVDAMKMGDWICTQCQFMNFSRNKICFKCEEPHPKRQLNPGEWECPSCDFVNFRRNAICKKCNQDRPEDDTRDSQRGLRKTRGAGKFRRFDYIDQKSDDDDDNAWFQKRGASMRSKPDQRTTTAKSRGSDGLDDILVTTKRRSTKQDEDDEVLPYEGARKHVVSRRATPSQRRFTAARNQ

SEQ ID NO: 2873 - DNA, 1675 bp, Zea mays subsp. mays
  misc_feature (1)..(1675): Ceres Seq. ID no. 12410523
  misc_feature (1)..(1675): Ortholog of  Ceres SEQ ID NO 14314382 as cited in SEQ ID NO 57346
  misc_feature (1)..(1675): Ortholog of  Ceres SEQ ID NO 13654517 as cited in SEQ ID NO 68060
acacggttcctctctgaccactcctctcctctcctctcctctcctctcgccggcgcatcgcccgactgtcagtcagcctcagccatggccgcggaggaggagcagggcttccgcccgctggacgaggcgtccctgctcgcctacatcaaggccacgccggcgctcgcctcccgcctcggcggcggtggcagtctagactccatcgagatcaaggaggtcggcgacggcaacctcaacttcgtctacatcgtgcagtccgaggccggcgccatcgtcgtcaagcaggcgctcccgtacgtgcgctgcgtgggggactcgtggcccatgacgcgggagcgcgcctacttcgaggcctccacgctgcgggagcacggccgcctgtgcccggagcacacccccgagggtgtaccacttcgaccggaccttgtcgctgatggggatgcgctacatcgagcccccgcacatcatcctccggaagggcctcgtcgccggtgtcgagtacccgctgctcgccgaccacatgtccgattacatggccaagacgctcttcttcacctccctcctctataacaataccacggatcataagaacggagttgctaagtactctgcgaacgtggagatgtgtaggctcacggagcaagttgtgttctcggacccataccgtgtttccaaatttaatcggtggacctcgccttatctcgacaaagatgctgaggcagttcgcgaggatgatgagctcaagttggaagtagctgggctgaaatcgatgtttatcgagagagctcaagctctgattcatggagatctccacactggttctatcatggtgaccgaaggttcaactcaagtcattgatccagaatttgggttctatgggccaatgggttttgatattggagccttccttggaaacctgattttggcatactatgcacagaatgggcatgctgatcaagcgaatgatcgtaaggcttacaagaaatggatcttgaagacaattgaagagtcgtggaatttgttccagaaaaagtttgttgaactatggaataaacacaaagaaagcaatggggaggcatacctgcctgatatatacaacaagccaaagcttttgagcgttgttcagaagaagtacatgacaaacctatttcatgatagccttgggtttggttcagccaaaatgatcaggagaatagtcggaatcgctcacgtagaggatctcgagtcaatcaaggatgccagcaagagagcagagtgcgagcgtgctgccctcaactgtgcgaagacgatcctcaagggaagacaccagtttgagacgatcgagcaagtcgtcgagcatattcagtcattcgatcaggactgagaagacgacagtctatttgtgcgctgaagcctgaaggagccatactctcgtcaattaacccacgcatgcccgagtatcgatgaatcgtctgttttgtagtgatgaagcgcccggttgtttgtgatctctgtattggttgctaggtgagaaaagtatgtggtctcctggcttgaactgtgtgtacactattattccgggccggcatagcgagcagctgaataatgaaatgtacgggtcctcagtgaccatctcagtgcatataaacacgtgtgttaccaataaattttgttatggtgctggtggttctatggt

SEQ ID NO: 2874 - protein, 309 aa, Zea mays subsp. mays
  peptide (1)..(309): Ceres Seq. ID no. 12410524
MGMRYIEPPHIILRKGLVAGVEYPLLADHMSDYMAKTLFFTSLLYNNTTDHKNGVAKYSANVEMCRLTEQVVFSDPYRVSKFNRWTSPYLDKDAEAVREDDELKLEVAGLKSMFIERAQALIHGDLHTGSIMVTEGSTQVIDPEFGFYGPMGFDIGAFLGNLILAYYAQNGHADQANDRKAYKKWILKTIEESWNLFQKKFVELWNKHKESNGEAYLPDIYNKPKLLSVVQKKYMTNLFHDSLGFGSAKMIRRIVGIAHVEDLESIKDASKRAECERAALNCAKTILKGRHQFETIEQVVEHIQSFDQD

SEQ ID NO: 2875 - protein, 307 aa, Zea mays subsp. mays
  peptide (1)..(307): Ceres Seq. ID no. 12410525
MRYIEPPHIILRKGLVAGVEYPLLADHMSDYMAKTLFFTSLLYNNTTDHKNGVAKYSANVEMCRLTEQVVFSDPYRVSKFNRWTSPYLDKDAEAVREDDELKLEVAGLKSMFIERAQALIHGDLHTGSIMVTEGSTQVIDPEFGFYGPMGFDIGAFLGNLILAYYAQNGHADQANDRKAYKKWILKTIEESWNLFQKKFVELWNKHKESNGEAYLPDIYNKPKLLSVVQKKYMTNLFHDSLGFGSAKMIRRIVGIAHVEDLESIKDASKRAECERAALNCAKTILKGRHQFETIEQVVEHIQSFDQD

SEQ ID NO: 2876 - protein, 280 aa, Zea mays subsp. mays
  peptide (1)..(280): Ceres Seq. ID no. 12410526
MSDYMAKTLFFTSLLYNNTTDHKNGVAKYSANVEMCRLTEQVVFSDPYRVSKFNRWTSPYLDKDAEAVREDDELKLEVAGLKSMFIERAQALIHGDLHTGSIMVTEGSTQVIDPEFGFYGPMGFDIGAFLGNLILAYYAQNGHADQANDRKAYKKWILKTIEESWNLFQKKFVELWNKHKESNGEAYLPDIYNKPKLLSVVQKKYMTNLFHDSLGFGSAKMIRRIVGIAHVEDLESIKDASKRAECERAALNCAKTILKGRHQFETIEQVVEHIQSFDQD

SEQ ID NO: 2877 - DNA, 1346 bp, Zea mays subsp. mays
  misc_feature (1)..(1346): Ceres Seq. ID no. 12356016
  misc_feature (1)..(1346): Ortholog of  Ceres SEQ ID NO 12578784 as cited in SEQ ID NO 20729
  misc_feature (1)..(1346): Ortholog of  Ceres SEQ ID NO 13658847 as cited in SEQ ID NO 66674
gactcgtcctcttccctcgccgcgagctccgggttcccctgcgcatagctaggccaagccaggtataccccaaccatcgcatgggagccgcgactgccccgacgaagcggagacgcggccccagcaagacgcaggaggaggccatggcgcgcgcgagcccggaggcgcggcggcgaccgcggccgcgcctggtgggctatgaggagctgccggagtacctcaaggacaacgagtacatccgcgggcactaccgcgccgagtggcccgtccgcgacgcgctcctcagcgccttcgcctggcacaacgagacgctcaacgtctggacgcatctgggagggttcctgttcttcctagcgctcgcggtcgccggaggacggaaggaggccgccgacggtgccgctccgggtatcatgaggttcgttgtgagactagattcatggggcagcgaccatccgggccagccgaggcacgacgacgccggggcatcgctgcccagtgtgccgcggtggccgcggacggtgttcctggtgggggccatgtcgtgcctcgccatcagcgcggcggcgcacctgctggcgtgccactcgcggcgcgccagcgcggtgttctggcagctggactacgcgggcatctccgtgatgatcgtcgcctccttcgtgccgccggtgtactacgccttcctctgccacccgccggcgcgggcggcctacctgtgcgccatcgcggcgctgggcgcgctggtggtggccgcgctgctctccccgtcctgctcgtccccgcgctaccgccgcctccgcgcggcgctgttcctggccatgggcctgtcgggcgtcgtcccggcgctgcacgcgctctggctcaactggggccacgccgcctgctacctggcgctgggcatcgaggtcgtcatgggcctcacctacgccacgggcgcctggttctacgtcagccgcgtgccggagaagtggcgacccggggtgttcgacgtcgtcggccacagccaccagatcttccacgtcctcgtgctcgtcggcgccgtcacgcactacgtcgccgtcgccgtgctcatccactggcgggagaaggtggccgtcgcctgtggcgccgcgtcggcgtaggctcacctgtttggttggctcactcaacaaccattcgaatggcaaaccaagtagtcgcaacatagatcagctctagagtttgagtgtgaccttcgacgatttataatttaattgatggggtgattgagtatggtggttcattagttcatgagatttatctgtcgagtgagtgcgtgcctcagatttccagaccttttgtttccagcctactcaactttttgtcccgtc

SEQ ID NO: 2878 - protein, 371 aa, Zea mays subsp. mays
  peptide (1)..(371): Ceres Seq. ID no. 12356017
LVLFPRRELRVPLRIARPSQVYPNHRMGAATAPTKRRRGPSKTQEEAMARASPEARRRPRPRLVGYEELPEYLKDNEYIRGHYRAEWPVRDALLSAFAWHNETLNVWTHLGGFLFFLALAVAGGRKEAADGAAPGIMRFVVRLDSWGSDHPGQPRHDDAGASLPSVPRWPRTVFLVGAMSCLAISAAAHLLACHSRRASAVFWQLDYAGISVMIVASFVPPVYYAFLCHPPARAAYLCAIAALGALVVAALLSPSCSSPRYRRLRAALFLAMGLSGVVPALHALWLNWGHAACYLALGIEVVMGLTYATGAWFYVSRVPEKWRPGVFDVVGHSHQIFHVLVLVGAVTHYVAVAVLIHWREKVAVACGAASA

SEQ ID NO: 2879 - protein, 345 aa, Zea mays subsp. mays
  peptide (1)..(345): Ceres Seq. ID no. 12356018
MGAATAPTKRRRGPSKTQEEAMARASPEARRRPRPRLVGYEELPEYLKDNEYIRGHYRAEWPVRDALLSAFAWHNETLNVWTHLGGFLFFLALAVAGGRKEAADGAAPGIMRFVVRLDSWGSDHPGQPRHDDAGASLPSVPRWPRTVFLVGAMSCLAISAAAHLLACHSRRASAVFWQLDYAGISVMIVASFVPPVYYAFLCHPPARAAYLCAIAALGALVVAALLSPSCSSPRYRRLRAALFLAMGLSGVVPALHALWLNWGHAACYLALGIEVVMGLTYATGAWFYVSRVPEKWRPGVFDVVGHSHQIFHVLVLVGAVTHYVAVAVLIHWREKVAVACGAASA

SEQ ID NO: 2880 - protein, 324 aa, Zea mays subsp. mays
  peptide (1)..(324): Ceres Seq. ID no. 12356019
MARASPEARRRPRPRLVGYEELPEYLKDNEYIRGHYRAEWPVRDALLSAFAWHNETLNVWTHLGGFLFFLALAVAGGRKEAADGAAPGIMRFVVRLDSWGSDHPGQPRHDDAGASLPSVPRWPRTVFLVGAMSCLAISAAAHLLACHSRRASAVFWQLDYAGISVMIVASFVPPVYYAFLCHPPARAAYLCAIAALGALVVAALLSPSCSSPRYRRLRAALFLAMGLSGVVPALHALWLNWGHAACYLALGIEVVMGLTYATGAWFYVSRVPEKWRPGVFDVVGHSHQIFHVLVLVGAVTHYVAVAVLIHWREKVAVACGAASA

SEQ ID NO: 2881 - DNA, 2015 bp, Zea mays subsp. mays
  misc_feature (1)..(2015): Ceres Seq. ID no. 12359708
  misc_feature (1)..(2015): Ortholog of  Ceres SEQ ID NO 15170647 as cited in SEQ ID NO 67122
agccaaatcggcctatagatcaaacgctgcactgtagggagcgtgaagccagcggcgaatggaatccctagccgccacctccgtgttcgcgccctcccgcgtcgccgtcccggcggcgcgggccctggttagggcggggacggtggtaccaaccaggcggacgagcagccggagcggaaccagcggggtgaaatgctctgctgccgtgacgccgcaggcgagcccagtgattagcaggagcgctgcggcggcgaaggcggcggaggaggacaagaggcggttcttcgaggcggcggcgcgggggagcgggaaggggaacctggtgcccatgtgggagtgcatcgtgtcggaccatctcacccccgtgctcgcctaccgctgcctcgtccccgaggacaacgtcgacgcccccagcttcctcttcgagtccgtcgagcaggggccccagggcaccaccaacgtcggccgctacagcatggtgggagcccacccagtgatggagattgtggccaaagaccacaaggttacgatcatggaccacgagaagagccaagtgacagagcaggtagtggacgacccgatgcagatcccgaggaccatgatggagggatggcacccacagcagatcgacgagctccctgaatccttctccggtggatgggttgggttcttttcctatgatacggttaggtatgttgagaagaagaagctaccgttctccagtgctcctcaggacgataggaaccttcctgatgtgcacttgggactctatgatgatgttctagtcttcgataatgttgagaagaaagtatatgttatccattgggtcaatgtggaccggcatgcatctgttgaggaagcataccaagatggcaggtcccgactaaacatgttgctatctaaagtgcacaattccaatgtccccacactctctcctggatttgtgaagctgcacacacgcaagtttggtacacctttgaacaagtcgaccatgacaagtgatgagtataagaatgctgttctgcaggctaaggaacatattatggctggggatatcttccagattgttttaagccagaggttcgagagacgaacatatgccaacccatttgaggtttatcgagcattacggattgtgaatcctagcccatacatggcgtatgtacaggcaagaggctgtgtattggttgcgtctagtcctgaaattcttacacgagtcagtaaggggaagattattaatcgaccacttgctggaactgttcgaaggggcaagacagagaaggaagatcaaatgcaagagcagcaactgttaagtgatgaaaaacagtgtgccgagcacataatgcttgtggacttgggaaggaatgatgttggcaaggtatccaaaccaggatcagtgaaggtggagaagttgatgaacattgagagatactcccatgttatgcacatcagctcaacggttagtggacagttggatgatcatctccagagttgggatgccttgagagctgccttgcccgttggaacagtcagtggtgcaccaaaggtgaaggccatggagttgattgataagttggaagttacgaggcgaggaccatatagtggtggtctaggaggaatatcgtttgatggtgacatgcaaattgcactttctctccgcaccatcgtattctcaacagcgccgagccacaacacgatgtactcatacaaagacgcagataggcgtcgggagtgggtcgctcatcttcaggctggtgcaggcattgttgccgacagtagcccagatgacgaacaacgtgaatgcgagaataaggctgctgcactagctcgggccatcgatcttgcagagtcagcttttgtagacaaagaatagtgtgctatggttatcgtttagttcttgttcatgtttcttttacccactttccgttaaaaaaagatgtcattagtgggtggagaaaagcaataagactgttctctagagaaccgaagaaatatggaaattgaggttatggctc

SEQ ID NO: 2882 - protein, 604 aa, Zea mays subsp. mays
  peptide (1)..(604): Ceres Seq. ID no. 12359709
MESLAATSVFAPSRVAVPAARALVRAGTVVPTRRTSSRSGTSGVKCSAAVTPQASPVISRSAAAAKAAEEDKRRFFEAAARGSGKGNLVPMWECIVSDHLTPVLAYRCLVPEDNVDAPSFLFESVEQGPQGTTNVGRYSMVGAHPVMEIVAKDHKVTIMDHEKSQVTEQVVDDPMQIPRTMMEGWHPQQIDELPESFSGGWVGFFSYDTVRYVEKKKLPFSSAPQDDRNLPDVHLGLYDDVLVFDNVEKKVYVIHWVNVDRHASVEEAYQDGRSRLNMLLSKVHNSNVPTLSPGFVKLHTRKFGTPLNKSTMTSDEYKNAVLQAKEHIMAGDIFQIVLSQRFERRTYANPFEVYRALRIVNPSPYMAYVQARGCVLVASSPEILTRVSKGKIINRPLAGTVRRGKTEKEDQMQEQQLLSDEKQCAEHIMLVDLGRNDVGKVSKPGSVKVEKLMNIERYSHVMHISSTVSGQLDDHLQSWDALRAALPVGTVSGAPKVKAMELIDKLEVTRRGPYSGGLGGISFDGDMQIALSLRTIVFSTAPSHNTMYSYKDADRRREWVAHLQAGAGIVADSSPDDEQRECENKAAALARAIDLAESAFVDKE

SEQ ID NO: 2883 - protein, 514 aa, Zea mays subsp. mays
  peptide (1)..(514): Ceres Seq. ID no. 12359710
MWECIVSDHLTPVLAYRCLVPEDNVDAPSFLFESVEQGPQGTTNVGRYSMVGAHPVMEIVAKDHKVTIMDHEKSQVTEQVVDDPMQIPRTMMEGWHPQQIDELPESFSGGWVGFFSYDTVRYVEKKKLPFSSAPQDDRNLPDVHLGLYDDVLVFDNVEKKVYVIHWVNVDRHASVEEAYQDGRSRLNMLLSKVHNSNVPTLSPGFVKLHTRKFGTPLNKSTMTSDEYKNAVLQAKEHIMAGDIFQIVLSQRFERRTYANPFEVYRALRIVNPSPYMAYVQARGCVLVASSPEILTRVSKGKIINRPLAGTVRRGKTEKEDQMQEQQLLSDEKQCAEHIMLVDLGRNDVGKVSKPGSVKVEKLMNIERYSHVMHISSTVSGQLDDHLQSWDALRAALPVGTVSGAPKVKAMELIDKLEVTRRGPYSGGLGGISFDGDMQIALSLRTIVFSTAPSHNTMYSYKDADRRREWVAHLQAGAGIVADSSPDDEQRECENKAAALARAIDLAESAFVDKE

SEQ ID NO: 2884 - protein, 465 aa, Zea mays subsp. mays
  peptide (1)..(465): Ceres Seq. ID no. 12359711
MVGAHPVMEIVAKDHKVTIMDHEKSQVTEQVVDDPMQIPRTMMEGWHPQQIDELPESFSGGWVGFFSYDTVRYVEKKKLPFSSAPQDDRNLPDVHLGLYDDVLVFDNVEKKVYVIHWVNVDRHASVEEAYQDGRSRLNMLLSKVHNSNVPTLSPGFVKLHTRKFGTPLNKSTMTSDEYKNAVLQAKEHIMAGDIFQIVLSQRFERRTYANPFEVYRALRIVNPSPYMAYVQARGCVLVASSPEILTRVSKGKIINRPLAGTVRRGKTEKEDQMQEQQLLSDEKQCAEHIMLVDLGRNDVGKVSKPGSVKVEKLMNIERYSHVMHISSTVSGQLDDHLQSWDALRAALPVGTVSGAPKVKAMELIDKLEVTRRGPYSGGLGGISFDGDMQIALSLRTIVFSTAPSHNTMYSYKDADRRREWVAHLQAGAGIVADSSPDDEQRECENKAAALARAIDLAESAFVDKE

SEQ ID NO: 2885 - DNA, 1906 bp, Zea mays subsp. mays
  misc_feature (1)..(1906): Ceres Seq. ID no. 12352137
  misc_feature (1)..(1906): Ortholog of  Ceres SEQ ID NO 14311862 as cited in SEQ ID NO 51654
  misc_feature (1)..(1906): Ortholog of  Ceres SEQ ID NO 13597334 as cited in SEQ ID NO 64244
  misc_feature (1)..(1906): Ortholog of  Ceres SEQ ID NO 14303165 as cited in SEQ ID NO 65181
  misc_feature (1)..(1906): Ortholog of  Ceres SEQ ID NO 15224550 as cited in SEQ ID NO 0
aactaaccaccacacacacaggcaggaagaagccgactgaggctggccggtcgtgctttgttcttcttcttttctccgattcttttttttttactgacggctttggcagtagcgggcgcacacacttatactgccatttaacattgattgaggttgttttgaggtggcctcgtggtgaagaaaggcgggagctggagagcaacgagacaagcacggcggtgtgcgtgcgcacaggcactagagtgagacagctctagaagagagcaagccgccgccgccgccgcatcatcgtcagaagcggccactcctacctctgatcctgatacaaaatccaggccagaaggcaggagcctccaaaagagatccactcccccggatggcttcttgcttctgcttccgcagacgccgccgcccaatcattgcctcctctgtccccttattcctcctcctcgtctccttcctcgcctcggcctcggcctcttccgcgacgacgacgaagctgctaggcagcggcaataatgccacgcggcgggtggcgttcagctcggaggagctgcgcgggttgcggagcatcacggcccggcttgcgcggctcagggacgcgtccgtcaagacgatccagagccccgacggcgacgtcatcgactgcgtgccggcgcacctgcagccggcgttcgagcaccccaagctgaggagccagaagccagaggaggagcccgaagagaggccgaggagcagcgctggccgcttctccgacgctggccaggacgaggacgacgacccgttgccgcaggtgtggcggcgctccggcgagtcctgcccggaggggaccataccagtgcggcgaaccacggaggacgacgtgctcagggccaccgcctcttccgccacccggttcgggatgaaggcccgcggtgcggggctcgggttcgcgcggcgcgactccaccggtggcggccacgagcacgcggtggggtacgtgaccggcgggcagttctacggcgccaaggcgagcctgaacgtgtggccggcgcaggtggcgtcgccggcggagttcagcctctcgcagatctgggtcatctccggcgccttcggcaacgacctcaacaccatcgaggccggctggcaggtcagccctcagttgtacggcgacaacagccccaggttcttcacctactggacagacgacgcgtaccaggagacgggctgctacaacctccactgctcgggcttcgtgcagaccagcagccgcgtggccatcggcgccgccatctcgcccgtctcctcctacgccggccgccagttcgacgtcacgcttctcatctggaaggacccgcgccggggccactggtggctgcagctcggctccggcgcgctcgtcggctactggccctccgcgctcttcacgcacctcggctcgcgcgccgacatggtgcagttcgggggcgaggtcgtcaacgcgcgccccgccggcgcgccgcacacgcccacgcagatgggctccggccgcttccccgccgagggatacgcgcgcgccgcatacttccgcaacgtgcagctcgtcgactgggacaacaacctcgtcccggcccgccgggctccgcctgctcgccgaccggccgggatgctatgacatcgccggcggcagcggcggcgcgtggggcacctacttctattacggcgggcccggcaggaacgcacggtgcccgtagctttatagtattagctaggaactgaatcgagtgcatgggatgggtgttgtacgtgtttttcgtacgtgcgcactcaagcacacattagcagaggctgatttctatatattactccaaatgagtctgcgttcacttttttttatctctccatgtgaatatgatgccgttgtgatcatctaactatttgctcattt

SEQ ID NO: 2886 - protein, 418 aa, Zea mays subsp. mays
  peptide (1)..(418): Ceres Seq. ID no. 12352138
MASCFCFRRRRRPIIASSVPLFLLLVSFLASASASSATTTKLLGSGNNATRRVAFSSEELRGLRSITARLARLRDASVKTIQSPDGDVIDCVPAHLQPAFEHPKLRSQKPEEEPEERPRSSAGRFSDAGQDEDDDPLPQVWRRSGESCPEGTIPVRRTTEDDVLRATASSATRFGMKARGAGLGFARRDSTGGGHEHAVGYVTGGQFYGAKASLNVWPAQVASPAEFSLSQIWVISGAFGNDLNTIEAGWQVSPQLYGDNSPRFFTYWTDDAYQETGCYNLHCSGFVQTSSRVAIGAAISPVSSYAGRQFDVTLLIWKDPRRGHWWLQLGSGALVGYWPSALFTHLGSRADMVQFGGEVVNARPAGAPHTPTQMGSGRFPAEGYARAAYFRNVQLVDWDNNLVPARRAPPARRPAGML

SEQ ID NO: 2887 - protein, 243 aa, Zea mays subsp. mays
  peptide (1)..(243): Ceres Seq. ID no. 12352139
MKARGAGLGFARRDSTGGGHEHAVGYVTGGQFYGAKASLNVWPAQVASPAEFSLSQIWVISGAFGNDLNTIEAGWQVSPQLYGDNSPRFFTYWTDDAYQETGCYNLHCSGFVQTSSRVAIGAAISPVSSYAGRQFDVTLLIWKDPRRGHWWLQLGSGALVGYWPSALFTHLGSRADMVQFGGEVVNARPAGAPHTPTQMGSGRFPAEGYARAAYFRNVQLVDWDNNLVPARRAPPARRPAGML

SEQ ID NO: 2888 - DNA, 804 bp, Zea mays subsp. mays
  misc_feature (1)..(804): Ceres Seq. ID no. 12351411
  misc_feature (1)..(804): Ortholog of  Ceres SEQ ID NO 13624430 as cited in SEQ ID NO 0
attcagtccggccacgcactcaagcaatcatcgttctttcgaaacgcaacagcaagaagaacaaccacgcacatcgccgttccatcgattcatgggtcgcctcggcaccgcgacgacgctggtggccctcgcggcctgcctcctctactgctctgcttcgtcggcgacgctggcctacgccggcgctgcgccgacggaccttggggcgctgcggccgacgtgcgacgggacgcttgggcagtgcgcggtggggagcgacgaggagcaggaggtgggcggcagcgacgcgttcctgcggcgggcgctggcgcagcggcagcccaccaaccggtacatcagctacgcggcgctgcgcgcggatcaggtgccgtgcaaccagcgcggccgctcttactacagcaactgcgcgtcgcagaagcccgccaacccctaccgccgcggatgctccgccatcacccgatgcgcacgcaacaccaactgacccatccgatttatcattcctagctaaattctcatccatgacggttgacggcgtgaccgtatgatttgaggattatatataaatatattgggcgcatccaagagatccagccatggcagatgtggatccatccattgacgtgcaggtccatccagaggtagaggaggaagacagggaacacatgtccaagtgttgtttggattgacatggatgtttccacttttttgtgttaatttatctttttgtgatgaatgatcgacgtctacgtatgtaccataagtactagtagttccattattgttttgattttttatggcttttgc

SEQ ID NO: 2889 - protein, 180 aa, Zea mays subsp. mays
  peptide (1)..(180): Ceres Seq. ID no. 12351412
SVRPRTQAIIVLSKRNSKKNNHAHRRSIDSWVASAPRRRWWPSRPASSTALLRRRRWPTPALRRRTLGRCGRRATGRLGSARWGATRSRRWAAATRSCGGRWRSGSPPTGTSATRRCARIRCRATSAAALTTATARRRSPPTPTAADAPPSPDAHATPTDPSDLSFLAKFSSMTVDGVTV

SEQ ID NO: 2890 - protein, 167 aa, Zea mays subsp. mays
  peptide (1)..(167): Ceres Seq. ID no. 12351413
IQSGHALKQSSFFRNATARRTTTHIAVPSIHGSPRHRDDAGGPRGLPPLLLCFVGDAGLRRRCADGPWGAAADVRRDAWAVRGGERRGAGGGRQRRVPAAGAGAAAAHQPVHQLRGAARGSGAVQPARPLLLQQLRVAEARQPLPPRMLRHHPMRTQHQLTHPIYHS

SEQ ID NO: 2891 - protein, 159 aa, Zea mays subsp. mays
  peptide (1)..(159): Ceres Seq. ID no. 12351414
FSPATHSSNHRSFETQQQEEQPRTSPFHRFMGRLGTATTLVALAACLLYCSASSATLAYAGAAPTDLGALRPTCDGTLGQCAVGSDEEQEVGGSDAFLRRALAQRQPTNRYISYAALRADQVPCNQRGRSYYSNCASQKPANPYRRGCSAITRCARNTN

SEQ ID NO: 2892 - protein, 129 aa, Zea mays subsp. mays
  peptide (1)..(129): Ceres Seq. ID no. 12351415
MGRLGTATTLVALAACLLYCSASSATLAYAGAAPTDLGALRPTCDGTLGQCAVGSDEEQEVGGSDAFLRRALAQRQPTNRYISYAALRADQVPCNQRGRSYYSNCASQKPANPYRRGCSAITRCARNTN

SEQ ID NO: 2893 - DNA, 1401 bp, Zea mays subsp. mays
  misc_feature (1)..(1401): Ceres Seq. ID no. 13493590
  misc_feature (1)..(1401): Ortholog of  Ceres SEQ ID NO 15169045 as cited in SEQ ID NO 58372
  misc_feature (1)..(1401): Ortholog of  Ceres SEQ ID NO 13597361 as cited in SEQ ID NO 63638
  misc_feature (1)..(1401): Ortholog of  Ceres SEQ ID NO 13595945 as cited in SEQ ID NO 68157
aatcgaaaaccaccacaggcacacacacctccctttttcattcgagttcgaggagaaggcggcggaggcggccatggagctcgacgagcaggccttcctggaggagatcctctccctgcgcagggacgcctgggactgcaatgtgtccatgggggacctcttcgccccggcggcggccgccgccattgactgctccttccacaaccagcaggcgcccaccgtcagcgtcctccccaccttcaccgcctcctgcgccgagccgccggccttcgactgcctcagcgaggtctacggcgccgccgccgcgttcggcgggcccaatgccggcgacgagatggcgttcctccacgtcgcggagcccaaggaggcgctgcagctggacgacaacgccggcctcggggtgtgcaaggtggagcccggcctggtggagagcgacggcggcggcgccgccgcgccgacgcccgcccctgcggcgtccaagaagaagaggaccgaggggatgccgtctaagaacctcatggccgagcgccgccgccgcaagcgcctcaacgaccgcctctccatgctgcgctccgtcgtgcccaagatcagcaagatggaccggacgtcgatcctgggcgacacgatcgactacatgaaggagctgctggagaggatcaagctgctgcaggaggagatcgagcagcagggggaggcgccggcgggcatgctcagcgtcttccgggagctcaaccccaacgagatggtggccaggaacacccccaagttggacgtggagcggaaggagggcggcgacacacgggtggagatctactgcggcgccaggccggggctgctgctgtccacggtgagcacgctggacgcgctagggctggacatccagcagtgcgtcgtcagctgcttcaacgacttcggcatgcacgcctcctgctccgagatgcagagggacatgatcagcgccgacgcgataaagcaggagctgttgaagaccgctggctatggcggaggctgcatgtagagggcatggcgcggctgtagcctggaggaaggagaagaagaggaggagcaggaggaggcggcaataaattcagctctattagacgacagcgctagtaacaaggagcagcagcagtatcggttcaggtccagtccagtagctgaaaaggcaggcagggcatgaggccagtgaagatatggcatgggggaactttttgcaatccaatctccccatcagaacccacttcgagttagcagtgtgtgtccgcctgaatctttctcctatatactgctgtatttaattagcaagagcaaagctctcactgcctttctaatgattgatcagaagtgcctttggcgaccccttgtctttctgggacatctatatataatgttcttcattct

SEQ ID NO: 2894 - protein, 338 aa, Zea mays subsp. mays
  peptide (1)..(338): Ceres Seq. ID no. 13493591
IENHHRHTHLPFSFEFEEKAAEAAMELDEQAFLEEILSLRRDAWDCNVSMGDLFAPAAAAAIDCSFHNQQAPTVSVLPTFTASCAEPPAFDCLSEVYGAAAAFGGPNAGDEMAFLHVAEPKEALQLDDNAGLGVCKVEPGLVESDGGGAAAPTPAPAASKKKRTEGMPSKNLMAERRRRKRLNDRLSMLRSVVPKISKMDRTSILGDTIDYMKELLERIKLLQEEIEQQGEAPAGMLSVFRELNPNEMVARNTPKLDVERKEGGDTRVEIYCGARPGLLLSTVSTLDALGLDIQQCVVSCFNDFGMHASCSEMQRDMISADAIKQELLKTAGYGGGCM

SEQ ID NO: 2895 - protein, 314 aa, Zea mays subsp. mays
  peptide (1)..(314): Ceres Seq. ID no. 13493592
MELDEQAFLEEILSLRRDAWDCNVSMGDLFAPAAAAAIDCSFHNQQAPTVSVLPTFTASCAEPPAFDCLSEVYGAAAAFGGPNAGDEMAFLHVAEPKEALQLDDNAGLGVCKVEPGLVESDGGGAAAPTPAPAASKKKRTEGMPSKNLMAERRRRKRLNDRLSMLRSVVPKISKMDRTSILGDTIDYMKELLERIKLLQEEIEQQGEAPAGMLSVFRELNPNEMVARNTPKLDVERKEGGDTRVEIYCGARPGLLLSTVSTLDALGLDIQQCVVSCFNDFGMHASCSEMQRDMISADAIKQELLKTAGYGGGCM

SEQ ID NO: 2896 - protein, 289 aa, Zea mays subsp. mays
  peptide (1)..(289): Ceres Seq. ID no. 13493593
MGDLFAPAAAAAIDCSFHNQQAPTVSVLPTFTASCAEPPAFDCLSEVYGAAAAFGGPNAGDEMAFLHVAEPKEALQLDDNAGLGVCKVEPGLVESDGGGAAAPTPAPAASKKKRTEGMPSKNLMAERRRRKRLNDRLSMLRSVVPKISKMDRTSILGDTIDYMKELLERIKLLQEEIEQQGEAPAGMLSVFRELNPNEMVARNTPKLDVERKEGGDTRVEIYCGARPGLLLSTVSTLDALGLDIQQCVVSCFNDFGMHASCSEMQRDMISADAIKQELLKTAGYGGGCM

SEQ ID NO: 2897 - DNA, 1121 bp, Zea mays subsp. mays
  misc_feature (1)..(1121): Ceres Seq. ID no. 12373836
  misc_feature (1)..(1121): Ortholog of  Ceres SEQ ID NO 13595084 as cited in SEQ ID NO 56095
  misc_feature (1)..(1121): Ortholog of  Ceres SEQ ID NO 13594252 as cited in SEQ ID NO 57528
  misc_feature (1)..(1121): Ortholog of  Ceres SEQ ID NO 13594430 as cited in SEQ ID NO 60181
  misc_feature (1)..(1121): Ortholog of  Ceres SEQ ID NO 12617960 as cited in SEQ ID NO 69051
  misc_feature (1)..(1121): Ortholog of  Ceres SEQ ID NO 13589401 as cited in SEQ ID NO 0
gttcggcttcggtcctaccgccgccgcgtcgtgggaggataatcgaactgcttcccttctcgtcttccctaacctttccgtccttcccggattatttccatcaccagagcgtatcgcgtcgtctcctctctatccgattccgcccgcggacccaggctcccgcatggacgctgccggcggggtggaggccgccgccaacggcgggatcgagggctccgccgacccctgcagctcaggcggtgccggcgggtacaggcgctccgtccaccagatcgccggcggcgggaaagctgctgatatcatcttatggaggcgagcgcgtgttacatttggtgttatatttggtgctactctggcatggtggttgtttgagaagtctggactatcattattaactatctgctctgatatacttctcatcttgatagttctgcagttcataagggttaaaatagctggactgctagataggcagcctaggccactacctgagttagttttatcagaggagatggttagcaatgctgcggcttcattccgtgtgaaagtgaacagcatgctgatgatagcgcatgacattactcttggcaaggacttcaggctatttttccaggtcgtgattgtcttgtggctgttatctgtcattggaaatttctgctcgtctatcactcttgcttacataggaaccgttgctttggtcacaatgcctgcattgtacaacaagtaccagaggcctgttgataggtatgctgggatggtctaccggaacatttcgaggcattacaagatagttgatgagaatgtgatcagtagactaccgagaaggtttatcagagataaagaggactgatactctgaaaaatgaactcgctaagctagtcaggtaatcttttacctacattgtcagaccttacatggtgtgaaactatagagctacgaaaacagagaacggcatggaacctacagtagataccgttgcagtgtactcttgggcaaaggtttgagacgaaattaaaatgtatagctttctgtgttagctctttgcaacgaactggctaaatgttgttaaaaataacaaaagcaattgtcatgggaagttgaaaatgaagtggttgtaactg

SEQ ID NO: 2898 - protein, 282 aa, Zea mays subsp. mays
  peptide (1)..(282): Ceres Seq. ID no. 12373837
FGFGPTAAASWEDNRTASLLVFPNLSVLPGLFPSPERIASSPLYPIPPADPGSRMDAAGGVEAAANGGIEGSADPCSSGGAGGYRRSVHQIAGGGKAADIILWRRARVTFGVIFGATLAWWLFEKSGLSLLTICSDILLILIVLQFIRVKIAGLLDRQPRPLPELVLSEEMVSNAAASFRVKVNSMLMIAHDITLGKDFRLFFQVVIVLWLLSVIGNFCSSITLAYIGTVALVTMPALYNKYQRPVDRYAGMVYRNISRHYKIVDENVISRLPRRFIRDKED

SEQ ID NO: 2899 - protein, 228 aa, Zea mays subsp. mays
  peptide (1)..(228): Ceres Seq. ID no. 12373838
MDAAGGVEAAANGGIEGSADPCSSGGAGGYRRSVHQIAGGGKAADIILWRRARVTFGVIFGATLAWWLFEKSGLSLLTICSDILLILIVLQFIRVKIAGLLDRQPRPLPELVLSEEMVSNAAASFRVKVNSMLMIAHDITLGKDFRLFFQVVIVLWLLSVIGNFCSSITLAYIGTVALVTMPALYNKYQRPVDRYAGMVYRNISRHYKIVDENVISRLPRRFIRDKED

SEQ ID NO: 2900 - DNA, 1621 bp, Zea mays subsp. mays
  misc_feature (1)..(1621): Ceres Seq. ID no. 12368052
  misc_feature (1)..(1621): Ortholog of  Ceres SEQ ID NO 15175523 as cited in SEQ ID NO 0
gtttttcttttattcccctccactgctttgcgcttgcgcctacgcatcgccgccccgcctctagttctctctgtcctcgtcttcctactgtaaaccacctcgtccctatccgcggcaaccgttcaccgcgccgcgaggcctgctgatccgaccgacctccaccgtcatggctcccctgcgccgcgcgtctcgcctccttcgatcagccgtctgccggctgaggtctccagcgccggctcgggccttctccagcgccgcggcgaccgagacgggtgccgtgatcgccgctgctgccgtggcggtggccagctccgggctcgggctgtggctgaaaccgccgtcgcttgccgactccggcgaggcgcccggcgaccagatctcggtcgcctgcgccggcgccacggaggcgcgggaggagaaggggtggttcctgttcgcagactcatttcgtagaagggtcttcttcaactacgagaagaggatacggcttctcagtcctcctgagaagatttttgagtactttgcgtctgtgaggaatcgagaagggaaagtttacatgttgcctgctgacttgatgagagcagtagtccctgtttttcctccatcagagtccacggtagttcgtgaaggaagattaaggggggagcggagccctggagaattgcactgtgctccatcagagttctttatgcagttcgacacaaataatgatggcctcatctcctttgctgagtacattttttttgtgacattgctcagcattcatgagtcaaatttcactgtggccttcaaaatgttcgacatcgaccacagtggttaatttatctcgccaagaaaaaagacctgctcgttatgagcatgttcaatcatctgacttgtttgttgatggtaaaagaaggggtgatagacagagaagagtttaagaaaataatggcactgatgcggtcctttaacagacaagggtcgactcataaggatggtttacgtattggacttaaagttggcaagcctgtggaaaatggtggggtggtcgagtacttctttgggagtgatgggaatgaacctctacactttgacaagttttctaaaattttgaaggaattgcatgatgagattattcaactggagttcagtcattatgatgtcaagtcgtctaaaacaataccagcaaaggattttgcattgtccatggttgcttctgctgacatgaaccatatcaacaaactgcttgatagagttgatagtttggtcaaggagccagatctgaaggacatacgcatcacctttgaggagtttaaggcatttgctgatttgcgacgaagattggagccactgtcgatggctatctttgcttacggtaaattgaatgggttattgacgaaggaggatctaaaacgtgcagcgcaacatgcgcagaaggtaatcaccaagcagtgcattgctgatcgttacaacggacttcactgtatgtcgtcttggtggccgaagcttgactagcagtaacagctgtaattgtaaatcgtgtcctctgtagccctaggactgagtgatatacattgttattctcacgtgtaaattaaaccccatatggccatatggcttcaatatatgaaacattgcc

SEQ ID NO: 2901 - protein, 217 aa, Zea mays subsp. mays
  peptide (1)..(217): Ceres Seq. ID no. 12368053
MAPLRRASRLLRSAVCRLRSPAPARAFSSAAATETGAVIAAAAVAVASSGLGLWLKPPSLADSGEAPGDQISVACAGATEAREEKGWFLFADSFRRRVFFNYEKRIRLLSPPEKIFEYFASVRNREGKVYMLPADLMRAVVPVFPPSESTVVREGRLRGERSPGELHCAPSEFFMQFDTNNDGLISFAEYIFFVTLLSIHESNFTVAFKMFDIDHSG

SEQ ID NO: 2902 - protein, 214 aa, Zea mays subsp. mays
  peptide (1)..(214): Ceres Seq. ID no. 12368054
MSMFNHLTCLLMVKEGVIDREEFKKIMALMRSFNRQGSTHKDGLRIGLKVGKPVENGGVVEYFFGSDGNEPLHFDKFSKILKELHDEIIQLEFSHYDVKSSKTIPAKDFALSMVASADMNHINKLLDRVDSLVKEPDLKDIRITFEEFKAFADLRRRLEPLSMAIFAYGKLNGLLTKEDLKRAAQHAQKVITKQCIADRYNGLHCMSSWWPKLD

SEQ ID NO: 2903 - protein, 212 aa, Zea mays subsp. mays
  peptide (1)..(212): Ceres Seq. ID no. 12368055
MFNHLTCLLMVKEGVIDREEFKKIMALMRSFNRQGSTHKDGLRIGLKVGKPVENGGVVEYFFGSDGNEPLHFDKFSKILKELHDEIIQLEFSHYDVKSSKTIPAKDFALSMVASADMNHINKLLDRVDSLVKEPDLKDIRITFEEFKAFADLRRRLEPLSMAIFAYGKLNGLLTKEDLKRAAQHAQKVITKQCIADRYNGLHCMSSWWPKLD

SEQ ID NO: 2904 - DNA, 1341 bp, Zea mays subsp. mays
  misc_feature (1)..(1341): Ceres Seq. ID no. 12366729
  misc_feature (1)..(1341): Ortholog of  Ceres SEQ ID NO 15171279 as cited in SEQ ID NO 51378
  misc_feature (1)..(1341): Ortholog of  Ceres SEQ ID NO 13596816 as cited in SEQ ID NO 62287
gtccagacatcaggcagagcaggaacacaaggagagttcagagttcagacagcagggctttctctccgatcgctgttctgagcgatggcagcgcgcggcggtggtacgaggatgacgtctgctgctgctgccgcggcgccatgggttagcgtctgcagcttcttgctctgcttggcggccttccagggcgctgagggtgcgattggcgtgaactacggcatggtcgctaacaacctgccggcgccggagcaggtcgtctccatgtacaaggccaagaacatcagctacgtgcggctcttccacccggacaaggacgcgttgaacgcgctccgcggctccggcgtcggcgtcgtcctgggcacgctgaacgaggacctcccgcgcctggcgtccgacctgtccttcgccgcgtcgtgggtggccacgaacgtgcagcccttcgccggcgccgtccagttccggtacatcaacgccggcaacgaggtcatcccgggggacgccgcggcgcgggtgctcccggccatgcagaacctggagtcggcgctccggtccgcgggggtcacgggcgtccccgtcaccacggccgtggccaccagcgtgctcggcgcctcgtacccgccgtcccagggcgccttctccgaggcggccgcgccggtgatggcgcccatcgtctcgtacctgtcgtcgaagggcgcgccgctgctggtcaacgtatacccgtacttcgcctactcgagcagcggcgggcaggtggcgctcgggtacgcgctgctgtcggcggacgccggcgcggcgtcgtcggtcacggacgccggggtggtctacaccaacatgttcgacgctatcgtggacgcgacgcacgccgcggtggagaaagccggggtccaggggctggagctggtggtgtcggagaccggctggccgtcggccggcggcgagggcgccaccgtggagaatgccgcggcgtacaacaacaacgtggtgcggcacgtcggcggcggtaccccgcggcgaccagggaaggccgtggagacgtaccttttcgccatgttcaacgagaacggcaaggccgagggcgtggagcagcacttcggcctcttccagccggacatgagcgaggtctaccacgtcgacttcacggcgggatccccctaggtctagggaggaggcggcttacccgcttcttcacttttagtagtaggctcatccttcattcccctgatctacttcgttttgttggagtagcaaaactgccgcacgtcacgtttactgtttattttttaatatcttatatagaaaaataatatcaacatttattctttaaataagtttatgtttact

SEQ ID NO: 2905 - protein, 356 aa, Zea mays subsp. mays
  peptide (1)..(356): Ceres Seq. ID no. 12366730
MAARGGGTRMTSAAAAAAPWVSVCSFLLCLAAFQGAEGAIGVNYGMVANNLPAPEQVVSMYKAKNISYVRLFHPDKDALNALRGSGVGVVLGTLNEDLPRLASDLSFAASWVATNVQPFAGAVQFRYINAGNEVIPGDAAARVLPAMQNLESALRSAGVTGVPVTTAVATSVLGASYPPSQGAFSEAAAPVMAPIVSYLSSKGAPLLVNVYPYFAYSSSGGQVALGYALLSADAGAASSVTDAGVVYTNMFDAIVDATHAAVEKAGVQGLELVVSETGWPSAGGEGATVENAAAYNNNVVRHVGGGTPRRPGKAVETYLFAMFNENGKAEGVEQHFGLFQPDMSEVYHVDFTAGSP

SEQ ID NO: 2906 - protein, 347 aa, Zea mays subsp. mays
  peptide (1)..(347): Ceres Seq. ID no. 12366731
MTSAAAAAAPWVSVCSFLLCLAAFQGAEGAIGVNYGMVANNLPAPEQVVSMYKAKNISYVRLFHPDKDALNALRGSGVGVVLGTLNEDLPRLASDLSFAASWVATNVQPFAGAVQFRYINAGNEVIPGDAAARVLPAMQNLESALRSAGVTGVPVTTAVATSVLGASYPPSQGAFSEAAAPVMAPIVSYLSSKGAPLLVNVYPYFAYSSSGGQVALGYALLSADAGAASSVTDAGVVYTNMFDAIVDATHAAVEKAGVQGLELVVSETGWPSAGGEGATVENAAAYNNNVVRHVGGGTPRRPGKAVETYLFAMFNENGKAEGVEQHFGLFQPDMSEVYHVDFTAGSP

SEQ ID NO: 2907 - protein, 311 aa, Zea mays subsp. mays
  peptide (1)..(311): Ceres Seq. ID no. 12366732
MVANNLPAPEQVVSMYKAKNISYVRLFHPDKDALNALRGSGVGVVLGTLNEDLPRLASDLSFAASWVATNVQPFAGAVQFRYINAGNEVIPGDAAARVLPAMQNLESALRSAGVTGVPVTTAVATSVLGASYPPSQGAFSEAAAPVMAPIVSYLSSKGAPLLVNVYPYFAYSSSGGQVALGYALLSADAGAASSVTDAGVVYTNMFDAIVDATHAAVEKAGVQGLELVVSETGWPSAGGEGATVENAAAYNNNVVRHVGGGTPRRPGKAVETYLFAMFNENGKAEGVEQHFGLFQPDMSEVYHVDFTAGSP

SEQ ID NO: 2908 - DNA, 1359 bp, Zea mays subsp. mays
  misc_feature (1)..(1359): Ceres Seq. ID no. 12410500
  misc_feature (1)..(1359): Ortholog of  Ceres SEQ ID NO 15170911 as cited in SEQ ID NO 55290
gctcggcgctcgctcgctcgttcgcgcttcgctcccttccttccgtttcgctcgctgccgcggacacgccgcacacggtcgaggagacgacagctgccgcgcggcactgggctcgggggagctggaccgccgggcgaggacaagagacggtatcgatggcctacgcgcgcaccgtgatggcggcggccgcctctgcgctgctgatggccgtgggcgtgcggttcctgggccccgcggcggcggcgttcgtggaggaagagctgccgcgcgcccgcgcggtggccgccacctggctcacgccgccgtacctgtacctcgtcatcaacgccatcatcatctccatcgccgcgtcgtcccgcttccagtcgagcggcggcgccggcggacgtccgtcagccccgtcgtatgcgcccgccgcggaccccgacgccgacgccatcggaggagaaggagcgggcgaggagatagcagcagcaggatgggatccagccggcggttgcgtcgttgcaggtgcctgcggcggtgcccgtggtggcagcgaaggccgcggaggttgctgctgtcgtcgaggagccagtggtggtggagatccacactgtagcggtggcgccggagggcgaggtggacgaggactattcggtttcgaggtcgacatggacgccgcgtcggaggggcgcggagccggaggtggcggcggaggtgccgccgttcgcggacctgaccaactccaggaagaagccgctcgtgtcggcgaggttcagcaggaaggcgaccaaaccaagccccgaaggtagcagggctctgcgggtggcgcggccgcggaaggaggagacgctggagagcacgtggaaggccatcacggagggccgggggccgacgctagctcggcacctcaagaagtccgacacctgggacaccccgtccccgggcgccgcccgtccggcggcggcagcagcggggaggtcgatccagcggccgcggcaccggcggggacgatgcggaaggccgagactttcaacgacggtggcgccggaaggagcagacctgctcccgctgcgctggtgcggcgggagccgtcgctggggcaggacgagctgaaccgccgcgtggaggcgttcatccacaagttcaacatggagatgcggctgcagcggcaggagtcgctcaagcactacaacgacatgattggcaggggcaggggcagccgttagtgggaagtcttgctgcaaatagctgcggctccgcaagaaggattctgcttttttgttccgtgatatttctcgattttggttcttggtctctgtaagatatggttttgtgtaaatggttttatcaagtaacgaggacaagttcgatcgc

SEQ ID NO: 2909 - protein, 263 aa, Zea mays subsp. mays
  peptide (1)..(263): Ceres Seq. ID no. 12410501
SALARSFALRSLPSVSLAAADTPHTVEETTAAARHWARGSWTAGRGQETVSMAYARTVMAAAASALLMAVGVRFLGPAAAAFVEEELPRARAVAATWLTPPYLYLVINAIIISIAASSRFQSSGGAGGRPSAPSYAPAADPDADAIGGEGAGEEIAAAGWDPAGGCVVAGACGGARGGSEGRGGCCCRRGASGGGDPHCSGGAGGRGGRGLFGFEVDMDAASEGRGAGGGGGGAAVRGPDQLQEEAARVGEVQQEGDQTKPRR

SEQ ID NO: 2910 - protein, 212 aa, Zea mays subsp. mays
  peptide (1)..(212): Ceres Seq. ID no. 12410502
MAYARTVMAAAASALLMAVGVRFLGPAAAAFVEEELPRARAVAATWLTPPYLYLVINAIIISIAASSRFQSSGGAGGRPSAPSYAPAADPDADAIGGEGAGEEIAAAGWDPAGGCVVAGACGGARGGSEGRGGCCCRRGASGGGDPHCSGGAGGRGGRGLFGFEVDMDAASEGRGAGGGGGGAAVRGPDQLQEEAARVGEVQQEGDQTKPRR

SEQ ID NO: 2911 - protein, 205 aa, Zea mays subsp. mays
  peptide (1)..(205): Ceres Seq. ID no. 12410503
MAAAASALLMAVGVRFLGPAAAAFVEEELPRARAVAATWLTPPYLYLVINAIIISIAASSRFQSSGGAGGRPSAPSYAPAADPDADAIGGEGAGEEIAAAGWDPAGGCVVAGACGGARGGSEGRGGCCCRRGASGGGDPHCSGGAGGRGGRGLFGFEVDMDAASEGRGAGGGGGGAAVRGPDQLQEEAARVGEVQQEGDQTKPRR

SEQ ID NO: 2912 - DNA, 884 bp, Zea mays subsp. mays
  misc_feature (1)..(884): Ceres Seq. ID no. 12405757
  misc_feature (1)..(884): Ortholog of  Ceres SEQ ID NO 13638609 as cited in SEQ ID NO 52110
aaccaactgagctgagcaagaaggcaagcaccaatcagccagcagtccagcacaatatcatgaacaagcgtcaggtcgccgcggcggtggctgccctcctggcgctgctagccgcatcatcgacggccggcgccgtgacgttcgacgcgacgaacacggcgtccgatacccccggcgggcagcggttcgaccaggccgtcggcctcgactacgccaagcaggtcctgtccgacgcgtccacgttcatctggaacaccttcgaccagcccagccccgccgaccgcaagcccgtcgacgcggtgaccctcgtcgtcgaggacatcggcggcgtggccttcacgagcgccaacgggatccacctcagcgcgcagtacgtcggcggctactccggcgacgtcaagaccgaagtcaccggcgtgctgtaccacgagacaacgcacgtgtggcagtgggacgggcagggccaggcgaacggcggcctcatcgagggcatcgccgactacgtccggctgaaggcggggtacgcgccgggccactgggtgcagccggggcagggggaccggtgggaccaggggtacgacgtcacggcgaggttcctggactactgcgactcgctcaagccgggcttcgtcgcgctgctcaacgccaagatgaaggacggctacaccgacgacttcttcgcccagatcctgggcaagaccgtgcagcagctgtggcaggactacaaggctaagtacgggggctgatgatggtgatgcaaattggtggcggtgcgaagtcaacgcgtcaatggctcaatgcgtttggtatgagatgctattatgtgctagtacgtacactctgtgtgtaaaatatatagagaaaataaaagggatcggataatt

SEQ ID NO: 2913 - protein, 247 aa, Zea mays subsp. mays
  peptide (1)..(247): Ceres Seq. ID no. 12405758
PTELSKKASTNQPAVQHNIMNKRQVAAAVAALLALLAASSTAGAVTFDATNTASDTPGGQRFDQAVGLDYAKQVLSDASTFIWNTFDQPSPADRKPVDAVTLVVEDIGGVAFTSANGIHLSAQYVGGYSGDVKTEVTGVLYHETTHVWQWDGQGQANGGLIEGIADYVRLKAGYAPGHWVQPGQGDRWDQGYDVTARFLDYCDSLKPGFVALLNAKMKDGYTDDFFAQILGKTVQQLWQDYKAKYGG

SEQ ID NO: 2914 - protein, 228 aa, Zea mays subsp. mays
  peptide (1)..(228): Ceres Seq. ID no. 12405759
MNKRQVAAAVAALLALLAASSTAGAVTFDATNTASDTPGGQRFDQAVGLDYAKQVLSDASTFIWNTFDQPSPADRKPVDAVTLVVEDIGGVAFTSANGIHLSAQYVGGYSGDVKTEVTGVLYHETTHVWQWDGQGQANGGLIEGIADYVRLKAGYAPGHWVQPGQGDRWDQGYDVTARFLDYCDSLKPGFVALLNAKMKDGYTDDFFAQILGKTVQQLWQDYKAKYGG

SEQ ID NO: 2915 - DNA, 1713 bp, Zea mays subsp. mays
  misc_feature (1)..(1713): Ceres Seq. ID no. 13498435
  misc_feature (1)..(1713): Ortholog of  Ceres SEQ ID NO 13662245 as cited in SEQ ID NO 62708
  misc_feature (1)..(1713): Ortholog of  Ceres SEQ ID NO 14314084 as cited in SEQ ID NO 63256
  misc_feature (1)..(1713): Ortholog of  Ceres SEQ ID NO 14303091 as cited in SEQ ID NO 66369
gcacgagaccattacctagaacatcctaatcgaaaagtccgtcgtctcgcgctctcgtttcgtcgctacgctagcttccagtcccgggcttagcaactgtgctgctgttgcactgcacccggcgcacgcagagatgcgccgtgtcgggacgggtgtgaggatgctttgcggcgcggcgctgtcggtgcttctgcttctcgcgggcggcgcggcggcgtcgcactcgcgctcgtcgtgccccgccacgccgccggacgcggggaacacgctgcaggtgtcgcacgcgttcgggccgtgctcgccgctgggccccgggacggcggcgccgtcgtgggcggggttcctggcggaccaggcgtcgcgtgacgcgtcgcggctgctgtacctggactcgctggcggtgcgtggccgcgcccgcgcgtacgcgcccatcgcgtcggggcggcagctgctgcagacgctgacgtacgtggtgcgggccagcctcggcacgccgccgcagcagctgctcctggccgtcgacaccagcaacgacgcctcgtggatcccttgcgccggctgcgcgggctgccccacgtcgtccgcggcgcccttcgacccggccgcgtccgcctcgtaccgcacggtgccctgcgggtcgccgctgtgcgcgcaggcacccaacgcggcgtgcccgcccggcggcaaggcctgcggcttcagcctcacctacgccgactcctcgctgcaggccgcgctgtcgcaggactccctcgccgtcgcaggcaacgccgtgaaggcctacaccttcgggtgcctgcagagggccactggcacggctgcgccgccgcaggggctgctgggtctcggccgcggcccgctgtcgttcctttcgcagaccaaggacatgtacgaggccaccttctcgtactgtctccccagcttcaagtcgctcaacttctctggaacgctccggctcgggcgcaacggccagccgcagcgcatcaagacgacgccgctgctggccaacccgcaccggtcgtcgctctactacgtgaacatgaccggcgtccgcgtgggcaggaaggtggtgcccatcccggcgttcgacccggcgacgggcgcgggcaccgtgctggactctggcaccatgttcacccggctggtggcgccggcgtacgtggccgtgcgggacgaggtccggcgccgcgtcggcgcgcccgtatcctcgctgggagggttcgacacgtgcttcaacaccaccgccgtcgcgtggccgcccatgacgctgctgttcgacggcatgcaggtgacgttgccggaggagaacgtggtcatccacagcacgtacgggaccatcagctgcctggccatggccgcggcgcccgacggcgtcaacaccgtgctcaacgtcatcgccagcatgcagcagcagaaccaccgtgtgctcttcgacgtgcccaacggacgcgtcggcttcgcgcgcgagcgctgcactgccgcttgatcagcttgctcgcgcgcctgcgcgcgggctcggattcgggttatatttagttaaacctacgttctacggttgtggacgtcatgcactgctgtcggagtgggtgattaataatttaactttccttttctttttaatctcgttgctcttcagatttaccatatgtgtttcacattcaccgcgttatgtggtttaggggctgaatgattggggtctaaataatgtactgt

SEQ ID NO: 2916 - protein, 450 aa, Zea mays subsp. mays
  peptide (1)..(450): Ceres Seq. ID no. 13498436
MRRVGTGVRMLCGAALSVLLLLAGGAAASHSRSSCPATPPDAGNTLQVSHAFGPCSPLGPGTAAPSWAGFLADQASRDASRLLYLDSLAVRGRARAYAPIASGRQLLQTLTYVVRASLGTPPQQLLLAVDTSNDASWIPCAGCAGCPTSSAAPFDPAASASYRTVPCGSPLCAQAPNAACPPGGKACGFSLTYADSSLQAALSQDSLAVAGNAVKAYTFGCLQRATGTAAPPQGLLGLGRGPLSFLSQTKDMYEATFSYCLPSFKSLNFSGTLRLGRNGQPQRIKTTPLLANPHRSSLYYVNMTGVRVGRKVVPIPAFDPATGAGTVLDSGTMFTRLVAPAYVAVRDEVRRRVGAPVSSLGGFDTCFNTTAVAWPPMTLLFDGMQVTLPEENVVIHSTYGTISCLAMAAAPDGVNTVLNVIASMQQQNHRVLFDVPNGRVGFARERCTAA

SEQ ID NO: 2917 - protein, 441 aa, Zea mays subsp. mays
  peptide (1)..(441): Ceres Seq. ID no. 13498437
MLCGAALSVLLLLAGGAAASHSRSSCPATPPDAGNTLQVSHAFGPCSPLGPGTAAPSWAGFLADQASRDASRLLYLDSLAVRGRARAYAPIASGRQLLQTLTYVVRASLGTPPQQLLLAVDTSNDASWIPCAGCAGCPTSSAAPFDPAASASYRTVPCGSPLCAQAPNAACPPGGKACGFSLTYADSSLQAALSQDSLAVAGNAVKAYTFGCLQRATGTAAPPQGLLGLGRGPLSFLSQTKDMYEATFSYCLPSFKSLNFSGTLRLGRNGQPQRIKTTPLLANPHRSSLYYVNMTGVRVGRKVVPIPAFDPATGAGTVLDSGTMFTRLVAPAYVAVRDEVRRRVGAPVSSLGGFDTCFNTTAVAWPPMTLLFDGMQVTLPEENVVIHSTYGTISCLAMAAAPDGVNTVLNVIASMQQQNHRVLFDVPNGRVGFARERCTAA

SEQ ID NO: 2918 - DNA, 1433 bp, Zea mays subsp. mays
  misc_feature (1)..(1433): Ceres Seq. ID no. 12350246
  misc_feature (1)..(1433): Ortholog of  Ceres SEQ ID NO 13590776 as cited in SEQ ID NO 64877
  misc_feature (1)..(1433): Ortholog of  Ceres SEQ ID NO 12780534 as cited in SEQ ID NO 65670
  misc_feature (1)..(1433): Ortholog of  Ceres SEQ ID NO 13598301 as cited in SEQ ID NO 68281
gacacacgaaattctcaggtcccggtcccgggtccaggcacccttctcgctcggttgctcgggagctttccccttcctgttcctgaagcttccgacatccgaccgcctcctcctcctcgttctactcgccgccccttctaggatcatccagaggcgtgccggtgaaacgcgagagcggtgaggcatggcgatgcagacgggggtcgcgacctccaaggtcctcatcctcgtcggtgcagggatgacgggctcgatcctgctgcggaatggccgcttatctgatgtgttgggagaactccaggagattatgaagggtgtaaatcaaggaactgcttcgggtccctatgacattgcacttattcaagctcagattcggaatttagcccaagaagtcagagatttgacattgtcaaagcccattaccatactgaatggcaaatctgactcgggaggcagtttatcatcctacatactgccagcagcagcagttggagcaatgggttattgctacatgtgggaaggggttgtctctctcagatgtcatgtttgtcacaaaacacaacatggcaaatgctgttcagagcatgtcaaagcagttggagcaagtttcatcagcactagctgcaacaaaaagacatctaactcaacggcttgagaatttggatggcaaaatggatgaacaagtagaggtctccaaagctattagaaatgaggtcaatgatgttaaagatgacctgtctcaaattggatttgatgtcgaatcaattcagaaaatggttgctggattggagggaaagatcgagttacttgagaacaaacaggacgtggctaatactggtatctggtacctctgccaagtagcaggcggtttaaaagatggaataaacaccaggtttttccaggaaaccagtgagaagctgaagctctcacattcagctcaacctgaaaacaagccagtgaaggggcttgaatttttttcggaaagcgccatggaacagaaagtagctgactccaaaccaattgcggtgacagtcgacgctgagaagcctgagaaaaccgctgctgtaatgggcaccacagtgcacaggtctatcaggttctcatatcggaaggcaggccttgctttgtgatcaaatcctctccgcttgagatgcacgtggccttcctggttgcttttcttttttggcaacaaccttcctggttgctttgtctgatggtcagaaaacatggaagaataacctgcaactggagtgacagaatttcttttccccgcagtagcacaggtgtgcgttatttggtctgatttgaaactatcttcagtccgctatcaatttttttccttggattttgattcattttatgtttcgacttgttgccttgtatactgtaaaggcattggaaagaatacataaaacacgaatgttttttttgtc

SEQ ID NO: 2919 - protein, 232 aa, Zea mays subsp. mays
  peptide (1)..(232): Ceres Seq. ID no. 12350247
MANLTREAVYHPTYCQQQQLEQWVIATCGKGLSLSDVMFVTKHNMANAVQSMSKQLEQVSSALAATKRHLTQRLENLDGKMDEQVEVSKAIRNEVNDVKDDLSQIGFDVESIQKMVAGLEGKIELLENKQDVANTGIWYLCQVAGGLKDGINTRFFQETSEKLKLSHSAQPENKPVKGLEFFSESAMEQKVADSKPIAVTVDAEKPEKTAAVMGTTVHRSIRFSYRKAGLAL

SEQ ID NO: 2920 - protein, 195 aa, Zea mays subsp. mays
  peptide (1)..(195): Ceres Seq. ID no. 12350248
MFVTKHNMANAVQSMSKQLEQVSSALAATKRHLTQRLENLDGKMDEQVEVSKAIRNEVNDVKDDLSQIGFDVESIQKMVAGLEGKIELLENKQDVANTGIWYLCQVAGGLKDGINTRFFQETSEKLKLSHSAQPENKPVKGLEFFSESAMEQKVADSKPIAVTVDAEKPEKTAAVMGTTVHRSIRFSYRKAGLAL

SEQ ID NO: 2921 - protein, 188 aa, Zea mays subsp. mays
  peptide (1)..(188): Ceres Seq. ID no. 12350249
MANAVQSMSKQLEQVSSALAATKRHLTQRLENLDGKMDEQVEVSKAIRNEVNDVKDDLSQIGFDVESIQKMVAGLEGKIELLENKQDVANTGIWYLCQVAGGLKDGINTRFFQETSEKLKLSHSAQPENKPVKGLEFFSESAMEQKVADSKPIAVTVDAEKPEKTAAVMGTTVHRSIRFSYRKAGLAL

SEQ ID NO: 2922 - DNA, 1385 bp, Zea mays subsp. mays; identical to SEQ ID NO: 1445
  misc_feature (1)..(1385): Ceres Seq. ID no. 12349947
  misc_feature (1)..(1385): Ortholog of  Ceres SEQ ID NO 12474685 as cited in SEQ ID NO 88
  misc_feature (1)..(1385): Ortholog of  Ceres SEQ ID NO 13638574 as cited in SEQ ID NO 51223
  misc_feature (1)..(1385): Ortholog of  Ceres SEQ ID NO 14311531 as cited in SEQ ID NO 51466
  misc_feature (1)..(1385): Ortholog of  Ceres SEQ ID NO 15170465 as cited in SEQ ID NO 52798
  misc_feature (1)..(1385): Ortholog of  Ceres SEQ ID NO 15177112 as cited in SEQ ID NO 55956
  misc_feature (1)..(1385): Ortholog of  Ceres SEQ ID NO 12610790 as cited in SEQ ID NO 56123
  misc_feature (1)..(1385): Ortholog of  Ceres SEQ ID NO 13655636 as cited in SEQ ID NO 63519
  misc_feature (1)..(1385): Ortholog of  Ceres SEQ ID NO 13655896 as cited in SEQ ID NO 64970
  misc_feature (1)..(1385): Ortholog of  Ceres SEQ ID NO 12627322 as cited in SEQ ID NO 67162

SEQ ID NO: 2923 - protein, 364 aa, Zea mays subsp. mays; identical to SEQ ID NO: 1446
  peptide (1)..(364): Ceres Seq. ID no. 12349948

SEQ ID NO: 2924 - protein, 311 aa, Zea mays subsp. mays; identical to SEQ ID NO: 1447
  peptide (1)..(311): Ceres Seq. ID no. 12349949

SEQ ID NO: 2925 - protein, 299 aa, Zea mays subsp. mays; identical to SEQ ID NO: 1448
  peptide (1)..(299): Ceres Seq. ID no. 12349950

SEQ ID NO: 2926 - DNA, 1496 bp, Zea mays subsp. mays
  misc_feature (1)..(1496): Ceres Seq. ID no. 12374344
  misc_feature (1)..(1496): Ortholog of  Ceres SEQ ID NO 15227289 as cited in SEQ ID NO 58851
  misc_feature (1)..(1496): Ortholog of  Ceres SEQ ID NO 13584416 as cited in SEQ ID NO 63441
aacccaaacaccacaatccccttcaacaaacgcaccgcactccacggcagccagaaaacacaatccacagagtctccgtgaggtctgagcgaggtaggactagctctgagcgagttcttccgtcttccaggtataatcctagcaactctcactatcctcttcgcatcgctcgtctctttttgagaccagttggatttctcttatttttccttggatcctactacctaatagaacagagctccggagccttttagtttctggtctctgatctactcattttcttttcttccccttttggtgacataggtaggtctagttaagatctgtcgtgcctgttctttgattttagctaagaaccaggcgatttagtcttcttcttccttacaaaaaaaatccccagaaaaaaaaagttgtgagtagtatattcttgtaccatttgatggccgctgctataaatctccccgggcccagcgaggatctgatgcgagcgatggagtccttcatgcaagacgacgccccatcccctctggccatgccgccggcgccgtctttcccagcggccgcagcccacggggcccagtacccggcgacccacctgagcccggcgcagatgcagttcatccaggcccagctccacctgcagcggaacccggggctgggcccgcgggcgcagcccatgaagcccgccgtcccagtgccgccggcgccggcgccgcagcggcctgtgaagctgtaccgcggcgtgcggcagcgtcactggggcaagtgggtggccgagatccggctcccccggaaccgcacccgcctgtggctcgggaccttcgacaccgccgagcaggcggcgctggcctacgaccaggcggcgtaccgcctccgcggggacgcggcgcggctcaacttccccgacaacgcggagtccagggcgccgctcgaccccgccgtggacgccaagctgcaggccatctgcgccaccatcgccgccgcgtcgtcgtcatccaagaattccaaggccaagagcaaggcgatgccaatcaacgcgtccgttctggaagcggcagcggcgtctccgagcaacagctcctccgacgaaggttccggctccgggttcgggtcggacgacgagatgtcctcgtcctccccgacgccggtggtggcgccgccggtggcggacatgggacagctggatttcagcgaggttccgtgggacgaggacgagagcttcgtgctccgcaagtacccgtcctacgagatcgactgggacgcgctgctctccaactagtcgcccttcgccgacagatgtgctgttgtagttcagtagtggcagtatctctggccgccgcagatgaggttttaggcaatctgcaggccgccggcccatgtgtattaagtaggttttgctcagttgttggccctggacttcgccggcgtttttgtgaccggcgtccccgagtgcactgcattggtgtactggtctgtctgtaaaaaaaatggatctg

SEQ ID NO: 2927 - protein, 279 aa, Zea mays subsp. mays
  peptide (1)..(279): Ceres Seq. ID no. 12374345
MAAAINLPGPSEDLMRAMESFMQDDAPSPLAMPPAPSFPAAAAHGAQYPATHLSPAQMQFIQAQLHLQRNPGLGPRAQPMKPAVPVPPAPAPQRPVKLYRGVRQRHWGKWVAEIRLPRNRTRLWLGTFDTAEQAALAYDQAAYRLRGDAARLNFPDNAESRAPLDPAVDAKLQAICATIAAASSSSKNSKAKSKAMPINASVLEAAAASPSNSSSDEGSGSGFGSDDEMSSSSPTPVVAPPVADMGQLDFSEVPWDEDESFVLRKYPSYEIDWDALLSN

SEQ ID NO: 2928 - protein, 265 aa, Zea mays subsp. mays
  peptide (1)..(265): Ceres Seq. ID no. 12374346
MRAMESFMQDDAPSPLAMPPAPSFPAAAAHGAQYPATHLSPAQMQFIQAQLHLQRNPGLGPRAQPMKPAVPVPPAPAPQRPVKLYRGVRQRHWGKWVAEIRLPRNRTRLWLGTFDTAEQAALAYDQAAYRLRGDAARLNFPDNAESRAPLDPAVDAKLQAICATIAAASSSSKNSKAKSKAMPINASVLEAAAASPSNSSSDEGSGSGFGSDDEMSSSSPTPVVAPPVADMGQLDFSEVPWDEDESFVLRKYPSYEIDWDALLSN

SEQ ID NO: 2929 - protein, 262 aa, Zea mays subsp. mays
  peptide (1)..(262): Ceres Seq. ID no. 12374347
MESFMQDDAPSPLAMPPAPSFPAAAAHGAQYPATHLSPAQMQFIQAQLHLQRNPGLGPRAQPMKPAVPVPPAPAPQRPVKLYRGVRQRHWGKWVAEIRLPRNRTRLWLGTFDTAEQAALAYDQAAYRLRGDAARLNFPDNAESRAPLDPAVDAKLQAICATIAAASSSSKNSKAKSKAMPINASVLEAAAASPSNSSSDEGSGSGFGSDDEMSSSSPTPVVAPPVADMGQLDFSEVPWDEDESFVLRKYPSYEIDWDALLSN

SEQ ID NO: 2930 - DNA, 1642 bp, Zea mays subsp. mays
  misc_feature (1)..(1642): Ceres Seq. ID no. 12423800
  misc_feature (1)..(1642): Ortholog of  Ceres SEQ ID NO 15171755 as cited in SEQ ID NO 57047
  misc_feature (1)..(1642): Ortholog of  Ceres SEQ ID NO 13597613 as cited in SEQ ID NO 65334
  misc_feature (1)..(1642): Ortholog of  Ceres SEQ ID NO 14303664 as cited in SEQ ID NO 65892
  misc_feature (1)..(1642): Ortholog of  Ceres SEQ ID NO 15178832 as cited in SEQ ID NO 0
atttctgggctggccggaaagcgagcgctcgagagcgaggggaaatcaggtggaggaagcttaaaattagaagtccagcgcaataattgagcaggcggcggcaggcccctcctaatcactgccctaaacacatgtgtgccgggccgaggtcacaatcgatgcacggaggaggatgccgccgtagctgcggagattgataatataaagcgggcggagacncggncccctctggcctcgctgctcctccccccttcctccccccacatgcgctgcccccgcccggccctgccctgccctgccctgctgcgcccaagcagctgaatctccgcacagacaattagagtagctgcattggcggggaaagcgcaagaagctcagcagaaatggcggagcaggcaggcgccggaaggtactggtgccacatgtgcgccgcggtcgtgagccccgcggagggcgaggcggaggtgaagtgcccgcattgccacagcggcttccttgaggagatggagaccgtccgcggcacgcccgcggccgatgacggcgacggtgacggcgcggtggctcaagtgtaccccggcgccgaccgcccgagctccatctgggcgcacgctatcctcagcacggtcgacagctccgtccgccgccgccgcaaccggcggcagacggaggccgccggcgacgtctacgacgggaacgaccccgagttcgccctgcgccggcgtcgcgtcaccgcgttcctgcggctcctgcacgagctccgggaccgccagctgcagcggctggaggctgctgccggggtcgccctcgaaggcgaccagctgacccctttcggccggagcctcttcatcggcgcagctggcggcggcgagcatggcgtggcgctgggcgactacttcctcggccccagcctcgacgcactggtgcagcagctcgccgagaacgacgcgggacggcacgggacgccgccggccaagaaggaggccgtggaggcaatgccgaccgtggaaatcgccggtggcaatggcaacgatgacgacacggccagctgccccgtctgcctggaggactacgcggccggcgagcgcgctcgggagatgccctgcaggcacaggttccactccaattgcatcgttccgtggctcgagatgcacagctcctgccctgtctgccggttgcagctgccggccaccgacgacaagggctcatgcagcagcggcgacggtggttttgtcagtgtcgatgcggatggtgaaggcaatgacaacggcggcggtgatggtagggcaagtattccaggcaatgcggagccagccgaagccgaagagaacggcagccggttgccgccatccttgcagtggctcaacagcctgttctcgccatcggcgcagtcctccggtagcggcagcggcagttcgcatcattgggagaattgagcaataatgcaatataaggatggatgattgttgctgcttgagcccattggtgccaatgtacataggaagagcaggagcatgccggcatgaaaatttggagcctttttttcagtgtgtcaatttggctcatgtaacgttctctctgatatagttgtcatggctataaaaagaacaaaaattggcaagtatatgaacttgcctcttgcgtg

SEQ ID NO: 2931 - protein, 349 aa, Zea mays subsp. mays
  peptide (1)..(349): Ceres Seq. ID no. 12423801
MAEQAGAGRYWCHMCAAVVSPAEGEAEVKCPHCHSGFLEEMETVRGTPAADDGDGDGAVAQVYPGADRPSSIWAHAILSTVDSSVRRRRNRRQTEAAGDVYDGNDPEFALRRRRVTAFLRLLHELRDRQLQRLEAAAGVALEGDQLTPFGRSLFIGAAGGGEHGVALGDYFLGPSLDALVQQLAENDAGRHGTPPAKKEAVEAMPTVEIAGGNGNDDDTASCPVCLEDYAAGERAREMPCRHRFHSNCIVPWLEMHSSCPVCRLQLPATDDKGSCSSGDGGFVSVDADGEGNDNGGGDGRASIPGNAEPAEAEENGSRLPPSLQWLNSLFSPSAQSSGSGSGSSHHWEN

SEQ ID NO: 2932 - protein, 336 aa, Zea mays subsp. mays
  peptide (1)..(336): Ceres Seq. ID no. 12423802
MCAAVVSPAEGEAEVKCPHCHSGFLEEMETVRGTPAADDGDGDGAVAQVYPGADRPSSIWAHAILSTVDSSVRRRRNRRQTEAAGDVYDGNDPEFALRRRRVTAFLRLLHELRDRQLQRLEAAAGVALEGDQLTPFGRSLFIGAAGGGEHGVALGDYFLGPSLDALVQQLAENDAGRHGTPPAKKEAVEAMPTVEIAGGNGNDDDTASCPVCLEDYAAGERAREMPCRHRFHSNCIVPWLEMHSSCPVCRLQLPATDDKGSCSSGDGGFVSVDADGEGNDNGGGDGRASIPGNAEPAEAEENGSRLPPSLQWLNSLFSPSAQSSGSGSGSSHHWEN

SEQ ID NO: 2933 - protein, 309 aa, Zea mays subsp. mays
  peptide (1)..(309): Ceres Seq. ID no. 12423803
METVRGTPAADDGDGDGAVAQVYPGADRPSSIWAHAILSTVDSSVRRRRNRRQTEAAGDVYDGNDPEFALRRRRVTAFLRLLHELRDRQLQRLEAAAGVALEGDQLTPFGRSLFIGAAGGGEHGVALGDYFLGPSLDALVQQLAENDAGRHGTPPAKKEAVEAMPTVEIAGGNGNDDDTASCPVCLEDYAAGERAREMPCRHRFHSNCIVPWLEMHSSCPVCRLQLPATDDKGSCSSGDGGFVSVDADGEGNDNGGGDGRASIPGNAEPAEAEENGSRLPPSLQWLNSLFSPSAQSSGSGSGSSHHWEN

SEQ ID NO: 2934 - DNA, 1507 bp, Zea mays subsp. mays
  misc_feature (1)..(1507): Ceres Seq. ID no. 12410492
  misc_feature (1)..(1507): Ortholog of  Ceres SEQ ID NO 15176588 as cited in SEQ ID NO 60461
cttctagggtttctctctgtttcgtcctcatcgaatcggagtttcgcatggagtcatcgcggtctcggaagcggacgcgccaggcgcatgactgtgccgccgcgccgccaccagagcgagaagtggtagcgaggggtggcgcgtcgccaccatggagggaggatgaccgtgatggacacttcgtattcgaccttggcgagaacttgacccgccgatataaaatcttgagcaaaatgggagaaggtacatttgggcgtgttttggaatgctgggaccgtgaaacacatgaatatgttgccataaaagttgttcgcagtatccgcaagtaccgtgatgctgcaatgattgagatagatgtgctcaatcgccttgcagaaaatgaaaagtacagatctctttgtgttcaaattcagagatggtttgactatcgtaatcatatatgcattgtttttgagaagcttgggccaagcttgtatgattttctaaagagaaatagataccaacctttccctgtggaacttgtgcgggagtttggacggcaactgttggaatctgtagcatatatgcatgagttgcggcttatccacactgatctgaagccagaaaacatactacttgtctcttctgagtatataaaagttccaagtacaaagaagaattcgcaaggtgagatgcatttcaagtgcttgccgaagtccagtgccataaagctgatagattttggcagtaccgcctttgataatcgggaccataactcgattgtttctacgaggcattatagggcacctgaaataatattaggtttaggctggagttttccatgtgatatttggagtgttggctgtattcttgttgagctatgctctggggaagcattgtttcagacacacgagaatctggaacacctagcaatgatggagagggttttgggacctctaccagaggatatgatacggaaagcaagctcttcagctcagaaatattttaggagagcaacacgattaaattggcctgaaggtgctgtttcaagagaaagcatcagagctgtgaggaaactggatcgactaaaggacttggtatcgaggaacgctgaccattcaaaggtggcactggtggacttgctatacggtctcctacggttcgagccatcggaacgcctgacagcagaagaagctctggaccatccattcttcaggaacccaacatgacttgttgagcaggcttgactcatgtgtaactctactgaaggtggtggtgggaagcaggcagagctgtccattgcaaagctgaaagcattttgctcctctataccagagagtttgtgtaaggcctgtcaatggggcttcttgtggtgataaaactgatggctttagtcacccaatgtcatgtacactagcatttttcctagggagcttagttcgccagatggcgcttgtatgttgttaaccgggatacactatgagctgtgccccgatgccctggtgccataatccaatcgcaaatgttg

SEQ ID NO: 2935 - protein, 401 aa, Zea mays subsp. mays
  peptide (1)..(401): Ceres Seq. ID no. 12410493
SRVSLCFVLIESEFRMESSRSRKRTRQAHDCAAAPPPEREVVARGGASPPWREDDRDGHFVFDLGENLTRRYKILSKMGEGTFGRVLECWDRETHEYVAIKVVRSIRKYRDAAMIEIDVLNRLAENEKYRSLCVQIQRWFDYRNHICIVFEKLGPSLYDFLKRNRYQPFPVELVREFGRQLLESVAYMHELRLIHTDLKPENILLVSSEYIKVPSTKKNSQGEMHFKCLPKSSAIKLIDFGSTAFDNRDHNSIVSTRHYRAPEIILGLGWSFPCDIWSVGCILVELCSGEALFQTHENLEHLAMMERVLGPLPEDMIRKASSSAQKYFRRATRLNWPEGAVSRESIRAVRKLDRLKDLVSRNADHSKVALVDLLYGLLRFEPSERLTAEEALDHPFFRNPT

SEQ ID NO: 2936 - protein, 386 aa, Zea mays subsp. mays
  peptide (1)..(386): Ceres Seq. ID no. 12410494
MESSRSRKRTRQAHDCAAAPPPEREVVARGGASPPWREDDRDGHFVFDLGENLTRRYKILSKMGEGTFGRVLECWDRETHEYVAIKVVRSIRKYRDAAMIEIDVLNRLAENEKYRSLCVQIQRWFDYRNHICIVFEKLGPSLYDFLKRNRYQPFPVELVREFGRQLLESVAYMHELRLIHTDLKPENILLVSSEYIKVPSTKKNSQGEMHFKCLPKSSAIKLIDFGSTAFDNRDHNSIVSTRHYRAPEIILGLGWSFPCDIWSVGCILVELCSGEALFQTHENLEHLAMMERVLGPLPEDMIRKASSSAQKYFRRATRLNWPEGAVSRESIRAVRKLDRLKDLVSRNADHSKVALVDLLYGLLRFEPSERLTAEEALDHPFFRNPT

SEQ ID NO: 2937 - protein, 324 aa, Zea mays subsp. mays
  peptide (1)..(324): Ceres Seq. ID no. 12410495
MGEGTFGRVLECWDRETHEYVAIKVVRSIRKYRDAAMIEIDVLNRLAENEKYRSLCVQIQRWFDYRNHICIVFEKLGPSLYDFLKRNRYQPFPVELVREFGRQLLESVAYMHELRLIHTDLKPENILLVSSEYIKVPSTKKNSQGEMHFKCLPKSSAIKLIDFGSTAFDNRDHNSIVSTRHYRAPEIILGLGWSFPCDIWSVGCILVELCSGEALFQTHENLEHLAMMERVLGPLPEDMIRKASSSAQKYFRRATRLNWPEGAVSRESIRAVRKLDRLKDLVSRNADHSKVALVDLLYGLLRFEPSERLTAEEALDHPFFRNPT

SEQ ID NO: 2938 - DNA, 1536 bp, Zea mays subsp. mays
  misc_feature (1)..(1536): Ceres Seq. ID no. 12361389
  misc_feature (1)..(1536): Ortholog of  Ceres SEQ ID NO 13596244 as cited in SEQ ID NO 69307
gcacgagaccattacctagaacatcctaatcgaaaacccctcatcgccttcgtggcctggcctgcccgtcgtgtgcggctctgcgcctctccctccctccctcccttccccgatcgtaaccgccgcctccgatcgatcgccacgatgcggctcttctgacgtaccgccgggcgtcaccgtcaccgaccgagacccgcgcccctcgcctggactccatggccgcgtcctccccgctggtgctgtcgctgctcctcttcgcgtcgctgacggcgctgctggtcctcgcgccgcgcctatccccgccgcagccgccggcggccgccggtggtggtggtggcgaggaggccgacgacctccgcctgttccgccgcgcgactctggagtcgtcggcggcggacggccctcccaaggtggccttcctgttcctgaccaactccgacctcaccttcgcccctctctgggagcgcttcttcgcggggaacgaggcgcggctgcgcgtgtacgtccacgcggacccgtccgcgcgcctgcttcttccacgcgtgcacgcagcagctacatcgaggtgctggagggcgagccgcagatggcgtcgcgctacgcggcgcgcggcggcgaggagggcatgctcccggaggtgccgtacgagcggttccgcatcgggtcgcagttcttcgcgctggcccggcgccacgccgtgctggtggtccgggagcgccggctgtggcgcaagttccgcgcgccctgcgtccccgagatggcgcaggactcgtgctaccccgaggagcactacttcccgacgctgctggacatggcggaccccggcggcgtggcgcggtacacgctcacgcgcgtcaactggacgggtagcgtcgcgggccacccgcacacgtacgccgcgccggaggtctcgccaaggctcatcgcagacctccgcgcctccaaccacacccaccacccccacatgttcgcgcgcaagttcgcgcccgactgcctcggcccgctcctcgccatcgccgacaccgtcatcttcaaggactgatggcgggcggctccatccaggtactacttactactcggcagcagagggctgggcctggggctagtcaaggccgccgacgacggacggcgcggcaccggaatcagtggcgttcttctcccgtttggaccccccctgcagcgtcatgcatgttcatcagctccagtgtttctgtgtagtagattaggagtgtagagaagaggaggacgacgacgacgacagcacgcggcgacctaatgcgaagcggcaggttgtggttgcgtgcgtgtacgcgtcctcgatcgtcgtccatccgtgaaaaaaaaagaagaaaaaatatcgcgcgcgtgtgtggcttttgcctagcgtagccagccaaataaggttctactgcaagtaataaatcctagtgttgtacagcataggtagccgccactcctgctctgtgggtttcgtgtctcgatgtttttgtgctttgcagtgtactacgtacatactaatacgtgcttccaacttcc

SEQ ID NO: 2939 - protein, 296 aa, Zea mays subsp. mays
  peptide (1)..(296): Ceres Seq. ID no. 12361390
MAASSPLVLSLLLFASLTALLVLAPRLSPPQPPAAAGGGGGEEADDLRLFRRATLESSAADGPPKVAFLFLTNSDLTFAPLWERFFAGNEARLRVYVHADPSARLLLPRVHAAATSRCWRASRRWRRATRRAAARRACSRRCRTSGSASGRSSSRWPGATPCWWSGSAGCGASSARPASPRWRRTRATPRSTTSRRCWTWRTPAAWRGTRSRASTGRVASRATRTRTPRRRSRQGSSQTSAPPTTPTTPTCSRASSRPTASARSSPSPTPSSSRTDGGRLHPGTTYYSAAEGWAWG

SEQ ID NO: 2940 - protein, 151 aa, Zea mays subsp. mays
  peptide (1)..(151): Ceres Seq. ID no. 12361391
MASRYAARGGEEGMLPEVPYERFRIGSQFFALARRHAVLVVRERRLWRKFRAPCVPEMAQDSCYPEEHYFPTLLDMADPGGVARYTLTRVNWTGSVAGHPHTYAAPEVSPRLIADLRASNHTHHPHMFARKFAPDCLGPLLAIADTVIFKD

SEQ ID NO: 2941 - DNA, 1736 bp, Zea mays subsp. mays
  misc_feature (1)..(1736): Ceres Seq. ID no. 12374455
  misc_feature (1)..(1736): Ortholog of  Ceres SEQ ID NO 14311203 as cited in SEQ ID NO 53639
  misc_feature (1)..(1736): Ortholog of  Ceres SEQ ID NO 15176053 as cited in SEQ ID NO 57792
  misc_feature (1)..(1736): Ortholog of  Ceres SEQ ID NO 14311175 as cited in SEQ ID NO 60223
  misc_feature (1)..(1736): Ortholog of  Ceres SEQ ID NO 15224727 as cited in SEQ ID NO 64990
  misc_feature (1)..(1736): Ortholog of  Ceres SEQ ID NO 14308023 as cited in SEQ ID NO 65865
  misc_feature (1)..(1736): Ortholog of  Ceres SEQ ID NO 14307972 as cited in SEQ ID NO 66436
  misc_feature (1)..(1736): Ortholog of  Ceres SEQ ID NO 15170175 as cited in SEQ ID NO 67138
  misc_feature (1)..(1736): Ortholog of  Ceres SEQ ID NO 12614670 as cited in SEQ ID NO 68565
gcatcggcggacatggtggtggccgtgcagctggccgctcttctcgcgctgctgctcgcgctgtggcgcctggtgtggcggccgcacgccgtggcgcggtcgttcgccaggcagggcatccggggcccgccctacacgttcctggcagggtccttgccggaggcgaagcggctgctgatggctggccggagagggacggcgcccctggacgccggctgccacgacatcatgcccgtactcctgccgcagtttctcagatgggtcgcggactatgggagaacgttgctgttctggatcgggccgattcccgctgtcttgtctactgatctacagctgattaagcaggttctgacagacaggacgggcctgtatcagaaggacttcatgatccccgtgctcaagttcctcttcggcaacggtgtcatattgataaacggagacgattggaagcggcaccgcaaagtggtcctccctgcgttcaaccatgagacgatcaagagcatgtcggcggtgacggcagaggtaacggagcagatgatgcagcaatggcgcggccagatacacggaagcgaagaggaatccgccgagatagacatgatccacgccttcaacgacctgacctccaaggtcaacggccgcgtcgccttcggcaccagccaccgggaagtcgaggaggtcatcgtactgatgcgggagatgcagaagctcgccactgcggccacgctcgatgctccaatactctggtatctgccaactcggcgtaacctgcacgtccggcgtctgaacaaacagctgagaagcaagatcatgtccatcatgcaggcgcggctggccgccgacggagctgataggcgtggtgggcgcggcggcgccgtttccggcggaggcgacctacttgggctgttgctagaggcgtggacgccgcagccgcagcagcacgggaacggcggcgagacgctgacaaccgacgaggtgatcgacgagtgcaagaccttcttcgccgcggggcaggaaaccacagctaccctcctggtctgggccatgttcctgctcgccgtgcacccggaatggcaggacaaagtcagggaggaggtcgtcagggaattctgcaccggcgacgacggcgaggttccccatgccgatgtcctcgccaagctcaagctgctatacatggtgttgctggagacgtcgcgcctctacccgccgatcgtgtacatacagcggagggctgcctgggacgccgtccttggaggcatcaaggtgccccagggcaccgtcatctccatccccattgccatgctgcaccgggacaagcaggtctggggccccgacgccgatgagttcaacccgatgaggttcgagcatggcctcacaaaggccgccaaggatcccaaggcgctgctgtctttctccctgggcccaagagtgtgcactggccagagcttcggcatcgtagaagtgcaggtcgtcatggcgatgatcctcaggaggttctccttctccctctccccaaagtatgttcacaagcccaagtatctcctgtccttgacacccaagcttgggatgcctctcatcgtcaggaatgtggatggctgagagagataatattgtaagagctcgttttgtgtgtgaaaatgaatacatgactagtgtgtgataaatggtactctctttgttttaaagtataaattgtttcaatttttctatgtatattgctttaacgactatacatttag

SEQ ID NO: 2942 - protein, 531 aa, Zea mays subsp. mays
  peptide (1)..(531): Ceres Seq. ID no. 12374456
ASADMVVAVQLAALLALLLALWRLVWRPHAVARSFARQGIRGPPYTFLAGSLPEAKRLLMAGRRGTAPLDAGCHDIMPVLLPQFLRWVADYGRTLLFWIGPIPAVLSTDLQLIKQVLTDRTGLYQKDFMIPVLKFLFGNGVILINGDDWKRHRKVVLPAFNHETIKSMSAVTAEVTEQMMQQWRGQIHGSEEESAEIDMIHAFNDLTSKVNGRVAFGTSHREVEEVIVLMREMQKLATAATLDAPILWYLPTRRNLHVRRLNKQLRSKIMSIMQARLAADGADRRGGRGGAVSGGGDLLGLLLEAWTPQPQQHGNGGETLTTDEVIDECKTFFAAGQETTATLLVWAMFLLAVHPEWQDKVREEVVREFCTGDDGEVPHADVLAKLKLLYMVLLETSRLYPPIVYIQRRAAWDAVLGGIKVPQGTVISIPIAMLHRDKQVWGPDADEFNPMRFEHGLTKAAKDPKALLSFSLGPRVCTGQSFGIVEVQVVMAMILRRFSFSLSPKYVHKPKYLLSLTPKLGMPLIVRNVDG

SEQ ID NO: 2943 - protein, 527 aa, Zea mays subsp. mays
  peptide (1)..(527): Ceres Seq. ID no. 12374457
MVVAVQLAALLALLLALWRLVWRPHAVARSFARQGIRGPPYTFLAGSLPEAKRLLMAGRRGTAPLDAGCHDIMPVLLPQFLRWVADYGRTLLFWIGPIPAVLSTDLQLIKQVLTDRTGLYQKDFMIPVLKFLFGNGVILINGDDWKRHRKVVLPAFNHETIKSMSAVTAEVTEQMMQQWRGQIHGSEEESAEIDMIHAFNDLTSKVNGRVAFGTSHREVEEVIVLMREMQKLATAATLDAPILWYLPTRRNLHVRRLNKQLRSKIMSIMQARLAADGADRRGGRGGAVSGGGDLLGLLLEAWTPQPQQHGNGGETLTTDEVIDECKTFFAAGQETTATLLVWAMFLLAVHPEWQDKVREEVVREFCTGDDGEVPHADVLAKLKLLYMVLLETSRLYPPIVYIQRRAAWDAVLGGIKVPQGTVISIPIAMLHRDKQVWGPDADEFNPMRFEHGLTKAAKDPKALLSFSLGPRVCTGQSFGIVEVQVVMAMILRRFSFSLSPKYVHKPKYLLSLTPKLGMPLIVRNVDG

SEQ ID NO: 2944 - protein, 472 aa, Zea mays subsp. mays
  peptide (1)..(472): Ceres Seq. ID no. 12374458
MAGRRGTAPLDAGCHDIMPVLLPQFLRWVADYGRTLLFWIGPIPAVLSTDLQLIKQVLTDRTGLYQKDFMIPVLKFLFGNGVILINGDDWKRHRKVVLPAFNHETIKSMSAVTAEVTEQMMQQWRGQIHGSEEESAEIDMIHAFNDLTSKVNGRVAFGTSHREVEEVIVLMREMQKLATAATLDAPILWYLPTRRNLHVRRLNKQLRSKIMSIMQARLAADGADRRGGRGGAVSGGGDLLGLLLEAWTPQPQQHGNGGETLTTDEVIDECKTFFAAGQETTATLLVWAMFLLAVHPEWQDKVREEVVREFCTGDDGEVPHADVLAKLKLLYMVLLETSRLYPPIVYIQRRAAWDAVLGGIKVPQGTVISIPIAMLHRDKQVWGPDADEFNPMRFEHGLTKAAKDPKALLSFSLGPRVCTGQSFGIVEVQVVMAMILRRFSFSLSPKYVHKPKYLLSLTPKLGMPLIVRNVDG

SEQ ID NO: 2945 - DNA, 1785 bp, Zea mays subsp. mays
  misc_feature (1)..(1785): Ceres Seq. ID no. 12408251
  misc_feature (1)..(1785): Ortholog of  Ceres SEQ ID NO 13597411 as cited in SEQ ID NO 64125
atatttaattatttattgctgcgaacatatgggatgccagagtcgcagcaaaccacggttcggcggcgtccaattccccttcctcgccgatgccgatgccgatgccgatgccgatgccgatgccacgggcgcggacgcggtggtcggcgctagccgccagcgcgctcatccaatgctgcgcggggagctcctactgcttcggcgtctactctcagacgctcaaggcctcgcagcgctacgaccagtccgcgctcgacgccgtcgccttcttcaaggacgtcggcgccaacgccggggtcctctcgggcttcctcgtcgcttgggcgccggggggccgcaggcgcccctggattgtcctcctcgccggctccctgctctgcgccgcgggctacctccccatgtggctagccgtcgcgggggtcgcgcccgcgccgctcccgctcgtctgcctctacatgctgctcgccgcgcaggcgcagaccttcttcaacaccgccgatgttgtctccgccgtcgagaacttccccgaccgacgaggcactgtcatcggcatcatgaagggttttctaggcctaagtggggcaatacttgtcgaaatttaccgcactcttggcattgatcccagctctttcatactgatgctggcagttttacccacgtccgtcaccttggtgctcatgtattttgtggatgtccacaatccacatgaacggtatgagaagaaattcctagacgctttctccctcattgctgttactgttgctggatacttgatgattctcataatctatggtcaagttttcccaataagctcagctgtgcagagcgtttgtttcgtggtactcctgctactagtgatgtctccaatagctgtggctgcaaaggcccagacgccagaatcaatagctcatcaaggatcaatctcagaacaaagggctggactgctccgcaaagaggtcacagaggattctgaaaatgctagctcaagcactactgcgcttgggggatctaaccaagacctgtcttcaggcaaagaaaacctgaacgtattacaggccatgtgcaagctcaacttctggttgctcttcctggcaatggcttgtggaatgggatcaggtctggccacggtgaacaatatcagccagatcggcggctcccttggctacacgaccaaggagaccagcacactcgtgtctctatggagcatatggaacttttcagggcggtttggtgcaggcttcatatccgaccatttccttcgcctgcgaggagttggcaggccattctttataagcatcacgctgctggtcatgagcgtcggccatgccatcatctcctccggtctccctgcgtcgctctacattgggtcggtgctcatcggcatgtgctatgggtgtcagtgggccctgatgccgagcataacatctgagatctttgggctgagccatttcggcaccatattcaacatggtggctgttgcaagccctgttgggtcctacatcctctcggtgcgcatcgtgggctacatatacgatattgaatcgccaccggacgagcactcttgtgtaggtaagcaatgctttgcactctctttcatgatcatggccggtgtctgtatgtttgggtccgctgtggcatttgtgttgtttatcagaacaaggacgttctataggcgtgtcgtatatgcaaggttgcaatcttttctagacaagtaacaagtctttatgtaagatggctatataacttggaataatgtttgtacatgtatattatgtcagtgtttcc

SEQ ID NO: 2946 - protein, 541 aa, Zea mays subsp. mays
  peptide (1)..(541): Ceres Seq. ID no. 12408252
MPMPMPMPMPMPRARTRWSALAASALIQCCAGSSYCFGVYSQTLKASQRYDQSALDAVAFFKDVGANAGVLSGFLVAWAPGGRRRPWIVLLAGSLLCAAGYLPMWLAVAGVAPAPLPLVCLYMLLAAQAQTFFNTADVVSAVENFPDRRGTVIGIMKGFLGLSGAILVEIYRTLGIDPSSFILMLAVLPTSVTLVLMYFVDVHNPHERYEKKFLDAFSLIAVTVAGYLMILIIYGQVFPISSAVQSVCFVVLLLLVMSPIAVAAKAQTPESIAHQGSISEQRAGLLRKEVTEDSENASSSTTALGGSNQDLSSGKENLNVLQAMCKLNFWLLFLAMACGMGSGLATVNNISQIGGSLGYTTKETSTLVSLWSIWNFSGRFGAGFISDHFLRLRGVGRPFFISITLLVMSVGHAIISSGLPASLYIGSVLIGMCYGCQWALMPSITSEIFGLSHFGTIFNMVAVASPVGSYILSVRIVGYIYDIESPPDEHSCVGKQCFALSFMIMAGVCMFGSAVAFVLFIRTRTFYRRVVYARLQSFLDK

SEQ ID NO: 2947 - protein, 539 aa, Zea mays subsp. mays
  peptide (1)..(539): Ceres Seq. ID no. 12408253
MPMPMPMPMPRARTRWSALAASALIQCCAGSSYCFGVYSQTLKASQRYDQSALDAVAFFKDVGANAGVLSGFLVAWAPGGRRRPWIVLLAGSLLCAAGYLPMWLAVAGVAPAPLPLVCLYMLLAAQAQTFFNTADVVSAVENFPDRRGTVIGIMKGFLGLSGAILVEIYRTLGIDPSSFILMLAVLPTSVTLVLMYFVDVHNPHERYEKKFLDAFSLIAVTVAGYLMILIIYGQVFPISSAVQSVCFVVLLLLVMSPIAVAAKAQTPESIAHQGSISEQRAGLLRKEVTEDSENASSSTTALGGSNQDLSSGKENLNVLQAMCKLNFWLLFLAMACGMGSGLATVNNISQIGGSLGYTTKETSTLVSLWSIWNFSGRFGAGFISDHFLRLRGVGRPFFISITLLVMSVGHAIISSGLPASLYIGSVLIGMCYGCQWALMPSITSEIFGLSHFGTIFNMVAVASPVGSYILSVRIVGYIYDIESPPDEHSCVGKQCFALSFMIMAGVCMFGSAVAFVLFIRTRTFYRRVVYARLQSFLDK

SEQ ID NO: 2948 - protein, 537 aa, Zea mays subsp. mays
  peptide (1)..(537): Ceres Seq. ID no. 12408254
MPMPMPMPRARTRWSALAASALIQCCAGSSYCFGVYSQTLKASQRYDQSALDAVAFFKDVGANAGVLSGFLVAWAPGGRRRPWIVLLAGSLLCAAGYLPMWLAVAGVAPAPLPLVCLYMLLAAQAQTFFNTADVVSAVENFPDRRGTVIGIMKGFLGLSGAILVEIYRTLGIDPSSFILMLAVLPTSVTLVLMYFVDVHNPHERYEKKFLDAFSLIAVTVAGYLMILIIYGQVFPISSAVQSVCFVVLLLLVMSPIAVAAKAQTPESIAHQGSISEQRAGLLRKEVTEDSENASSSTTALGGSNQDLSSGKENLNVLQAMCKLNFWLLFLAMACGMGSGLATVNNISQIGGSLGYTTKETSTLVSLWSIWNFSGRFGAGFISDHFLRLRGVGRPFFISITLLVMSVGHAIISSGLPASLYIGSVLIGMCYGCQWALMPSITSEIFGLSHFGTIFNMVAVASPVGSYILSVRIVGYIYDIESPPDEHSCVGKQCFALSFMIMAGVCMFGSAVAFVLFIRTRTFYRRVVYARLQSFLDK

SEQ ID NO: 2949 - DNA, 1513 bp, Zea mays subsp. mays
  misc_feature (1)..(1513): Ceres Seq. ID no. 12408247
  misc_feature (1)..(1513): Ortholog of  Ceres SEQ ID NO 14311576 as cited in SEQ ID NO 51551
gtccgaacactgggccggccggttgtccgccgcatccccttgcgttgcgttcacggttctcctctctgtctctcgcgcaagggatctcgttctccgcggcagctggtgtttcgctcccttctcgccctccgacggctggttggcagccggcgccggcgccgccaaacgctaggtgctgaggccttcgccagtgtcttcgacggcgacgagcacgtaccagcatcatgtcggaaagaggtcgcctggcaggacgattgattgataaccgcagcagagggtaccatgtagtccctctagttgaggatcccagaggccatcctgaagtcctcgtggatggggatcggaggggctactctgacattcgtggggttcagcaacgtcggggctaccctgacacccatctgcttgaggaacctaggggctaccctggtgttcgtgtggtcgaccataggggctatcctggcagtcgtggggttgatgaacgcagggcctatcctgagctccatcaaggctcacgcatgagggcggctcctcccccttacccagctgccttcgaggatgagctcgagttacaggaagttgaactccggaggctttcggcacataaccgcgctctagttgaggagcgtgaactgttaagcagggaaatacaagctggaaaagatgaggtccgccacttgaatgtgatcattgctgacattaacactgagaaagaagcttatatcagtaagcttatggacaagaggaggaagcttgaagctgaacttggagcaagtgagcacttgcgtgatgaggtcaggcatcttcgtggtgaaattgacaagctcgttaccgctcggaaagaactatctgcagaggctgcatctctcgtggaagagctgaacagggagcaatctgttaaacagcagctacctgtgctgaaaacagaaattgacggtctgcaacaggaacttgttcacgtgaggactgcttgcgggttagagcagaaggggaatttggaattgctggaacaaaggaaggcaatggagaagaatatgctttctatggcacaagagatcgagcagatgcgaggcgaattagctaattttgaagttagaccaaggggcccaggtggagcatatgggatgcagattgggagttcggaagtgaccttcactaagaacccatatgaagatggttataatgcttatgtgggggttcctgagaaagatcctttgcatcctcctgaatatgcttcatgggggacatatgacaggagtcgccttcagtaccgctaagaccagaacttagtcattggagaaagaattgccttctaggttttaatggacatgtcttgtcgtttacagtaccgaagctttatgcctgctgcttggttttccattaagagttgtcctttttaatgcttctaatcgtaactttttccattacaaactggctagattattaaactattggtaccaagatgtccagcaatgtgcggaaagcaccttacatacatgtgattttgcgtgtc

SEQ ID NO: 2950 - protein, 350 aa, Zea mays subsp. mays
  peptide (1)..(350): Ceres Seq. ID no. 12408248
MSERGRLAGRLIDNRSRGYHVVPLVEDPRGHPEVLVDGDRRGYSDIRGVQQRRGYPDTHLLEEPRGYPGVRVVDHRGYPGSRGVDERRAYPELHQGSRMRAAPPPYPAAFEDELELQEVELRRLSAHNRALVEERELLSREIQAGKDEVRHLNVIIADINTEKEAYISKLMDKRRKLEAELGASEHLRDEVRHLRGEIDKLVTARKELSAEAASLVEELNREQSVKQQLPVLKTEIDGLQQELVHVRTACGLEQKGNLELLEQRKAMEKNMLSMAQEIEQMRGELANFEVRPRGPGGAYGMQIGSSEVTFTKNPYEDGYNAYVGVPEKDPLHPPEYASWGTYDRSRLQYR

SEQ ID NO: 2951 - protein, 252 aa, Zea mays subsp. mays
  peptide (1)..(252): Ceres Seq. ID no. 12408249
MRAAPPPYPAAFEDELELQEVELRRLSAHNRALVEERELLSREIQAGKDEVRHLNVIIADINTEKEAYISKLMDKRRKLEAELGASEHLRDEVRHLRGEIDKLVTARKELSAEAASLVEELNREQSVKQQLPVLKTEIDGLQQELVHVRTACGLEQKGNLELLEQRKAMEKNMLSMAQEIEQMRGELANFEVRPRGPGGAYGMQIGSSEVTFTKNPYEDGYNAYVGVPEKDPLHPPEYASWGTYDRSRLQYR

SEQ ID NO: 2952 - protein, 180 aa, Zea mays subsp. mays
  peptide (1)..(180): Ceres Seq. ID no. 12408250
MDKRRKLEAELGASEHLRDEVRHLRGEIDKLVTARKELSAEAASLVEELNREQSVKQQLPVLKTEIDGLQQELVHVRTACGLEQKGNLELLEQRKAMEKNMLSMAQEIEQMRGELANFEVRPRGPGGAYGMQIGSSEVTFTKNPYEDGYNAYVGVPEKDPLHPPEYASWGTYDRSRLQYR

SEQ ID NO: 2953 - DNA, 1869 bp, Zea mays subsp. mays
  misc_feature (1)..(1869): Ceres Seq. ID no. 12364442
  misc_feature (1)..(1869): Ortholog of  Ceres SEQ ID NO 14310547 as cited in SEQ ID NO 55132
  misc_feature (1)..(1869): Ortholog of  Ceres SEQ ID NO 13596261 as cited in SEQ ID NO 67817
  misc_feature (1)..(1869): Ortholog of  Ceres SEQ ID NO 13662360 as cited in SEQ ID NO 68830
gcacgagaccattacctagaacatcctaatcgcaaaataaagcgacggggcccttgcgctgggcgcggagactggagagggcgagagtcctcccatccacaagttcttagcttttgcgagattgagatccggctggggacagaccgacagaggaaggtgaattgtgggaaagaggacagaaaaatggggattggagatggatcttcaaatgggaaccagcaaccggtgcataaggaaatacgagatgagaccacaccacttcttccagtcaaggtggaggaggacgaggggtttcatgagttcaatggagcttcattctctggggcagttttcaatctgtcgaccaccatagttggggctggaattatggctcttccagcaagtatcaagatgctgggcatcatcccggggattctgttgatcatccttgtggcactgctcacagaggcatccatcgacatgcttgtaaggtgcagccaccagggcaagattacatcatatgggtggctgatgggcgaggttttcgggcagtgggggagaattgcgctgcaggcctccgtcatcataaacaatgttggcgtgctaattgtttacatgattatcattggtgatgtattatctggaacaacatcaggcgatgttcatcatcgtggtatattggagggctggtttggagctcatttgtggaattctcgtgccattgttcttcttgccacagctcttttggtgttcgctccgttggtgagctttaagcgcttggattcattaagatacacatctgcgctatcagttgccctggcagtagtttttgtcgtaattactgctgggattgccatcatcaaactcttcaatggaactgtagcgatgcccaaactttttccagaattagatggtcttaattctatctggaatctttttacagctgtccctgttcttgttacggcctatatctgccactataacgttcacagcattgacaatgaacttgaagacagaacacagatcaagccgattgtgcgaacatcgctgttcctgtgctccagtgtttacattgccacaagtttctttgcttatctcctcttcggtgaaggcacactggacgacgtgctcgccaactttgacgcaaatcttggcattccattcagttcagtcttcgatgacatagtgcgagtgagctatgcagcacatgtcatgcttgtctttcccattgtcttctttgccctccggctcaacttggatgggttgctcttccccacgtcaaggcacatctctcgtgacaacaagagattcgccatcatcaccgtctctctcctcgcagtaatttatcttgctgccattctcataccaagcatctgggacgcgttccagtttactggtgccacagctgctgtcctgattggttttatatttcctgccatggtcatacttagggattcttacggaatcgcgagcaagcgcgacaagattctggctgtaaccatgatcgtgcttgctgtcctgtcaaattctgtcgccctatacagtgacgcgatgaacatcttccgtaagaaggaagtggcctgatctcagatttcaaaagtagtcagtgctggatgaagaatggtctcgcaatgcaagactcgatggtacgaaggaaaacgatgcgcttggattccgtgaaggaacgatttctttgtcagcacctcagaatttggccacttgaaagaatctgatgcttgaagtttcctggttctgtgtacacaagtcggctcaatgtcagaattgagccgcttgaaatatatttagttatattctatgcggagagtaggtcttggaaacagccttttccacaataatgtacagttattatgccaatttctgagttcagtt

SEQ ID NO: 2954 - protein, 520 aa, Zea mays subsp. mays
  peptide (1)..(520): Ceres Seq. ID no. 12364443
ARDHYLEHPNRKIKRRGPCAGRGDWRGRESSHPQVLSFCEIEIRLGTDRQRKVNCGKEDRKMGIGDGSSNGNQQPVHKEIRDETTPLLPVKVEEDEGFHEFNGASFSGAVFNLSTTIVGAGIMALPASIKMLGIIPGILLIILVALLTEASIDMLVRCSHQGKITSYGWLMGEVFGQWGRIALQASVIINNVGVLIVYMIIIGDVLSGTTSGDVHHRGILEGWFGAHLWNSRAIVLLATALLVFAPLVSFKRLDSLRYTSALSVALAVVFVVITAGIAIIKLFNGTVAMPKLFPELDGLNSIWNLFTAVPVLVTAYICHYNVHSIDNELEDRTQIKPIVRTSLFLCSSVYIATSFFAYLLFGEGTLDDVLANFDANLGIPFSSVFDDIVRVSYAAHVMLVFPIVFFALRLNLDGLLFPTSRHISRDNKRFAIITVSLLAVIYLAAILIPSIWDAFQFTGATAAVLIGFIFPAMVILRDSYGIASKRDKILAVTMIVLAVLSNSVALYSDAMNIFRKKEVA

SEQ ID NO: 2955 - protein, 459 aa, Zea mays subsp. mays
  peptide (1)..(459): Ceres Seq. ID no. 12364444
MGIGDGSSNGNQQPVHKEIRDETTPLLPVKVEEDEGFHEFNGASFSGAVFNLSTTIVGAGIMALPASIKMLGIIPGILLIILVALLTEASIDMLVRCSHQGKITSYGWLMGEVFGQWGRIALQASVIINNVGVLIVYMIIIGDVLSGTTSGDVHHRGILEGWFGAHLWNSRAIVLLATALLVFAPLVSFKRLDSLRYTSALSVALAVVFVVITAGIAIIKLFNGTVAMPKLFPELDGLNSIWNLFTAVPVLVTAYICHYNVHSIDNELEDRTQIKPIVRTSLFLCSSVYIATSFFAYLLFGEGTLDDVLANFDANLGIPFSSVFDDIVRVSYAAHVMLVFPIVFFALRLNLDGLLFPTSRHISRDNKRFAIITVSLLAVIYLAAILIPSIWDAFQFTGATAAVLIGFIFPAMVILRDSYGIASKRDKILAVTMIVLAVLSNSVALYSDAMNIFRKKEVA

SEQ ID NO: 2956 - protein, 398 aa, Zea mays subsp. mays
  peptide (1)..(398): Ceres Seq. ID no. 12364445
MALPASIKMLGIIPGILLIILVALLTEASIDMLVRCSHQGKITSYGWLMGEVFGQWGRIALQASVIINNVGVLIVYMIIIGDVLSGTTSGDVHHRGILEGWFGAHLWNSRAIVLLATALLVFAPLVSFKRLDSLRYTSALSVALAVVFVVITAGIAIIKLFNGTVAMPKLFPELDGLNSIWNLFTAVPVLVTAYICHYNVHSIDNELEDRTQIKPIVRTSLFLCSSVYIATSFFAYLLFGEGTLDDVLANFDANLGIPFSSVFDDIVRVSYAAHVMLVFPIVFFALRLNLDGLLFPTSRHISRDNKRFAIITVSLLAVIYLAAILIPSIWDAFQFTGATAAVLIGFIFPAMVILRDSYGIASKRDKILAVTMIVLAVLSNSVALYSDAMNIFRKKEVA

SEQ ID NO: 2957 - DNA, 1596 bp, Zea mays subsp. mays
  misc_feature (1)..(1596): Ceres Seq. ID no. 12345281
  misc_feature (1)..(1596): Ortholog of  Ceres SEQ ID NO 13593889 as cited in SEQ ID NO 53305
  misc_feature (1)..(1596): Ortholog of  Ceres SEQ ID NO 13581959 as cited in SEQ ID NO 56156
acgaactggaatcatctccgcctcgccacctcttcatcttcttccccagtagccgccgccaccaccactgcagcagccaaaccacgtgacacctcccgcgccgctcaaccccacagcatccgttgccaccgccgctcacctccccggcgctcccggctacaaccactgcaagcatgaggcagccaaccagcgcgggcggcgacgctgggttcttgcgcgcggaccagatcgacctcaagagcctggacgagcagctcgagcgccacctcggacatcccgcggagcgggtagttggcccagtctctgggacagggagccgccgcggcgaaacggccaagctgggtccggaggagctgacgccactgcagcggtgccgtgaggactgggagatcgaccctaccaagctcatcatcaagggcgtcatcgcgcgcggcacctttggcaccgtccaccgcggcgtctacgacggccaggacgtcgctgtaaaattgcttgactggggcgaagatggccatagatcagaacaagaaattggtgcactaagagcagcgtttgcacaagaggtcgctgtctggcataagcttgagcatccaaacgttactaagtttattggggctataatgggcgcaagagatttaaatatacaaacggaacatggacagcttggcatgccaagcaatatttgctgtgttgttgttgagtaccttgctggaggtgcgctgaaaaattttctgataaagaacaggagaaggaaacttgcctttaaagttgtggtccaaatagctcttgaccttgccaggggattatgctacctccactcaaagaaaatagtgcaccgtgatgtcaagactgaaaacatgcttctggacaagacgagaacggtaaagatcgctgattttggtgttgctcgagtcgaggcttcaaatcctagcgatatgacgggagaaacagggacgcttggttacatggctcctgaggttctcaatggccatgcttacaacaggaagtgtgacgtgtacagctttgggatctgcctgtgggagatatactgctgtgacatgccgtaccctgatctcagtttttctgaggtcacctctgccgtcgttcgccagaatctgaggcctgagataccgcgctgctgcccgagctcgctagcgaatgtgatgaagcgatgctgggacgcgaacccggacaagcgtcccgagatggcggaggtggtgtccatgctggaggcgatcgacacgtccaagggtggcggcatgatccctaaggaccagacgcagggctgcctctcgtgcttccgccagtaccgaggtccctaacgcagggttgtttatttatacccggtgaaatgatgatattggtctctacactacaactcagtgtaatctaatcgcagaagtggctatataatggagaagcttatcattgcttgccatgggtgtaaatggatggggcggggtggttgacgattggtgtgcttgtatgctcgcttcgagttataatgcttgctgtaagttaaggtgtggacggagttgctgttgccgtttgctcacatcgttaaattcgtgggcgtgacatgaagcaaggttatgt

SEQ ID NO: 2958 - protein, 382 aa, Zea mays subsp. mays
  peptide (1)..(382): Ceres Seq. ID no. 12345282
MRQPTSAGGDAGFLRADQIDLKSLDEQLERHLGHPAERVVGPVSGTGSRRGETAKLGPEELTPLQRCREDWEIDPTKLIIKGVIARGTFGTVHRGVYDGQDVAVKLLDWGEDGHRSEQEIGALRAAFAQEVAVWHKLEHPNVTKFIGAIMGARDLNIQTEHGQLGMPSNICCVVVEYLAGGALKNFLIKNRRRKLAFKVVVQIALDLARGLCYLHSKKIVHRDVKTENMLLDKTRTVKIADFGVARVEASNPSDMTGETGTLGYMAPEVLNGHAYNRKCDVYSFGICLWEIYCCDMPYPDLSFSEVTSAVVRQNLRPEIPRCCPSSLANVMKRCWDANPDKRPEMAEVVSMLEAIDTSKGGGMIPKDQTQGCLSCFRQYRGP

SEQ ID NO: 2959 - protein, 233 aa, Zea mays subsp. mays
  peptide (1)..(233): Ceres Seq. ID no. 12345283
MGARDLNIQTEHGQLGMPSNICCVVVEYLAGGALKNFLIKNRRRKLAFKVVVQIALDLARGLCYLHSKKIVHRDVKTENMLLDKTRTVKIADFGVARVEASNPSDMTGETGTLGYMAPEVLNGHAYNRKCDVYSFGICLWEIYCCDMPYPDLSFSEVTSAVVRQNLRPEIPRCCPSSLANVMKRCWDANPDKRPEMAEVVSMLEAIDTSKGGGMIPKDQTQGCLSCFRQYRGP

SEQ ID NO: 2960 - protein, 217 aa, Zea mays subsp. mays
  peptide (1)..(217): Ceres Seq. ID no. 12345284
MPSNICCVVVEYLAGGALKNFLIKNRRRKLAFKVVVQIALDLARGLCYLHSKKIVHRDVKTENMLLDKTRTVKIADFGVARVEASNPSDMTGETGTLGYMAPEVLNGHAYNRKCDVYSFGICLWEIYCCDMPYPDLSFSEVTSAVVRQNLRPEIPRCCPSSLANVMKRCWDANPDKRPEMAEVVSMLEAIDTSKGGGMIPKDQTQGCLSCFRQYRGP

SEQ ID NO: 2961 - DNA, 2062 bp, Zea mays subsp. mays
  misc_feature (1)..(2062): Ceres Seq. ID no. 12373375
  misc_feature (1)..(2062): Ortholog of  Ceres SEQ ID NO 15175923 as cited in SEQ ID NO 54037
  misc_feature (1)..(2062): Ortholog of  Ceres SEQ ID NO 14303366 as cited in SEQ ID NO 54418
  misc_feature (1)..(2062): Ortholog of  Ceres SEQ ID NO 13503610 as cited in SEQ ID NO 62416
  misc_feature (1)..(2062): Ortholog of  Ceres SEQ ID NO 13657610 as cited in SEQ ID NO 66165
  misc_feature (1)..(2062): Ortholog of  Ceres SEQ ID NO 13598312 as cited in SEQ ID NO 68448
  misc_feature (1)..(2062): Ortholog of  Ceres SEQ ID NO 13596100 as cited in SEQ ID NO 68573
  misc_feature (1)..(2062): Ortholog of  Ceres SEQ ID NO 15179123 as cited in SEQ ID NO 0
ctctcactaccaccaccactgccccggatccataccagctgcagcagcagcgcgcgcgagctagcttcggtcggtcgatagatcgatcgatcgctcggccatcatggcgcgggaggagcaggcgctgctgtcgacggagatcgtgaaccgcggcgtggagccgtcgggcccggacgccggctcgccggccttctcggtgcgcgtgcgccgccgcctgccggacttcctgcagtcggtgaacctcaagtacgtgcgcctcgggtaccactacctcatcagccacggcgtgtacctggccaccatccccgtcatcgtgctggtgtgcggcgccgagctgggcagcctcagccgcgacgagctgtggcgcaaggtgtggggggaggccacctacgacctcgccaccgtgctcgccttcctcgccgtcctcgccttcaccatctccgtctacatcatgtccaggcccaggcccgtgtacctcatcgacttcgcatgctacaagccggccgacgagctcaaggtgtccaaggcggagttcatcgacctggcgcgcaagtccggcaagttcgacgaggacagcctggcgttccagtcgcgtctgctggccaagtccggcatcggcgacgagtcgtacatgccgcgctgcgtgttcgagcccaacgccagctgcgccaccatgaaggagggccgcgccgaggcgtccacggccatgttcgcggcgctggacgagctgttcgacaagtgccgcgtccggcccaaggacgtgggcgtgctggtggtcaactgcagcctcttcaacccgacgccctccctgtccgccatgatcgtcaaccactacaagatgcgcggcaacatcctgagctacaacctgggggggcatgggctgcagcggcgggcgtcatcgccatcgatctggcccgcgacatgctccaggccagcggcgcgggcctggccgtggtggtcagcacggaggccgtctccttcacgtggtaccccgggaagcggcgctccatgctcatcccgaacgccttcttccgggccggctgcgcggcggtgctgctgtccaaccggcgccgcgacttccaccgcgccaagtaccagctggagcacgtggtgcgcacgcacaagggcgcggacgaccgcgccttccgctccgtgtaccaggaggaggacgagcagcggatcaagggcctgtccatcagccgcgacctgctggaggtgggcggccacgcgctcaagaccaacatcaccacgctggggcccctggtgctgcccttctccgagcagctgctcttcttcgcgggcgtgctgttccgccacctgttcccgtccaaggcctccacgccggcgccgccgaccaccccaggggacgcctcggccgccgcgccctacatcccggacttcaagcgcgcgttcgagcacttctgcatgcacgcggccagccgcgacgtgctggagcacctgcagagcaacctgggcctgcgcaacgccgacctggaggcctcccgcgccgcgctgcaccgcttcggcaacacctcaagcagcagcatctggtacgagctggcgtacctggaggccaagggccgcgtccgccgcggcgaccgcgtctggcagctcgccttcgggtcgggcttcaagtgcaacagcgcggtgtggcgcgccgtccgccgcgtgcgccgccccgcgcgcagcccctggctgggactgcgtcgaccagtacccggcgcgcatggacgcctagcacgtacctgcaatgcagtggctgctatctatctatcgctcgcttcgctaccactaccagtgcagtgctgcacttcaccgatggatgatggatcggatatgatatggtataggacgcggtcggtcgatttgcatgcatgcacaagtgttagtataccgttctgaaggtacgtttgaactttgttcgtttgtattgcactattgcttgttgtttaagtagcggttaagggaggcatacgtacgctgtactaccataatggaagtactccggtccggtcctgtcctgtgtgagccttatgtacgtgcaattttaatgtgttttggt

SEQ ID NO: 2962 - protein, 544 aa, Zea mays subsp. mays
  peptide (1)..(544): Ceres Seq. ID no. 12373376
MAREEQALLSTEIVNRGVEPSGPDAGSPAFSVRVRRRLPDFLQSVNLKYVRLGYHYLISHGVYLATIPVIVLVCGAELGSLSRDELWRKVWGEATYDLATVLAFLAVLAFTISVYIMSRPRPVYLIDFACYKPADELKVSKAEFIDLARKSGKFDEDSLAFQSRLLAKSGIGDESYMPRCVFEPNASCATMKEGRAEASTAMFAALDELFDKCRVRPKDVGVLVVNCSLFNPTPSLSAMIVNHYKMRGNILSYNLGGHGLQRRASSPSIWPATCSRPAARAWPWWSARRPSPSRGTPGSGAPCSSRTPSSGPAARRCCCPTGAATSTAPSTSWSTWCARTRARTTAPSAPCTRRRTSSGSRACPSAATCWRWAATRSRPTSPRWGPWCCPSPSSCSSSRACCSATCSRPRPPRRRRRPPQGTPRPPRPTSRTSSARSSTSACTRPAATCWSTCRATWACATPTWRPPAPRCTASATPQAAASGTSWRTWRPRAASAAATASGSSPSGRASSATARCGAPSAACAAPRAAPGWDCVDQYPARMDA

SEQ ID NO: 2963 - protein, 470 aa, Zea mays subsp. mays
  peptide (1)..(470): Ceres Seq. ID no. 12373377
MLQAGRRAQGVQGGVHRPGAQVRQVRRGQPGVPVASAGQVRHRRRVVHAALRVRAQRQLRHHEGGPRRGVHGHVRGAGRAVRQVPRPAQGRGRAGGQLQPLQPDALPVRHDRQPLQDARQHPELQPGGAWAAAAGVIAIDLARDMLQASGAGLAVVVSTEAVSFTWYPGKRRSMLIPNAFFRAGCAAVLLSNRRRDFHRAKYQLEHVVRTHKGADDRAFRSVYQEEDEQRIKGLSISRDLLEVGGHALKTNITTLGPLVLPFSEQLLFFAGVLFRHLFPSKASTPAPPTTPGDASAAAPYIPDFKRAFEHFCMHAASRDVLEHLQSNLGLRNADLEASRAALHRFGNTSSSSIWYELAYLEAKGRVRRGDRVWQLAFGSGFKCNSAVWRAVRRVRRPARSPWLGLRRPVPGAHGRLARTCNAVAAIYLSLASLPLPVQCCTSPMDDGSDMIWYRTRSVDLHACTSVSIPF

SEQ ID NO: 2964 - protein, 428 aa, Zea mays subsp. mays
  peptide (1)..(428): Ceres Seq. ID no. 12373378
MSRPRPVYLIDFACYKPADELKVSKAEFIDLARKSGKFDEDSLAFQSRLLAKSGIGDESYMPRCVFEPNASCATMKEGRAEASTAMFAALDELFDKCRVRPKDVGVLVVNCSLFNPTPSLSAMIVNHYKMRGNILSYNLGGHGLQRRASSPSIWPATCSRPAARAWPWWSARRPSPSRGTPGSGAPCSSRTPSSGPAARRCCCPTGAATSTAPSTSWSTWCARTRARTTAPSAPCTRRRTSSGSRACPSAATCWRWAATRSRPTSPRWGPWCCPSPSSCSSSRACCSATCSRPRPPRRRRRPPQGTPRPPRPTSRTSSARSSTSACTRPAATCWSTCRATWACATPTWRPPAPRCTASATPQAAASGTSWRTWRPRAASAAATASGSSPSGRASSATARCGAPSAACAAPRAAPGWDCVDQYPARMDA

SEQ ID NO: 2965 - DNA, 1624 bp, Zea mays subsp. mays
  misc_feature (1)..(1624): Ceres Seq. ID no. 13492681
  misc_feature (1)..(1624): Ortholog of  Ceres SEQ ID NO 14303850 as cited in SEQ ID NO 53464
  misc_feature (1)..(1624): Ortholog of  Ceres SEQ ID NO 14310452 as cited in SEQ ID NO 54426
  misc_feature (1)..(1624): Ortholog of  Ceres SEQ ID NO 15174626 as cited in SEQ ID NO 59393
  misc_feature (1)..(1624): Ortholog of  Ceres SEQ ID NO 15169663 as cited in SEQ ID NO 64659
  misc_feature (1)..(1624): Ortholog of  Ceres SEQ ID NO 13656177 as cited in SEQ ID NO 64997
aacttggccccaaatcgtggagtggaaaccctactcgtccccttccgcatcgccgcccaattcccccacccaattcccactctccgctcgacagatccatacatgatgggagaggccaaggagaacgacgtttatgaggaggagctcctggactacgaggaggacgacgacaagacggtcgatggctccgctgctaagcccaccggagaggtcgcaaagaagggctacgtcgggatccacagttccggtttcagagacttcctgctcaagccagagctgctccgtgctatccaggattgtggttttgagcatccttccgaagtgcaacacgagtgtatccctcaagccattcttggaatggatgtcatctgtcaagctaaatctgggatggggaaaactgctgtttttgtcctttcatccctccaacaaattgaccctgttgcgggtcaggtagcagcacttgtactgtgccacacaagggaactggcttatcagatatgccacgaatttgagaggttcagcaaatatcttactgaagttaaagttgctgtcttctatggaggtgttcacatcaggaagcataaagatttgttgaagaatgaatgccctcatattgtggttggcacgcctggtaggatacttgctcttgccagggataaggatctctccttgaagaatgtgaggcacttcattcttgatgaatgtgacaaaatgctggaatcacttgacatgcggagagatgttcaggagatcttcaaaatgactcctcatgataagcaagtcatgatgttttcagcaacgctcagcaaggagatccgtcctgtatgcaagaaatttatgcaagatccgatggaaatatatgttgatgatgaggcaaagttgaccctccatggtcttgtacagcactatataaaacttagcgaggcagagaagaaccggaaactgaatgatctcttggacgctcttgatttcaaccaagttgtgatattcgtgaagagtgttagcagagctgccgaactgaataagttactttgtgaatgcaacttcccatcaatctgcattcattctggaatgactcaggaagaaaggctaacaagatataagaacttcaaggaaggccacaagaaaattcttgtggctacagatttagttggcaggggcattgacattgagcgtgtcaacattgtgataaactatgacatgccagactcagctgatacttatttgcacagggttggaagggctggacgttttggcacgaagggacttgcaattacctttgtttcctctgcttcggattctgatgttcttaaccaggtgcaagaaaggtttgaggtagacataaaggaactgcctgagcaaattgacacctcgacctacatgccatcataaatgggaaggacaactgagaagagaggaggataggggagtgagcagccgtctggagatggttacctttgaactatccgatctggaggatttgatttgcctcctttgtgtactttaaaaagggcagccaggatgatgatctgtattttaagacaatgctgtctgtttgggtttaggattttgctttgtcgaaaactagcacacttattgtactactgagcagcatatttgtttt

SEQ ID NO: 2966 - protein, 463 aa, Zea mays subsp. mays
  peptide (1)..(463): Ceres Seq. ID no. 13492682
NLAPNRGVETLLVPFRIAAQFPHPIPTLRSTDPYMMGEAKENDVYEEELLDYEEDDDKTVDGSAAKPTGEVAKKGYVGIHSSGFRDFLLKPELLRAIQDCGFEHPSEVQHECIPQAILGMDVICQAKSGMGKTAVFVLSSLQQIDPVAGQVAALVLCHTRELAYQICHEFERFSKYLTEVKVAVFYGGVHIRKHKDLLKNECPHIVVGTPGRILALARDKDLSLKNVRHFILDECDKMLESLDMRRDVQEIFKMTPHDKQVMMFSATLSKEIRPVCKKFMQDPMEIYVDDEAKLTLHGLVQHYIKLSEAEKNRKLNDLLDALDFNQVVIFVKSVSRAAELNKLLCECNFPSICIHSGMTQEERLTRYKNFKEGHKKILVATDLVGRGIDIERVNIVINYDMPDSADTYLHRVGRAGRFGTKGLAITFVSSASDSDVLNQVQERFEVDIKELPEQIDTSTYMPS

SEQ ID NO: 2967 - protein, 429 aa, Zea mays subsp. mays
  peptide (1)..(429): Ceres Seq. ID no. 13492683
MMGEAKENDVYEEELLDYEEDDDKTVDGSAAKPTGEVAKKGYVGIHSSGFRDFLLKPELLRAIQDCGFEHPSEVQHECIPQAILGMDVICQAKSGMGKTAVFVLSSLQQIDPVAGQVAALVLCHTRELAYQICHEFERFSKYLTEVKVAVFYGGVHIRKHKDLLKNECPHIVVGTPGRILALARDKDLSLKNVRHFILDECDKMLESLDMRRDVQEIFKMTPHDKQVMMFSATLSKEIRPVCKKFMQDPMEIYVDDEAKLTLHGLVQHYIKLSEAEKNRKLNDLLDALDFNQVVIFVKSVSRAAELNKLLCECNFPSICIHSGMTQEERLTRYKNFKEGHKKILVATDLVGRGIDIERVNIVINYDMPDSADTYLHRVGRAGRFGTKGLAITFVSSASDSDVLNQVQERFEVDIKELPEQIDTSTYMPS

SEQ ID NO: 2968 - protein, 428 aa, Zea mays subsp. mays
  peptide (1)..(428): Ceres Seq. ID no. 13492684
MGEAKENDVYEEELLDYEEDDDKTVDGSAAKPTGEVAKKGYVGIHSSGFRDFLLKPELLRAIQDCGFEHPSEVQHECIPQAILGMDVICQAKSGMGKTAVFVLSSLQQIDPVAGQVAALVLCHTRELAYQICHEFERFSKYLTEVKVAVFYGGVHIRKHKDLLKNECPHIVVGTPGRILALARDKDLSLKNVRHFILDECDKMLESLDMRRDVQEIFKMTPHDKQVMMFSATLSKEIRPVCKKFMQDPMEIYVDDEAKLTLHGLVQHYIKLSEAEKNRKLNDLLDALDFNQVVIFVKSVSRAAELNKLLCECNFPSICIHSGMTQEERLTRYKNFKEGHKKILVATDLVGRGIDIERVNIVINYDMPDSADTYLHRVGRAGRFGTKGLAITFVSSASDSDVLNQVQERFEVDIKELPEQIDTSTYMPS

SEQ ID NO: 2969 - DNA, 1748 bp, Zea mays subsp. mays
  misc_feature (1)..(1748): Ceres Seq. ID no. 12384166
  misc_feature (1)..(1748): Ortholog of  Ceres SEQ ID NO 12609146 as cited in SEQ ID NO 52118
  misc_feature (1)..(1748): Ortholog of  Ceres SEQ ID NO 14316158 as cited in SEQ ID NO 52413
  misc_feature (1)..(1748): Ortholog of  Ceres SEQ ID NO 13638136 as cited in SEQ ID NO 58644
  misc_feature (1)..(1748): Ortholog of  Ceres SEQ ID NO 15177947 as cited in SEQ ID NO 60308
  misc_feature (1)..(1748): Ortholog of  Ceres SEQ ID NO 12587035 as cited in SEQ ID NO 63605
  misc_feature (1)..(1748): Ortholog of  Ceres SEQ ID NO 15225826 as cited in SEQ ID NO 64774
attgcgctgcactgctcccacacgctcggattcctgctcgctttctcctcccacgattccatcgccagccgccccttttcccttcctttttcccttgctcgcccgcccgcccgcccaggactcgtccttcgcgcttcttcgccagctcgtccttcgcgcttcttcgccagccgtcggcgagagagggtgagaggatcctacgtgccttgtacgctcgctcgggagccggccgggatcgcgccgcgccaccgtaccccgccccggacatgtgcgtggaggggctggacgacgcagcagggaggctcggcttcggagaccaggagaccgacaggcgcgccggtgatgcgatggagagagtttgtgagaacacagtggctgttgacttcaagcagactaagctgaacaactttgtgccattcatccggtcaggggaatggtctgatattggaggtcgcgattacatggaagatgcccatgtgtgcatctctgatctggcaaagaattttggctatgactcagtcgaagatgaagtaatttctttctatggggtgtttgatggccataatggcaaagatgctgctcattatgtccgtgataacttgccacgggtcatcgtggaagacgctgattttcctcttgagcttgaaaaggtagtaaagaggtcatttgtgcaaactgatagtaagtttgcagagaaattctctcaccacaggggactttcttctggaacgacagcacttacagcaatgatttttggaaggtcccttctggttgcgaatgccggtgactgcagagcggtgctctcgcggcgtggcactgccattgagatgtccaaggaccacaggccttgctgcatgaatgaaaggaagcgcgtagagtcacttggcggctacgttgacgacggttacctgaacggtcagctggcagtgaccagagcgctcggtgactggcatctggagggcatgaaagaggtgggcgagccaggagggcccctgagcgccgaaccagagctgaagatggtcacgctgacgaaggacgacgagttcctgataatcggcagcgacggcatctgggacttcttctcgagccagaacgccgtggacttcgcgcggcggaggctccaggaccacaacgacctgaggctgtgctgcagggagatcgtggacgaggcggtgcggcggggcgccagcgacaacttgacggcggtgatggtctcgttccactcggacgcccctcccccgagccgtgccaacaagaggaccggcagggtcacgcggagcatatcggctgaggggcttcacagcctcagagtgctcctggaaggccagtgacgtcgcccggcggcgccattgctgcccgttcgtccctgatgctgtgctacgttgctgatgaggtgttaactgtaagtagcggtttccggtatcttggtgcttgctcttcttcttccgctgagggcgggcgactattcttgtccttcctccgacaataaaccaacgagcctgagatctcactgtgagacgctgtaaataagcaaatatggaagttggagctcgtcattaaggacgagttagcggtgtgcatccagggggcttttgtggctcagtatgtgatgccttttcgcccctcctgattttctgtaaataaaacgatgctgggagccatcggtgtgattgaactagtgttctgttatgcgtgctccccatcgattcaagacctacagtttttatttactactagtacaagtcttt

SEQ ID NO: 2970 - protein, 442 aa, Zea mays subsp. mays
  peptide (1)..(442): Ceres Seq. ID no. 12384167
CAALLPHARIPARFLLPRFHRQPPLFPSFFPCSPARPPRTRPSRFFASSSFALLRQPSAREGERILRALYARSGAGRDRAAPPYPAPDMCVEGLDDAAGRLGFGDQETDRRAGDAMERVCENTVAVDFKQTKLNNFVPFIRSGEWSDIGGRDYMEDAHVCISDLAKNFGYDSVEDEVISFYGVFDGHNGKDAAHYVRDNLPRVIVEDADFPLELEKVVKRSFVQTDSKFAEKFSHHRGLSSGTTALTAMIFGRSLLVANAGDCRAVLSRRGTAIEMSKDHRPCCMNERKRVESLGGYVDDGYLNGQLAVTRALGDWHLEGMKEVGEPGGPLSAEPELKMVTLTKDDEFLIIGSDGIWDFFSSQNAVDFARRRLQDHNDLRLCCREIVDEAVRRGASDNLTAVMVSFHSDAPPPSRANKRTGRVTRSISAEGLHSLRVLLEGQ

SEQ ID NO: 2971 - protein, 354 aa, Zea mays subsp. mays
  peptide (1)..(354): Ceres Seq. ID no. 12384168
MCVEGLDDAAGRLGFGDQETDRRAGDAMERVCENTVAVDFKQTKLNNFVPFIRSGEWSDIGGRDYMEDAHVCISDLAKNFGYDSVEDEVISFYGVFDGHNGKDAAHYVRDNLPRVIVEDADFPLELEKVVKRSFVQTDSKFAEKFSHHRGLSSGTTALTAMIFGRSLLVANAGDCRAVLSRRGTAIEMSKDHRPCCMNERKRVESLGGYVDDGYLNGQLAVTRALGDWHLEGMKEVGEPGGPLSAEPELKMVTLTKDDEFLIIGSDGIWDFFSSQNAVDFARRRLQDHNDLRLCCREIVDEAVRRGASDNLTAVMVSFHSDAPPPSRANKRTGRVTRSISAEGLHSLRVLLEGQ

SEQ ID NO: 2972 - protein, 327 aa, Zea mays subsp. mays
  peptide (1)..(327): Ceres Seq. ID no. 12384169
MERVCENTVAVDFKQTKLNNFVPFIRSGEWSDIGGRDYMEDAHVCISDLAKNFGYDSVEDEVISFYGVFDGHNGKDAAHYVRDNLPRVIVEDADFPLELEKVVKRSFVQTDSKFAEKFSHHRGLSSGTTALTAMIFGRSLLVANAGDCRAVLSRRGTAIEMSKDHRPCCMNERKRVESLGGYVDDGYLNGQLAVTRALGDWHLEGMKEVGEPGGPLSAEPELKMVTLTKDDEFLIIGSDGIWDFFSSQNAVDFARRRLQDHNDLRLCCREIVDEAVRRGASDNLTAVMVSFHSDAPPPSRANKRTGRVTRSISAEGLHSLRVLLEGQ

SEQ ID NO: 2973 - DNA, 1613 bp, Zea mays subsp. mays
  misc_feature (1)..(1613): Ceres Seq. ID no. 12408053
  misc_feature (1)..(1613): Ortholog of  Ceres SEQ ID NO 12364737 as cited in SEQ ID NO 51089
  misc_feature (1)..(1613): Ortholog of  Ceres SEQ ID NO 14306553 as cited in SEQ ID NO 53121
  misc_feature (1)..(1613): Ortholog of  Ceres SEQ ID NO 12581561 as cited in SEQ ID NO 53617
  misc_feature (1)..(1613): Ortholog of  Ceres SEQ ID NO 14316263 as cited in SEQ ID NO 55294
  misc_feature (1)..(1613): Ortholog of  Ceres SEQ ID NO 13595567 as cited in SEQ ID NO 56760
  misc_feature (1)..(1613): Ortholog of  Ceres SEQ ID NO 14315035 as cited in SEQ ID NO 56880
  misc_feature (1)..(1613): Ortholog of  Ceres SEQ ID NO 13594147 as cited in SEQ ID NO 58975
  misc_feature (1)..(1613): Ortholog of  Ceres SEQ ID NO 15176751 as cited in SEQ ID NO 59719
  misc_feature (1)..(1613): Ortholog of  Ceres SEQ ID NO 13597380 as cited in SEQ ID NO 64054
  misc_feature (1)..(1613): Ortholog of  Ceres SEQ ID NO 12625474 as cited in SEQ ID NO 64169
  misc_feature (1)..(1613): Ortholog of  Ceres SEQ ID NO 13597502 as cited in SEQ ID NO 64681
  misc_feature (1)..(1613): Ortholog of  Ceres SEQ ID NO 15180805 as cited in SEQ ID NO 0
acctggccgctccatctcgcgtccaacaatcaattcggcgtcgctctcgtctcatcagtcatcactccgcgactgcgagcgagcgagcgaggcccttccgcgccacgcgcaatggacgctgctctgctcgtgaccgtcctcgtccccgcggtggcggcgctcctcgtcctcgggtccggggccgcgtccgcctcgccgccgcgcgccttcttcgtgttcggggactccctcgtggacaacggcaacaacaactacctcatgaccacggcgcgggccgacgcgccgccctacgggatcgacttccccacgcacctgcccacggggcggttctcccaacgggctcaacatccccgacatcatcagcgagcacctcggctcccagcccgcgctgccgtacctcagccccgacctccgcggcgaccagctgctcgtcggcgccaacttcgcgtccgccggcgtcggcatcctcaacgacaccggcatacagttcgtgaacatcatcgggatcgggcagcagctgcacaacttccaggactaccagcagaggctggccgcgttcgtcggcgacgacgcggcgaggcaggtcgtgagcaatgcgctcgtcctcatcacgctcggcggcaacgacttcgtcaacaactactacctggtgcccttctccttccgctcccgccagttcgccatccaagactacgtcccgtacctcatctccgagtacaggaaaatcctcacgcggctgtacgagctcggggcccgtcgcgtggtggtgacgggcaccgggatgatcgggtgcgtgccggcggagctggccatgcacagcatcgacggcgagtgcgcgcgcgacctcacggaggcggccgacctcttcaacccgcagctggtgcagatgctctccgacctcaacgcggccatcggcggcgacgtcttcatcgccgccaacaccaaccgcctcagcttcgacttcatgttcaacccgcaggactacgggttcgtgacggccaaggtggcgtgctgcgggcagggcccgtacaacgggatcgggctgtgcacgccggcgtccaacgtgtgccccaaccgggacgtgtacgcgtactgggacgcgttccaccccacggagcgcgccaaccggatcatcgtcgcccagttcatgcacggctccaccgaccacatcagccccatgaacatcagcaccatcctcgccatggacaacaggggggactaactagtcccgccgcgtgctgcctccacccatctcgtcattggttggttcacgccaagaggttttgctgcattgcatgtgtcatggagctggtggataacaagttttcgttgcacctttttgtgatttattagatgacgtgaattagtggtgaattgagccttattagagtgggttaaattaatacagctgtcccaagtttctttgctccagcagattgtttggggacagggctagctaggaacttcagaaattgctaagcggtactacctagccagtccgtccgatcatttcaagaaaattctcttgcactttgtagtgtgatcctgaacttttgggtacaaggtaccgacgattcaatgccaatgtatattttggtggctggggcacagtg

SEQ ID NO: 2974 - protein, 450 aa, Zea mays subsp. mays
  peptide (1)..(450): Ceres Seq. ID no. 12408054
TWPLHLASNNQFGVALVSSVITPRLRASERGPSAPRAMDAALLVTVLVPAVAALLVLGSGAASASPPRAFFVFGDSLVDNGNNNYLMTTARADAPPYGIDFPTHLPTGRFSQRAQHPRHHQRAPRLPARAAVPQPRPPRRPAARRRQLRVRRRRHPQRHRHTVREHHRDRAAAAQLPGLPAEAGRVRRRRRGEAGREQCARPHHARRQRLRQQLLPGALLLPLPPVRHPRLRPVPHLRVQENPHAAVRARGPSRGGDGHRDDRVRAGGAGHAQHRRRVRARPHGGGRPLQPAAGADALRPQRGHRRRRLHRRQHQPPQLRLHVQPAGLRVRDGQGGVLRAGPVQRDRAVHAGVQRVPQPGRVRVLGRVPPHGARQPDHRRPVHARLHRPHQPHEHQHHPRHGQQGGLTSPAACCLHPSRHWLVHAKRFCCIACVMELVDNKFSLHLFVIY

SEQ ID NO: 2975 - protein, 413 aa, Zea mays subsp. mays
  peptide (1)..(413): Ceres Seq. ID no. 12408055
MDAALLVTVLVPAVAALLVLGSGAASASPPRAFFVFGDSLVDNGNNNYLMTTARADAPPYGIDFPTHLPTGRFSQRAQHPRHHQRAPRLPARAAVPQPRPPRRPAARRRQLRVRRRRHPQRHRHTVREHHRDRAAAAQLPGLPAEAGRVRRRRRGEAGREQCARPHHARRQRLRQQLLPGALLLPLPPVRHPRLRPVPHLRVQENPHAAVRARGPSRGGDGHRDDRVRAGGAGHAQHRRRVRARPHGGGRPLQPAAGADALRPQRGHRRRRLHRRQHQPPQLRLHVQPAGLRVRDGQGGVLRAGPVQRDRAVHAGVQRVPQPGRVRVLGRVPPHGARQPDHRRPVHARLHRPHQPHEHQHHPRHGQQGGLTSPAACCLHPSRHWLVHAKRFCCIACVMELVDNKFSLHLFVIY

SEQ ID NO: 2976 - protein, 364 aa, Zea mays subsp. mays
  peptide (1)..(364): Ceres Seq. ID no. 12408056
MTTARADAPPYGIDFPTHLPTGRFSQRAQHPRHHQRAPRLPARAAVPQPRPPRRPAARRRQLRVRRRRHPQRHRHTVREHHRDRAAAAQLPGLPAEAGRVRRRRRGEAGREQCARPHHARRQRLRQQLLPGALLLPLPPVRHPRLRPVPHLRVQENPHAAVRARGPSRGGDGHRDDRVRAGGAGHAQHRRRVRARPHGGGRPLQPAAGADALRPQRGHRRRRLHRRQHQPPQLRLHVQPAGLRVRDGQGGVLRAGPVQRDRAVHAGVQRVPQPGRVRVLGRVPPHGARQPDHRRPVHARLHRPHQPHEHQHHPRHGQQGGLTSPAACCLHPSRHWLVHAKRFCCIACVMELVDNKFSLHLFVIY

SEQ ID NO: 2977 - DNA, 1467 bp, Zea mays subsp. mays
  misc_feature (1)..(1467): Ceres Seq. ID no. 12378238
  misc_feature (1)..(1467): Ortholog of  Ceres SEQ ID NO 13592961 as cited in SEQ ID NO 20522
  misc_feature (1)..(1467): Ortholog of  Ceres SEQ ID NO 12583469 as cited in SEQ ID NO 51031
  misc_feature (1)..(1467): Ortholog of  Ceres SEQ ID NO 13597389 as cited in SEQ ID NO 63426
  misc_feature (1)..(1467): Ortholog of  Ceres SEQ ID NO 14303071 as cited in SEQ ID NO 67114
  misc_feature (1)..(1467): Ortholog of  Ceres SEQ ID NO 13595998 as cited in SEQ ID NO 68161
agcatagcagcagcccattgcctgcctttcgcctctctctctctctctctctctctctctcacacacacaaccactcacactgccggttggtttcccttccgttgtggttggtgcgtacttagtggcggccggccatggcgcggaggaggggcttctcggcggtggtgccgccggcgtggctgccggcggtgctcctgtgcctggcaggcgcggcgtcgggcgagccgctgccgcagtactacaatgccatcttcagcttcggcgactccttctccgacacgggcaacttcgtcatcatcaactcgggcaagctgcccaacatgcccaagttcccgccgccgtacgcgaggtgctccaacggccgcctcgtcatcgacttcctggccgaggcgttcggtctcccgctgctccctccgtcggcgaacaagggcaccaacttcagccagggcgccaacttcgcggtgatgggcgcgacggcgcttgacctcaagtacttcaaggacaacaacgtgtggagcatcccgcccttcaacacgtccatgggcgtgcagctggagtggttccaggaggtgaagcgcagcatctgccccgacgaccccgccgcgtgccgcgccctgttcgggagggccctgttcgtgttcggcgagttcggcggcaacgactacagcttcgcgtggaaggcggactggtcgctggagaaggtgaagacgatggtgccggcggtggtggcgtcgctggtgggcggcgtggagcggctgctggacgagggcgcccgccacgtcgtggtgccgggcaacctccccgccggatgcatccccatcacgctcaccatgtacccgtccgaggaccgctccgagtacgacccgcgcaccggctgcctcaagaagtacaacagcgtcgcgctctaccacaacgccatgctccgcgtcgcgctcgaccgcctgcagcgccgccgcccggagtcccgcgtcgtctacgccgactactacacgccctacatacagttcgcgcgcacaccgcacctctacggctacaagcgcggcgctctgcgggcttgctgcggcggcggcgggccgtacaactacaacgtgagcgcgtcgtgcgggctccccggcgccaccacctgcgaggaccccgacgcgcacgtcagctgggacggcatccacctcaccgaggcgccctaccgcttcatcgccaacacctgggtcaagggcccctacgcgcacccgccgctcgccaccgtcgtgctcgaggacatggtcgactgatcctcttgtggtttggcacaagggaagagctgatatgtaacgtgaattccattcgttcatgtccatgtatattgggtaactaccggagcggagtaacaaaaaaaaatatatatgttagtcttttctgtttttttttcgtcgtgcacctgtgtgccgtgcagtcgcatagatcaatgaagaaaccactccagctgtttg

SEQ ID NO: 2978 - protein, 377 aa, Zea mays subsp. mays
  peptide (1)..(377): Ceres Seq. ID no. 12378239
MARRRGFSAVVPPAWLPAVLLCLAGAASGEPLPQYYNAIFSFGDSFSDTGNFVIINSGKLPNMPKFPPPYARCSNGRLVIDFLAEAFGLPLLPPSANKGTNFSQGANFAVMGATALDLKYFKDNNVWSIPPFNTSMGVQLEWFQEVKRSICPDDPAACRALFGRALFVFGEFGGNDYSFAWKADWSLEKVKTMVPAVVASLVGGVERLLDEGARHVVVPGNLPAGCIPITLTMYPSEDRSEYDPRTGCLKKYNSVALYHNAMLRVALDRLQRRRPESRVVYADYYTPYIQFARTPHLYGYKRGALRACCGGGGPYNYNVSASCGLPGATTCEDPDAHVSWDGIHLTEAPYRFIANTWVKGPYAHPPLATVVLEDMVD

SEQ ID NO: 2979 - protein, 315 aa, Zea mays subsp. mays
  peptide (1)..(315): Ceres Seq. ID no. 12378240
MPKFPPPYARCSNGRLVIDFLAEAFGLPLLPPSANKGTNFSQGANFAVMGATALDLKYFKDNNVWSIPPFNTSMGVQLEWFQEVKRSICPDDPAACRALFGRALFVFGEFGGNDYSFAWKADWSLEKVKTMVPAVVASLVGGVERLLDEGARHVVVPGNLPAGCIPITLTMYPSEDRSEYDPRTGCLKKYNSVALYHNAMLRVALDRLQRRRPESRVVYADYYTPYIQFARTPHLYGYKRGALRACCGGGGPYNYNVSASCGLPGATTCEDPDAHVSWDGIHLTEAPYRFIANTWVKGPYAHPPLATVVLEDMVD

SEQ ID NO: 2980 - protein, 267 aa, Zea mays subsp. mays
  peptide (1)..(267): Ceres Seq. ID no. 12378241
MGATALDLKYFKDNNVWSIPPFNTSMGVQLEWFQEVKRSICPDDPAACRALFGRALFVFGEFGGNDYSFAWKADWSLEKVKTMVPAVVASLVGGVERLLDEGARHVVVPGNLPAGCIPITLTMYPSEDRSEYDPRTGCLKKYNSVALYHNAMLRVALDRLQRRRPESRVVYADYYTPYIQFARTPHLYGYKRGALRACCGGGGPYNYNVSASCGLPGATTCEDPDAHVSWDGIHLTEAPYRFIANTWVKGPYAHPPLATVVLEDMVD

SEQ ID NO: 2981 - DNA, 1532 bp, Zea mays subsp. mays
  misc_feature (1)..(1532): Ceres Seq. ID no. 12410481
  misc_feature (1)..(1532): Ortholog of  Ceres SEQ ID NO 15170945 as cited in SEQ ID NO 55162
agagagtcagagactgagagactggaagcgcccgcgcgtgccggcgatggagagggacgtcgtgctctccgcacccgaggccgctgggtcctcgtcctcccccgcctcctcgtcgtactcctccttcgccgagaccagggtcatctgccgcgtgtgtcagaagcagttcgcgcagtacacttgcccccgctgtaacgcccggtactgctcgctctcgtgctacaagggtcatagtgttcaatgcactgaatccttcatgcgtgagaatgttatggacgagcttaagcagatgcaacctgaggatgaatcaaagaaaaagatgctagatatcctcaagcggctccacttggaagaagagatggcatcagatggtgaagatgagtccatgctatcagaggagcttattcaaaaagttatgtctggggaagagataaagctggaagacctctctgattgtgaaatcaaacgattccgtcaagctctggcctcaggtgagctcagtaagatgattgaaccgtggacaccttggtggaaaaaaccctcagccagatctatttcccttggcccggatggaagccagcttatcagacaagtaaacgcagaagacactgctgtaccatatccagatgcaaatactgaccaagaggctagcatcaacgaaatccctgaagggccagaatctcctctcccgtcactgaaacagttaacaaggacagagccatctcctttgcttgctgtccacttggttgacattctgtacagttactgcttcacacttcggctctacaacggtgattggcactcagatcctttgggtgcttccactgtcgccctgtcgatgtcgaaagtcatgggccaggatgctaaacctgagactgtacctgaagcactcgcagcctgcatcgaggagacatgctcaccagcttacaggcatactggtggtttcaggtttgctattggactcgtggacgatatcatcgccattctctccttgggacagaacgcacttatttgtgccctatgcgacttccatcgactcgttgaagttggtaagagcatgctcaaagtggagaaggtgggcaagacggagagggcacagggctctccaaagcttcgcagtgcagctaggaagctattcttcatgacttgttgggtccatgagcagccagatgaggcgtggccatctttagctcacatcgtccaggtgcagaaagcatctatggaggagttggagaccgggaattggaaggcggatagaaagagcaaaccacaatccgcggttcttatcgaggagctgtaggcatatggatgtaccactggaaactggatcgcgaagctctgtacccttgtgtatcgctcaggatgaatccaacgagagaccttgtccttgtaatgcagttagttgcttttgtgtacacttttttttttgaaaaaaattgtatttgttgaaatcctggttgaagcgatcctgctttactttgcttgttaagttgcgggctgatttaatccatgcgttggagcttatgcagttc

SEQ ID NO: 2982 - protein, 432 aa, Zea mays subsp. mays
  peptide (1)..(432): Ceres Seq. ID no. 12410482
ESQRLRDWKRPRVPAMERDVVLSAPEAAGSSSSPASSSYSSFAETRVICRVCQKQFAQYTCPRCNARYCSLSCYKGHSVQCTESFMRENVMDELKQMQPEDESKKKMLDILKRLHLEEEMASDGEDESMLSEELIQKVMSGEEIKLEDLSDCEIKRFRQALASGELSKMIEPWTPWWKKPSARSISLGPDGSQLIRQVNAEDTAVPYPDANTDQEASINEIPEGPESPLPSLKQLTRTEPSPLLAVHLVDILYSYCFTLRLYNGDWHSDPLGASTVALSMSKVMGQDAKPETVPEALAACIEETCSPAYRHTGGFRFAIGLVDDIIAILSLGQNALICALCDFHRLVEVGKSMLKVEKVGKTERAQGSPKLRSAARKLFFMTCWVHEQPDEAWPSLAHIVQVQKASMEELETGNWKADRKSKPQSAVLIEEL

SEQ ID NO: 2983 - protein, 417 aa, Zea mays subsp. mays
  peptide (1)..(417): Ceres Seq. ID no. 12410483
MERDVVLSAPEAAGSSSSPASSSYSSFAETRVICRVCQKQFAQYTCPRCNARYCSLSCYKGHSVQCTESFMRENVMDELKQMQPEDESKKKMLDILKRLHLEEEMASDGEDESMLSEELIQKVMSGEEIKLEDLSDCEIKRFRQALASGELSKMIEPWTPWWKKPSARSISLGPDGSQLIRQVNAEDTAVPYPDANTDQEASINEIPEGPESPLPSLKQLTRTEPSPLLAVHLVDILYSYCFTLRLYNGDWHSDPLGASTVALSMSKVMGQDAKPETVPEALAACIEETCSPAYRHTGGFRFAIGLVDDIIAILSLGQNALICALCDFHRLVEVGKSMLKVEKVGKTERAQGSPKLRSAARKLFFMTCWVHEQPDEAWPSLAHIVQVQKASMEELETGNWKADRKSKPQSAVLIEEL

SEQ ID NO: 2984 - protein, 347 aa, Zea mays subsp. mays
  peptide (1)..(347): Ceres Seq. ID no. 12410484
MRENVMDELKQMQPEDESKKKMLDILKRLHLEEEMASDGEDESMLSEELIQKVMSGEEIKLEDLSDCEIKRFRQALASGELSKMIEPWTPWWKKPSARSISLGPDGSQLIRQVNAEDTAVPYPDANTDQEASINEIPEGPESPLPSLKQLTRTEPSPLLAVHLVDILYSYCFTLRLYNGDWHSDPLGASTVALSMSKVMGQDAKPETVPEALAACIEETCSPAYRHTGGFRFAIGLVDDIIAILSLGQNALICALCDFHRLVEVGKSMLKVEKVGKTERAQGSPKLRSAARKLFFMTCWVHEQPDEAWPSLAHIVQVQKASMEELETGNWKADRKSKPQSAVLIEEL

SEQ ID NO: 2985 - DNA, 1228 bp, Zea mays subsp. mays
  misc_feature (1)..(1228): Ceres Seq. ID no. 12352148
  misc_feature (1)..(1228): Ortholog of  Ceres SEQ ID NO 13584217 as cited in SEQ ID NO 64024
  misc_feature (1)..(1228): Ortholog of  Ceres SEQ ID NO 14316021 as cited in SEQ ID NO 67130
ctattcctcagctcctggaccggccatggccgcaccttccggcacgatgcgcgccgtgcagtacgacagatacggcggaggagcacgggggctcaagcatgtggaggtgccgatcccgtcgccgaagaaaggcgaggtgctcatcaggatggaggccaccagcatcaacgtcgtcgactggaagttccagaacggcttcgcgcggcccttcatgcccaggaggttccctttcatctctggtttcgacctagcaggagaggtcgtagagttgggtgctggagtgagcagcttcaaaccaggggataaggtgatcgccatcaacttcccgaacggcggagggctcgccgagtacgcggtcgcgtcagcgtctcgtacagccgcaaggccgccggaggtgtcggccgtcgaaggtgtctgcgtgccgatcgccgcagtcaccgcgctcgggtcgctgcggacagccggggtcacagtcacactggacgacccggctcgcgcccccgccacgcccaagaacgtgctggtcaccgcggcctccggcgccgtcggccacttcgccgtgcagctcgccaggatgggcggccacaacgtcacggccacctgcggcgcgcgcaacctcggcctggtccggagcctcggcgccgacgaggcgctggactacaagacccccgagggcgccaagctgcggagcccctccggcaggaagtacgacgcggtggtgcactgcgccgcgaaggggctcccgtggtccgtgttcaggcccgtgctcgccgcctcgggcacggtcgtcgacatcacgccagggttcgtggccgtcgtcaccgcgatcctccaggtggcgaccttctccaagaagaggctggtgccgctcatagtgacgcccaagaaggaggagatggagctgctgctgggcatgctgaagcagggtaggctcaagacggtcatagattcccggcacccgctgggcagcgctcacgaaggctgggccaagagcatgagcggccacgccaccggcaaggtcgtcatagagatcggagccgcgcaaccataataatagtgcagcaatatattgattcaaaaaataattatgaattttgtaatttttagatctataatttctatatttttttgttcatgaattatgtatttttatttaaaatttatgaatcatgtatttttatttttatatgaattatgtatttttactagatgaatgcacgtgcgttgc

SEQ ID NO: 2986 - protein, 349 aa, Zea mays subsp. mays
  peptide (1)..(349): Ceres Seq. ID no. 12352149
YSSAPGPAMAAPSGTMRAVQYDRYGGGARGLKHVEVPIPSPKKGEVLIRMEATSINVVDWKFQNGFARPFMPRRFPFISGFDLAGEVVELGAGVSSFKPGDKVIAINFPNGGGLAEYAVASASRTAARPPEVSAVEGVCVPIAAVTALGSLRTAGVTVTLDDPARAPATPKNVLVTAASGAVGHFAVQLARMGGHNVTATCGARNLGLVRSLGADEALDYKTPEGAKLRSPSGRKYDAVVHCAAKGLPWSVFRPVLAASGTVVDITPGFVAVVTAILQVATFSKKRLVPLIVTPKKEEMELLLGMLKQGRLKTVIDSRHPLGSAHEGWAKSMSGHATGKVVIEIGAAQP

SEQ ID NO: 2987 - protein, 341 aa, Zea mays subsp. mays
  peptide (1)..(341): Ceres Seq. ID no. 12352150
MAAPSGTMRAVQYDRYGGGARGLKHVEVPIPSPKKGEVLIRMEATSINVVDWKFQNGFARPFMPRRFPFISGFDLAGEVVELGAGVSSFKPGDKVIAINFPNGGGLAEYAVASASRTAARPPEVSAVEGVCVPIAAVTALGSLRTAGVTVTLDDPARAPATPKNVLVTAASGAVGHFAVQLARMGGHNVTATCGARNLGLVRSLGADEALDYKTPEGAKLRSPSGRKYDAVVHCAAKGLPWSVFRPVLAASGTVVDITPGFVAVVTAILQVATFSKKRLVPLIVTPKKEEMELLLGMLKQGRLKTVIDSRHPLGSAHEGWAKSMSGHATGKVVIEIGAAQP

SEQ ID NO: 2988 - protein, 334 aa, Zea mays subsp. mays
  peptide (1)..(334): Ceres Seq. ID no. 12352151
MRAVQYDRYGGGARGLKHVEVPIPSPKKGEVLIRMEATSINVVDWKFQNGFARPFMPRRFPFISGFDLAGEVVELGAGVSSFKPGDKVIAINFPNGGGLAEYAVASASRTAARPPEVSAVEGVCVPIAAVTALGSLRTAGVTVTLDDPARAPATPKNVLVTAASGAVGHFAVQLARMGGHNVTATCGARNLGLVRSLGADEALDYKTPEGAKLRSPSGRKYDAVVHCAAKGLPWSVFRPVLAASGTVVDITPGFVAVVTAILQVATFSKKRLVPLIVTPKKEEMELLLGMLKQGRLKTVIDSRHPLGSAHEGWAKSMSGHATGKVVIEIGAAQP

SEQ ID NO: 2989 - DNA, 1768 bp, Zea mays subsp. mays
  misc_feature (1)..(1768): Ceres Seq. ID no. 12381060
  misc_feature (1)..(1768): Ortholog of  Ceres SEQ ID NO 15177298 as cited in SEQ ID NO 52711
aagccaggccactctaccaccgcacgctcaactcaaacccccgtcccgaacgcagangaccggcggcagcggcggggtgtgtgtggactggactgaaaccaattgccatcaatccaggcatccatccatccacccgcacccgccccgctgacggcggcaatggcccggctcgtgctctccgagtgctgcggcctcgcgccgctccgccgcctgcgcgccggccggggcgccattgcggcgccgtcaccccccgcgctctccgcggcgccgcgccgtcgtcccgcgtccgcgtccatccaccgcgactgggcgctccgcgtctccgcgcccacccgcctcgcctccgccgccgtcgaggaggacaagccgagcgccgcgccggggcaggaggagggcgcggcggccggcggggagttcgacccgggggcgccgccgccgttcgggctggccgagatccgcgccgccatccccaagcactgctgggtcaaggacccctggcgctccatgagctacgtgctgcgcgacgtcgccgtcgtcctgggcctcgccgcagcggccgcgcgcctcgacagctggctcgtctggccgctctactgggccgcgcagggcaccatgttctgggcgctcttcgtcctcggccacgactgtggacacgggagcttctcgaacaaccccaagttaaacagcgtcgtcggccacatactccattcctccattcttgtgccataccacggatggaggattagccacaggacgcaccatcaaaaccacggtcacgttgagaaggacgagtcctggcacccgctaccagagaggctgtacaaaagcctggactttatgactaggaaactgcggttcaccatgccgttccccttgctcgcgttcccgttatacttgtttgcgaggagtccagggaagtcaggatcacacttcaacccaggcagtgatctgttccaacctactgaaaagaatgatatcataacatccacggcgtcctggctggccatggttggtgttctggccggtctcacctttctgatgggtcctgttccgatgctaaagctctacggagtcccatacttggtatttgttgcttggctagatatggtcacatacttgcaccatcatggccacgaagacaagcttccctggtaccgtggaaaggagtggagttatctgcgtggaggactgacgacgctcgaccgggactacggatggatcaacaacatccatcacgacatcggaactcatgtcatccatcacctcttccctcagatcccgcattaccatctcatcgaggcgaccgaggcagcaaagccggttcttggcaagtactacaaagagccgaagaactcgggtgctctgccgtggcatctattccgggtgctggcacagagcttgaagcaagaccactatgtcagtcacaccggagatgtggtctactaccaagctgagtcgaaaacgagcacctctgcacaaaaatccgattgacagggagtatagagcgtgtagagtgttcttcatttttctcggggagggcctgtgcctgaagacctgaccagcctccacctctgattagcgtgagtacatgggtacgtcgactcaagaacgtaagctggcgaagtagtgccatgtatgtatggagagggttaaatgtaattctttccaatggtccaaggcggatgctgcttccgatgtagcagcatgcgattctttggacaagatgtatactattacagtgaagagtgaaaaaaagagagagttagct

SEQ ID NO: 2990 - protein, 443 aa, Zea mays subsp. mays
  peptide (1)..(443): Ceres Seq. ID no. 12381061
MARLVLSECCGLAPLRRLRAGRGAIAAPSPPALSAAPRRRPASASIHRDWALRVSAPTRLASAAVEEDKPSAAPGQEEGAAAGGEFDPGAPPPFGLAEIRAAIPKHCWVKDPWRSMSYVLRDVAVVLGLAAAAARLDSWLVWPLYWAAQGTMFWALFVLGHDCGHGSFSNNPKLNSVVGHILHSSILVPYHGWRISHRTHHQNHGHVEKDESWHPLPERLYKSLDFMTRKLRFTMPFPLLAFPLYLFARSPGKSGSHFNPGSDLFQPTEKNDIITSTASWLAMVGVLAGLTFLMGPVPMLKLYGVPYLVFVAWLDMVTYLHHHGHEDKLPWYRGKEWSYLRGGLTTLDRDYGWINNIHHDIGTHVIHHLFPQIPHYHLIEATEAAKPVLGKYYKEPKNSGALPWHLFRVLAQSLKQDHYVSHTGDVVYYQAESKTSTSAQKSD

SEQ ID NO: 2991 - protein, 328 aa, Zea mays subsp. mays
  peptide (1)..(328): Ceres Seq. ID no. 12381062
MSYVLRDVAVVLGLAAAAARLDSWLVWPLYWAAQGTMFWALFVLGHDCGHGSFSNNPKLNSVVGHILHSSILVPYHGWRISHRTHHQNHGHVEKDESWHPLPERLYKSLDFMTRKLRFTMPFPLLAFPLYLFARSPGKSGSHFNPGSDLFQPTEKNDIITSTASWLAMVGVLAGLTFLMGPVPMLKLYGVPYLVFVAWLDMVTYLHHHGHEDKLPWYRGKEWSYLRGGLTTLDRDYGWINNIHHDIGTHVIHHLFPQIPHYHLIEATEAAKPVLGKYYKEPKNSGALPWHLFRVLAQSLKQDHYVSHTGDVVYYQAESKTSTSAQKSD

SEQ ID NO: 2992 - protein, 292 aa, Zea mays subsp. mays
  peptide (1)..(292): Ceres Seq. ID no. 12381063
MFWALFVLGHDCGHGSFSNNPKLNSVVGHILHSSILVPYHGWRISHRTHHQNHGHVEKDESWHPLPERLYKSLDFMTRKLRFTMPFPLLAFPLYLFARSPGKSGSHFNPGSDLFQPTEKNDIITSTASWLAMVGVLAGLTFLMGPVPMLKLYGVPYLVFVAWLDMVTYLHHHGHEDKLPWYRGKEWSYLRGGLTTLDRDYGWINNIHHDIGTHVIHHLFPQIPHYHLIEATEAAKPVLGKYYKEPKNSGALPWHLFRVLAQSLKQDHYVSHTGDVVYYQAESKTSTSAQKSD

SEQ ID NO: 2993 - DNA, 1298 bp, Zea mays subsp. mays
  misc_feature (1)..(1298): Ceres Seq. ID no. 12410473
  misc_feature (1)..(1298): Ortholog of  Ceres SEQ ID NO 13594758 as cited in SEQ ID NO 51898
  misc_feature (1)..(1298): Ortholog of  Ceres SEQ ID NO 13661175 as cited in SEQ ID NO 61110
  misc_feature (1)..(1298): Ortholog of  Ceres SEQ ID NO 13598708 as cited in SEQ ID NO 68118
  misc_feature (1)..(1298): Ortholog of  Ceres SEQ ID NO 13596265 as cited in SEQ ID NO 68369
  misc_feature (1)..(1298): Ortholog of  Ceres SEQ ID NO 15179585 as cited in SEQ ID NO 0
acaatattattggactattcctaacacaacggaggccataggatgggatggtcatctataaatacgtagcccggcgcagccttctttggagcagggagaagaacacagggcacacgcacggcacgcagatacatatagagagaggttagctatagcttgcacatctatttaactaactaactaactggctagctagctcgatcggcagagcaaagcgaaagcagcaagaagcaaagcaatggagaaccctgcgagtgtgctagttctaccagcgcagttcaccaaactcaccttccgaaacctgtacatccgccgggccgggccgggcagcagggagataaccgaggagggcaggtgcgacctggacaagagatacgtgagtgacttccccgtctacgacggccgcggccccgacgccagccttgtggcccgcgtgcaggggatcaccagcgaaatcgggaacgcgcaccaactgttcgtcgttgttttcgacaccgacaggctcaagggctccacgctcgtcaccaatggcgtgataacggccgggtctgacgagtgggcgatctacggcggaaccggggtgtttgccatggcgaggggcgtcataaggagaaggtatctcgccgacagggccggcgggaacactgatgagctcaacatggatgtcttctgccggccgtttggctcacagtcagagctgcaagataagatgcaggtgcaggggcagggctctagcgtcaccaagattggactatggggtggaccgggagggtcggcacaggacatcacggcggagcggccgccgcagcgtctgcacagcgtcaccgttcgtgctggcgtcgccgtcgactccatcgagttcacctatactgacagcgcttggcagaggcgcgccgctgggcgatggggtggactcgggggcaatgttcgaacgatcgaccttggcgacgccgaggatgtcagggaagtctcgggaacatacggcgcatttgaaggtgccactacgctgacctcgctcaggctcgtcaccagcagcagaacctggggcccctggggtgtcgagaacgggacgcgtttctccgtcacggcgcccatcggcagcagcatcgtgggattctatgcgcgggcgggaaccaggctcgtcgatgctatcggtgtttacttgcgtcagatttaattcgaataatagcaggggagctactgctagctacgtacctgctccatcctccattatcctttatttcaattcgctcatcatcgtcgtgtgtaaattaaataaataaagctcttgtgcccat

SEQ ID NO: 2994 - protein, 312 aa, Zea mays subsp. mays
  peptide (1)..(312): Ceres Seq. ID no. 12410474
MENPASVLVLPAQFTKLTFRNLYIRRAGPGSREITEEGRCDLDKRYVSDFPVYDGRGPDASLVARVQGITSEIGNAHQLFVVVFDTDRLKGSTLVTNGVITAGSDEWAIYGGTGVFAMARGVIRRRYLADRAGGNTDELNMDVFCRPFGSQSELQDKMQVQGQGSSVTKIGLWGGPGGSAQDITAERPPQRLHSVTVRAGVAVDSIEFTYTDSAWQRRAAGRWGGLGGNVRTIDLGDAEDVREVSGTYGAFEGATTLTSLRLVTSSRTWGPWGVENGTRFSVTAPIGSSIVGFYARAGTRLVDAIGVYLRQI

SEQ ID NO: 2995 - protein, 195 aa, Zea mays subsp. mays
  peptide (1)..(195): Ceres Seq. ID no. 12410475
MARGVIRRRYLADRAGGNTDELNMDVFCRPFGSQSELQDKMQVQGQGSSVTKIGLWGGPGGSAQDITAERPPQRLHSVTVRAGVAVDSIEFTYTDSAWQRRAAGRWGGLGGNVRTIDLGDAEDVREVSGTYGAFEGATTLTSLRLVTSSRTWGPWGVENGTRFSVTAPIGSSIVGFYARAGTRLVDAIGVYLRQI

SEQ ID NO: 2996 - protein, 172 aa, Zea mays subsp. mays
  peptide (1)..(172): Ceres Seq. ID no. 12410476
MDVFCRPFGSQSELQDKMQVQGQGSSVTKIGLWGGPGGSAQDITAERPPQRLHSVTVRAGVAVDSIEFTYTDSAWQRRAAGRWGGLGGNVRTIDLGDAEDVREVSGTYGAFEGATTLTSLRLVTSSRTWGPWGVENGTRFSVTAPIGSSIVGFYARAGTRLVDAIGVYLRQI

SEQ ID NO: 2997 - DNA, 1654 bp, Zea mays subsp. mays
  misc_feature (1)..(1654): Ceres Seq. ID no. 12367905
  misc_feature (1)..(1654): Ortholog of  Ceres SEQ ID NO 14311854 as cited in SEQ ID NO 51455
  misc_feature (1)..(1654): Ortholog of  Ceres SEQ ID NO 14313097 as cited in SEQ ID NO 58902
aaaccacgcgaacaagaacaaccaagatgacgcgctctcctctggctctcgccctactgctcctctgcgccgccggcgccgcggcggccgtgccgcggtaccgcgaggcgccgcacttcaccaactcggcggcggcgcagtgcccgccgccgctgcagccgtcggacgcggacgcggcgtgctcgccgcacgcggcggtgcacgtcgccatgacgctggacgcgtcgtacctgcgcggcaccatggcggccgtgctctccgtgctgcgccacgcgtcgtgcccggagtccatccacttccacttcatcgcctccgcctcctccgggtccagtgcgacggcggaggcgctcagggccacggtgcgcgcgtcgttcccgtcgctggcgttccgggtgtacccgttcgccgacgaggcccgcgtggcggggctcatctccacctccatccggggcgcgctggaccgcccgctcaactacgcgcgctcctacctcgcgtccacgctgcccgcctgcgtgcgccgcgtcgtgtacctcgactccgacgtcgtgctcaccgacgacatcgccgccctcgccgccaccccgctcccgggggaggagggcacggccgtggcggcgccccagtactgcggcgccaacttcaccgcctacttcacgccgggcttctgggcgtcccccgcgctctcctccgccttcgccggccgccgcgcctgctacttcaacacgggcgtcatggtgctcgacctcgcgcgctggcgccgcgcgggatacacggcgcagatcgaggagtggatggagctgcagaagcgggtgcgcatctacgagctgggctcgctgccgcccttcctgctcgtcttcgccggcaggatcgcgtccgtcgaccaccgatggaaccagcacggcctcggcggggacaactaccgcggcctctgccgcggcctgcacgccggcgccgtcagcctgctgcactggagcggcaaggggaagccctgggaccgcctggacgccggaaggccgtgcccgctcgacgccgtctgggccaagtacgacctgctccggccggccgccgacatcgagacctcgtgaacacaacgacggcgttcgatcgaccgctcgtttcactttttgttcggtttagaagcacgtgctcttcgttgttttgttgatctaggctagatattggtagatcgatcatcagggtgttcatgtgaactgtacatattgttgctaactttctcggaaaagtttagaccgcttgcacaaattctagattcagaaaaaaaatagtactactcaaaagttggccaaatggtattgctccaagaaatctagatataacaaattggtggatctaaggtcagaatcaaggtgaagctctcaagtggcgcttcgctagcacaaaattagtggacttggtgaaaattgtacgaagaaaaaagatggtcaagaatagaagagactattagcaccaaaattgtcctccactagatctaaacaaaaaacatagtcattgcctcattggtagaagggactattagccaaaaagttttttttcccattgaatcttagatccggtagtgcatctgttctaaacaagctcttgagttttcagtttcgctctattaccttcgataagaaattcagaagcatcgttt

SEQ ID NO: 2998 - protein, 387 aa, Zea mays subsp. mays
  peptide (1)..(387): Ceres Seq. ID no. 12367906
NHANKNNQDDALSSGSRPTAPLRRRRRGGRAAVPRGAALHQLGGGAVPAAAAAVGRGRGVLAARGGARRHDAGRVVPARHHGGRALRAAPRVVPGVHPLPLHRLRLLRVQCDGGGAQGHGARVVPVAGVPGVPVRRRGPRGGAHLHLHPGRAGPPAQLRALLPRVHAARLRAPRRVPRLRRRAHRRHRRPRRHPAPGGGGHGRGGAPVLRRQLHRLLHAGLLGVPRALLRLRRPPRLLLQHGRHGARPRALAPRGIHGADRGVDGAAEAGAHLRAGLAAALPARLRRQDRVRRPPMEPARPRRGQLPRPLPRPARRRRQPAALERQGEALGPPGRRKAVPARRRLGQVRPAPAGRRHRDLVNTTTAFDRPLVSLFVRFRSTCSSLFC

SEQ ID NO: 2999 - protein, 360 aa, Zea mays subsp. mays
  peptide (1)..(360): Ceres Seq. ID no. 12367907
TTRTRTTKMTRSPLALALLLLCAAGAAAAVPRYREAPHFTNSAAAQCPPPLQPSDADAACSPHAAVHVAMTLDASYLRGTMAAVLSVLRHASCPESIHFHFIASASSGSSATAEALRATVRASFPSLAFRVYPFADEARVAGLISTSIRGALDRPLNYARSYLASTLPACVRRVVYLDSDVVLTDDIAALAATPLPGEEGTAVAAPQYCGANFTAYFTPGFWASPALSSAFAGRRACYFNTGVMVLDLARWRRAGYTAQIEEWMELQKRVRIYELGSLPPFLLVFAGRIASVDHRWNQHGLGGDNYRGLCRGLHAGAVSLLHWSGKGKPWDRLDAGRPCPLDAVWAKYDLLRPAADIETS

SEQ ID NO: 3000 - protein, 352 aa, Zea mays subsp. mays
  peptide (1)..(352): Ceres Seq. ID no. 12367908
MTRSPLALALLLLCAAGAAAAVPRYREAPHFTNSAAAQCPPPLQPSDADAACSPHAAVHVAMTLDASYLRGTMAAVLSVLRHASCPESIHFHFIASASSGSSATAEALRATVRASFPSLAFRVYPFADEARVAGLISTSIRGALDRPLNYARSYLASTLPACVRRVVYLDSDVVLTDDIAALAATPLPGEEGTAVAAPQYCGANFTAYFTPGFWASPALSSAFAGRRACYFNTGVMVLDLARWRRAGYTAQIEEWMELQKRVRIYELGSLPPFLLVFAGRIASVDHRWNQHGLGGDNYRGLCRGLHAGAVSLLHWSGKGKPWDRLDAGRPCPLDAVWAKYDLLRPAADIETS

SEQ ID NO: 3001 - DNA, 1634 bp, Zea mays subsp. mays
  misc_feature (1)..(1634): Ceres Seq. ID no. 12410453
  misc_feature (1)..(1634): Ortholog of  Ceres SEQ ID NO 14303790 as cited in SEQ ID NO 55525
acacttcaattacgattattccagataagcacgatccgatgatggccccaccgatatccgccgatgccttggtggaggctgcctcggccgtcgccgcgtacccagccatcgngccgaacagaatgctttgcaaggacgcgccggcgccggccatctctgtcgtctcgaagcagacggtccggcccgccggcgcgtcggcggcggtcggcagtggagacctcaggctctcggtgtcggacatgccgatgctatcgtgccactacatccagaaggggctgttcttcccgccgcctcctcccggcgtgctggcggcctcgctggtgtcgtcgctcgtggcggcgctctcccgcgcgctcggcgtcttccccgcgctcgccggccgcctcgtcacgctccacgacgacagcatcgtgatacggtgcggcggcgacgacgccgccgtcgagttctaccacgcggtggcgccgtctctgtcgctcggcgacttcctggtgcccggcgccgacgtgccgacccgtttgacgaacggcctgttccccatggaccggacggtgagctacggcggccacggccgcccgctcacggcgttccagctcaccgtgctcggcgacggcgccgtgttcgtcggcttcgtcgccaaccacgccgtcgtggacggcacctccttctggcacttcttcaacacgtgggcggggctgtgccgcggcgcgccggtccgggagcccgacttccgccgcaacttcttcggcgactccaccgccgtcctacgcttccccggaggcgcgagccccgccgtgacgttcgacgccgacgcgccgctccgcgagcggatcctccacttcagtgctgccgcaatcagcgagctgaaggcgacggccaaccgctcgaaaagagcaggtcaggaagccgtgctaacggcaagctcgcgcacgacgactccagacttgaagggcgttccggtgaaatctcgtcgtttcagtcgctgtgcgcgcacatctggagggcggtgacgcgcgcgcgccggctgctggctgccgacaagacgacgacgttccgcatggccgtgaactgccggcaccgtctgcgcccggcgatctccccgctctacttcggcaacgcgatccagagcgtggcgacgacggccaccgtagccgagctggcgtccaacgacctgggctgggcggccgcccggctgaacgccaccgtggcgtcgcacaaggacggcgcgatccggcgcgccgcggcggagtgggaggccgcgccccgttgcttcccgctaggcaaccccgacggggcggccctcacgatggggagctcgcctcggttcccgatgtacgacgggaacgacttcgggtggggccgcgcgctcgccgtgcggagcggccgcgcgaacaaattcgacggcaagatgtcttcgttccccggacaggctggggacggtagcatcgacgtggaggtgtgcctcgcgccagacaccatggcgcatctcctcctcgacaaggagttcttgcagtacgtgtcctcccctgcaccgtgaggcggtgacagagtgaatgtgtggcttgttgctgcgcagctacatatagtaactggatttgtaccctttcagcagatatcaagtgcttgccaacttt

SEQ ID NO: 3002 - protein, 335 aa, Zea mays subsp. mays
  peptide (1)..(335): Ceres Seq. ID no. 12410454
  misc_feature (37)..(37): Xaa is any aa, unknown or other
TSITIIPDKHDPMMAPPISADALVEAASAVAAYPAIXPNRMLCKDAPAPAISVVSKQTVRPAGASAAVGSGDLRLSVSDMPMLSCHYIQKGLFFPPPPPGVLAASLVSSLVAALSRALGVFPALAGRLVTLHDDSIVIRCGGDDAAVEFYHAVAPSLSLGDFLVPGADVPTRLTNGLFPMDRTVSYGGHGRPLTAFQLTVLGDGAVFVGFVANHAVVDGTSFWHFFNTWAGLCRGAPVREPDFRRNFFGDSTAVLRFPGGASPAVTFDADAPLRERILHFSAAAISELKATANRSKRAGQEAVLTASSRTTTPDLKGVPVKSRRFSRCARTSGGR

SEQ ID NO: 3003 - protein, 323 aa, Zea mays subsp. mays
  peptide (1)..(323): Ceres Seq. ID no. 12410455
  misc_feature (25)..(25): Xaa is any aa, unknown or other
MMAPPISADALVEAASAVAAYPAIXPNRMLCKDAPAPAISVVSKQTVRPAGASAAVGSGDLRLSVSDMPMLSCHYIQKGLFFPPPPPGVLAASLVSSLVAALSRALGVFPALAGRLVTLHDDSIVIRCGGDDAAVEFYHAVAPSLSLGDFLVPGADVPTRLTNGLFPMDRTVSYGGHGRPLTAFQLTVLGDGAVFVGFVANHAVVDGTSFWHFFNTWAGLCRGAPVREPDFRRNFFGDSTAVLRFPGGASPAVTFDADAPLRERILHFSAAAISELKATANRSKRAGQEAVLTASSRTTTPDLKGVPVKSRRFSRCARTSGGR

SEQ ID NO: 3004 - protein, 322 aa, Zea mays subsp. mays
  peptide (1)..(322): Ceres Seq. ID no. 12410456
  misc_feature (24)..(24): Xaa is any aa, unknown or other
MAPPISADALVEAASAVAAYPAIXPNRMLCKDAPAPAISVVSKQTVRPAGASAAVGSGDLRLSVSDMPMLSCHYIQKGLFFPPPPPGVLAASLVSSLVAALSRALGVFPALAGRLVTLHDDSIVIRCGGDDAAVEFYHAVAPSLSLGDFLVPGADVPTRLTNGLFPMDRTVSYGGHGRPLTAFQLTVLGDGAVFVGFVANHAVVDGTSFWHFFNTWAGLCRGAPVREPDFRRNFFGDSTAVLRFPGGASPAVTFDADAPLRERILHFSAAAISELKATANRSKRAGQEAVLTASSRTTTPDLKGVPVKSRRFSRCARTSGGR

SEQ ID NO: 3005 - DNA, 1283 bp, Zea mays subsp. mays
  misc_feature (1)..(1283): Ceres Seq. ID no. 12356020
  misc_feature (1)..(1283): Ortholog of  Ceres SEQ ID NO 13654989 as cited in SEQ ID NO 63117
gcccacctaccactaccagtcgcggacgctcctcccacaactcgcgggtctcgagatgttcaggggttgcggcctgttcgccggcgcccgccgggggcgcggcggcgacctcaggaagcgcggggagcaaggcggcgcgagctcgcgggtggcgccggccgagcccgtgtgcgtggacgaggcggaggacggcggcgccgcgcggcagctggcgtgggcggaggtggagaccgccacgggcggcttctcgtccagggtggtcggccgcggcggcttcagcacggtgtacctcgcctcgctctcctcctcgcggctcggcgccgtcaaggtgcactgcagcagcgagcgcctccgccgcgcgttccgccgggagctcgacgtgctgctctccctccgccacccgcacgtcgtccgcctcctcgcctactgcgacgagcgcgacgagggcgtgctggtgttcgagtacgcgcccaacggcgacctccacgagaggctccacggcggcgcgggcgcgggcaccctcccctgggcgcgccgcgtggcggtcgcgttccaggtggcctcggcgctggagtacctccacgagggccgcgacccggccgtcgtccacggggacatcaaggcctccaacgtcctcctcgacgccagcatggacgccaagctctgcgacttcggcttcgcgcacgtcggcgtctcggccacgatgggcggccgccggccctcggaccgcgccgtcatgggctctccgggctacgtcgacccgcacctcctccgctccggagtggccaccaaggcgagcgacgtgtacagctttggcgtgctgctgctcgagctcctgacgggcaaggaggccgtctgccgcgagacagggcaccggctcacggccgcggtgaggcctaagctcagcgatggtgatcaactgccgggcgttctggaccagaggctgggaggagactacgacgccgctgaggcggccgccgtggccgagctcgccatgcagtgcgtcagtgacagccctgggctccgcccgtccatggccgacgtggtgcgcgtgctccaggagaagacctccgccgctggatcgagagtcgaccgcaagcaagatggtgtcctaagttagatgcctatggagtagtgtgtaaatatgtccttgatggtgctataattgtgttgagggtagttagccacaagaattggcgcagtgagatgaggttttagaatcactagatctctgatagaaaattttgtcatgccatcgagttgtcaatttgtcttgttgtgtt

SEQ ID NO: 3006 - protein, 354 aa, Zea mays subsp. mays
  peptide (1)..(354): Ceres Seq. ID no. 12356021
MFRGCGLFAGARRGRGGDLRKRGEQGGASSRVAPAEPVCVDEAEDGGAARQLAWAEVETATGGFSSRVVGRGGFSTVYLASLSSSRLGAVKVHCSSERLRRAFRRELDVLLSLRHPHVVRLLAYCDERDEGVLVFEYAPNGDLHERLHGGAGAGTLPWARRVAVAFQVASALEYLHEGRDPAVVHGDIKASNVLLDASMDAKLCDFGFAHVGVSATMGGRRPSDRAVMGSPGYVDPHLLRSGVATKASDVYSFGVLLLELLTGKEAVCRETGHRLTAAVRPKLSDGDQLPGVLDQRLGGDYDAAEAAAVAELAMQCVSDSPGLRPSMADVVRVLQEKTSAAGSRVDRKQDGVLS

SEQ ID NO: 3007 - protein, 299 aa, Zea mays subsp. mays
  peptide (1)..(299): Ceres Seq. ID no. 12356022
AHLPLPVADAPPTTRGSRDVQGLRPVRRRPPGARRRPQEARGARRRELAGGAGRARVRGRGGGRRRRAAAGVGGGGDRHGRLLVQGGRPRRLQHGVPRLALLLAARRRQGALQQRAPPPRVPPGARRAALPPPPARRPPPRLLRRARRGRAGVRVRAQRRPPREAPRRRGRGHPPLGAPRGGRVPGGLGAGVPPRGPRPGRRPRGHQGLQRPPRRQHGRQALRLRLRARRRLGHDGRPPALGPRRHGLSGLRRPAPPPLRSGHQGERRVQLWRAAARAPDGQGGRLPRDRAPAHGRGEA

SEQ ID NO: 3008 - protein, 372 aa, Zea mays subsp. mays
  peptide (1)..(372): Ceres Seq. ID no. 12356023
PTYHYQSRTLLPQLAGLEMFRGCGLFAGARRGRGGDLRKRGEQGGASSRVAPAEPVCVDEAEDGGAARQLAWAEVETATGGFSSRVVGRGGFSTVYLASLSSSRLGAVKVHCSSERLRRAFRRELDVLLSLRHPHVVRLLAYCDERDEGVLVFEYAPNGDLHERLHGGAGAGTLPWARRVAVAFQVASALEYLHEGRDPAVVHGDIKASNVLLDASMDAKLCDFGFAHVGVSATMGGRRPSDRAVMGSPGYVDPHLLRSGVATKASDVYSFGVLLLELLTGKEAVCRETGHRLTAAVRPKLSDGDQLPGVLDQRLGGDYDAAEAAAVAELAMQCVSDSPGLRPSMADVVRVLQEKTSAAGSRVDRKQDGVLS

SEQ ID NO: 3009 - DNA, 1544 bp, Zea mays subsp. mays
  misc_feature (1)..(1544): Ceres Seq. ID no. 12405741
  misc_feature (1)..(1544): Ortholog of  Ceres SEQ ID NO 12784444 as cited in SEQ ID NO 67288
aaaggacgggcaaagagccggagccgcgaccgacgactcatcagacatggcgaagccggcggcggcgaggaagccctctgcggcgtcgaccgtcgcactgacactggttctggccctggcttcggctgtcctcctcttcctcctgctccgcttctctccctcctccccgtcccccaacccgcacccgcaccgccgcctccgcctccgcccccgcgcgcatgcgcaccaccaccagatcccattcgaccctgtcgtcgcggacatagagcgccgcctcgaagaccacgagtgggagcgcctcgccgctgcagggctgcacgctccgggcatggaggcggcgccagtcccagaggatctcaccgacggtgaggtcgacgccgacgaggactacatcaatgacgctgcgcgcttcaacgtcacgcttcgcgtggaggcgctgttcccaaagatcgacgtcgaccctgccgatggcgccgtcacgggcgctgagctggccgcgtggaacctcgcaaatgcgcggcgggaggtgctacaccgcaccgcccgggagctcgagctgcacgaccgcgatcacgacggccgggtcgcctacggcgaatacgagcggcccagctgggcctggcgtttcgacgatcataactcaaccgatgacggagcgggatggtggaaggaggagcattttagtgctgcagatatggatggtgatggctttctaaatcttactgagtttaatgactttttacatccagctgatactaccaacccaaagctaatacattggttgtgcaaagaagaagtcagggaaagagataaagacaatgatgggaagctcaatttccaagagttcttcaacggattattttactcaattcgacactatgatgatgaaggcttaacagatgacaccggtggctctgatgcaccagctaaaaagtcattttcacaccttgatctggataatgatgggctcttatcagcagatgagctaaagcctgtaattggtaatctccatccatcagaatacttctatgccaagcaacaagccgactatgtaatatctcaggctgacacgaacaaagatggacaattgagcatgaatgagatgatcgagaacccctatgtcttttacaatgctttattcacagaagatgattatggctttcatgacgagctccgttagttcccaattcaacacaaagctttatggaatcaccactgtaggaagtcggaagactttgttatgcactgctaagaccatttccgttttctgtctgaaatcatccatcatttgacggtgattccatgtaaaacaagcatgtttttagatgcacctattctagaagctgtgttcttttgtactacccttgagccttttttatagtttgttgtttttttaatcatatatgtacggtgaggatgtgagtgagttttgttctttcaacttcttgaatcttgatacgatacaaaactagcgtcttccagaatcacaatttgtaaaccatacaaacccaggaaagcattactgtaagccatgaattgacgtt

SEQ ID NO: 3010 - protein, 392 aa, Zea mays subsp. mays
  peptide (1)..(392): Ceres Seq. ID no. 12405742
KDGQRAGAATDDSSDMAKPAAARKPSAASTVALTLVLALASAVLLFLLLRFSPSSPSPNPHPHRRLRLRPRAHAHHHQIPFDPVVADIERRLEDHEWERLAAAGLHAPGMEAAPVPEDLTDGEVDADEDYINDAARFNVTLRVEALFPKIDVDPADGAVTGAELAAWNLANARREVLHRTARELELHDRDHDGRVAYGEYERPSWAWRFDDHNSTDDGAGWWKEEHFSAADMDGDGFLNLTEFNDFLHPADTTNPKLIHWLCKEEVRERDKDNDGKLNFQEFFNGLFYSIRHYDDEGLTDDTGGSDAPAKKSFSHLDLDNDGLLSADELKPVIGNLHPSEYFYAKQQADYVISQADTNKDGQLSMNEMIENPYVFYNALFTEDDYGFHDELR

SEQ ID NO: 3011 - protein, 377 aa, Zea mays subsp. mays
  peptide (1)..(377): Ceres Seq. ID no. 12405743
MAKPAAARKPSAASTVALTLVLALASAVLLFLLLRFSPSSPSPNPHPHRRLRLRPRAHAHHHQIPFDPVVADIERRLEDHEWERLAAAGLHAPGMEAAPVPEDLTDGEVDADEDYINDAARFNVTLRVEALFPKIDVDPADGAVTGAELAAWNLANARREVLHRTARELELHDRDHDGRVAYGEYERPSWAWRFDDHNSTDDGAGWWKEEHFSAADMDGDGFLNLTEFNDFLHPADTTNPKLIHWLCKEEVRERDKDNDGKLNFQEFFNGLFYSIRHYDDEGLTDDTGGSDAPAKKSFSHLDLDNDGLLSADELKPVIGNLHPSEYFYAKQQADYVISQADTNKDGQLSMNEMIENPYVFYNALFTEDDYGFHDELR

SEQ ID NO: 3012 - protein, 283 aa, Zea mays subsp. mays
  peptide (1)..(283): Ceres Seq. ID no. 12405744
MEAAPVPEDLTDGEVDADEDYINDAARFNVTLRVEALFPKIDVDPADGAVTGAELAAWNLANARREVLHRTARELELHDRDHDGRVAYGEYERPSWAWRFDDHNSTDDGAGWWKEEHFSAADMDGDGFLNLTEFNDFLHPADTTNPKLIHWLCKEEVRERDKDNDGKLNFQEFFNGLFYSIRHYDDEGLTDDTGGSDAPAKKSFSHLDLDNDGLLSADELKPVIGNLHPSEYFYAKQQADYVISQADTNKDGQLSMNEMIENPYVFYNALFTEDDYGFHDELR

SEQ ID NO: 3013 - DNA, 1658 bp, Zea mays subsp. mays
  misc_feature (1)..(1658): Ceres Seq. ID no. 13494433
  misc_feature (1)..(1658): Ortholog of  Ceres SEQ ID NO 14307164 as cited in SEQ ID NO 54775
atcaaacgcccacgcagcgccggggatggagcgcggccggcaccagatgagagctgcctcccacacatggcatcgtggccagcagcgtcaaggaggcggtccagcggcggcatgaaaagcgccgagctttcgggctccggtgcttcttacggctatggccggacgtcctcctcccctgatgcctgcggctacggccggcagctctcggcctacagcgcccgctcctcccaggtcagcaggagtggctccttcagtgcggcggcgcagcgggtcgccggcgccttcaccggctgcttcgtgccgcgccggcaggtcaaagccggggaagaggaggaggaggaggagaagaagagcaagcgctccatggattcaggatcctatcatggatggaatgaagcaaacttgagtgcagcagcaggatcatggcaggaaggcagggctctcaccatcgctgacgtgtcgaaggcaacatcaaacttcagcgaaaagaacgtgataaggcagggacgctcaagcaccatgtacagaggaaagctcagggatggttctcagatcgccgtcaaatgtgtcacgaagctgaacgaccagagtccgacggctgaactctggagggagcttgagaagatccagcacaggaatctggcgaggctctttggattcttcgaacgcgcagctgatagtctcgtcgtagtcgagtatgtcggcaatggttccttgagggaacatttggatgaatcatgtggaaatggtttagagctcgcgcaacggctcaacatcgcgatcgacgttgctcaggccatcacctacctgcacgagtacaaagagcgtccgatcatccatggcggcatccggtcgtcgggcgtgctactgaccgacgcgctgacggcgaaggtggccggctttgggctggccgggactgcggcctcggggtcgggctcaggctccgacgcaacgccggcgaggagcgccgccgggtacgtggacccggagtacctgagcacgtaccagctgaccgacaagagcgacgtgtacgccttcggcgtcctcctcgtcgagctagccaccggccggccgcccgtcgagcgcacccgcggcggcgaggcccggctcaccaccaaatgggcgttgcagaggtgcagagcaggggaagccgtggtggccatggaccccaggatgcggcggagcccggcgtcggtggccgccgtggagagggcgctggcgctggcagcgcagagcgtcgcggcggccagggatgagcggccgtccatgcggcggtgcagcgagctgctgtggaccatccggagagactaccaccgccaggaggagccgcgctgcggcgccgtcgctgaggaacgtagcgacgagtgggtcatcaggtagcttagcttgccagttgaatggatatgattctgctttggattgatcggcatggaactgtaactagcctgtaagtggatgcgaagttctaggaagctgcagattttttttagcacgtacaacttctgtgattactatcaaatgatgtagtcattgcagccaatacctgcgaatttctagaaaacagtagacgttgtaaacaatcagacgactttgctgaagtagccacttgatccctcaatcaaatataaataaccatcgaaggatgaggatgttgatgc

SEQ ID NO: 3014 - protein, 459 aa, Zea mays subsp. mays
  peptide (1)..(459): Ceres Seq. ID no. 13494434
IKRPRSAGDGARPAPDESCLPHMASWPAASRRRSSGGMKSAELSGSGASYGYGRTSSSPDACGYGRQLSAYSARSSQVSRSGSFSAAAQRVAGAFTGCFVPRRQVKAGEEEEEEEKKSKRSMDSGSYHGWNEANLSAAAGSWQEGRALTIADVSKATSNFSEKNVIRQGRSSTMYRGKLRDGSQIAVKCVTKLNDQSPTAELWRELEKIQHRNLARLFGFFERAADSLVVVEYVGNGSLREHLDESCGNGLELAQRLNIAIDVAQAITYLHEYKERPIIHGGIRSSGVLLTDALTAKVAGFGLAGTAASGSGSGSDATPARSAAGYVDPEYLSTYQLTDKSDVYAFGVLLVELATGRPPVERTRGGEARLTTKWALQRCRAGEAVVAMDPRMRRSPASVAAVERALALAAQSVAAARDERPSMRRCSELLWTIRRDYHRQEEPRCGAVAEERSDEWVIR

SEQ ID NO: 3015 - protein, 437 aa, Zea mays subsp. mays
  peptide (1)..(437): Ceres Seq. ID no. 13494435
MASWPAASRRRSSGGMKSAELSGSGASYGYGRTSSSPDACGYGRQLSAYSARSSQVSRSGSFSAAAQRVAGAFTGCFVPRRQVKAGEEEEEEEKKSKRSMDSGSYHGWNEANLSAAAGSWQEGRALTIADVSKATSNFSEKNVIRQGRSSTMYRGKLRDGSQIAVKCVTKLNDQSPTAELWRELEKIQHRNLARLFGFFERAADSLVVVEYVGNGSLREHLDESCGNGLELAQRLNIAIDVAQAITYLHEYKERPIIHGGIRSSGVLLTDALTAKVAGFGLAGTAASGSGSGSDATPARSAAGYVDPEYLSTYQLTDKSDVYAFGVLLVELATGRPPVERTRGGEARLTTKWALQRCRAGEAVVAMDPRMRRSPASVAAVERALALAAQSVAAARDERPSMRRCSELLWTIRRDYHRQEEPRCGAVAEERSDEWVIR

SEQ ID NO: 3016 - protein, 422 aa, Zea mays subsp. mays
  peptide (1)..(422): Ceres Seq. ID no. 13494436
MKSAELSGSGASYGYGRTSSSPDACGYGRQLSAYSARSSQVSRSGSFSAAAQRVAGAFTGCFVPRRQVKAGEEEEEEEKKSKRSMDSGSYHGWNEANLSAAAGSWQEGRALTIADVSKATSNFSEKNVIRQGRSSTMYRGKLRDGSQIAVKCVTKLNDQSPTAELWRELEKIQHRNLARLFGFFERAADSLVVVEYVGNGSLREHLDESCGNGLELAQRLNIAIDVAQAITYLHEYKERPIIHGGIRSSGVLLTDALTAKVAGFGLAGTAASGSGSGSDATPARSAAGYVDPEYLSTYQLTDKSDVYAFGVLLVELATGRPPVERTRGGEARLTTKWALQRCRAGEAVVAMDPRMRRSPASVAAVERALALAAQSVAAARDERPSMRRCSELLWTIRRDYHRQEEPRCGAVAEERSDEWVIR

SEQ ID NO: 3017 - DNA, 1565 bp, Zea mays subsp. mays
  misc_feature (1)..(1565): Ceres Seq. ID no. 12410445
  misc_feature (1)..(1565): Ortholog of  Ceres SEQ ID NO 15168517 as cited in SEQ ID NO 57071
ggcaacgagcctgctgctccagctaccccgaaaccccgtccaacgtccatggctatccacctccgggcacacgccttcgcggccaacccgctgcgtggcgtctccgccgccaccaccgccatgtccccctccgcggccgccgaggcactccgctacctcctcgaccccagctccgccgccgccgccgccaatcccagccagtacctctccaagatccttcctttccgcaggggccgcccactcgcgcgctccactgaccctcccgcggcgccggcctggcgcctcgcgtggctcccgccgtcccgcgtccccggggtggccccggacgccttcgtcttcctgggcgcgctcgtcgagggggacggcaaggaggccgccgcgtactgggcggtcgacgtcagcgagggcgagggagccagggttggtgggccggcggacggggatgggccgtcggcgtttgtggacttgaggacgctcatggtggccacggactggagcgacaaggacgccatggcggagctcgccatcgcaggacatgctcgagcactgctagaatggcacagcacggcaaaattttgtggagcttgtggagcaaaggctgtacctactgaagccgggaggcgtaagcagtgcagcaacgattcctgcaagaagaggatataccctagaattgatccggttgtgatcatgttggtcattgataaagaaaatgatcgggcactcttaagccgccagtcaagatttgtgcctcgtatgtggagttgtcttgctggtttcatagagccaggagaaagcctggaagaggcagtgagacgagaaacatgggaggaaactggtatcgaagttgggcaagtcgtttatcacagttctcaaccatggcctgttgggccaaatactatgccgtgtcaactgatggtgggcttctttgcttatgctaaatcattggagataaacgtggaacaagcaggagcttgaagatgcccagtggcacaaccgcgaagacgtcaagaaagcgttgacgtttgctgaatacgagaaagcccagagaacaagcgctgccaaggtcgatcagatctgcaagggcgctgagaaagggcagaacccctctgccgacttcaaagttggaagcggcgagcctgctccaatgtttgtcccaggaccctacgccattgctcaccaccttatctcgtcgtgggctttcgagggagcaccgaagctgcctagttcattctcaaacctataagcctggaccctggtgttcagacagacgatgacaggaactggacccctgtgctgcgggctcatggatcacctgtgttgccgtgagtgtaattctgatagtgtgtgtccgttgccggttgtgataaaataaaatagcaatagagtactgggtacagaagacttgccggaggatttggcatcaatggacatgtatatccattgcctttttacatgttgatcctctttgtatcacacgtaatgttgcatacttgcatagatacaacaatgatatacatcacacagtgtactcatgcatttatacatgtattcagataactggattc

SEQ ID NO: 3018 - protein, 324 aa, Zea mays subsp. mays
  peptide (1)..(324): Ceres Seq. ID no. 12410446
GNEPAAPATPKPRPTSMAIHLRAHAFAANPLRGVSAATTAMSPSAAAEALRYLLDPSSAAAAANPSQYLSKILPFRRGRPLARSTDPPAAPAWRLAWLPPSRVPGVAPDAFVFLGALVEGDGKEAAAYWAVDVSEGEGARVGGPADGDGPSAFVDLRTLMVATDWSDKDAMAELAIAGHARALLEWHSTAKFCGACGAKAVPTEAGRRKQCSNDSCKKRIYPRIDPVVIMLVIDKENDRALLSRQSRFVPRMWSCLAGFIEPGESLEEAVRRETWEETGIEVGQVVYHSSQPWPVGPNTMPCQLMVGFFAYAKSLEINVEQAGA

SEQ ID NO: 3019 - protein, 308 aa, Zea mays subsp. mays
  peptide (1)..(308): Ceres Seq. ID no. 12410447
MAIHLRAHAFAANPLRGVSAATTAMSPSAAAEALRYLLDPSSAAAAANPSQYLSKILPFRRGRPLARSTDPPAAPAWRLAWLPPSRVPGVAPDAFVFLGALVEGDGKEAAAYWAVDVSEGEGARVGGPADGDGPSAFVDLRTLMVATDWSDKDAMAELAIAGHARALLEWHSTAKFCGACGAKAVPTEAGRRKQCSNDSCKKRIYPRIDPVVIMLVIDKENDRALLSRQSRFVPRMWSCLAGFIEPGESLEEAVRRETWEETGIEVGQVVYHSSQPWPVGPNTMPCQLMVGFFAYAKSLEINVEQAGA

SEQ ID NO: 3020 - protein, 284 aa, Zea mays subsp. mays
  peptide (1)..(284): Ceres Seq. ID no. 12410448
MSPSAAAEALRYLLDPSSAAAAANPSQYLSKILPFRRGRPLARSTDPPAAPAWRLAWLPPSRVPGVAPDAFVFLGALVEGDGKEAAAYWAVDVSEGEGARVGGPADGDGPSAFVDLRTLMVATDWSDKDAMAELAIAGHARALLEWHSTAKFCGACGAKAVPTEAGRRKQCSNDSCKKRIYPRIDPVVIMLVIDKENDRALLSRQSRFVPRMWSCLAGFIEPGESLEEAVRRETWEETGIEVGQVVYHSSQPWPVGPNTMPCQLMVGFFAYAKSLEINVEQAGA

SEQ ID NO: 3021 - DNA, 1320 bp, Zea mays subsp. mays
  misc_feature (1)..(1320): Ceres Seq. ID no. 12367593
  misc_feature (1)..(1320): Ortholog of  Ceres SEQ ID NO 13585143 as cited in SEQ ID NO 67757
agatgggacaaaaaaaaaatcgcgccgagtaccagagcgacgctacgcggcgtgacttctcccgaaacctccacatacccaaacccaccgaccgccgcctaggcttccacctctcccgctcaaactccggccactgaggtcgaacccgagcccgcgccgcagcggcacgatggtgaacgacgccgcggcgatggccgtcgtgagggcggcgcgcccagccctccgtggcgcccacgatggcgtcgccttcgccgcccacgccgccttcctcgccgatgggtactcgctctgcgccgtcggccctgccgcgctcgccgacccctcgcccttaggtgatgaggaggtggggattgatggttggaacatcatggagaattgttacgcctttttgtatagcaaggaggagaagggcaagaagaaaagggtactagtgaaatgtctggtgatcggtgaagtacttgcaattgatgtcttggatcttgaggcacaagataaggcgccttataatatccagattaatgtgaaagacttctttgtcgaagagcagccaaagaattatggggatatgtacaagaattttacaagtctcattgagactgtgaactcaaatgtgttgtgcaaattggatggagacggttccggtgctgaggctgctaagagcactgccgccgctgctgctaagaactctgatgggagaagttcaccaatacagagctctggagatccaggtcctagaactgctgacccttccggcctaatttatcctccaatagcaccgattggttctgatgatctctaccctgggcctggtgcaggcttctaccctcacagtggcattgggagcggtggcagcatgcatgttggtcctaatgatccgcgcttctttccttctaatcccttctctgccccatttggtgggcttgggagtgttccaccaggtagtcgctatgatccaattggcccacctgacgtcccagggtttgagccatctagctttgttaggcgtccaaggcggcctccaggcgggagcacccaccccgacctcgagttcttccagcaaggcccagacttctgagagtcgcgcagaggccggccggagcctcgccctaccctcacgaaataacttcaaaatgctgagccctcgagctagatatctcgcttggtgtgattgcaactgctgtatcaagtatagtcctagtgcgctttggctgtaaagatggatgtgaacatcgtcctagtgtatttactcttaattccaaaccatcgcctgtcatagcctaatatactcttttgtgtataatatcgggtgtaccggagccc

SEQ ID NO: 3022 - protein, 301 aa, Zea mays subsp. mays
  peptide (1)..(301): Ceres Seq. ID no. 12367594
MVNDAAAMAVVRAARPALRGAHDGVAFAAHAAFLADGYSLCAVGPAALADPSPLGDEEVGIDGWNIMENCYAFLYSKEEKGKKKRVLVKCLVIGEVLAIDVLDLEAQDKAPYNIQINVKDFFVEEQPKNYGDMYKNFTSLIETVNSNVLCKLDGDGSGAEAAKSTAAAAAKNSDGRSSPIQSSGDPGPRTADPSGLIYPPIAPIGSDDLYPGPGAGFYPHSGIGSGGSMHVGPNDPRFFPSNPFSAPFGGLGSVPPGSRYDPIGPPDVPGFEPSSFVRRPRRPPGGSTHPDLEFFQQGPDF

SEQ ID NO: 3023 - protein, 294 aa, Zea mays subsp. mays
  peptide (1)..(294): Ceres Seq. ID no. 12367595
MAVVRAARPALRGAHDGVAFAAHAAFLADGYSLCAVGPAALADPSPLGDEEVGIDGWNIMENCYAFLYSKEEKGKKKRVLVKCLVIGEVLAIDVLDLEAQDKAPYNIQINVKDFFVEEQPKNYGDMYKNFTSLIETVNSNVLCKLDGDGSGAEAAKSTAAAAAKNSDGRSSPIQSSGDPGPRTADPSGLIYPPIAPIGSDDLYPGPGAGFYPHSGIGSGGSMHVGPNDPRFFPSNPFSAPFGGLGSVPPGSRYDPIGPPDVPGFEPSSFVRRPRRPPGGSTHPDLEFFQQGPDF

SEQ ID NO: 3024 - protein, 235 aa, Zea mays subsp. mays
  peptide (1)..(235): Ceres Seq. ID no. 12367596
MENCYAFLYSKEEKGKKKRVLVKCLVIGEVLAIDVLDLEAQDKAPYNIQINVKDFFVEEQPKNYGDMYKNFTSLIETVNSNVLCKLDGDGSGAEAAKSTAAAAAKNSDGRSSPIQSSGDPGPRTADPSGLIYPPIAPIGSDDLYPGPGAGFYPHSGIGSGGSMHVGPNDPRFFPSNPFSAPFGGLGSVPPGSRYDPIGPPDVPGFEPSSFVRRPRRPPGGSTHPDLEFFQQGPDF

SEQ ID NO: 3025 - DNA, 1482 bp, Zea mays subsp. mays
  misc_feature (1)..(1482): Ceres Seq. ID no. 12373828
  misc_feature (1)..(1482): Ortholog of  Ceres SEQ ID NO 14307296 as cited in SEQ ID NO 53966
  misc_feature (1)..(1482): Ortholog of  Ceres SEQ ID NO 15175368 as cited in SEQ ID NO 60071
  misc_feature (1)..(1482): Ortholog of  Ceres SEQ ID NO 15225423 as cited in SEQ ID NO 64689
  misc_feature (1)..(1482): Ortholog of  Ceres SEQ ID NO 15179340 as cited in SEQ ID NO 0
gcacgagaccattacctagaacatcctaatcaaaaaacggtctgctctctttctctctcttcccctattacgagtcccagcagctagaacaacacaaaccctctcctgtagctagatgtgtggtagtaagctctcgctgttaacctcggcaaagaacctactggaagtcggaagggaaaaagcaaagtaggagtagctagctagtatagcaaacaagctcccccgtgtgccgacgagccgccgactaggtcagccgccatggacttcgacgagcacgatgacggcgacgaggagatgacgccgatgcccgtgagctcgagctacgatgcgccgatgcagccggggctgggactgggcggaggaggcggcgagaccccgaagcacggggattctgctggagccgggagcttcaggacgccgccagcaggcggcttcgggggaggaggcgcaggcgcaggcgcaggcgcaggcggtggcggggccaccaggtaccgggagtgcctcaagaaccacgcggtcggcatcggcgggcacgcggtggacggctgcggcgaattcatggccgctggcgaggagggctccatcgacgcgctgcgctgcgcggcctgcggctgccaccgcaacttccaccgcaaggagtccgacaactcgccagcgggaggcgggggcgtcgcgccgcccgatcccgccgccgccctgtccccggccgccatcacagcctacggcgccgccgtggcggcgcaccaccaccagttctccccctactaccgcacccctgccgggtacttcctgcaccagcagctggcggccgccgccgggcacatgcagcgcccgctcgcgctgccgtccacctcccactcgctggggcgcgaagagggcgacgacgtgtccgggctgatcggccccatggtggtggcgcccatgatgggcatgtcgctgggcccgggcggcggcccgtcggggggctcgtccggcggctcggggtccggcaagaagcggttccgcaccaagttcacgcaggagcagaaggaccggatgctggcgttcgcggagcggctggggtggcgcatccagaagcacgacgaggccgccgtgcagcagttctgcgaggaggtctgcgtcaagcgccacgtgctcaaggtgtggatgcacaacaacaagcacaccctcggcaagaagccatgaccgaccgccggccanttcttcgcgccggcgcctgcactgtgtgctagctaggtacaccaccactgatcgcattgcatcatagatctcctcctctctttctcagcaccgtattgcttgctagccttttttttttgggggtactcctctccttgccttcctttttttagagttttagctagaaatgtaagctagctacttaggtcagtagcgagcagcagttcttggattttagctacgatggagaagacggccgttgttctcttgtcatcttcattattttattgtacttctttggcc

SEQ ID NO: 3026 - protein, 308 aa, Zea mays subsp. mays
  peptide (1)..(308): Ceres Seq. ID no. 12373829
MDFDEHDDGDEEMTPMPVSSSYDAPMQPGLGLGGGGGETPKHGDSAGAGSFRTPPAGGFGGGGAGAGAGAGGGGATRYRECLKNHAVGIGGHAVDGCGEFMAAGEEGSIDALRCAACGCHRNFHRKESDNSPAGGGGVAPPDPAAALSPAAITAYGAAVAAHHHQFSPYYRTPAGYFLHQQLAAAAGHMQRPLALPSTSHSLGREEGDDVSGLIGPMVVAPMMGMSLGPGGGPSGGSSGGSGSGKKRFRTKFTQEQKDRMLAFAERLGWRIQKHDEAAVQQFCEEVCVKRHVLKVWMHNNKHTLGKKP

SEQ ID NO: 3027 - protein, 296 aa, Zea mays subsp. mays
  peptide (1)..(296): Ceres Seq. ID no. 12373830
MTPMPVSSSYDAPMQPGLGLGGGGGETPKHGDSAGAGSFRTPPAGGFGGGGAGAGAGAGGGGATRYRECLKNHAVGIGGHAVDGCGEFMAAGEEGSIDALRCAACGCHRNFHRKESDNSPAGGGGVAPPDPAAALSPAAITAYGAAVAAHHHQFSPYYRTPAGYFLHQQLAAAAGHMQRPLALPSTSHSLGREEGDDVSGLIGPMVVAPMMGMSLGPGGGPSGGSSGGSGSGKKRFRTKFTQEQKDRMLAFAERLGWRIQKHDEAAVQQFCEEVCVKRHVLKVWMHNNKHTLGKKP

SEQ ID NO: 3028 - protein, 293 aa, Zea mays subsp. mays
  peptide (1)..(293): Ceres Seq. ID no. 12373831
MPVSSSYDAPMQPGLGLGGGGGETPKHGDSAGAGSFRTPPAGGFGGGGAGAGAGAGGGGATRYRECLKNHAVGIGGHAVDGCGEFMAAGEEGSIDALRCAACGCHRNFHRKESDNSPAGGGGVAPPDPAAALSPAAITAYGAAVAAHHHQFSPYYRTPAGYFLHQQLAAAAGHMQRPLALPSTSHSLGREEGDDVSGLIGPMVVAPMMGMSLGPGGGPSGGSSGGSGSGKKRFRTKFTQEQKDRMLAFAERLGWRIQKHDEAAVQQFCEEVCVKRHVLKVWMHNNKHTLGKKP

SEQ ID NO: 3029 - DNA, 1149 bp, Zea mays subsp. mays
  misc_feature (1)..(1149): Ceres Seq. ID no. 12407816
  misc_feature (1)..(1149): Ortholog of  Ceres SEQ ID NO 14312699 as cited in SEQ ID NO 0
agttcgcttcgtgagttatctcctctcgatcgatcgcttcctccatcgaggcgggaaagcgccgcccagatcgccggatagcaagctggcgacctcaccagctccgagcagcagcagggaggctcgtggaaccattagtcgttttctgtcagcggcaacagagcacaccatggaggggctgagctggagaacggtgtgttgtttatcggtgctctgtgccgtgctgttcttgcgcccggccgagggcatccgcttcgtgatcgacagggaagagtgcttctcgcataacgtggaatacgagggggatactgtccatgtatccttcgtcgtcatcaaggctgacaccccgtggcattacagcgaggagggcgtcgatcttgtggttaaggatcctaatggcgctcaagtccgtgattcccgagataagactagtgacaagtttgagttcatagttcagaagagaggcgtccatcgcttctgcttcacgaacaaatccccatatcacgaaacgatagacttcgatgttcatgttggccatttttcatatttcgagcagcatgccaaagatgagcattttgcaccactttttgatcaaataggcaagttggatgaggcactttataatattcagttcgaacagcactggctagaggcccagactgaccgtcaagcaatattgaacgagaacatgagcaggagggcagtccataaggcgctcttcgagtcagcggcgctgatcgccgccagcgtcatccaagtctacctcctgcgccggctcttcgagcgcaagctggggacgtctcgggtttaaggcaacagtagccaacttgcccttcgcagccaccatgatcacaccgacataaccgttacgaattcgaatggttgctagatcagctaaataccacatgtttgtggacttcagttacatgtaatattttttttgtgattccacagatgagaactcttcaaagtttaaaccgtcgatttagccttcattctgcctcagcattttatcgccttgtttctgtagtagcaaccagtaacaacaaggttgcctgtagtctgtacaagatagtagaggttttttttttctgtgctggttgtacgacacaactgtgaatgacttgccgtagacggatactatactgt

SEQ ID NO: 3030 - protein, 269 aa, Zea mays subsp. mays
  peptide (1)..(269): Ceres Seq. ID no. 12407817
VRFVSYLLSIDRFLHRGGKAPPRSPDSKLATSPAPSSSREARGTISRFLSAATEHTMEGLSWRTVCCLSVLCAVLFLRPAEGIRFVIDREECFSHNVEYEGDTVHVSFVVIKADTPWHYSEEGVDLVVKDPNGAQVRDSRDKTSDKFEFIVQKRGVHRFCFTNKSPYHETIDFDVHVGHFSYFEQHAKDEHFAPLFDQIGKLDEALYNIQFEQHWLEAQTDRQAILNENMSRRAVHKALFESAALIAASVIQVYLLRRLFERKLGTSRV

SEQ ID NO: 3031 - protein, 213 aa, Zea mays subsp. mays
  peptide (1)..(213): Ceres Seq. ID no. 12407818
MEGLSWRTVCCLSVLCAVLFLRPAEGIRFVIDREECFSHNVEYEGDTVHVSFVVIKADTPWHYSEEGVDLVVKDPNGAQVRDSRDKTSDKFEFIVQKRGVHRFCFTNKSPYHETIDFDVHVGHFSYFEQHAKDEHFAPLFDQIGKLDEALYNIQFEQHWLEAQTDRQAILNENMSRRAVHKALFESAALIAASVIQVYLLRRLFERKLGTSRV

SEQ ID NO: 3032 - DNA, 1597 bp, Zea mays subsp. mays
  misc_feature (1)..(1597): Ceres Seq. ID no. 12352156
  misc_feature (1)..(1597): Ortholog of  Ceres SEQ ID NO 15177320 as cited in SEQ ID NO 52645
  misc_feature (1)..(1597): Ortholog of  Ceres SEQ ID NO 15171359 as cited in SEQ ID NO 57279
  misc_feature (1)..(1597): Ortholog of  Ceres SEQ ID NO 14313840 as cited in SEQ ID NO 59568
  misc_feature (1)..(1597): Ortholog of  Ceres SEQ ID NO 13662245 as cited in SEQ ID NO 62708
  misc_feature (1)..(1597): Ortholog of  Ceres SEQ ID NO 14314084 as cited in SEQ ID NO 63256
tcacactctgcccagctaagctaagctccctccgtccatcggcatggcgactaccactactaccatcctcctcctcctcctcgtcgcagccacagccgtctcggcggccgacctctccgtgtaccacaacgtgcacccgccgtccccgtccccgctcgagtccatcatcgcgctcgcccgcgccgacgacgcgcggctcctcttcctctcatccaaggcggcctcgtccggcggcgtcacctccgctcccgtcgcctccggccagactccgccctcgtacgtcgtccgcgcggggctcggcaccccggtccagcagctgctcctcgcgctcgacaccagcgccgacgccacctggtcgcactgcgcgccgtgcgacacgtgccccgccggcagccgcttcatcccggccagctcctcctcgtacgcctccctcccgtgcgcctccgactggtgcccgctcttcgagggccagccgtgcccggcgaatcaggacgcctcggcgccgctgccggcgtgcgccttctccaagccgttcgcggacacctcgttccaggcgtcgctgggcagcgacacgctgcgcctgggcaaggacgccatcgccggctacgcgttcgggtgcgtgggcgcggtggccgggccgacgaccaacctgccgaagcaggggctcctcggcctcggccggggccccatgtctctgctatcccagaccgggagcacgtacaacggcgtcttctcctactgcctgcccagctacaggtcctactacttctccggctccctccggctgggagccgccgggcagcccaggaacgtccggtacacgccgctgctgaccaacccgcaccgcccgtcgctctactacgtgaacgtgacggggctcagcgtgggtcggacctgggtgaaggtccccgcggggtcgttcgcgttcgacccggccaccggcgccggcacggtgatcgactcgggcacggtgatcacgcggtggacagcacccgtgtacgcggcgctgcgcgaggagttccggcggcaggtggcggcgccgagcgggtacacgtcgctgggagcgttcgacacgtgcttcaacacggacgaggtggcggcgggcggcgcgccgcccgtgacgctgcacatggacggcggcgtggacctgacgctgccgatggagaacacgctgatccacagcagcgccacgccgctggcgtgcctggccatggccgaggcgccgcagaacgtgaacgccgtcgtgaacgtggtggccaaccttcagcagcagaacgtgcgggtcgtcgtcgacgtcgccggctcgcgcgtcgggttcgcgagggagccctgcaactgagcccctgaatccgtccgtgccctatgcacgggaggaaggaggagacgcgctgcggctgctgcatcggtcggtgtgcagttagttgtcctgttagtctatgctacgttgtctgcactctgcaataacggacgtgacccggggaaaaaaactgtttcgtcacgggtagctagagaatcacgtaaggctcttgttttcgtttgtgtcctataatgtatggctattggcctgtttcgagaggttaaaatttggaggtgctgc

SEQ ID NO: 3033 - protein, 431 aa, Zea mays subsp. mays
  peptide (1)..(431): Ceres Seq. ID no. 12352157
MATTTTTILLLLLVAATAVSAADLSVYHNVHPPSPSPLESIIALARADDARLLFLSSKAASSGGVTSAPVASGQTPPSYVVRAGLGTPVQQLLLALDTSADATWSHCAPCDTCPAGSRFIPASSSSYASLPCASDWCPLFEGQPCPANQDASAPLPACAFSKPFADTSFQASLGSDTLRLGKDAIAGYAFGCVGAVAGPTTNLPKQGLLGLGRGPMSLLSQTGSTYNGVFSYCLPSYRSYYFSGSLRLGAAGQPRNVRYTPLLTNPHRPSLYYVNVTGLSVGRTWVKVPAGSFAFDPATGAGTVIDSGTVITRWTAPVYAALREEFRRQVAAPSGYTSLGAFDTCFNTDEVAAGGAPPVTLHMDGGVDLTLPMENTLIHSSATPLACLAMAEAPQNVNAVVNVVANLQQQNVRVVVDVAGSRVGFAREPCN

SEQ ID NO: 3034 - protein, 276 aa, Zea mays subsp. mays
  peptide (1)..(276): Ceres Seq. ID no. 12352158
TLCPAKLSSLRPSAWRLPLLPSSSSSSSQPQPSRRPTSPCTTTCTRRPRPRSSPSSRSPAPTTRGSSSSHPRRPRPAASPPLPSPPARLRPRTSSARGSAPRSSSCSSRSTPAPTPPGRTARRATRAPPAAASSRPAPPRTPPSRAPPTGARSSRASRARRIRTPRRRCRRAPSPSRSRTPRSRRRWAATRCAWARTPSPATRSGAWARWPGRRPTCRSRGSSASAGAPCLCYPRPGARTTASSPTACPATGPTTSPAPSGWEPPGSPGTSGTRRC

SEQ ID NO: 3035 - protein, 216 aa, Zea mays subsp. mays
  peptide (1)..(216): Ceres Seq. ID no. 12352159
MSLLSQTGSTYNGVFSYCLPSYRSYYFSGSLRLGAAGQPRNVRYTPLLTNPHRPSLYYVNVTGLSVGRTWVKVPAGSFAFDPATGAGTVIDSGTVITRWTAPVYAALREEFRRQVAAPSGYTSLGAFDTCFNTDEVAAGGAPPVTLHMDGGVDLTLPMENTLIHSSATPLACLAMAEAPQNVNAVVNVVANLQQQNVRVVVDVAGSRVGFAREPCN

SEQ ID NO: 3036 - DNA, 1481 bp, Zea mays subsp. mays
  misc_feature (1)..(1481): Ceres Seq. ID no. 12373824
  misc_feature (1)..(1481): Ortholog of  Ceres SEQ ID NO 15170752 as cited in SEQ ID NO 52719
aacaaaataccgatcgcccgaccccttcagtgccttgactcacgcccgcggcaaccggcgacgaggcggcacgaccctccagtccggagtccgccatgcctcacgccgccgccaccgccgctgcggcgctcccgcgtgcctctctgctcgttatctcggcgccgctccgcgactccctcgccgcggcgccgtacgagccccccgcgggcgcatccgcctccgtcaagtccctcctcgcctctctcctcccttcgccttcccctccccagccccagcttcaggagccggcgggtaaggagtctggggacctcctcctcttctgcgctgccgtactcgcggcctccccggagtaccccgcgctgcactgggtcccggcgagcctcgtgggcgcggccgccgccgcggtgaacgagctggcggcggcgggaggttggggcagcgttggggatatggtggtggccgtggcaccggaggtggtgcctcctctcaaggccgtggtgaaggactcgtgcgtcgatgctgacagcgacgagattggggctgtgaagccgcccaaggagcacgcagcagtcgccgcgcaccagttccggtggctggtgtctcaggtaagctaccctaagctcggggatttgtgttcgttagtcattccatgtgccctgacaaccttagatcattggtcaccagaagttaaggtacagggaatggtaagctttgtacacatagcgaagaatgtgaaagcaacggaattaagtttgtatgaagatgccatacttgatgcgtgctgtcagaacattcctgcagatgatgagttatggtaccaggttattgaggtatctgtgatgttgctgacattcacccagcggagcaatcctcgtagcccctggtatgatcgaatgcttagtgagatgttgggccacctggaacggcagccactaaataaagagcgtcgtgttgcatggttgacccttattgggccagtttttgatgctatgggcctcttcctgttggcacattttcgccgccttttctcactgtttttccaatggatgcacactgatgataataagacagttcttctgactttaaagcaaatacatgccattatcaagcttacctggatcaggaagtcaccttatactttgaggctggtggacgagcttgttctattatataaagaatcagccacaaggagcaaccgtgaaatcatgcgagatcatatcctggagatacttgtactgcttcagaactgcaagggacatcaatttgaggaagcttggaagaaacatgaactagacccagacttgacgatgctgctgtccactttcaataagctttgtataaaaaacagttcaccgtgatgttgagttcaactacatgtgttatcagtgtaaatatttcaccatcgcctatcctgtcactgaatatttcactactgcctattctgccactctcatctgctgaaggaaatcagccttgattct

SEQ ID NO: 3037 - protein, 420 aa, Zea mays subsp. mays
  peptide (1)..(420): Ceres Seq. ID no. 12373825
MPHAAATAAAALPRASLLVISAPLRDSLAAAPYEPPAGASASVKSLLASLLPSPSPPQPQLQEPAGKESGDLLLFCAAVLAASPEYPALHWVPASLVGAAAAAVNELAAAGGWGSVGDMVVAVAPEVVPPLKAVVKDSCVDADSDEIGAVKPPKEHAAVAAHQFRWLVSQVSYPKLGDLCSLVIPCALTTLDHWSPEVKVQGMVSFVHIAKNVKATELSLYEDAILDACCQNIPADDELWYQVIEVSVMLLTFTQRSNPRSPWYDRMLSEMLGHLERQPLNKERRVAWLTLIGPVFDAMGLFLLAHFRRLFSLFFQWMHTDDNKTVLLTLKQIHAIIKLTWIRKSPYTLRLVDELVLLYKESATRSNREIMRDHILEILVLLQNCKGHQFEEAWKKHELDPDLTMLLSTFNKLCIKNSSP

SEQ ID NO: 3038 - protein, 302 aa, Zea mays subsp. mays
  peptide (1)..(302): Ceres Seq. ID no. 12373826
MVVAVAPEVVPPLKAVVKDSCVDADSDEIGAVKPPKEHAAVAAHQFRWLVSQVSYPKLGDLCSLVIPCALTTLDHWSPEVKVQGMVSFVHIAKNVKATELSLYEDAILDACCQNIPADDELWYQVIEVSVMLLTFTQRSNPRSPWYDRMLSEMLGHLERQPLNKERRVAWLTLIGPVFDAMGLFLLAHFRRLFSLFFQWMHTDDNKTVLLTLKQIHAIIKLTWIRKSPYTLRLVDELVLLYKESATRSNREIMRDHILEILVLLQNCKGHQFEEAWKKHELDPDLTMLLSTFNKLCIKNSSP

SEQ ID NO: 3039 - protein, 218 aa, Zea mays subsp. mays
  peptide (1)..(218): Ceres Seq. ID no. 12373827
MVSFVHIAKNVKATELSLYEDAILDACCQNIPADDELWYQVIEVSVMLLTFTQRSNPRSPWYDRMLSEMLGHLERQPLNKERRVAWLTLIGPVFDAMGLFLLAHFRRLFSLFFQWMHTDDNKTVLLTLKQIHAIIKLTWIRKSPYTLRLVDELVLLYKESATRSNREIMRDHILEILVLLQNCKGHQFEEAWKKHELDPDLTMLLSTFNKLCIKNSSP

SEQ ID NO: 3040 - DNA, 1671 bp, Zea mays subsp. mays
  misc_feature (1)..(1671): Ceres Seq. ID no. 12594232
  misc_feature (1)..(1671): Ortholog of  Ceres SEQ ID NO 13600071 as cited in SEQ ID NO 0
aaaaatttccccatctccgacctcccccttcctctccccctgccgctccccgcgccgagaaggagaaccccagccgccgcgcagcgcgccgcccatggcctcctcgtcggagaacgcggctgtgccgccggaggaggagccccaggccccgccgccgccggacacagagcctaccgaggcggcgcccggcgaggcggaggatgagccgcaaaccctagagcgggcgcaggagctcttcgacaggggttccaaggccatcgaggatgaggacttcgtcgacgccgtagactgtctcagccgagcgctcgagatcagggcttcacattatggagagctcgcaccggagtgtgccagcacatacttcaaatatggatgtgccctgctatacaaagctcaggaggagagtgatgttttgggaaatgttcccaagagcttgccaaatgaagactcagtgaagagtacagctactaaagatgacagtggaacctcaaaggtctctggtaccgatgcggaggatgctgcgtcatcagaaaaagttgatgctgaagaaggtcacaactcaaatggcaaaaatcaggagaatgggaatggtgaagttgagaaagatgatgacgacgtcgacgatgatgagaagatgggagatgaagaggataatgatttggatctttcttggaaaatgttggacattgctagggcaatagttgagaagagccaagataacactatggagaaagtaaaaatatattctgctcttgctgaagtggcaacggaaagagaggacatggacaactcactcagtgactatatgaaagctttatccatgttggagcatttggttgagcctgaccatcgtcgagttgtggaattaaacttccgcatttgtttggtttatgaactagtttccaagatcggagaagcaatttcatactgtgcaaaagcaatttcgctatgcaagtcacgcatacagagcctgaaaagttccaaggatgctttgttggctggtatagatggtgatgcatctgctgctgaagctgaaggaggctcagaaaaatctgccattgaaaaagagctagagcagcttactagcatattgcctgatcttgagaagaagcttgaggacctgtctgaagcaaacccaagcgctgacatggatgagatggtgaaggcaatcgtgtccagggtaactgatgtgatgccaaaagctgcatcttttacttcttcccagatggcaacctcaagcaatggattcgactcctcggttatgtctacggcagcgacaaccggaagctctggaagcaccgtgactgaccttggggttgtaggcagaggcgtcaaacgagctagcatcaagccgatctctgctgaacctgctgctaagaaacctgcacttgattcaccatctcaacaaggtgacagcagcatcaactctgaggttgttcctgcaacgcagactggagacgagtcagtatctaagtaaattacaatttcattagccctactgtaatgttaacttgctggaacatattagctgctatgtaaacgcttaagaagggactgctggggccatagactcatcgtgagctgaccattgaaatgttaaattgctgagatcatcatggcggtaaatcatgtctgctatatcaaatatgcttggtgagatgtgtactttcc

SEQ ID NO: 3041 - protein, 491 aa, Zea mays subsp. mays
  peptide (1)..(491): Ceres Seq. ID no. 12594233
KISPSPTSPFLSPCRSPRREGEPQPPRSAPPMASSSENAAVPPEEEPQAPPPPDTEPTEAAPGEAEDEPQTLERAQELFDRGSKAIEDEDFVDAVDCLSRALEIRASHYGELAPECASTYFKYGCALLYKAQEESDVLGNVPKSLPNEDSVKSTATKDDSGTSKVSGTDAEDAASSEKVDAEEGHNSNGKNQENGNGEVEKDDDDVDDDEKMGDEEDNDLDLSWKMLDIARAIVEKSQDNTMEKVKIYSALAEVATEREDMDNSLSDYMKALSMLEHLVEPDHRRVVELNFRICLVYELVSKIGEAISYCAKAISLCKSRIQSLKSSKDALLAGIDGDASAAEAEGGSEKSAIEKELEQLTSILPDLEKKLEDLSEANPSADMDEMVKAIVSRVTDVMPKAASFTSSQMATSSNGFDSSVMSTAATTGSSGSTVTDLGVVGRGVKRASIKPISAEPAAKKPALDSPSQQGDSSINSEVVPATQTGDESVSK

SEQ ID NO: 3042 - protein, 460 aa, Zea mays subsp. mays
  peptide (1)..(460): Ceres Seq. ID no. 12594234
MASSSENAAVPPEEEPQAPPPPDTEPTEAAPGEAEDEPQTLERAQELFDRGSKAIEDEDFVDAVDCLSRALEIRASHYGELAPECASTYFKYGCALLYKAQEESDVLGNVPKSLPNEDSVKSTATKDDSGTSKVSGTDAEDAASSEKVDAEEGHNSNGKNQENGNGEVEKDDDDVDDDEKMGDEEDNDLDLSWKMLDIARAIVEKSQDNTMEKVKIYSALAEVATEREDMDNSLSDYMKALSMLEHLVEPDHRRVVELNFRICLVYELVSKIGEAISYCAKAISLCKSRIQSLKSSKDALLAGIDGDASAAEAEGGSEKSAIEKELEQLTSILPDLEKKLEDLSEANPSADMDEMVKAIVSRVTDVMPKAASFTSSQMATSSNGFDSSVMSTAATTGSSGSTVTDLGVVGRGVKRASIKPISAEPAAKKPALDSPSQQGDSSINSEVVPATQTGDESVSK

SEQ ID NO: 3043 - protein, 280 aa, Zea mays subsp. mays; identical to SEQ ID NO: 2639
  peptide (1)..(280): Ceres Seq. ID no. 12594235

SEQ ID NO: 3044 - DNA, 1252 bp, Zea mays subsp. mays
  misc_feature (1)..(1252): Ceres Seq. ID no. 12412175
  misc_feature (1)..(1252): Ortholog of  Ceres SEQ ID NO 12562215 as cited in SEQ ID NO 20489
  misc_feature (1)..(1252): Ortholog of  Ceres SEQ ID NO 13595548 as cited in SEQ ID NO 51024
  misc_feature (1)..(1252): Ortholog of  Ceres SEQ ID NO 13582350 as cited in SEQ ID NO 56734
  misc_feature (1)..(1252): Ortholog of  Ceres SEQ ID NO 12476493 as cited in SEQ ID NO 58163
  misc_feature (1)..(1252): Ortholog of  Ceres SEQ ID NO 14313459 as cited in SEQ ID NO 62395
  misc_feature (1)..(1252): Ortholog of  Ceres SEQ ID NO 13597439 as cited in SEQ ID NO 64081
  misc_feature (1)..(1252): Ortholog of  Ceres SEQ ID NO 13597233 as cited in SEQ ID NO 64370
  misc_feature (1)..(1252): Ortholog of  Ceres SEQ ID NO 13623850 as cited in SEQ ID NO 0
  misc_feature (1)..(1252): Ortholog of  Ceres SEQ ID NO 14309162 as cited in SEQ ID NO 0
atgcagcagcgaacaacacaaattaagtagtggagtgtcagaacttgggaggcacaaattaagtacaaagcagtctaattaatgacgggcccgatggagattccggtgatcgatctcggcggcctcaacggcggcggcgaggagaggtcgcggaccttggcggagctccacgacgcctgcaaggactggggcttcttctgggtggagaaccacggcgtggacgcgccgctgatggacgaggtcaagcgcttcgtctacggccactacgaggagcacctggaggccaagttctacgcctccgccctcgccatggacctcgaggccgccaccagaggtgacactgatgagaagccctccgacgaggtggactgggagtccacctacttcatccagcaccaccccaagaccaacgtcgccgacttcccagagatcacgccgccgacacgagagacgctggacgcgtacgtcgcccagatggtgtccctcgcggagcgtctggcggagtgcatgagcctcaacctgggcctccccggcgcccacgtggccgccaccttcgcgccgccgttcgtgggcaccaagttcgccatgtacccgtcctgcccgcgcccggagctggtgtggggcctgcgcgcgcacaccgacgccggcggcatcatcctgctcctccaggacgacgtcgtgggcggcctcgagttcctcagggccggcgcccactgggtccccgtcggccccaccaaggggggcaggctcttcgtcaacatcggggaccagatcgaggtcctcagcgccggcgcctaccggagcgtcctgcaccgcgtcgcggccggggaccagggccgccgcctgtccgtggccacgttctacaaccctggcaccgacgccgtggtcgcgccagcgcccggcagggacgatcagggcgccggcgccgccgcgtaccccggtccctacaggttcggggactacctcgactactaccagggcaccaagttcggcgacaaggacgccaggttccaggccgtcaagaagctgctcggctaagcgaacagctgcaagtaggcagaggcagcttagctcgtggactatgcatagtttcaagcttgctgcttgcttcttgttcgatccattgtctgcatgcgtactgttgcgtgtttaaatttagcaaatcttatacgtagtcgttactggtactacgtattctgtggttgacaatacattgttgcggtttaagggcgcatccgtttggtggacttgc

SEQ ID NO: 3045 - protein, 318 aa, Zea mays subsp. mays
  peptide (1)..(318): Ceres Seq. ID no. 12412176
MTGPMEIPVIDLGGLNGGGEERSRTLAELHDACKDWGFFWVENHGVDAPLMDEVKRFVYGHYEEHLEAKFYASALAMDLEAATRGDTDEKPSDEVDWESTYFIQHHPKTNVADFPEITPPTRETLDAYVAQMVSLAERLAECMSLNLGLPGAHVAATFAPPFVGTKFAMYPSCPRPELVWGLRAHTDAGGIILLLQDDVVGGLEFLRAGAHWVPVGPTKGGRLFVNIGDQIEVLSAGAYRSVLHRVAAGDQGRRLSVATFYNPGTDAVVAPAPGRDDQGAGAAAYPGPYRFGDYLDYYQGTKFGDKDARFQAVKKLLG

SEQ ID NO: 3046 - protein, 314 aa, Zea mays subsp. mays
  peptide (1)..(314): Ceres Seq. ID no. 12412177
MEIPVIDLGGLNGGGEERSRTLAELHDACKDWGFFWVENHGVDAPLMDEVKRFVYGHYEEHLEAKFYASALAMDLEAATRGDTDEKPSDEVDWESTYFIQHHPKTNVADFPEITPPTRETLDAYVAQMVSLAERLAECMSLNLGLPGAHVAATFAPPFVGTKFAMYPSCPRPELVWGLRAHTDAGGIILLLQDDVVGGLEFLRAGAHWVPVGPTKGGRLFVNIGDQIEVLSAGAYRSVLHRVAAGDQGRRLSVATFYNPGTDAVVAPAPGRDDQGAGAAAYPGPYRFGDYLDYYQGTKFGDKDARFQAVKKLLG

SEQ ID NO: 3047 - protein, 268 aa, Zea mays subsp. mays
  peptide (1)..(268): Ceres Seq. ID no. 12412178
MDEVKRFVYGHYEEHLEAKFYASALAMDLEAATRGDTDEKPSDEVDWESTYFIQHHPKTNVADFPEITPPTRETLDAYVAQMVSLAERLAECMSLNLGLPGAHVAATFAPPFVGTKFAMYPSCPRPELVWGLRAHTDAGGIILLLQDDVVGGLEFLRAGAHWVPVGPTKGGRLFVNIGDQIEVLSAGAYRSVLHRVAAGDQGRRLSVATFYNPGTDAVVAPAPGRDDQGAGAAAYPGPYRFGDYLDYYQGTKFGDKDARFQAVKKLLG

SEQ ID NO: 3048 - DNA, 1189 bp, Zea mays subsp. mays
  misc_feature (1)..(1189): Ceres Seq. ID no. 12356089
  misc_feature (1)..(1189): Ortholog of  Ceres SEQ ID NO 15169191 as cited in SEQ ID NO 58440
  misc_feature (1)..(1189): Ortholog of  Ceres SEQ ID NO 13597523 as cited in SEQ ID NO 64778
accgcaccaccgcaccgggcctcctccgagtctccgacctcctcctgtcttcggtgtcgtcgcccgcctccccatgaggccgccctcgagacatgcctcgtagcctcggcgtcagtagcagcagcagcaccaggcgctccctccgcgtcgcgccccccgcctcacccccgctgcggcggccgccgtcgccggcatggccatgccgttcgcgcgccgcgacatcgaggcggcgggcgccggcgccagcagcgacgactctcctgccgctaagaagggcaagcccgagctcgcaggggcgcgcccggctttgacgaggtccgaggcgttcgcgttcgcggccgtgctcgcgctcttcaccgccgggatcttctgcgtcttcctcaccgcgccacgcggcgagtttgggcagatcctccgcctcccgcgcagccttgccgacgtccgccttctcaaagacaatcttgctgtttacgcgagagattaccaaacgaattttatattgggttattgctcaatatacatcttcatgcaaacattcatgatccctgggacaatattcatgtctttacttgctggggctctttttggagtgattaaaggtggcattttggtagttttcactgccacagccggtggatcttcttgctattttgtctccaagctgattggcaggcccttggttagttggttgtggcctgaaaaactgagatatttccaatcagagattgctaagaggaaagaaaagctgctgaattatatgctttttctgagaataactccaactttgcccaatacattcataaatatggcgtcaccgattgttgacatacctttccatattttctttgctgcaacactagttggtcttattccagcatcttatattactgtaaaggctggtagagccctaggcgatctgaaatcagttagagagttgtatgacttcaagacattagtggttctgttccttattggatctgttgttgtcgttccaacaatcctgaaaaggaagagaacatacgaatgatgtcttagagcatctacatactttctttagatgttcaaaatgtattaggatttttttaccttttgttttcttgatatcgtatacattttcaattctatacgtagagatgtaaaatcgaatcgaatgctttctaatactagatgatgccatcattgtatctgc

SEQ ID NO: 3049 - protein, 277 aa, Zea mays subsp. mays
  peptide (1)..(277): Ceres Seq. ID no. 12356090
MAMPFARRDIEAAGAGASSDDSPAAKKGKPELAGARPALTRSEAFAFAAVLALFTAGIFCVFLTAPRGEFGQILRLPRSLADVRLLKDNLAVYARDYQTNFILGYCSIYIFMQTFMIPGTIFMSLLAGALFGVIKGGILVVFTATAGGSSCYFVSKLIGRPLVSWLWPEKLRYFQSEIAKRKEKLLNYMLFLRITPTLPNTFINMASPIVDIPFHIFFAATLVGLIPASYITVKAGRALGDLKSVRELYDFKTLVVLFLIGSVVVVPTILKRKRTYE

SEQ ID NO: 3050 - protein, 275 aa, Zea mays subsp. mays
  peptide (1)..(275): Ceres Seq. ID no. 12356091
MPFARRDIEAAGAGASSDDSPAAKKGKPELAGARPALTRSEAFAFAAVLALFTAGIFCVFLTAPRGEFGQILRLPRSLADVRLLKDNLAVYARDYQTNFILGYCSIYIFMQTFMIPGTIFMSLLAGALFGVIKGGILVVFTATAGGSSCYFVSKLIGRPLVSWLWPEKLRYFQSEIAKRKEKLLNYMLFLRITPTLPNTFINMASPIVDIPFHIFFAATLVGLIPASYITVKAGRALGDLKSVRELYDFKTLVVLFLIGSVVVVPTILKRKRTYE

SEQ ID NO: 3051 - protein, 166 aa, Zea mays subsp. mays
  peptide (1)..(166): Ceres Seq. ID no. 12356092
MQTFMIPGTIFMSLLAGALFGVIKGGILVVFTATAGGSSCYFVSKLIGRPLVSWLWPEKLRYFQSEIAKRKEKLLNYMLFLRITPTLPNTFINMASPIVDIPFHIFFAATLVGLIPASYITVKAGRALGDLKSVRELYDFKTLVVLFLIGSVVVVPTILKRKRTYE

SEQ ID NO: 3052 - DNA, 1620 bp, Zea mays subsp. mays
  misc_feature (1)..(1620): Ceres Seq. ID no. 12352160
  misc_feature (1)..(1620): Ortholog of  Ceres SEQ ID NO 14311596 as cited in SEQ ID NO 51728
  misc_feature (1)..(1620): Ortholog of  Ceres SEQ ID NO 14308120 as cited in SEQ ID NO 58423
  misc_feature (1)..(1620): Ortholog of  Ceres SEQ ID NO 12617197 as cited in SEQ ID NO 63406
  misc_feature (1)..(1620): Ortholog of  Ceres SEQ ID NO 13597804 as cited in SEQ ID NO 64182
  misc_feature (1)..(1620): Ortholog of  Ceres SEQ ID NO 14302768 as cited in SEQ ID NO 64889
  misc_feature (1)..(1620): Ortholog of  Ceres SEQ ID NO 13598565 as cited in SEQ ID NO 65250
  misc_feature (1)..(1620): Ortholog of  Ceres SEQ ID NO 13598597 as cited in SEQ ID NO 65496
  misc_feature (1)..(1620): Ortholog of  Ceres SEQ ID NO 13596284 as cited in SEQ ID NO 68273
  misc_feature (1)..(1620): Ortholog of  Ceres SEQ ID NO 14308995 as cited in SEQ ID NO 0
gacatgcccgatcccgacgccctggcggccgcggtcgccgtcgccgggtgcgagggggtcgcctctcctgtgtcctgtgcccgtagataaggtcctcaatcctgaggaaagttccggtccaatctcttccaattgacaccgtgttggtgttgttctgacttctgttgaataggatgaacctgcatttacggaaaaaattctccctttgatgacccaacccctgtgaaaacaaaacaaccctcagaagatgtccaaactccaaacacacgaaaaggggagcgtgcgacgactttccgccgacctgcagagctgaatgtgcatttttggtcgtttgcatccttcgccgccggctctttctgcgtgttcttcttcttgtcgatttccgtcttgtgtatatactatatactatgctgctgtgctgggttacaagacaagcaagtggcaactggcaatatacggacaagccgtggcgggtatatacggacgaagaggaggaccggaggaggaagcttcagtgaggccctggactgcagcgggatggcgtcgccgccgccaccacgcgtgtgcgtaaccggtggcggcgggtacgtcgcctcatggctcgtcaagctcctgctctcccgcggctacgccgtgcacgccactgtccgcgacccaagtgatcccaagaacgcccacctgcaacagctggacggggcccgggagaggttgcgcctgttcaaggccgacgtgctcgaccgcgacgccctggcgaccgcggtcgtcgcgtgcgagggcgtcttccacgtcgcctcccctgtgcccgcggacaaagtcctcgatcccgagtccgaggtgctgtctcctgctgtcaagggcactctgaacgtcctccaggcctgctcggcaaacaacgttcagaaagttgtcgtggtttcgtccacggctgctgtttactttaacccgagctggccccaaggtagaaccaaagacgagagttgctggtcagacagagatttatgcattaagaacgagaactggtactgtgctgccaagacgattgctgaagaaactgcagtggagtatggagagaagaacgggctggttgttgtcacggtctgcccttgtatcgttttaggcccactcctgcagccgctgatcaatgccagcagcgaattactcatctacattataaaaggaggtcctagggtgctgaaaaacctcccctggaacatagtcgacgtccgtgacgtagctgatgctttgctcctagtatacgagaaagtggaatcatccgggagatacatctgtgcgcctaatcggatcagcacaaacaacatggtgaacttgtttaaaaagtcctaccctaactacaattatgtgaactgcgacaacaaggactatgaatctgaaatctcaccagttacatcggagaaacttaagagtctaggctggaacccaaggacaatggagaaaactttgttggacaacattgagtatttcgagaaggcagggtttttgcgtgatgcagagggttatccttgtcgtctactacctcatatttttcatttcgcttctgactaatgaaatagattctgtaaaacaattacgacaactactataactgtctttggacaattc

SEQ ID NO: 3053 - protein, 341 aa, Zea mays subsp. mays
  peptide (1)..(341): Ceres Seq. ID no. 12352161
MASPPPPRVCVTGGGGYVASWLVKLLLSRGYAVHATVRDPSDPKNAHLQQLDGARERLRLFKADVLDRDALATAVVACEGVFHVASPVPADKVLDPESEVLSPAVKGTLNVLQACSANNVQKVVVVSSTAAVYFNPSWPQGRTKDESCWSDRDLCIKNENWYCAAKTIAEETAVEYGEKNGLVVVTVCPCIVLGPLLQPLINASSELLIYIIKGGPRVLKNLPWNIVDVRDVADALLLVYEKVESSGRYICAPNRISTNNMVNLFKKSYPNYNYVNCDNKDYESEISPVTSEKLKSLGWNPRTMEKTLLDNIEYFEKAGFLRDAEGYPCRLLPHIFHFASD

SEQ ID NO: 3054 - DNA, 1406 bp, Zea mays subsp. mays
  misc_feature (1)..(1406): Ceres Seq. ID no. 13498652
  misc_feature (1)..(1406): Ortholog of  Ceres SEQ ID NO 15177969 as cited in SEQ ID NO 58823
  misc_feature (1)..(1406): Ortholog of  Ceres SEQ ID NO 15177963 as cited in SEQ ID NO 59105
  misc_feature (1)..(1406): Ortholog of  Ceres SEQ ID NO 14302746 as cited in SEQ ID NO 66646
  misc_feature (1)..(1406): Ortholog of  Ceres SEQ ID NO 15179123 as cited in SEQ ID NO 0
aaatcggacacacggcaacagcacacactggacacgaatcgctagtagacacagcgcacagcggcagccggcaagcaagaacccaaacattccagtgcccttaccgttgcatgcagccatgacgaggatgagcttggcggtgtcggcgacgttctttgtgctcgcggtcgcctcggcggcgcagccggcgccgagcatgcccccgccggcggtggccgtgaacagctcccggctggagaaggcgtacgtggcgctgcaggcgctgaggcgcgccatcacggacgaccccaagaagctgacggagaactggtgcgggcccgacgtgtgcaactacttcggcgtgtactgcgcgccggcgcccgacgacccctgccagcgcaccgtggcctccgtggacctcaaccacggcgacctcgccgggacgctccccgaggagctgggcctgctgtccgacctcgccgtcttccacctcaactccaaccgcttctgcggctccctccccgagtcgctccggtccctgcacctcctccacgagatcgatgtcagcaacaacaggctgtccgggcccttcccgtcgcagctcctctgcctccccagtgtccagtacgtcgacatcaggtttaacaacttctgcggcgaggtgccggcggccatcttcgacaagaagatcgacgcgcttttcatcaacaacaaccacttcgagttcacgctgccggccagcttcaccaactcgacggcgtcggtgatcgtgctggcgaaccttccgcgggtgagcggctgcctgccgagcagcatcggcgacatggccggcacgctcaacgagctcatcctcctcaacagcggcatctcctcctgcatcccgccggagatcggcaagctggacaagctcaccgtgctcgacctcagcttcaacagcatcgccggcgcgctgccggacacgatcggcggcatgcgggcgctggagcagctggacgtcgcgcacaaccggctcaccggcgagatccccgagagcatctgcgagctgccgcacctcaagaacttcacctactcgtacaacttcttctgcggcgagccacgccggtgcctcgaggtgccgcgcgtcgacgaccggcagaactgcatcgctggccgccccgaccagcggccaggcgaggagtgcgtctcattcctacaccaaccgcaagtccactgcgacgcccacgggtgcatcgcgccaccacctccagcggtgcatgctcctccgccgcctgtatactgaattactgatcagtggtaacttgtaaatgtttcctgctcctgcctcgtggtgtgaaaacttggagggtaaacgcatacacatggtatatactgtaatttttattcatcagcagaagagagtaataatggattcatagatttacattacg

SEQ ID NO: 3055 - protein, 418 aa, Zea mays subsp. mays
  peptide (1)..(418): Ceres Seq. ID no. 13498653
NRTHGNSTHWTRIASRHSAQRQPASKNPNIPVPLPLHAAMTRMSLAVSATFFVLAVASAAQPAPSMPPPAVAVNSSRLEKAYVALQALRRAITDDPKKLTENWCGPDVCNYFGVYCAPAPDDPCQRTVASVDLNHGDLAGTLPEELGLLSDLAVFHLNSNRFCGSLPESLRSLHLLHEIDVSNNRLSGPFPSQLLCLPSVQYVDIRFNNFCGEVPAAIFDKKIDALFINNNHFEFTLPASFTNSTASVIVLANLPRVSGCLPSSIGDMAGTLNELILLNSGISSCIPPEIGKLDKLTVLDLSFNSIAGALPDTIGGMRALEQLDVAHNRLTGEIPESICELPHLKNFTYSYNFFCGEPRRCLEVPRVDDRQNCIAGRPDQRPGEECVSFLHQPQVHCDAHGCIAPPPPAVHAPPPPVY

SEQ ID NO: 3056 - protein, 379 aa, Zea mays subsp. mays
  peptide (1)..(379): Ceres Seq. ID no. 13498654
MTRMSLAVSATFFVLAVASAAQPAPSMPPPAVAVNSSRLEKAYVALQALRRAITDDPKKLTENWCGPDVCNYFGVYCAPAPDDPCQRTVASVDLNHGDLAGTLPEELGLLSDLAVFHLNSNRFCGSLPESLRSLHLLHEIDVSNNRLSGPFPSQLLCLPSVQYVDIRFNNFCGEVPAAIFDKKIDALFINNNHFEFTLPASFTNSTASVIVLANLPRVSGCLPSSIGDMAGTLNELILLNSGISSCIPPEIGKLDKLTVLDLSFNSIAGALPDTIGGMRALEQLDVAHNRLTGEIPESICELPHLKNFTYSYNFFCGEPRRCLEVPRVDDRQNCIAGRPDQRPGEECVSFLHQPQVHCDAHGCIAPPPPAVHAPPPPVY

SEQ ID NO: 3057 - protein, 376 aa, Zea mays subsp. mays
  peptide (1)..(376): Ceres Seq. ID no. 13498655
MSLAVSATFFVLAVASAAQPAPSMPPPAVAVNSSRLEKAYVALQALRRAITDDPKKLTENWCGPDVCNYFGVYCAPAPDDPCQRTVASVDLNHGDLAGTLPEELGLLSDLAVFHLNSNRFCGSLPESLRSLHLLHEIDVSNNRLSGPFPSQLLCLPSVQYVDIRFNNFCGEVPAAIFDKKIDALFINNNHFEFTLPASFTNSTASVIVLANLPRVSGCLPSSIGDMAGTLNELILLNSGISSCIPPEIGKLDKLTVLDLSFNSIAGALPDTIGGMRALEQLDVAHNRLTGEIPESICELPHLKNFTYSYNFFCGEPRRCLEVPRVDDRQNCIAGRPDQRPGEECVSFLHQPQVHCDAHGCIAPPPPAVHAPPPPVY

SEQ ID NO: 3058 - DNA, 967 bp, Zea mays subsp. mays
  misc_feature (1)..(967): Ceres Seq. ID no. 12403890
  misc_feature (1)..(967): Ortholog of  Ceres SEQ ID NO 12616414 as cited in SEQ ID NO 63563
aacgcctttttactattttttttctattcccatttccaccctcgcaccgcatccacctccaccgcgccgccgcgagagaggggaaggagggtttccgatggagaacggcgaggagacgttcgcctcccccactgccgccgccgccgcggacttcgagatctccatcaacggcggggacagcacgcccaagctccacaatttggcggacgagatggaggccctccgcgcggcgaagcgcgacctggaggagaagctcgatgccgtgggacacgagaaccggttcctgtcctctgagtcccggcgcctcgaggtcctcgtgtcccaggcccgcgaggaggtcgccgctgccgagcaagtcgccgccgccaacgagagcgaggccgccacgctccgcgccgaagtcgagcgtctccagggcctcctagccgcagagaaggccagccatgaggaggagatgcgcaggggcgcaaggctcggggaccagctgcagaccgcgtaccaggagaaggccgcccttgaggaggagatcgagaccctgaagggttccgccactgccgagggcaagggcgggaaggaggaagaggagggacgtgattccgtttctgccagggccgggacgcctaaggatgagggcgtggtgtctcccgctcttgtggctgccgcggctgctggagcagctgccacggctgccatcgcggtggtcttgctcaacctcaagagatgatgtggtggtccgatgctcgggaagttttgatctgctgctatggcctatatgagaatgggttatccgttttgtcgtggtactagtgttgctggactcagtgtggtatctttactatcagctggataatatattagaggttagaacaacctatattgcaagtacttttagtttctgcagttttccatgctaataagagttgtgaacacaaacgtgagaggtaattgaggtcaggtgtgttgtttt

SEQ ID NO: 3059 - protein, 240 aa, Zea mays subsp. mays
  peptide (1)..(240): Ceres Seq. ID no. 12403891
TPFYYFFSIPISTLAPHPPPPRRRERGEGGFPMENGEETFASPTAAAAADFEISINGGDSTPKLHNLADEMEALRAAKRDLEEKLDAVGHENRFLSSESRRLEVLVSQAREEVAAAEQVAAANESEAATLRAEVERLQGLLAAEKASHEEEMRRGARLGDQLQTAYQEKAALEEEIETLKGSATAEGKGGKEEEEGRDSVSARAGTPKDEGVVSPALVAAAAAGAAATAAIAVVLLNLKR

SEQ ID NO: 3060 - protein, 208 aa, Zea mays subsp. mays
  peptide (1)..(208): Ceres Seq. ID no. 12403892
MENGEETFASPTAAAAADFEISINGGDSTPKLHNLADEMEALRAAKRDLEEKLDAVGHENRFLSSESRRLEVLVSQAREEVAAAEQVAAANESEAATLRAEVERLQGLLAAEKASHEEEMRRGARLGDQLQTAYQEKAALEEEIETLKGSATAEGKGGKEEEEGRDSVSARAGTPKDEGVVSPALVAAAAAGAAATAAIAVVLLNLKR

SEQ ID NO: 3061 - protein, 170 aa, Zea mays subsp. mays
  peptide (1)..(170): Ceres Seq. ID no. 12403893
MEALRAAKRDLEEKLDAVGHENRFLSSESRRLEVLVSQAREEVAAAEQVAAANESEAATLRAEVERLQGLLAAEKASHEEEMRRGARLGDQLQTAYQEKAALEEEIETLKGSATAEGKGGKEEEEGRDSVSARAGTPKDEGVVSPALVAAAAAGAAATAAIAVVLLNLKR

SEQ ID NO: 3062 - DNA, 803 bp, Zea mays subsp. mays
  misc_feature (1)..(803): Ceres Seq. ID no. 12423776
  misc_feature (1)..(803): Ortholog of  Ceres SEQ ID NO 14309538 as cited in SEQ ID NO 52606
aaatcatcacaggtccaaagcgcttccgattctctcttctcccctccgcccgcctccggttgtcttctccaattccccaacgcagccagcagcgcaaggtccagaagcccaggaccagacgacggacctccgcgccccatcgatccgcgcggccctcccccaacgcgcgtgcgtccgcaactagcgtctgcngccggtnnctttcttccgcaccccccgacgcggcaaggagcccccccgccatgagggtccacccggccccgcggaagcgcaccatcnnngtgcaacgctgcgcctccgcggcggcgggcgcgctcggcgggaagaagctgcgccgcctgccgcacatattcgacaaggtgctggagctcccgttcgcggccgacgcggacgtgtccgtcgaggaggacgcggcggcgctgcggttcgtcgccgccgccgacgagttctccctcgcgggcgcccgcgcgcacgccgtcgagatccacccaggggtcaccaaggtcgtcgtccgcggcctctcctcctcctccctcggcggcgatggcgacgacgacgacgacggggccgccgccgccgccttcgagctcgaccgctggcgcttccgcctcccgccctgcacgcgccccgccatggccaccgccacctacgccgcgggcgagctcgttgtcaccgtccccaagggcgccggccccggcgacggcggcgcggccgctgtcctcggtggcacggagcgcgtccttgtgcttgtatagtatagtaaatctagcttttccctaaattatatatcatctgctttgtgc

SEQ ID NO: 3063 - protein, 250 aa, Zea mays subsp. mays
  peptide (1)..(250): Ceres Seq. ID no. 12423777
  misc_feature (64)..(64): Xaa is any aa, unknown or other
  misc_feature (66)..(66): Xaa is any aa, unknown or other
  misc_feature (93)..(93): Xaa is any aa, unknown or other
IITGPKRFRFSLLPSARLRLSSPIPQRSQQRKVQKPRTRRRTSAPHRSARPSPNARASATSVCXRXLSSAPPDAARSPPAMRVHPAPRKRTIXVQRCASAAAGALGGKKLRRLPHIFDKVLELPFAADADVSVEEDAAALRFVAAADEFSLAGARAHAVEIHPGVTKVVVRGLSSSSLGGDGDDDDDGAAAAAFELDRWRFRLPPCTRPAMATATYAAGELVVTVPKGAGPGDGGAAAVLGGTERVLVLV

SEQ ID NO: 3064 - protein, 170 aa, Zea mays subsp. mays
  peptide (1)..(170): Ceres Seq. ID no. 12423778
  misc_feature (13)..(13): Xaa is any aa, unknown or other
MRVHPAPRKRTIXVQRCASAAAGALGGKKLRRLPHIFDKVLELPFAADADVSVEEDAAALRFVAAADEFSLAGARAHAVEIHPGVTKVVVRGLSSSSLGGDGDDDDDGAAAAAFELDRWRFRLPPCTRPAMATATYAAGELVVTVPKGAGPGDGGAAAVLGGTERVLVLV

SEQ ID NO: 3065 - DNA, 906 bp, Zea mays subsp. mays
  misc_feature (1)..(906): Ceres Seq. ID no. 13495259
  misc_feature (1)..(906): Ortholog of  Ceres SEQ ID NO 13661508 as cited in SEQ ID NO 61302
  misc_feature (1)..(906): Ortholog of  Ceres SEQ ID NO 13596366 as cited in SEQ ID NO 68126
aaaaaagaagcagaggagaggcccaagcagagtaatggccaaggtctacccaaacagcgcagccgtcgcggcagagcccgccacccgagccgctgccggcgaccaacaacctgaaccgccgacggtgctgacggtatggcgcaagtcgctgctcttcaactgcgacggcttcaccgtgtacgacgcccggggagacctcgccttccgcgtcgactgctacgccacctcccgccggcgcgccgaggtcgcgctcatggacgccgcgggggcgccgctgctcacgctccaccgcaagaggctcagcctggcggagcgctggctcatctacgaagacggcgccggcaccacgcagccgcagccgcgtcgccctctcctctccgtccaccgccacgtcggtctccgcgcctccggcgggaagacgctggcgcatgtcttcgcgccctcctcggccgcccaggaggcgttcgtggtcgaggggtcgtacggccgtcgtgactgcgccgtgcgcgacgcgcgcggcgacgtcatggccgaggtccggcgcaaggaggccgtcggcgacgacgtgttcaggctggtggtcagtccccgcttcggcgcgccgctcgccatggggcttgtcatcgtcctcgacgagatgttcggcggccgcagctcgtggtcgtggctgcacagagcgtgctaggattggataggcagtagaggccctcccccagttgtcagcgtcagcagagtttataatgcaggctgcggctgggccaaccccctaaaaactagaacgccctatcaccaattacgaaatagtgagaacaatgcaaaagcaaaaaggcacatccaattattttggatatggatgtcagttgattattttgtaatgtcatcagtcatctactgattgttttccgc

SEQ ID NO: 3066 - protein, 227 aa, Zea mays subsp. mays
  peptide (1)..(227): Ceres Seq. ID no. 13495260
KKKQRRGPSRVMAKVYPNSAAVAAEPATRAAAGDQQPEPPTVLTVWRKSLLFNCDGFTVYDARGDLAFRVDCYATSRRRAEVALMDAAGAPLLTLHRKRLSLAERWLIYEDGAGTTQPQPRRPLLSVHRHVGLRASGGKTLAHVFAPSSAAQEAFVVEGSYGRRDCAVRDARGDVMAEVRRKEAVGDDVFRLVVSPRFGAPLAMGLVIVLDEMFGGRSSWSWLHRAC

SEQ ID NO: 3067 - protein, 216 aa, Zea mays subsp. mays
  peptide (1)..(216): Ceres Seq. ID no. 13495261
MAKVYPNSAAVAAEPATRAAAGDQQPEPPTVLTVWRKSLLFNCDGFTVYDARGDLAFRVDCYATSRRRAEVALMDAAGAPLLTLHRKRLSLAERWLIYEDGAGTTQPQPRRPLLSVHRHVGLRASGGKTLAHVFAPSSAAQEAFVVEGSYGRRDCAVRDARGDVMAEVRRKEAVGDDVFRLVVSPRFGAPLAMGLVIVLDEMFGGRSSWSWLHRAC

SEQ ID NO: 3068 - protein, 143 aa, Zea mays subsp. mays
  peptide (1)..(143): Ceres Seq. ID no. 13495262
MDAAGAPLLTLHRKRLSLAERWLIYEDGAGTTQPQPRRPLLSVHRHVGLRASGGKTLAHVFAPSSAAQEAFVVEGSYGRRDCAVRDARGDVMAEVRRKEAVGDDVFRLVVSPRFGAPLAMGLVIVLDEMFGGRSSWSWLHRAC

SEQ ID NO: 3069 - DNA, 677 bp, Zea mays subsp. mays
  misc_feature (1)..(677): Ceres Seq. ID no. 12402947
  misc_feature (1)..(677): Ortholog of  Ceres SEQ ID NO 13595818 as cited in SEQ ID NO 56698
gaaatttggcagtcgatcggatttgtggctcgcggagctggaccagccgccgcgggttttaaaaggagggaccgcaaccaaccacctcgccatcgacctcctcgatccagacagcaggcagcagccatgtccaaggtcttcaccctcgacgcggtcgccaagcacaactccaaggaggattgctggctcatcatcggcggcaaggtgtatgatgtgacgaagtttttggtagaccacccaggaggtgatgatgttctgttgtcctcaactggcaaggatgcgactgatgatttcgaggatgtcggtcacagcaacactgcccgcgcgatgatggatgagtacttggtgggtgaaatcgacgcgtcgacgatcccttccaggacgaagtatgtccccccgaaacaaccgcactacaaccaggacaagactcccgagtttgtcatcaagatcctccagtttttggttcccctggcaatcctgggcttggctgttgccgttaggatgtacaccaagtcggagtctgcttagctttgttgcccacttgcccttgcccccctcgcgattgtacgagtcgaacttgtcgaataagctagcaagagttttgtgaggttttattacatgtgtaacttgtcacgaaattcatcgaatgttctgagctgctgtgggttctgtggtct

SEQ ID NO: 3070 - protein, 175 aa, Zea mays subsp. mays
  peptide (1)..(175): Ceres Seq. ID no. 12402948
EIWQSIGFVARGAGPAAAGFKRRDRNQPPRHRPPRSRQQAAAMSKVFTLDAVAKHNSKEDCWLIIGGKVYDVTKFLVDHPGGDDVLLSSTGKDATDDFEDVGHSNTARAMMDEYLVGEIDASTIPSRTKYVPPKQPHYNQDKTPEFVIKILQFLVPLAILGLAVAVRMYTKSESA

SEQ ID NO: 3071 - protein, 133 aa, Zea mays subsp. mays
  peptide (1)..(133): Ceres Seq. ID no. 12402949
MSKVFTLDAVAKHNSKEDCWLIIGGKVYDVTKFLVDHPGGDDVLLSSTGKDATDDFEDVGHSNTARAMMDEYLVGEIDASTIPSRTKYVPPKQPHYNQDKTPEFVIKILQFLVPLAILGLAVAVRMYTKSESA

SEQ ID NO: 3072 - protein, 90 aa, Zea mays subsp. mays
  peptide (1)..(90): Ceres Seq. ID no. 12402950
MSTWWVKSTRRRSLPGRSMSPRNNRTTTRTRLPSLSSRSSSFWFPWQSWAWLLPLGCTPSRSLLSFVAHLPLPPSRLYESNLSNKLARVL

SEQ ID NO: 3073 - DNA, 1690 bp, Zea mays subsp. mays
  misc_feature (1)..(1690): Ceres Seq. ID no. 12365309
  misc_feature (1)..(1690): Ortholog of  Ceres SEQ ID NO 13595999 as cited in SEQ ID NO 68173
aaaaaacctcgcctccccccactccttccctccctccctcgctcacccagtggggcagccaaagccgagccgcaaccgcaaagatcttgcgcggcctcctttccccagctcgtcactgtgccgctcgtgccatccaccctcggttcacccaaccaacaatccatccgccaccacaccccgctgcggcgatgtgcggcggcgccatcctctcgggtttcatcccgccgtccggggtgccggcggcggcagcggcggccaagaagaaacagcagcggcgtgcgacggcggacctgctgtggccggggcccggcaagaagggagcgccccgggaggaggacttcgaggccgacttccgcgagttcgagcgcggcctcggagaggatgacgacgtggacggggccggcgacgaggtccaggagcttcctctgccggagccggcgaggctcgccttcgccgccgcggttggggcgccgcgcactgcagttgacggcgtgatgactccaaaggatggtgaaggagacatgcctactaccgctaccaactcagcagcaaataagcgcaggcggaagaaccagtacaggggaatccggcggcggccctggggcaagtgggcggccgagatcagagaccccagcaagggcgtgcgcgtctggctcggcacatacagcaccgccgaggaggcggccagggcgtacgacgccgaggctcgcaggatacgcgggaagaaagccaaggtcaatttccgggacgaagcggcggcagcagcaggtgctcagaaggcaccagccgcaactactccaactgcttgtggcaacgcagcgaggctaggtcctccacctccaccgccgaagttccgtgctgacgaggttttcgggaacatgaacggtggcactggcagcaacgatctgttcgcgattatgttcgcgttcagtgacagtagtagtaaggtcgttcgtgtggagccaggtgagggcgccgccggtttcctccccgcagatctgttgcccggcagtaagaggtctgcggctaacatgctgctgctctccgaccagagcagcgactcgtatggctcttgtgacttggggtgggagtgggactgggacgatgacaccatgacctcagactacgcctcagtctttgctccagctgctcccagtaacgttgtgccagcatggtacacgcaaggtggaccggtgtcgaagagaacgaggagcagctacggctacggtgcggccatgccgggcggctttgaccctgagacgaactaccagtaccagccgttgccttatgtcgtcgagagcagcccgtcagacggcgcgtcgacggacgacatggactgccttcaaatgatgcgggctggtgatgttccacaggatggggcgagcagtggtggtggtggcggcgacggcggcgatatctggagccttgacgagctgctcatggccgctggcgcttactgagaaaagctatgtgcatcgcattcgcatgtgctagacggctacttgctgtgccgtgaatggagtgtttctcagcttcgttttgcttttaattttttgttatgccaggtctcctgcttgtgcttgtggtgatgatgcaggagagccatggtgggtactatgcttttgctgccagtggaactgtaagacaatgtttatatagtatctatactatgttggtgcgtcgatggttc

SEQ ID NO: 3074 - protein, 485 aa, Zea mays subsp. mays
  peptide (1)..(485): Ceres Seq. ID no. 12365310
KTSPPPTPSLPPSLTQWGSQSRAATAKILRGLLSPARHCAARAIHPRFTQPTIHPPPHPAAAMCGGAILSGFIPPSGVPAAAAAAKKKQQRRATADLLWPGPGKKGAPREEDFEADFREFERGLGEDDDVDGAGDEVQELPLPEPARLAFAAAVGAPRTAVDGVMTPKDGEGDMPTTATNSAANKRRRKNQYRGIRRRPWGKWAAEIRDPSKGVRVWLGTYSTAEEAARAYDAEARRIRGKKAKVNFRDEAAAAAGAQKAPAATTPTACGNAARLGPPPPPPKFRADEVFGNMNGGTGSNDLFAIMFAFSDSSSKVVRVEPGEGAAGFLPADLLPGSKRSAANMLLLSDQSSDSYGSCDLGWEWDWDDDTMTSDYASVFAPAAPSNVVPAWYTQGGPVSKRTRSSYGYGAAMPGGFDPETNYQYQPLPYVVESSPSDGASTDDMDCLQMMRAGDVPQDGASSGGGGGDGGDIWSLDELLMAAGAY

SEQ ID NO: 3075 - protein, 423 aa, Zea mays subsp. mays
  peptide (1)..(423): Ceres Seq. ID no. 12365311
MCGGAILSGFIPPSGVPAAAAAAKKKQQRRATADLLWPGPGKKGAPREEDFEADFREFERGLGEDDDVDGAGDEVQELPLPEPARLAFAAAVGAPRTAVDGVMTPKDGEGDMPTTATNSAANKRRRKNQYRGIRRRPWGKWAAEIRDPSKGVRVWLGTYSTAEEAARAYDAEARRIRGKKAKVNFRDEAAAAAGAQKAPAATTPTACGNAARLGPPPPPPKFRADEVFGNMNGGTGSNDLFAIMFAFSDSSSKVVRVEPGEGAAGFLPADLLPGSKRSAANMLLLSDQSSDSYGSCDLGWEWDWDDDTMTSDYASVFAPAAPSNVVPAWYTQGGPVSKRTRSSYGYGAAMPGGFDPETNYQYQPLPYVVESSPSDGASTDDMDCLQMMRAGDVPQDGASSGGGGGDGGDIWSLDELLMAAGAY

SEQ ID NO: 3076 - protein, 321 aa, Zea mays subsp. mays
  peptide (1)..(321): Ceres Seq. ID no. 12365312
MTPKDGEGDMPTTATNSAANKRRRKNQYRGIRRRPWGKWAAEIRDPSKGVRVWLGTYSTAEEAARAYDAEARRIRGKKAKVNFRDEAAAAAGAQKAPAATTPTACGNAARLGPPPPPPKFRADEVFGNMNGGTGSNDLFAIMFAFSDSSSKVVRVEPGEGAAGFLPADLLPGSKRSAANMLLLSDQSSDSYGSCDLGWEWDWDDDTMTSDYASVFAPAAPSNVVPAWYTQGGPVSKRTRSSYGYGAAMPGGFDPETNYQYQPLPYVVESSPSDGASTDDMDCLQMMRAGDVPQDGASSGGGGGDGGDIWSLDELLMAAGAY

SEQ ID NO: 3077 - DNA, 1414 bp, Zea mays subsp. mays
  misc_feature (1)..(1414): Ceres Seq. ID no. 13493147
  misc_feature (1)..(1414): Ortholog of  Ceres SEQ ID NO 12466401 as cited in SEQ ID NO 20698
  misc_feature (1)..(1414): Ortholog of  Ceres SEQ ID NO 15224731 as cited in SEQ ID NO 63650
aagccaggcacggaggaggcgcgtgctctgctctgctctgcgtctgctccactccacctcccccccccccccctgcgccactcacgccgctcgttcgcgcagttttggtcttctggccagcagggcagggggggaacccgcgggagcgaggcgcgcgagcgagcgagcggagggaggaggaggatgatgcacaccaagtcggagtcggacgtgacgagcctggcagcgtcgtcgccgccgcggtcgccgaagnngggcgttgcnncnnccggcaccggcggcggcggcgggtactacgtgcagagcccgtcgcgggagtcgcacgacggcggcggcggcggcgggtacaagtcgtcgtcgatgcaggccacgccggtgtacaacaacagccccagcgagtcgccgtcgcacccctcctacggccgccactcccgctcctcctccgtcagccgcttctccggcggcctccgcggggccgncgncggcgggcgcaaggtgctcaacnacaagggctggcccgagtgcagcgtcatcgagnaggaagggccctacgagggcctcggcgccggggacagcggcctctcccgccgctgccagatcgtgctcggcttcctcaccttcgtcctcctcttcaccgtcttctgcctcgtcatctggggcgccgcccgcccgtacgagcccgaggtcgtcgtcaagagcttggtgatggacgacttctacgctggtgaaggcacagaccacagcggcgttccgaccaaattggtcacgacgaactgttcgctgcacgtatcggtgtacaaccctgccacaatgtttgggatccatgtcacctccggccccatccgtctgatctattcagagatctcaatagcagtcggtcaggtccgcaggtactaccagccgaggaagagccaacggacggtgacggcggtgatccacggcgagaaggtgccgctgtacggcgccgggggcggcctgacgctgtccacgagcgcgggcgggggcgcggtgcccctgacgctggacttcgacctcacctcccggggctacgtgatcggcaggctcgtgcgggtgacgcacagggcgcacgtgacgtgccccgtcgtcgtggacgccaggaggaccaagcctgtcaggttctccaagaaggcgtgcgccgtgtacaaggcctgagcttgagagctcgtgaaacctgtgatcgacggagcgttagcgatgcgtgttcttgaaaagatgtagctattgtgttgatggtgaagaacaataagcgcacacgtatggtcttgtcgatatatcgcgctgtaaggcctgttgttcttgtgtgtgtgtgtccctttttcagagcatgatcgtagagacggaagatgacttaccatgacaattttcctatacctttataacttcaatttttttt

SEQ ID NO: 3078 - protein, 390 aa, Zea mays subsp. mays
  peptide (1)..(390): Ceres Seq. ID no. 13493148
  misc_feature (85)..(85): Xaa is any aa, unknown or other
  misc_feature (88)..(88): Xaa is any aa, unknown or other
  misc_feature (89)..(89): Xaa is any aa, unknown or other
  misc_feature (90)..(90): Xaa is any aa, unknown or other
  misc_feature (160)..(160): Xaa is any aa, unknown or other
  misc_feature (161)..(161): Xaa is any aa, unknown or other
  misc_feature (169)..(169): Xaa is any aa, unknown or other
  misc_feature (180)..(180): Xaa is any aa, unknown or other
KPGTEEARALLCSASAPLHLPPPPLRHSRRSFAQFWSSGQQGRGGTRGSEARERASGGRRRMMHTKSESDVTSLAASSPPRSPKXGVXXXGTGGGGGYYVQSPSRESHDGGGGGGYKSSSMQATPVYNNSPSESPSHPSYGRHSRSSSVSRFSGGLRGAXXGGRKVLNXKGWPECSVIEXEGPYEGLGAGDSGLSRRCQIVLGFLTFVLLFTVFCLVIWGAARPYEPEVVVKSLVMDDFYAGEGTDHSGVPTKLVTTNCSLHVSVYNPATMFGIHVTSGPIRLIYSEISIAVGQVRRYYQPRKSQRTVTAVIHGEKVPLYGAGGGLTLSTSAGGGAVPLTLDFDLTSRGYVIGRLVRVTHRAHVTCPVVVDARRTKPVRFSKKACAVYKA

SEQ ID NO: 3079 - protein, 329 aa, Zea mays subsp. mays
  peptide (1)..(329): Ceres Seq. ID no. 13493149
  misc_feature (24)..(24): Xaa is any aa, unknown or other
  misc_feature (27)..(27): Xaa is any aa, unknown or other
  misc_feature (28)..(28): Xaa is any aa, unknown or other
  misc_feature (29)..(29): Xaa is any aa, unknown or other
  misc_feature (99)..(99): Xaa is any aa, unknown or other
  misc_feature (100)..(100): Xaa is any aa, unknown or other
  misc_feature (108)..(108): Xaa is any aa, unknown or other
  misc_feature (119)..(119): Xaa is any aa, unknown or other
MMHTKSESDVTSLAASSPPRSPKXGVXXXGTGGGGGYYVQSPSRESHDGGGGGGYKSSSMQATPVYNNSPSESPSHPSYGRHSRSSSVSRFSGGLRGAXXGGRKVLNXKGWPECSVIEXEGPYEGLGAGDSGLSRRCQIVLGFLTFVLLFTVFCLVIWGAARPYEPEVVVKSLVMDDFYAGEGTDHSGVPTKLVTTNCSLHVSVYNPATMFGIHVTSGPIRLIYSEISIAVGQVRRYYQPRKSQRTVTAVIHGEKVPLYGAGGGLTLSTSAGGGAVPLTLDFDLTSRGYVIGRLVRVTHRAHVTCPVVVDARRTKPVRFSKKACAVYKA

SEQ ID NO: 3080 - protein, 328 aa, Zea mays subsp. mays
  peptide (1)..(328): Ceres Seq. ID no. 13493150
  misc_feature (23)..(23): Xaa is any aa, unknown or other
  misc_feature (26)..(26): Xaa is any aa, unknown or other
  misc_feature (27)..(27): Xaa is any aa, unknown or other
  misc_feature (28)..(28): Xaa is any aa, unknown or other
  misc_feature (98)..(98): Xaa is any aa, unknown or other
  misc_feature (99)..(99): Xaa is any aa, unknown or other
  misc_feature (107)..(107): Xaa is any aa, unknown or other
  misc_feature (118)..(118): Xaa is any aa, unknown or other
MHTKSESDVTSLAASSPPRSPKXGVXXXGTGGGGGYYVQSPSRESHDGGGGGGYKSSSMQATPVYNNSPSESPSHPSYGRHSRSSSVSRFSGGLRGAXXGGRKVLNXKGWPECSVIEXEGPYEGLGAGDSGLSRRCQIVLGFLTFVLLFTVFCLVIWGAARPYEPEVVVKSLVMDDFYAGEGTDHSGVPTKLVTTNCSLHVSVYNPATMFGIHVTSGPIRLIYSEISIAVGQVRRYYQPRKSQRTVTAVIHGEKVPLYGAGGGLTLSTSAGGGAVPLTLDFDLTSRGYVIGRLVRVTHRAHVTCPVVVDARRTKPVRFSKKACAVYKA

SEQ ID NO: 3081 - DNA, 938 bp, Zea mays subsp. mays
  misc_feature (1)..(938): Ceres Seq. ID no. 12366741
  misc_feature (1)..(938): Ortholog of  Ceres SEQ ID NO 14305363 as cited in SEQ ID NO 1276
  misc_feature (1)..(938): Ortholog of  Ceres SEQ ID NO 14314743 as cited in SEQ ID NO 56854
attcacgcatcacaagctggaaggcactgtgggcaataatggctctgctcacgctccagcagccagcgatacccttcctcctgctcctcctcctgctccccgccgcgtccgctaggctgcccggtggccggacactggtcttcatcctggctgggcagtccaacatgagcggccgcggcggcgccaccaacggcacctgggacggcatcgtcccgccggagtgcgcgccctcggaccgcatcgtccgtctctcccccgccttcgctgggagcaggcgcgcgagccgctgcacgccggcgtcgacgtgggcaacgttctcggcgtcgggcccggcatgcccttcgcgcacgccgtgctcaccagcgagggcgcagccgcagagccccccgtcgtcgtcgggctcgtgccgtgcgcacagggcggcacgccgatcgccaactggtcccgggggacggagctgtacgagcggatggtgacgcgcgccagggcggccgtggccgagtgcagcggacgcggtcacctggccgccttgctttggtaccagggggaggcggacaccatgaggcgccaggatgctgagctctaccagcggcggatggagactctcgtgcgtgacgttcgctgcgacctcggccggcccgacctcctcgtcatccaggtgggcattgcaactgcgcagtacaatggcaagttcctcggcgtggtgagggaagctcagaaggcagtgaagctcccaaatgtcaagtacgttgatgccatggggctgcccatcgcgagcgaccacacgcatctcaccacggaggctcaagtccagctcggcaacaaactagccgagtcgtatttagaaacgctgtaattttcaaataccggtatgcctaccaaaaacaaggcattcccccacgatttggaaacggacagagcaagcaatatgtacactc

SEQ ID NO: 3082 - protein, 173 aa, Zea mays subsp. mays
  peptide (1)..(173): Ceres Seq. ID no. 12366742
MPFAHAVLTSEGAAAEPPVVVGLVPCAQGGTPIANWSRGTELYERMVTRARAAVAECSGRGHLAALLWYQGEADTMRRQDAELYQRRMETLVRDVRCDLGRPDLLVIQVGIATAQYNGKFLGVVREAQKAVKLPNVKYVDAMGLPIASDHTHLTTEAQVQLGNKLAESYLETL

SEQ ID NO: 3083 - protein, 157 aa, Zea mays subsp. mays
  peptide (1)..(157): Ceres Seq. ID no. 12366743
SRITSWKALWAIMALLTLQQPAIPFLLLLLLLPAASARLPGGRTLVFILAGQSNMSGRGGATNGTWDGIVPPECAPSDRIVRLSPAFAGSRRASRCTPASTWATFSASGPACPSRTPCSPARAQPQSPPSSSGSCRAHRAARRSPTGPGGRSCTSGW

SEQ ID NO: 3084 - protein, 145 aa, Zea mays subsp. mays
  peptide (1)..(145): Ceres Seq. ID no. 12366744
MALLTLQQPAIPFLLLLLLLPAASARLPGGRTLVFILAGQSNMSGRGGATNGTWDGIVPPECAPSDRIVRLSPAFAGSRRASRCTPASTWATFSASGPACPSRTPCSPARAQPQSPPSSSGSCRAHRAARRSPTGPGGRSCTSGW

SEQ ID NO: 3085 - DNA, 1174 bp, Zea mays subsp. mays
  misc_feature (1)..(1174): Ceres Seq. ID no. 12365255
  misc_feature (1)..(1174): Ortholog of  Ceres SEQ ID NO 12598859 as cited in SEQ ID NO 62872
  misc_feature (1)..(1174): Ortholog of  Ceres SEQ ID NO 12617350 as cited in SEQ ID NO 63777
  misc_feature (1)..(1174): Ortholog of  Ceres SEQ ID NO 13598749 as cited in SEQ ID NO 64341
  misc_feature (1)..(1174): Ortholog of  Ceres SEQ ID NO 15176153 as cited in SEQ ID NO 0
  misc_feature (1)..(1174): Ortholog of  Ceres SEQ ID NO 15179157 as cited in SEQ ID NO 0
atagcaaatccgcgaccccgagcaagaagccaggaaccagctcaaagttattcgtccaagaaccccaccccacccccacaacacatagaaatttcgtcttggagagccaccaatggcttgttccactgcatctttagcggcgatgctgctggcgttcgcgctgatgttccaggcctgcgtcgcggggaggaggaggctcaccgcgctcgtgcaggagccggccatcaccatgaagtaccacaagggcgcgctcctgtcgggccccatcgccgtcaacttcatctggtacggcgacttcacggcgccacagcgggcggtgatcaccgacttcgtctcgtcgctgtccgcggccccgcgggcggcggcgcagtcgcagccggagccgtccgtgtccacgtggttcaagacggcgcgcaagtactacgacacctccaaggcgcgtttcccggcgctgcgcctcggctcccacgccgtcgaccggaactgctccctcggcaggcggctcacggagcgggacctcctcaggctcgccgccaggggggcaccgagccgcgccatcaacctggtgctcacggccgccgacgtggccgtggacgggttctgcgcgtcccgttgcggcacgcacggcgcgtccccgcggtcccgcgccggccggttcgcgtacgtgtgggtgggcaacccggcgtcgcagtgccccggacagtgcgcgtggccgttccaccagcccgtctacggcccgcaggcgccgccgctcacgccccccaacgccgacgtcggggtcgacggcatggtgatctcgctggcgtccatgatcgtcggcaccgtcaccaacccgttcggcaacggggttctaccaggagggctcggccgacgcgccgctcgaggccgccacggcgtgcgccggcgtgtacggcaagggcgcgtaccccggctacgcgggggcgctgctggtggacccggccagcggcgccagcttcaatgccaacggggcccacgggagaaagtacctggtcccggcgctcgtggatccggacacgtcgtcgtgtgccaccttggggtagatttcgcggatcgtaaattagtgtttgcgatgtggcggtggtggtgctgtggagtgtgttccacgcggctaaaagtttgtgctaaagtagtactgaccaggttgcattattcc

SEQ ID NO: 3086 - protein, 358 aa, Zea mays subsp. mays
  peptide (1)..(358): Ceres Seq. ID no. 12365256
IANPRPRARSQEPAQSYSSKNPTPPPQHIEISSWRATNGLFHCIFSGDAAGVRADVPGLRRGEEEAHRARAGAGHHHEVPQGRAPVGPHRRQLHLVRRLHGATAGGDHRLRLVAVRGPAGGGAVAAGAVRVHVVQDGAQVLRHLQGAFPGAAPRLPRRRPELLPRQAAHGAGPPQARRQGGTEPRHQPGAHGRRRGRGRVLRVPLRHARRVPAVPRRPVRVRVGGQPGVAVPRTVRVAVPPARLRPAGAAAHAPQRRRRGRRHGDLAGVHDRRHRHQPVRQRGSTRRARPTRRSRPPRRAPACTARARTPATRGRCWWTRPAAPASMPTGPTGESTWSRRSWIRTRRRVPPWGRFRGS

SEQ ID NO: 3087 - protein, 354 aa, Zea mays subsp. mays
  peptide (1)..(354): Ceres Seq. ID no. 12365257
MACSTASLAAMLLAFALMFQACVAGRRRLTALVQEPAITMKYHKGALLSGPIAVNFIWYGDFTAPQRAVITDFVSSLSAAPRAAAQSQPEPSVSTWFKTARKYYDTSKARFPALRLGSHAVDRNCSLGRRLTERDLLRLAARGAPSRAINLVLTAADVAVDGFCASRCGTHGASPRSRAGRFAYVWVGNPASQCPGQCAWPFHQPVYGPQAPPLTPPNADVGVDGMVISLASMIVGTVTNPFGNGVLPGGLGRRAARGRHGVRRRVRQGRVPRLRGGAAGGPGQRRQLQCQRGPREKVPGPGARGSGHVVVCHLGVDFADRKLVFAMWRWWCCGVCSTRLKVCAKVVLTRLHYS

SEQ ID NO: 3088 - protein, 344 aa, Zea mays subsp. mays
  peptide (1)..(344): Ceres Seq. ID no. 12365258
MLLAFALMFQACVAGRRRLTALVQEPAITMKYHKGALLSGPIAVNFIWYGDFTAPQRAVITDFVSSLSAAPRAAAQSQPEPSVSTWFKTARKYYDTSKARFPALRLGSHAVDRNCSLGRRLTERDLLRLAARGAPSRAINLVLTAADVAVDGFCASRCGTHGASPRSRAGRFAYVWVGNPASQCPGQCAWPFHQPVYGPQAPPLTPPNADVGVDGMVISLASMIVGTVTNPFGNGVLPGGLGRRAARGRHGVRRRVRQGRVPRLRGGAAGGPGQRRQLQCQRGPREKVPGPGARGSGHVVVCHLGVDFADRKLVFAMWRWWCCGVCSTRLKVCAKVVLTRLHYS

SEQ ID NO: 3089 - DNA, 1660 bp, Zea mays subsp. mays
  misc_feature (1)..(1660): Ceres Seq. ID no. 12362157
  misc_feature (1)..(1660): Ortholog of  Ceres SEQ ID NO 13594536 as cited in SEQ ID NO 51382
  misc_feature (1)..(1660): Ortholog of  Ceres SEQ ID NO 15172549 as cited in SEQ ID NO 57185
atcctcgctgctttccaccaccctataccaaaccagccaaagccctcctctcctccccgcctccgcctccgacctcgaacattcttctccaatggcgacggcccccgcatccctctcgctctccgcctctaccctgcccacccggctccgtgccgcagcggtgctggcgggcatgcgctggaggcagccgcagcgcgggcggatggtggtgcgcgccaagatccgggagatcttcatgccggcgctgagctccaccatgacggagggcaagatcgtctcctggtccgctggagagggtgatcgcgtctccaagggtgacgccgtcgtggtcgtcgagtctgacaaggccgacatggacgttgagaccttccacgacggcatcgtggcggcggtcctcgtccaggctggcgagtcggcgccggtgggcgcgcccatcgcgctgctcgcggagtcagaggaggaggtgccgctcgctctcgccaaggctcaggagctctccaacgggcagccgcagcaggtgcctcctgctccgacggaggatgccgcagcgacgccgccccctcctcctgctccggccactgctcccacgccggtggccgtgggtacgaagggcattgccagcccgcacgctaagaagctggctaagcagcacagggtggaccttgccaaggtgactggcaccgggccgtatggtcgaattacgtcggcagatgtcgaggcggctgccggaatccagccgaagtcaaagcccgctgctgctgctgctgcgccaccacctgtggctgcaccttcagtgggtgcggtgcctcagtcggcagttctaccaccggttcctggcgcgactgttgttccattcactaccatgcaggctgcagtgagcaagaacatggtggagagtctggcagtgccaacattccgcgttgggtaccccattattactgataaactcgacgagctgtatgaaaaggttaagccaaagggagtgacaatgacagtgctgctggcgaaggctgcagccatggctcttgcacagcaccctgttgtcaatgctagctgcagggatggaaagagcttcacatacaacagtaacatcaacattgcagtggctgtggcaattgatggtggccttattacacctgtccttcaggatgctgacaagctggatatatatttgctctcgcaaaattggaaggatctagtgaagaaagcacgagcaaaacagctccaaccaaatgagtacagctctgggacttttacactgtccaacctgggtatgtttggtgtagatcggtttgatgcaatccttccacctgaccagggagctattatggctgttggagcctcgaaacctacagttgtggctgataaagatggtttctttagcgtcaagaacaaaatgctggtcaatgtcactgctgatcacaggattgtatatggggctgatttggcagcattcctacaaacttttgcaaaggttattgaggatcctgagagcttaactttgtgagatctcttgaagagttatgatcttatctatatgcccataaatagtctggttgcagttggagttctgttgttgatctccagtttttgtatctttgaacattcggcatgatttatctgatctttttgtactggtttctatctctcattgttgtgg

SEQ ID NO: 3090 - protein, 501 aa, Zea mays subsp. mays
  peptide (1)..(501): Ceres Seq. ID no. 12362158
SSLLSTTLYQTSQSPPLLPASASDLEHSSPMATAPASLSLSASTLPTRLRAAAVLAGMRWRQPQRGRMVVRAKIREIFMPALSSTMTEGKIVSWSAGEGDRVSKGDAVVVVESDKADMDVETFHDGIVAAVLVQAGESAPVGAPIALLAESEEEVPLALAKAQELSNGQPQQVPPAPTEDAAATPPPPPAPATAPTPVAVGTKGIASPHAKKLAKQHRVDLAKVTGTGPYGRITSADVEAAAGIQPKSKPAAAAAAPPPVAAPSVGAVPQSAVLPPVPGATVVPFTTMQAAVSKNMVESLAVPTFRVGYPIITDKLDELYEKVKPKGVTMTVLLAKAAAMALAQHPVVNASCRDGKSFTYNSNINIAVAVAIDGGLITPVLQDADKLDIYLLSQNWKDLVKKARAKQLQPNEYSSGTFTLSNLGMFGVDRFDAILPPDQGAIMAVGASKPTVVADKDGFFSVKNKMLVNVTADHRIVYGADLAAFLQTFAKVIEDPESLTL

SEQ ID NO: 3091 - protein, 471 aa, Zea mays subsp. mays
  peptide (1)..(471): Ceres Seq. ID no. 12362159
MATAPASLSLSASTLPTRLRAAAVLAGMRWRQPQRGRMVVRAKIREIFMPALSSTMTEGKIVSWSAGEGDRVSKGDAVVVVESDKADMDVETFHDGIVAAVLVQAGESAPVGAPIALLAESEEEVPLALAKAQELSNGQPQQVPPAPTEDAAATPPPPPAPATAPTPVAVGTKGIASPHAKKLAKQHRVDLAKVTGTGPYGRITSADVEAAAGIQPKSKPAAAAAAPPPVAAPSVGAVPQSAVLPPVPGATVVPFTTMQAAVSKNMVESLAVPTFRVGYPIITDKLDELYEKVKPKGVTMTVLLAKAAAMALAQHPVVNASCRDGKSFTYNSNINIAVAVAIDGGLITPVLQDADKLDIYLLSQNWKDLVKKARAKQLQPNEYSSGTFTLSNLGMFGVDRFDAILPPDQGAIMAVGASKPTVVADKDGFFSVKNKMLVNVTADHRIVYGADLAAFLQTFAKVIEDPESLTL

SEQ ID NO: 3092 - protein, 444 aa, Zea mays subsp. mays
  peptide (1)..(444): Ceres Seq. ID no. 12362160
MRWRQPQRGRMVVRAKIREIFMPALSSTMTEGKIVSWSAGEGDRVSKGDAVVVVESDKADMDVETFHDGIVAAVLVQAGESAPVGAPIALLAESEEEVPLALAKAQELSNGQPQQVPPAPTEDAAATPPPPPAPATAPTPVAVGTKGIASPHAKKLAKQHRVDLAKVTGTGPYGRITSADVEAAAGIQPKSKPAAAAAAPPPVAAPSVGAVPQSAVLPPVPGATVVPFTTMQAAVSKNMVESLAVPTFRVGYPIITDKLDELYEKVKPKGVTMTVLLAKAAAMALAQHPVVNASCRDGKSFTYNSNINIAVAVAIDGGLITPVLQDADKLDIYLLSQNWKDLVKKARAKQLQPNEYSSGTFTLSNLGMFGVDRFDAILPPDQGAIMAVGASKPTVVADKDGFFSVKNKMLVNVTADHRIVYGADLAAFLQTFAKVIEDPESLTL

SEQ ID NO: 3093 - DNA, 1741 bp, Zea mays subsp. mays
  misc_feature (1)..(1741): Ceres Seq. ID no. 12362368
  misc_feature (1)..(1741): Ortholog of  Ceres SEQ ID NO 14301994 as cited in SEQ ID NO 56653
  misc_feature (1)..(1741): Ortholog of  Ceres SEQ ID NO 14304120 as cited in SEQ ID NO 58862
  misc_feature (1)..(1741): Ortholog of  Ceres SEQ ID NO 13595658 as cited in SEQ ID NO 59888
  misc_feature (1)..(1741): Ortholog of  Ceres SEQ ID NO 13661330 as cited in SEQ ID NO 61614
  misc_feature (1)..(1741): Ortholog of  Ceres SEQ ID NO 13596025 as cited in SEQ ID NO 62024
  misc_feature (1)..(1741): Ortholog of  Ceres SEQ ID NO 13662324 as cited in SEQ ID NO 62162
  misc_feature (1)..(1741): Ortholog of  Ceres SEQ ID NO 12625713 as cited in SEQ ID NO 64160
  misc_feature (1)..(1741): Ortholog of  Ceres SEQ ID NO 14303564 as cited in SEQ ID NO 65360
  misc_feature (1)..(1741): Ortholog of  Ceres SEQ ID NO 15170103 as cited in SEQ ID NO 66345
  misc_feature (1)..(1741): Ortholog of  Ceres SEQ ID NO 14301782 as cited in SEQ ID NO 66788
  misc_feature (1)..(1741): Ortholog of  Ceres SEQ ID NO 14302860 as cited in SEQ ID NO 67667
  misc_feature (1)..(1741): Ortholog of  Ceres SEQ ID NO 14313495 as cited in SEQ ID NO 0
  misc_feature (1)..(1741): Ortholog of  Ceres SEQ ID NO 15174373 as cited in SEQ ID NO 0
gcacgagaccattacctagaacatcctaatcgaaaaaccccccgttctgtagctctcctctaatcctgatttttgtatgcgtggtggtcgctcttccgtctctcccagcccagcagccagcagtcgtctccttctctacctccctcgcatatcctgctcctctgtaaccactgtactaaaactagcctgtacctgtactgtgctgacattatatacagccccttctctttgcttcttgctcgtgccaattggcagttgccattgccaatcaccacgtagagctgcattattgcttgcttcgaggccatgggaactgcaagagttcgcttcgtggtccttgttctgatctctacgtttctcagagtcagagaaggcagagccgcgacattcacgttcgtgaaccggtgcacggggacggtgtggccgggcatccagtccaacgccggaagctcgaggctggacacgacgggcttcgtgctgccgccgggcacgtcgcgcgcggtcccggcgccgtcggggtggtccggccgcgtctgggcccgcaccggctgcgggcaggacggcagcggcaaggtggtgtgcgcgacgggcgactgcgggtccgggtccctggagtgcaacgggcagaacgcggcgacgcctgcgacgctggccgagttcacgctggcctccgcgggcggcaacgacttctacgacgtgagcctggtggacggctacaacctgccgatcctggtggagcccgcgggcggcgccgccaccggcgccagtgccacgacgtgcgccgcggccgggtgcacggcggacctcaacgagcggtgccccgcggagctgcgcgccgagggcggcgccgggtgccgcaccgcctgccacgccttcggcaggcccgagtactgctgcagcggcgcctacgccaaccccaacacctgccgccccaccgcctactcgcagctcttcaagtccgcctgccccaactcgtacagctacgcatacgacgaccccaccagcaccttcacctgcgccggcggccgcgactacaccatcaccttctgccccgtcgccaccccaagcgtgaaatcgtcgagtggccctggagcggcaacaacgacggcggcaccgacaggcccgacgccgacgctgccgggggcgacgccgcggtcggcaggcggcggcccggaggggcagggcgtgatgctgggcgacaactcctggctcgccagcctcgccacgggcgacgcgtcgtccgcgccggcgctccgggccttgcccctcgcgccgctcctgctcgtcggcctgctcctgcttgtgctgctatagcaccaccagcgggaaacccaggcaaccgaccgcgtcacgggcgtgtgaggcgaaagcttttgatctcggacagcctaccgaacgcgcgcgctcctgctacgtttgatgaatcatctcctagtcacggtgcaggcctgcagtgcggcggatgattttgacggctagccgaatgcgcgcacccccatccccagtcagcagctgaaggaaaaaaagtttaagtggcctactcatggatgaggtggctgcagcatggactagacacaaatactattagtgctgatggtgtatagtaccgctgccgctttaaagtagtgtacagtgcagtgcagctctgatggcgctgtccctcggcacatgggaggagatgtgcccatgccatgccatctgatctgtgcttgcggatcaatcaaatactacgtacgtgtcc

SEQ ID NO: 3094 - protein, 335 aa, Zea mays subsp. mays
  peptide (1)..(335): Ceres Seq. ID no. 12362369
MGTARVRFVVLVLISTFLRVREGRAATFTFVNRCTGTVWPGIQSNAGSSRLDTTGFVLPPGTSRAVPAPSGWSGRVWARTGCGQDGSGKVVCATGDCGSGSLECNGQNAATPATLAEFTLASAGGNDFYDVSLVDGYNLPILVEPAGGAATGASATTCAAAGCTADLNERCPAELRAEGGAGCRTACHAFGRPEYCCSGAYANPNTCRPTAYSQLFKSACPNSYSYAYDDPTSTFTCAGGRDYTITFCPVATPSVKSSSGPGAATTTAAPTGPTPTLPGATPRSAGGGPEGQGVMLGDNSWLASLATGDASSAPALRALPLAPLLLVGLLLLVLL

SEQ ID NO: 3095 - DNA, 1191 bp, Zea mays subsp. mays
  misc_feature (1)..(1191): Ceres Seq. ID no. 12352162
  misc_feature (1)..(1191): Ortholog of  Ceres SEQ ID NO 14304273 as cited in SEQ ID NO 53621
  misc_feature (1)..(1191): Ortholog of  Ceres SEQ ID NO 13595438 as cited in SEQ ID NO 56490
  misc_feature (1)..(1191): Ortholog of  Ceres SEQ ID NO 14314104 as cited in SEQ ID NO 63109
aagatataggttggaaccagactctgacaccgactacggagccaatccctcctgctggttcgatccaaaccctaccaaatcgatggccgacggcggcaacggcgggccgggcggcggcaatgcatcggcgccggtgtgcagtttcgtgaggaaaccacccaagaacatccggaagcgccccgccgcgcccgcggggtctgatgacgacgacgacggcggcggcggcgccctagccgccgcgcgctccaagaaggggccaccgtcctcaaccgctggcaagctcgttttctccaccgcaggtgcttcctccgaggcgccgcggttccagtacgaatcgtcccggacgatccagtccacggacacccgcgcaactgccacgctcgagacggagacggagtttgaccgcgacgcgcgctccatccgcgagagacagctcaagcaggccgaggagtccctcaagaagaacccctccgctgttgctgcttccgcctccgcctccaccgctggagaggtgtacaaggggatccacggctacacggactacaaagctgggttccgacgggagcacacggtatctagcgagaaggccggcggttcgcatggtccgctccgggcgtccgcgcacattcgcctctcccagcggtttgactaccagcccgacatctgcaaggactacaaggagacggggtactgtggttacggcgattcctgcaaattcatgcacgaccgaggggattacaaatccgggtggcagctcgagaaggaatatgaggaggctgagaaggcccgcaagcgacgaattgccatgggtggtggtggtgagagtgatgatgaggcagcagatgacgaggatgaggaggaggcgctgccctttgcctgcttcatttgtcgggagccattcgttgatccagtggtcaccaaatgcaagcactacttttgtgaacattgcgctttgaagcaccactcgaagaacaagaagtgctacgtctgcaacaaaccgacgctgggcatcttcaacgctgcacaggagatccgcaagaagatggcacaggacaagaagcagcagcagcaggagtaggagagctcaaaacacaccgttgctaatttagctgtgttgtacaacgatgattggtgcgataactagagtccggtatttttcgctatcagataaaagagaccaagttttgaacg

SEQ ID NO: 3096 - protein, 358 aa, Zea mays subsp. mays
  peptide (1)..(358): Ceres Seq. ID no. 12352163
RYRLEPDSDTDYGANPSCWFDPNPTKSMADGGNGGPGGGNASAPVCSFVRKPPKNIRKRPAAPAGSDDDDDGGGGALAAARSKKGPPSSTAGKLVFSTAGASSEAPRFQYESSRTIQSTDTRATATLETETEFDRDARSIRERQLKQAEESLKKNPSAVAASASASTAGEVYKGIHGYTDYKAGFRREHTVSSEKAGGSHGPLRASAHIRLSQRFDYQPDICKDYKETGYCGYGDSCKFMHDRGDYKSGWQLEKEYEEAEKARKRRIAMGGGGESDDEAADDEDEEEALPFACFICREPFVDPVVTKCKHYFCEHCALKHHSKNKKCYVCNKPTLGIFNAAQEIRKKMAQDKKQQQQE

SEQ ID NO: 3097 - protein, 331 aa, Zea mays subsp. mays
  peptide (1)..(331): Ceres Seq. ID no. 12352164
MADGGNGGPGGGNASAPVCSFVRKPPKNIRKRPAAPAGSDDDDDGGGGALAAARSKKGPPSSTAGKLVFSTAGASSEAPRFQYESSRTIQSTDTRATATLETETEFDRDARSIRERQLKQAEESLKKNPSAVAASASASTAGEVYKGIHGYTDYKAGFRREHTVSSEKAGGSHGPLRASAHIRLSQRFDYQPDICKDYKETGYCGYGDSCKFMHDRGDYKSGWQLEKEYEEAEKARKRRIAMGGGGESDDEAADDEDEEEALPFACFICREPFVDPVVTKCKHYFCEHCALKHHSKNKKCYVCNKPTLGIFNAAQEIRKKMAQDKKQQQQE

SEQ ID NO: 3098 - DNA, 1249 bp, Zea mays subsp. mays
  misc_feature (1)..(1249): Ceres Seq. ID no. 12381193
  misc_feature (1)..(1249): Ortholog of  Ceres SEQ ID NO 14314464 as cited in SEQ ID NO 52405
  misc_feature (1)..(1249): Ortholog of  Ceres SEQ ID NO 15177592 as cited in SEQ ID NO 58436
  misc_feature (1)..(1249): Ortholog of  Ceres SEQ ID NO 13655251 as cited in SEQ ID NO 62888
  misc_feature (1)..(1249): Ortholog of  Ceres SEQ ID NO 13597194 as cited in SEQ ID NO 63661
  misc_feature (1)..(1249): Ortholog of  Ceres SEQ ID NO 14302883 as cited in SEQ ID NO 66384
  misc_feature (1)..(1249): Ortholog of  Ceres SEQ ID NO 13662855 as cited in SEQ ID NO 69059
gcacgagaccattacctagaacatcctaatcgaaaaaaaccccaactccacaatgaggccgtcgctgatgagatccacctcccagctcctccgccgccggagctactcctccgcatccgggcagcccgagcggaaggtggccatcctcggggcggcggggggcatcgggcagccgctgtcgctgctcatgaagctcaacccactggtctcctccctctcgctctacgatatcgctggcaccccaggtgtcgcggccgacgtctcccacatcaactcccccgcactggtgaagggtttcatgggtgatgagcaacttggggaagcgctagagggctcggacgtggtgatcataccggccggcgtcccgaggaagcccggcatgaccagggacgacctattcaatatcaacgctggcatcgttaagaacctcagcaccgccatcgccaagtactgccccaatgcccttgtcaacatgatcagcaaccctgtgaattcaactgtaccaattgctgctgaggttttcaagaaggctgggacatatgatgagaagaagttgtttggcgtgaccacccttgatgttgttcgtgctaagactttctatgctgggaaggctaatttaccagttaccgatgtgaatgtccctgttgttggtggtcatgcgggtatcactatcctgccgttgttctcacaggccacccctgcaaccaacgcattgtccgatgaagacatcaaggctctcaccaagaggacacaggatggtggaactgaagttgtcgaggcaaaggctgggaagggctctgcaaccttgtccatggcgtatgctggtgctgtttttgcagatgcatgcttgaagggtctcaatggagttccggatattgttgagtgctcttttgttcaatcaactgtaacagagcttccattctttgcatctaaggtaaggcttgggaagaatggagttgaggaagtgcttggattaggtgagctgtgcggactttgagaaagaagggttggagaagctcaagagcgagctcaagtcttcgattgagaagggtatcaagtttgcaaatgataactagataaggccattttgcagattatagcaacaattgaaacctttagtagcaattgaaacctttagttgcgggatcttctgatttcattctacccttttctgtccctttttgtgagggagtggaaggtattacaataaaaaacctgatgggcaaagcttacatgagggatttattcc

SEQ ID NO: 3099 - protein, 314 aa, Zea mays subsp. mays
  peptide (1)..(314): Ceres Seq. ID no. 12381194
MRPSLMRSTSQLLRRRSYSSASGQPERKVAILGAAGGIGQPLSLLMKLNPLVSSLSLYDIAGTPGVAADVSHINSPALVKGFMGDEQLGEALEGSDVVIIPAGVPRKPGMTRDDLFNINAGIVKNLSTAIAKYCPNALVNMISNPVNSTVPIAAEVFKKAGTYDEKKLFGVTTLDVVRAKTFYAGKANLPVTDVNVPVVGGHAGITILPLFSQATPATNALSDEDIKALTKRTQDGGTEVVEAKAGKGSATLSMAYAGAVFADACLKGLNGVPDIVECSFVQSTVTELPFFASKVRLGKNGVEEVLGLGELCGL

SEQ ID NO: 3100 - protein, 309 aa, Zea mays subsp. mays
  peptide (1)..(309): Ceres Seq. ID no. 12381195
MRSTSQLLRRRSYSSASGQPERKVAILGAAGGIGQPLSLLMKLNPLVSSLSLYDIAGTPGVAADVSHINSPALVKGFMGDEQLGEALEGSDVVIIPAGVPRKPGMTRDDLFNINAGIVKNLSTAIAKYCPNALVNMISNPVNSTVPIAAEVFKKAGTYDEKKLFGVTTLDVVRAKTFYAGKANLPVTDVNVPVVGGHAGITILPLFSQATPATNALSDEDIKALTKRTQDGGTEVVEAKAGKGSATLSMAYAGAVFADACLKGLNGVPDIVECSFVQSTVTELPFFASKVRLGKNGVEEVLGLGELCGL

SEQ ID NO: 3101 - protein, 269 aa, Zea mays subsp. mays
  peptide (1)..(269): Ceres Seq. ID no. 12381196
MKLNPLVSSLSLYDIAGTPGVAADVSHINSPALVKGFMGDEQLGEALEGSDVVIIPAGVPRKPGMTRDDLFNINAGIVKNLSTAIAKYCPNALVNMISNPVNSTVPIAAEVFKKAGTYDEKKLFGVTTLDVVRAKTFYAGKANLPVTDVNVPVVGGHAGITILPLFSQATPATNALSDEDIKALTKRTQDGGTEVVEAKAGKGSATLSMAYAGAVFADACLKGLNGVPDIVECSFVQSTVTELPFFASKVRLGKNGVEEVLGLGELCGL

SEQ ID NO: 3102 - DNA, 1673 bp, Zea mays subsp. mays
  misc_feature (1)..(1673): Ceres Seq. ID no. 12384182
  misc_feature (1)..(1673): Ortholog of  Ceres SEQ ID NO 15177221 as cited in SEQ ID NO 53046
  misc_feature (1)..(1673): Ortholog of  Ceres SEQ ID NO 15170209 as cited in SEQ ID NO 58562
  misc_feature (1)..(1673): Ortholog of  Ceres SEQ ID NO 14315134 as cited in SEQ ID NO 59476
  misc_feature (1)..(1673): Ortholog of  Ceres SEQ ID NO 12616332 as cited in SEQ ID NO 63449
  misc_feature (1)..(1673): Ortholog of  Ceres SEQ ID NO 13597498 as cited in SEQ ID NO 64648
  misc_feature (1)..(1673): Ortholog of  Ceres SEQ ID NO 14308053 as cited in SEQ ID NO 67790
ctcgacgcctcataggctcatagggttctccaaattctaaatcgttgcaagcgaaaccaccaaaactgtactcacaaccctcgtctgcgctgcgccaccactcccccgtggcggcttgtagttgtagaagttcccggaaccagacaacccctaggcgctgagttttctgatagcggcttcggatatctcgtcgtgggcggccatggcgggcccgtgctgagtgcggggcgggacaggtgaaggtctccgagctcgagatctcgatgcagattcgggagggcccggcgcggcggcaggcgccgtccgccgctggggcgctgcggtcgcccatgtccgccatgatgctcgctatgttcgctactatggcctccttctacgtcgccggtcgattgtggcaggatgctcagaaccgacttcatctcattaaggagctcgacagacgaacaggccaggggcaatcagcaatatctgtggatgataccttgaaggttgttgcatgcaggcagcaagggaagcggttggcatcacttgagatggagctggctgcagcaaagcataaaggttttgttggcaaatatactcctgagacaaatggaactcattctgggaaaaagccactgattgttattggaataatgagtagctttgggaggaaaaactaccgtgatgctgtcaggaaatcatggcttccaacaggttcaatgctgaagaaactagaagaagaaaaaggcattgtagtacgttttgttgttggaagaagtgcaaatcgaggtgatactttcgatagggagattgatgacgaaaataggagcaccaaggatttcttgatattggatgatcatatagaatctgatgaagagcttcctaagaagacaaaaagtttctttgctaatgcagcagaaacattcaatgctgcattttatgctaaggtcaatgatgatatatacataaatgtcgatactttgagtgcaatgctcgaaactcactgggacaggcctcgtgtctatataggttgcatgaaatcgggcgaggttttctctgacttaacccacaagtggtacgaatcagactggtggaaatttggtgatgggaaatcgtactttcgacacgcttctggtgaaatgtttgtcatatccagggccatagctcagttcatttctataaacaagtccgctctccggacatatgcccatgatgatgttagtattggatcgtggatgattggccttgccgtgaatcatgtaaatgaagcaaaactgtgctgttcatcgtggccctcaggtgcgttatgttcagcgctataacgagcaacaatgcttaatgaggaagagttttgcaaacactgtgcctgttggatcgaatcggtattgggaaaattttgttttcttctgccatcttgtgtagtcctttggaggaggcttgtacgagccagttcatactgattactggatcggatatcttgtttttcttttccaaaggaaaggtcttgcatattttctttgcaaggccactacactagaatcatgagttctgacgaaaagccctctgcagattgtatcctgttccgcgtgccatttgtagatgccccaccctttaccattcttttttctgacagacactgccattgttggagtgacagaaatcaatagcaattcgggagattactttgctcc

SEQ ID NO: 3103 - protein, 346 aa, Zea mays subsp. mays
  peptide (1)..(346): Ceres Seq. ID no. 12384183
MQIREGPARRQAPSAAGALRSPMSAMMLAMFATMASFYVAGRLWQDAQNRLHLIKELDRRTGQGQSAISVDDTLKVVACRQQGKRLASLEMELAAAKHKGFVGKYTPETNGTHSGKKPLIVIGIMSSFGRKNYRDAVRKSWLPTGSMLKKLEEEKGIVVRFVVGRSANRGDTFDREIDDENRSTKDFLILDDHIESDEELPKKTKSFFANAAETFNAAFYAKVNDDIYINVDTLSAMLETHWDRPRVYIGCMKSGEVFSDLTHKWYESDWWKFGDGKSYFRHASGEMFVISRAIAQFISINKSALRTYAHDDVSIGSWMIGLAVNHVNEAKLCCSSWPSGALCSAL

SEQ ID NO: 3104 - protein, 324 aa, Zea mays subsp. mays
  peptide (1)..(324): Ceres Seq. ID no. 12384184
MSAMMLAMFATMASFYVAGRLWQDAQNRLHLIKELDRRTGQGQSAISVDDTLKVVACRQQGKRLASLEMELAAAKHKGFVGKYTPETNGTHSGKKPLIVIGIMSSFGRKNYRDAVRKSWLPTGSMLKKLEEEKGIVVRFVVGRSANRGDTFDREIDDENRSTKDFLILDDHIESDEELPKKTKSFFANAAETFNAAFYAKVNDDIYINVDTLSAMLETHWDRPRVYIGCMKSGEVFSDLTHKWYESDWWKFGDGKSYFRHASGEMFVISRAIAQFISINKSALRTYAHDDVSIGSWMIGLAVNHVNEAKLCCSSWPSGALCSAL

SEQ ID NO: 3105 - protein, 321 aa, Zea mays subsp. mays
  peptide (1)..(321): Ceres Seq. ID no. 12384185
MMLAMFATMASFYVAGRLWQDAQNRLHLIKELDRRTGQGQSAISVDDTLKVVACRQQGKRLASLEMELAAAKHKGFVGKYTPETNGTHSGKKPLIVIGIMSSFGRKNYRDAVRKSWLPTGSMLKKLEEEKGIVVRFVVGRSANRGDTFDREIDDENRSTKDFLILDDHIESDEELPKKTKSFFANAAETFNAAFYAKVNDDIYINVDTLSAMLETHWDRPRVYIGCMKSGEVFSDLTHKWYESDWWKFGDGKSYFRHASGEMFVISRAIAQFISINKSALRTYAHDDVSIGSWMIGLAVNHVNEAKLCCSSWPSGALCSAL

SEQ ID NO: 3106 - DNA, 1506 bp, Zea mays subsp. mays
  misc_feature (1)..(1506): Ceres Seq. ID no. 12410412
  misc_feature (1)..(1506): Ortholog of  Ceres SEQ ID NO 14312324 as cited in SEQ ID NO 60453
  misc_feature (1)..(1506): Ortholog of  Ceres SEQ ID NO 12624791 as cited in SEQ ID NO 63574
  misc_feature (1)..(1506): Ortholog of  Ceres SEQ ID NO 12780574 as cited in SEQ ID NO 65624
cccggctcggctcggctcggcacaggatccggccggccttttcactcaactcgcttcagcagctcagcctccaaccaaccgagagaagccagagaaaaggttactccacagaaagcaaaaccctagcccactccggcgcgccaccggccgatggtttcgatgagcaccacgccgaagccgcttgactccgccgtcgtcagcgcagccgttgacggcggggatgagggtggtggtggaggcggtggcgggaagaagcaggcgcacggggcggtgatggcgccgccaccgatggtggtcccggccgcggcgcccgcggccgaggaggaggttcggaaggtcaggaagccgtacaccatcaccaagtcgcgggagagctggacggagccggagcacgacaagttcctcgaggccctgcagctttttgatcgtgattggaagaaaattgaagcatatgttggctcaaagactgttatacagataaggagccatgcacagaagtacttcctgaaggttcagaagaatggtacgggcgagcatctgcccccacccaggccaaaacgaaaggcagctcatccatatccacagaaggcatctaaaaatgctcctgcagtttctcaagctattttatcacaagaacaacctacccagagggagcaaggttctgtcatgcctatggatactgctactgtgagaaacacaaatgcgaatgtggcggtgccttcctgggacaatactcttgctcaacctttcagcgctggtcatgttcaaggtgcagctgcaacaaataactgttcaagtagcatggagagtccatctggtacttggccaacttctgaagcagtcgagcaagaaaatatggttccaccactccgtgccatgccagattttgcccaagtatacaacttcctgggaagcatatttgatccggatacaagtgggcatttgcagatgttaaaagcgatggatccagttgatattgaaacggcactactacttatgaggaatctttccatgaaccttaggagtcccgactttgagcaacatcggaggttgctatcatcatatagctatggtggcgcggaccatgtcaaatctgaagccatggaaaatcttggatctcctcagagtggccatcttccatccctggtaacaagcgaatgagagcacacttccaatttgcggtcggagctttggttgtttacacgggacattcctgtgcgctcccagcaatggagttgtggagacggctggtctgtttatgaatgctagagacgtatcgtggcagtaacatctgtatagcttccaataaatggtctgaccctaggcaagttttgctttttcgcgtacgtgtagatagccagttttgtgtgctcatgcaattttttcctgggtggggcctagatcgtatgtttttttatatacacactattggacgcgtgatgtaaatatgtgcaatctttgtaatgcttgaggtactataattatataatggatatgttatgatcg

SEQ ID NO: 3107 - protein, 336 aa, Zea mays subsp. mays
  peptide (1)..(336): Ceres Seq. ID no. 12410413
MVSMSTTPKPLDSAVVSAAVDGGDEGGGGGGGGKKQAHGAVMAPPPMVVPAAAPAAEEEVRKVRKPYTITKSRESWTEPEHDKFLEALQLFDRDWKKIEAYVGSKTVIQIRSHAQKYFLKVQKNGTGEHLPPPRPKRKAAHPYPQKASKNAPAVSQAILSQEQPTQREQGSVMPMDTATVRNTNANVAVPSWDNTLAQPFSAGHVQGAAATNNCSSSMESPSGTWPTSEAVEQENMVPPLRAMPDFAQVYNFLGSIFDPDTSGHLQMLKAMDPVDIETALLLMRNLSMNLRSPDFEQHRRLLSSYSYGGADHVKSEAMENLGSPQSGHLPSLVTSE

SEQ ID NO: 3108 - protein, 333 aa, Zea mays subsp. mays
  peptide (1)..(333): Ceres Seq. ID no. 12410414
MSTTPKPLDSAVVSAAVDGGDEGGGGGGGGKKQAHGAVMAPPPMVVPAAAPAAEEEVRKVRKPYTITKSRESWTEPEHDKFLEALQLFDRDWKKIEAYVGSKTVIQIRSHAQKYFLKVQKNGTGEHLPPPRPKRKAAHPYPQKASKNAPAVSQAILSQEQPTQREQGSVMPMDTATVRNTNANVAVPSWDNTLAQPFSAGHVQGAAATNNCSSSMESPSGTWPTSEAVEQENMVPPLRAMPDFAQVYNFLGSIFDPDTSGHLQMLKAMDPVDIETALLLMRNLSMNLRSPDFEQHRRLLSSYSYGGADHVKSEAMENLGSPQSGHLPSLVTSE

SEQ ID NO: 3109 - protein, 295 aa, Zea mays subsp. mays
  peptide (1)..(295): Ceres Seq. ID no. 12410415
MAPPPMVVPAAAPAAEEEVRKVRKPYTITKSRESWTEPEHDKFLEALQLFDRDWKKIEAYVGSKTVIQIRSHAQKYFLKVQKNGTGEHLPPPRPKRKAAHPYPQKASKNAPAVSQAILSQEQPTQREQGSVMPMDTATVRNTNANVAVPSWDNTLAQPFSAGHVQGAAATNNCSSSMESPSGTWPTSEAVEQENMVPPLRAMPDFAQVYNFLGSIFDPDTSGHLQMLKAMDPVDIETALLLMRNLSMNLRSPDFEQHRRLLSSYSYGGADHVKSEAMENLGSPQSGHLPSLVTSE

SEQ ID NO: 3110 - DNA, 1505 bp, Zea mays subsp. mays
  misc_feature (1)..(1505): Ceres Seq. ID no. 12347490
  misc_feature (1)..(1505): Ortholog of  Ceres SEQ ID NO 15175785 as cited in SEQ ID NO 56970
  misc_feature (1)..(1505): Ortholog of  Ceres SEQ ID NO 13597407 as cited in SEQ ID NO 64106
gatatcttttttccatatgcttcactggacatctgcttattactcaggatgggtggttagcacatccctagctggtgcaacactaggttcctttaccgggggatctttggcagataaatttgggcggacaagaacattcatcctggatgcagccccactggctgtaggtgcattcttgagcgcaacagctcaagatatccgcaccatgattattggtcggttgcttgctggaattggtattgggatctcatctgcacttgtacccctttacatatctgagatatcaccaactgaaattcgtggaacacttggttctgttaatcaactttttatctgcattggaattcttgcagctttgttagctggattgcctttggcaggaaatcctgcctggtggaggacaatgtttggaattgctgtagttccatccattttgctggctgtaggaatggccttttcgcctgaaagccctcgatggctattccagcaaggaaaggttattcaagcagaatcagctgtaaaaagactatatggaaaagaaatggttaccgaaattatgtatgatctgagagctagtggccaaagttcttctgagaccgaagctggctggttggatcttttcagcaagcgttactggaaagttgtgagtgtgggggcagcactgtttttgttccagcagcttgctggtataaacgctgttgtatattactctacatcggtgttccgtaatgcaggcattacatctgatgttgctgctagtgctcttgttggagcagccaatgtttttggcaccatggttgcatcttctctaatggacaagaaaggaaggaaaagccttctgatgacaagcttttctggaatgggtgcttcaatgctactcctagcattgtccttcacctggaaagctctggcaccttattctggtactcttgctgttgttggcactgttctgtatgtgctgtcttttgctctaggagctggtcctgttcctgccctgcttcttcctgaaatatttgcctccagaataagggccaaggctgttgcattatctctaggcatgcactgggtatccaacttttttattggcctgtacttcttgagtgtcgtcaacaagttcgggatcagcaatgtatatttgggatttgcatcagtgtgcgtccttgcagttctctacatagctgggaatgtggtcgagaccaaggggcgatcacttgaagagattgaacgggaactaagtgtagcagaatgatgtgcttttgctagtcatgctgcggcgccgttttggtgattttgagaatgcaaccaagcacacaaccgagcatccttggacctggagactttctagtttcatgtagcagttaccgatcagattcagaaacaatgaactcgtcgatgtttctggagataagttttcgttttttgttctaaaatttcttgtttctcttgtataggagactttgagatagtttcagctctaaagacgtgaatatggagcagctccgctg

SEQ ID NO: 3111 - protein, 415 aa, Zea mays subsp. mays
  peptide (1)..(415): Ceres Seq. ID no. 12347491
ISFFHMLHWTSAYYSGWVVSTSLAGATLGSFTGGSLADKFGRTRTFILDAAPLAVGAFLSATAQDIRTMIIGRLLAGIGIGISSALVPLYISEISPTEIRGTLGSVNQLFICIGILAALLAGLPLAGNPAWWRTMFGIAVVPSILLAVGMAFSPESPRWLFQQGKVIQAESAVKRLYGKEMVTEIMYDLRASGQSSSETEAGWLDLFSKRYWKVVSVGAALFLFQQLAGINAVVYYSTSVFRNAGITSDVAASALVGAANVFGTMVASSLMDKKGRKSLLMTSFSGMGASMLLLALSFTWKALAPYSGTLAVVGTVLYVLSFALGAGPVPALLLPEIFASRIRAKAVALSLGMHWVSNFFIGLYFLSVVNKFGISNVYLGFASVCVLAVLYIAGNVVETKGRSLEEIERELSVAE

SEQ ID NO: 3112 - protein, 410 aa, Zea mays subsp. mays
  peptide (1)..(410): Ceres Seq. ID no. 12347492
MLHWTSAYYSGWVVSTSLAGATLGSFTGGSLADKFGRTRTFILDAAPLAVGAFLSATAQDIRTMIIGRLLAGIGIGISSALVPLYISEISPTEIRGTLGSVNQLFICIGILAALLAGLPLAGNPAWWRTMFGIAVVPSILLAVGMAFSPESPRWLFQQGKVIQAESAVKRLYGKEMVTEIMYDLRASGQSSSETEAGWLDLFSKRYWKVVSVGAALFLFQQLAGINAVVYYSTSVFRNAGITSDVAASALVGAANVFGTMVASSLMDKKGRKSLLMTSFSGMGASMLLLALSFTWKALAPYSGTLAVVGTVLYVLSFALGAGPVPALLLPEIFASRIRAKAVALSLGMHWVSNFFIGLYFLSVVNKFGISNVYLGFASVCVLAVLYIAGNVVETKGRSLEEIERELSVAE

SEQ ID NO: 3113 - protein, 347 aa, Zea mays subsp. mays
  peptide (1)..(347): Ceres Seq. ID no. 12347493
MIIGRLLAGIGIGISSALVPLYISEISPTEIRGTLGSVNQLFICIGILAALLAGLPLAGNPAWWRTMFGIAVVPSILLAVGMAFSPESPRWLFQQGKVIQAESAVKRLYGKEMVTEIMYDLRASGQSSSETEAGWLDLFSKRYWKVVSVGAALFLFQQLAGINAVVYYSTSVFRNAGITSDVAASALVGAANVFGTMVASSLMDKKGRKSLLMTSFSGMGASMLLLALSFTWKALAPYSGTLAVVGTVLYVLSFALGAGPVPALLLPEIFASRIRAKAVALSLGMHWVSNFFIGLYFLSVVNKFGISNVYLGFASVCVLAVLYIAGNVVETKGRSLEEIERELSVAE

SEQ ID NO: 3114 - DNA, 1775 bp, Zea mays subsp. mays
  misc_feature (1)..(1775): Ceres Seq. ID no. 12410409
  misc_feature (1)..(1775): Ortholog of  Ceres SEQ ID NO 15170655 as cited in SEQ ID NO 67069
aatccctccctccctcatcgcgttttattattcccgtccttcttcattcggcccttcgccgctgctatatttcgcggccgccttgcctcctaataatagccgccgcggcagtggataccgccaccgccatgggagcgctcgaggaggcccacctcgcggccgccgcgtgcgcgtgcgaggaggaggaggaaagcgactacatcggcctcctcgcaggggaagcggcggcgggcgacgccgtggagccggccgtgcgcgccctgctgctggggctcggtgaggacgaccgccgcgagggcctgctccggacgcccaagcgcgtcgccaaggccttccgcgacggcacccgaggctacaggcaaaaagtaaaagacatagtgcaaggtgctctgtttccagaggttggtgtggataaaaggactggatctgctggtggaactggcgggcaagtagttgttcgagacattgaacttttctcctattgtgagtcatgcttgcttccattcagcatacagtgccatgtcgggtatgttccctcaggtggaagagtggttgggttaagcaagctttctagagtatctgatgtctttgccaagagattgcaaaaccctcaaagactagctaatgaaatctgtggtgcactgcatgctagcattcaacctgccggcgtggctgttgctctgcagtgctggcacattcctttaccagaaaacttggaatgcaagactttggaaggttggattagaacttcacattcatctcgctctggagtctttgaaggtgaaagcagcactttctggactgacttcttggctcttgttaagcttaggggcatagacgtggaggctaaggaccatactgtttctattccttggtgccctttaaggtctcatgaggttctactctctaacgggctctgcaagaaaaactcaactaatggcatggtttctgctgttacctcgatgctcttatcactcggagaggaccccctcaggaaagagcttttaggcactcctcagcgttatgtgcagtggctgatgaagttcaaagcatgtaatctactagacgtgaagctgaatggttttacacttagtaatgttagcttatatgagaggctaggtggaggcacaactgatcatggagcaatccgatcggagctgcacttgccattttgtgctcaatgtgaacaccatcttctgcccttctacggagtagttcacattgggtactttgacaatggaagcggagaaggcattgatcggtcgcattttcaggcgttggttcatttctacgggtgcaagcttcaggttcaagaaaggatgacaaggcagatagctgaagcggtttattcggtttcgcaccatggggccatggtcgttgttgaggccaaccacatttgcatgatctcaagggggatagagaaaataaggagcaacacggcaacaattgcagttttgggccagtttttggccgacccttctgccaaggcgtgcttcttacaaaatgttttggattctgttggttctgcggtatgaatcgtatcgcaagcagcaaaggaaaaaaatgtctagttgggagtcactatccagcaattgaaatttttagcaatctacttgtctagcatgattcttctcgggtgcaaatttgtcacctgtgggactgtaccgaggatgtcacaagaaagcaccaaaagggttttggttctctcgtgttgtaccatgtcacttgtaaggcacttcaaataaaaaagaaatagtaatagttacaactgtgcc

SEQ ID NO: 3115 - protein, 510 aa, Zea mays subsp. mays
  peptide (1)..(510): Ceres Seq. ID no. 12410410
SLPPSSRFIIPVLLHSALRRCYISRPPCLLIIAAAAVDTATAMGALEEAHLAAAACACEEEEESDYIGLLAGEAAAGDAVEPAVRALLLGLGEDDRREGLLRTPKRVAKAFRDGTRGYRQKVKDIVQGALFPEVGVDKRTGSAGGTGGQVVVRDIELFSYCESCLLPFSIQCHVGYVPSGGRVVGLSKLSRVSDVFAKRLQNPQRLANEICGALHASIQPAGVAVALQCWHIPLPENLECKTLEGWIRTSHSSRSGVFEGESSTFWTDFLALVKLRGIDVEAKDHTVSIPWCPLRSHEVLLSNGLCKKNSTNGMVSAVTSMLLSLGEDPLRKELLGTPQRYVQWLMKFKACNLLDVKLNGFTLSNVSLYERLGGGTTDHGAIRSELHLPFCAQCEHHLLPFYGVVHIGYFDNGSGEGIDRSHFQALVHFYGCKLQVQERMTRQIAEAVYSVSHHGAMVVVEANHICMISRGIEKIRSNTATIAVLGQFLADPSAKACFLQNVLDSVGSAV

SEQ ID NO: 3116 - protein, 468 aa, Zea mays subsp. mays
  peptide (1)..(468): Ceres Seq. ID no. 12410411
MGALEEAHLAAAACACEEEEESDYIGLLAGEAAAGDAVEPAVRALLLGLGEDDRREGLLRTPKRVAKAFRDGTRGYRQKVKDIVQGALFPEVGVDKRTGSAGGTGGQVVVRDIELFSYCESCLLPFSIQCHVGYVPSGGRVVGLSKLSRVSDVFAKRLQNPQRLANEICGALHASIQPAGVAVALQCWHIPLPENLECKTLEGWIRTSHSSRSGVFEGESSTFWTDFLALVKLRGIDVEAKDHTVSIPWCPLRSHEVLLSNGLCKKNSTNGMVSAVTSMLLSLGEDPLRKELLGTPQRYVQWLMKFKACNLLDVKLNGFTLSNVSLYERLGGGTTDHGAIRSELHLPFCAQCEHHLLPFYGVVHIGYFDNGSGEGIDRSHFQALVHFYGCKLQVQERMTRQIAEAVYSVSHHGAMVVVEANHICMISRGIEKIRSNTATIAVLGQFLADPSAKACFLQNVLDSVGSAV

SEQ ID NO: 3117 - DNA, 1255 bp, Zea mays subsp. mays
  misc_feature (1)..(1255): Ceres Seq. ID no. 12358141
  misc_feature (1)..(1255): Ortholog of  Ceres SEQ ID NO 12609965 as cited in SEQ ID NO 55883
  misc_feature (1)..(1255): Ortholog of  Ceres SEQ ID NO 13596393 as cited in SEQ ID NO 62144
  misc_feature (1)..(1255): Ortholog of  Ceres SEQ ID NO 13591076 as cited in SEQ ID NO 63757
  misc_feature (1)..(1255): Ortholog of  Ceres SEQ ID NO 13599575 as cited in SEQ ID NO 0
gcaaaaatctcctctctcgcttcatttcttttttctttccatcgaattcctcgtcaccaacacgcacgcggcctctgcctccgcgatccgcgtctccatcctgaggctccgaatcgatctcccttcctcaccaaaccggagcacttcggaggccggacccggcgagaagcgaccgaccgcagccagctcacgtctccctcttcatccaccatgctgagggtcgcgggcaggcgcctctcgtccgctctcgcctggcgccccgccgccgccgcctcaggctcccggggccctctcgccggtacactacccggccgcgacgacgacgacacacgcgactgcagggcgcgtttcgccatcgaatctcccttcttcgccgctgccagagggttttctgcagagactcttgctccaagaaaccaggatgtgggcttatccgagctcccagcaactgtggcagctgtgaagaatccaagtggaaaaatcgtgtatgatgagtataaccatgagcgctacccgcctggagaccccagcaagcgtgcatttgcctactttgtgctgagtggtgggaggttcatttacgcatctttgctgcgacttctcgtcttaaaatttgtcctgagcatgtcagcaagtaaggatgttctcgcgcttgcctcacttgaggttgacctctcaagcattgagcctggaaccacggtgacggtgaagtggcgtggcaagccggtcttcataaggcggaggacagaggatgatatcaagttggccaacagtgttgacgtcgcatccctccgccacccagagcaggatgcagagcgtgtcaagaaccccgaatggctggtcgtcattggggtctgcactcacctgggctgcatcccgctccctaatgcaggagactttggtggctggttctgcccgtgccacggctcgcactacgacatttctggtaggatccgcaagggcccggcacccttcaacctggaagtgccgacatacagcttcttggaagagaacaagcttctcatcggctgagattgctgttagtgttgttcgtgtggccctgtcgtttttgtttgatcaacaacttcaccttttctcttgcctgggttagggcatacctttgtgggttgtttctgagtgcagtgttgttgctagcacctgacagtaatgaataacctgctgctacataaaggatactgttaattgttgtcaaatttggttctgtttttttcctgacagcaatgaacaaacttctgct

SEQ ID NO: 3118 - protein, 342 aa, Zea mays subsp. mays
  peptide (1)..(342): Ceres Seq. ID no. 12358142
AKISSLASFLFSFHRIPRHQHARGLCLRDPRLHPEAPNRSPFLTKPEHFGGRTRREATDRSQLTSPSSSTMLRVAGRRLSSALAWRPAAAASGSRGPLAGTLPGRDDDDTRDCRARFAIESPFFAAARGFSAETLAPRNQDVGLSELPATVAAVKNPSGKIVYDEYNHERYPPGDPSKRAFAYFVLSGGRFIYASLLRLLVLKFVLSMSASKDVLALASLEVDLSSIEPGTTVTVKWRGKPVFIRRRTEDDIKLANSVDVASLRHPEQDAERVKNPEWLVVIGVCTHLGCIPLPNAGDFGGWFCPCHGSHYDISGRIRKGPAPFNLEVPTYSFLEENKLLIG

SEQ ID NO: 3119 - protein, 272 aa, Zea mays subsp. mays
  peptide (1)..(272): Ceres Seq. ID no. 12358143
MLRVAGRRLSSALAWRPAAAASGSRGPLAGTLPGRDDDDTRDCRARFAIESPFFAAARGFSAETLAPRNQDVGLSELPATVAAVKNPSGKIVYDEYNHERYPPGDPSKRAFAYFVLSGGRFIYASLLRLLVLKFVLSMSASKDVLALASLEVDLSSIEPGTTVTVKWRGKPVFIRRRTEDDIKLANSVDVASLRHPEQDAERVKNPEWLVVIGVCTHLGCIPLPNAGDFGGWFCPCHGSHYDISGRIRKGPAPFNLEVPTYSFLEENKLLIG

SEQ ID NO: 3120 - DNA, 817 bp, Zea mays subsp. mays
  misc_feature (1)..(817): Ceres Seq. ID no. 12342710
  misc_feature (1)..(817): Ortholog of  Ceres SEQ ID NO 13664349 as cited in SEQ ID NO 64378
atccggcatcccgatcctgtgtgtctctactctgcactcctcgattcgattcccccgacccagcaggcgggaaatggcgaacggtggggccgaggcatcgccgctgcggccccggcggcgcgccggctccagggacccgttcctcatcgtgtgccgcttcttcggcgtcgtcacggccgccgccgcgctgctctgcgtcgccgccaacgtcctctccgcggtctactccttccgcggtggcgctgacatcatcggcggcgtgttccggtgctacgcggtggtgttctccgtcttcgtcgccgttctcgagaccgagtgggcacccgtcatcaggctctggaagatatttgagtacttgccggcaaggggaatgctgcagacctttgttgctatcatgactaaggcgtacccaaatgttgagaggagcgagctgattttgatccaggagatcgctacctacatgcttcttgtgtgtggagctgtctacataatcgcaggtatactatgtcttggtgttttaaaacgttctaggcagcataaagcaacatcacaggagcaagcggccaaggatctggaggagctagagaagaggagagaggagcttgagtctctgttaactgctgagcggtcagagatggcctgatgtcgacctaccatctctcttctggtgtaaataagtgttttttttcattctctgttgaatgttggtagcgtgcatactgctttgccgtgaccattttgtttcagcatgttgtttcagctgggttctagacattcgtgtaatgcactgtttacttatatgatgatctcctgttgt

SEQ ID NO: 3121 - protein, 213 aa, Zea mays subsp. mays
  peptide (1)..(213): Ceres Seq. ID no. 12342711
SGIPILCVSTLHSSIRFPRPSRREMANGGAEASPLRPRRRAGSRDPFLIVCRFFGVVTAAAALLCVAANVLSAVYSFRGGADIIGGVFRCYAVVFSVFVAVLETEWAPVIRLWKIFEYLPARGMLQTFVAIMTKAYPNVERSELILIQEIATYMLLVCGAVYIIAGILCLGVLKRSRQHKATSQEQAAKDLEELEKRREELESLLTAERSEMA

SEQ ID NO: 3122 - protein, 189 aa, Zea mays subsp. mays
  peptide (1)..(189): Ceres Seq. ID no. 12342712
MANGGAEASPLRPRRRAGSRDPFLIVCRFFGVVTAAAALLCVAANVLSAVYSFRGGADIIGGVFRCYAVVFSVFVAVLETEWAPVIRLWKIFEYLPARGMLQTFVAIMTKAYPNVERSELILIQEIATYMLLVCGAVYIIAGILCLGVLKRSRQHKATSQEQAAKDLEELEKRREELESLLTAERSEMA

SEQ ID NO: 3123 - protein, 131 aa, Zea mays subsp. mays
  peptide (1)..(131): Ceres Seq. ID no. 12342713
PASRSCVSLLCTPRFDSPDPAGGKWRTVGPRHRRCGPGGAPAPGTRSSSCAASSASSRPPPRCSASPPTSSPRSTPSAVALTSSAACSGATRWCSPSSSPFSRPSGHPSSGSGRYLSTCRQGECCRPLLLS

SEQ ID NO: 3124 - DNA, 1402 bp, Zea mays subsp. mays
  misc_feature (1)..(1402): Ceres Seq. ID no. 12344673
  misc_feature (1)..(1402): Ortholog of  Ceres SEQ ID NO 14312166 as cited in SEQ ID NO 59253
cttgaccctggcctccacggcgtaggccttgtacccggctaccctccgccgtcgcttcgcctcggggtcgcccgacgaccaccacgagtccacgacggcgcgcgcacctcgctgtcgcccccgtcgtgcgacgccgccggctgggcatcgccccggaactcctcctgaaggcccctcatcacgctcttgcaggctctggacggacgtgggaggccccgcggcgcccgtacgtatatctagcggcgagacggcaagctcccgccccatctccgccgcctccgctccccgtcgtccggctgcgctgttgctgctcatacggatcaagctcggctacacccgtttctgcgagcagatcagaggacgccatcgtcgggtcggtagggatgggacctgttcactccgatcaaaaggcgaagaaattggcgattatttgcgaacaaagagttataattccaaacgggcatggggagaagcttgttggtttattacatcgaacaagttcaaagaatcttgtgatcctttgtcatggattccaagccacaaaggatgacagcatcttggttgaccttgctgatgccatcacaaaggaaggaattagtgcttttcggtttgatttttctggaaatggggaaagtgatggtgaattccagtatggaagctacagaaaagaggcagctgatttgcgctctgtagtattacatttctcagaacagaaatatgacataattgctcttatcgggcatagcaaaggaggaaatgctgttcttctttatgcttccaagtaccatgatgtccctgccattgtgaacatttctggccgctttgcattagagcgaggtatggagggacgccttgggaagaatttcatgaggagaataaacgaagatggatacattgatgtgaagaataaaaaaggggagttgcagtaccgggtgtcgaaagcgagtctggatgaccggctgagcactgataccctattttccagccgtgccataagcaaagactgcagggttctcacgatccacggcgccaaagacgagatcgtcccggcggaggacgcccggcagttcgcggcgaacatccgcaaccacgagctgcgcatcatggcagaggccaaccaccgttacaccgggcacagggaggagctggcctcgctggtgctgggcttcctcagctcccatccctaccagatcacgtcgcgcttgcgtccgagactctagatagagtagagcacacccacttgaccgtttgcgaacaaaaaaaaaatcccctgtaccaatccaagagttgtgggtatggtgatgtgtttatccagaaccagaacacgagcacctgccgtccaaatcagcgtgactctgtctcgctcaagaatttcaaaaaaagtcagtgccaggcatctaac

SEQ ID NO: 3125 - protein, 278 aa, Zea mays subsp. mays
  peptide (1)..(278): Ceres Seq. ID no. 12344674
MGPVHSDQKAKKLAIICEQRVIIPNGHGEKLVGLLHRTSSKNLVILCHGFQATKDDSILVDLADAITKEGISAFRFDFSGNGESDGEFQYGSYRKEAADLRSVVLHFSEQKYDIIALIGHSKGGNAVLLYASKYHDVPAIVNISGRFALERGMEGRLGKNFMRRINEDGYIDVKNKKGELQYRVSKASLDDRLSTDTLFSSRAISKDCRVLTIHGAKDEIVPAEDARQFAANIRNHELRIMAEANHRYTGHREELASLVLGFLSSHPYQITSRLRPRL

SEQ ID NO: 3126 - DNA, 1531 bp, Zea mays subsp. mays
  misc_feature (1)..(1531): Ceres Seq. ID no. 12358795
  misc_feature (1)..(1531): Ortholog of  Ceres SEQ ID NO 15171813 as cited in SEQ ID NO 57309
  misc_feature (1)..(1531): Ortholog of  Ceres SEQ ID NO 14314378 as cited in SEQ ID NO 57601
  misc_feature (1)..(1531): Ortholog of  Ceres SEQ ID NO 15173178 as cited in SEQ ID NO 64574
ctagccgcctgcctctcctcctccagagctcgtcgccaccggccaccgccaccctcgatcacgccgtccgtcgaggtaaagttagtctccacgcccctttccctccgccctagtcctccgtagctctccgccgcgtcgtccgtcgaggtaaggtcagcatggtgagggtcagtgtgctcaacgatgcgctcaagtccatgtacaacgctgagaagatcggcaagaggcaggtcatgatcaggccgtcgtccaaggtcatcatcaagttcctgacggtcatgcagcgccacggctacattggagagttcgagtacgttgatgaccaccgatcgggcaagatcgtggtcgaactcaacgggaggctgaacaagtgcggcgtcatcagccctcgctttgatatcggcgtgaaagacattgagggatggactgcaaggctgctcccgtccaggcagttcggatacatcgtcctcacaacttcggcaggcatcatggaccacgaggaggcccgccggaagagcgtaggaggcaaggttctaggtttcttctattgaagaagctgagaatctttgttatggcctgcctgcctgtcttactctctcagactagagtacctgttattttactttaatatgtctctctcagactagagcgccttcttttacttgaatattggtgactgcattggtctttcactttaaaatcggtgactgcattgatcgaaaaaaaaaaaaaaaaaacggcacgagaagcgcttctcgtgccgttttttttttttttttttaccactactactaccatgtttgtgtatataaaaagaatgtgttctttcacgggcccgtgaaatcgtgtgctggggacaacatacatcaagtttcttcctcattacatcactcgccgctagtgtatggacaaggggtcacaatcaccaacgacaagggccgtctctccaaggaggagatcgagaagatggttcaggacgctgagaagtacaagtctgaggatgaggagcacaagaagaaggtggaggccaagaactcgctggagaactactcctacaacatgcgcaacacgatcaaggacgagaagattgcgtccaagctgccggccgatgacaagaagaagatcgaggacgccatcgacgcggccatcagctggctggacgccaaccagctcgccgaggcggacgagttcgaggacaagatgaaggagctggagagcctctgcaaccccatcatcgccaagatgtaccagggcgcgggtgaagacatgggcggcgctggcggcatggacgaggacgcccctgccggcagcggcggccctggccccaagatcgaggaggtggactaagcggtttgttgtcagtcttgagtgtgctgcagttgctggctggcccagttgctgccgagagttatcgtcagttggtgcggtgtgtccgcttaaactttatttgtggttggttggtacttttgtggtggttatttttttggacctcgtgatagtcggtcggttcaatgttatcgcggctactggt

SEQ ID NO: 3127 - protein, 130 aa, Zea mays subsp. mays
  peptide (1)..(130): Ceres Seq. ID no. 12358796
MVRVSVLNDALKSMYNAEKIGKRQVMIRPSSKVIIKFLTVMQRHGYIGEFEYVDDHRSGKIVVELNGRLNKCGVISPRFDIGVKDIEGWTARLLPSRQFGYIVLTTSAGIMDHEEARRKSVGGKVLGFFY

SEQ ID NO: 3128 - protein, 126 aa, Zea mays subsp. mays
  peptide (1)..(126): Ceres Seq. ID no. 12358797
MVQDAEKYKSEDEEHKKKVEAKNSLENYSYNMRNTIKDEKIASKLPADDKKKIEDAIDAAISWLDANQLAEADEFEDKMKELESLCNPIIAKMYQGAGEDMGGAGGMDEDAPAGSGGPGPKIEEVD

SEQ ID NO: 3129 - protein, 117 aa, Zea mays subsp. mays
  peptide (1)..(117): Ceres Seq. ID no. 12358798
MYNAEKIGKRQVMIRPSSKVIIKFLTVMQRHGYIGEFEYVDDHRSGKIVVELNGRLNKCGVISPRFDIGVKDIEGWTARLLPSRQFGYIVLTTSAGIMDHEEARRKSVGGKVLGFFY

SEQ ID NO: 3130 - DNA, 1201 bp, Zea mays subsp. mays
  misc_feature (1)..(1201): Ceres Seq. ID no. 12410398
  misc_feature (1)..(1201): Ortholog of  Ceres SEQ ID NO 15174883 as cited in SEQ ID NO 53894
cccggttagctcccgcgggagacgagacagcgcgcgcaaaacaaacctcaaacgccaaacgcaacacccgccagcaggccacctgtgagcagcgatgagctcgtcgacgcccggccgcgatgacgacgcgccggacctcgtctgccagatcgactgcgtccacggcatggtggacgcgctctcctcagtccgctggaagcgccaccaggacgcggtgatggagctgtcggagcacgggatcgttctctccgtagaggagagcgggtgtctccaggccaaggtcttcctcaagcgcgagctgttcgtagagtacgactatgcgggggacgggaggcagcggttcggcctcagcctgggtctcttcgtcgactgcctcaacatcttctcatcgccaggccacgcgtccgccgtcgagatccgttaccctggccccgacatgcagcttctcctcaagtctgtgggctctgccgatgcatgcctgtacgcagaaatcagaaccaggattccagatacagtctcctgggattaccattttgagcatgctgggaatagtccagtcagttttaccgtcaagtccgccgtcctgaaagaaacgatcgacgacctcgaatggccaggttccagcatccagattcgaatgcaaccagatcctccaactgttatactaaaaggcgaaggtcatggcgacttgcagaccgaattcccctactatgcaaacaccgaccttctaatcgtgttccaatgcgagcacgaagtgtcacacaggtacaaatacaagttcctccgagcgaccacctcgaacatccccagcagtgccgtgaaggagaaccgcaggaccaaggtctcgatcgggaggggagggatgctgaaggtccagcacctggtgtcgcttgccaggccaggcatgccgtacttccgtagcattggtggagggaacgagcagacgagccggatcgcgcatatagagttcttcgtgaagcccgaagaagacgataacggtgcctagctagcgttttgtggagtgtgttatcggcatgttgtttgagtagttcatgtgaaactgaagccgggtcttggtttttgaaacggctagtgtcgtctatcatacaggcatcacgcttctaatcatgtggatcctgttactaggcacgcattattttcctaatcaggtgaaacacatgtttgtggccttgtgatttgc

SEQ ID NO: 3131 - protein, 303 aa, Zea mays subsp. mays
  peptide (1)..(303): Ceres Seq. ID no. 12410399
MSSSTPGRDDDAPDLVCQIDCVHGMVDALSSVRWKRHQDAVMELSEHGIVLSVEESGCLQAKVFLKRELFVEYDYAGDGRQRFGLSLGLFVDCLNIFSSPGHASAVEIRYPGPDMQLLLKSVGSADACLYAEIRTRIPDTVSWDYHFEHAGNSPVSFTVKSAVLKETIDDLEWPGSSIQIRMQPDPPTVILKGEGHGDLQTEFPYYANTDLLIVFQCEHEVSHRYKYKFLRATTSNIPSSAVKENRRTKVSIGRGGMLKVQHLVSLARPGMPYFRSIGGGNEQTSRIAHIEFFVKPEEDDNGA

SEQ ID NO: 3132 - protein, 279 aa, Zea mays subsp. mays
  peptide (1)..(279): Ceres Seq. ID no. 12410400
MVDALSSVRWKRHQDAVMELSEHGIVLSVEESGCLQAKVFLKRELFVEYDYAGDGRQRFGLSLGLFVDCLNIFSSPGHASAVEIRYPGPDMQLLLKSVGSADACLYAEIRTRIPDTVSWDYHFEHAGNSPVSFTVKSAVLKETIDDLEWPGSSIQIRMQPDPPTVILKGEGHGDLQTEFPYYANTDLLIVFQCEHEVSHRYKYKFLRATTSNIPSSAVKENRRTKVSIGRGGMLKVQHLVSLARPGMPYFRSIGGGNEQTSRIAHIEFFVKPEEDDNGA

SEQ ID NO: 3133 - protein, 262 aa, Zea mays subsp. mays
  peptide (1)..(262): Ceres Seq. ID no. 12410401
MELSEHGIVLSVEESGCLQAKVFLKRELFVEYDYAGDGRQRFGLSLGLFVDCLNIFSSPGHASAVEIRYPGPDMQLLLKSVGSADACLYAEIRTRIPDTVSWDYHFEHAGNSPVSFTVKSAVLKETIDDLEWPGSSIQIRMQPDPPTVILKGEGHGDLQTEFPYYANTDLLIVFQCEHEVSHRYKYKFLRATTSNIPSSAVKENRRTKVSIGRGGMLKVQHLVSLARPGMPYFRSIGGGNEQTSRIAHIEFFVKPEEDDNGA

SEQ ID NO: 3134 - DNA, 938 bp, Zea mays subsp. mays
  misc_feature (1)..(938): Ceres Seq. ID no. 12410394
  misc_feature (1)..(938): Ortholog of  Ceres SEQ ID NO 13583718 as cited in SEQ ID NO 63252
agtgtctccactcgcacttccgcgacgcgcaacccaaagcaaacgcaccgggtcgagccaatccaccacccagccatgcctcccaagcgcaagtccccggcgacgattgcccctgcggcggggtccccgaggaagacgcggagcatggctgctgctgctgctgcagggaagcgggcaacggagcctgctccggcgaaggcagtgccggccaagaaggaagacgaggcggcggttgccgagttgaaagggaggaagaggggcaagaaggaagccgaggcggtgacggtggccaccgagccgaaagggaggaatagggacaagaaggaagccgaggcggtgacggtggccaccgagccgaaagggaggaagaggggcaagaaggaagccgaggcggtggcaccagcggcagaggaggaggatggggttgatgtggcggctgtagggaagcgtgtcatcgtcgaggcctgcactcagtgcagacagtttaagatccgagctcagaaggtgaaggaggacctggaaagttatgtttcgggggtgtctgtgataatcaaccctcagaagccacgccgtggttgccttgagatacgtgaagaaggcggtgaagtgttcatatcactgctgaacatgccacgccccttcacaccaatgaagaagctcgacatggacaaggttatcaaggacatcgccaagaagatctcctaaaccatgttggctggctatggctcggcggcaccattttgtgattgaaatattcaatctaagatcgtaatcttcaaagggtacggtgtaccttaggtgtaggttccaatcagtggcgtttcctattgcattggccatgtgcccatgtctcgtactcgtacctatgcttgtcctgcattgctggggcatatcgttttctgttatatgatatatgccctgaaaattccttgacttcc

SEQ ID NO: 3135 - protein, 234 aa, Zea mays subsp. mays
  peptide (1)..(234): Ceres Seq. ID no. 12410395
SVSTRTSATRNPKQTHRVEPIHHPAMPPKRKSPATIAPAAGSPRKTRSMAAAAAAGKRATEPAPAKAVPAKKEDEAAVAELKGRKRGKKEAEAVTVATEPKGRNRDKKEAEAVTVATEPKGRKRGKKEAEAVAPAAEEEDGVDVAAVGKRVIVEACTQCRQFKIRAQKVKEDLESYVSGVSVIINPQKPRRGCLEIREEGGEVFISLLNMPRPFTPMKKLDMDKVIKDIAKKIS

SEQ ID NO: 3136 - protein, 209 aa, Zea mays subsp. mays
  peptide (1)..(209): Ceres Seq. ID no. 12410396
MPPKRKSPATIAPAAGSPRKTRSMAAAAAAGKRATEPAPAKAVPAKKEDEAAVAELKGRKRGKKEAEAVTVATEPKGRNRDKKEAEAVTVATEPKGRKRGKKEAEAVAPAAEEEDGVDVAAVGKRVIVEACTQCRQFKIRAQKVKEDLESYVSGVSVIINPQKPRRGCLEIREEGGEVFISLLNMPRPFTPMKKLDMDKVIKDIAKKIS

SEQ ID NO: 3137 - protein, 186 aa, Zea mays subsp. mays
  peptide (1)..(186): Ceres Seq. ID no. 12410397
MAAAAAAGKRATEPAPAKAVPAKKEDEAAVAELKGRKRGKKEAEAVTVATEPKGRNRDKKEAEAVTVATEPKGRKRGKKEAEAVAPAAEEEDGVDVAAVGKRVIVEACTQCRQFKIRAQKVKEDLESYVSGVSVIINPQKPRRGCLEIREEGGEVFISLLNMPRPFTPMKKLDMDKVIKDIAKKIS

SEQ ID NO: 3138 - DNA, 1370 bp, Zea mays subsp. mays
  misc_feature (1)..(1370): Ceres Seq. ID no. 12356099
  misc_feature (1)..(1370): Ortholog of  Ceres SEQ ID NO 13582619 as cited in SEQ ID NO 56520
  misc_feature (1)..(1370): Ortholog of  Ceres SEQ ID NO 14314632 as cited in SEQ ID NO 59923
  misc_feature (1)..(1370): Ortholog of  Ceres SEQ ID NO 13660872 as cited in SEQ ID NO 60830
  misc_feature (1)..(1370): Ortholog of  Ceres SEQ ID NO 12616221 as cited in SEQ ID NO 63291
tcaagagtcaagatacatcagagtagctcattgcatagtttcagtgtgtaattatatatttgtctcctctagtgcagtactagagtctagtctagctagtttagattgagtctgcttgttcatctagcgcgtgttttggggtaggtagctagctagctagacacgcgcacccggacaaacgcacgcagcagacaccaagcaggaatcatcggcggcaggcggagggatggggctgagggagattgagtcgacattgccgccggggttcaggttctatcccagcgacgaggagctggtatgccattacctctacaggaaggtggccaacgagcgctccgtgcaggggacgctggtggaggtcgacctgcacgcgcgggaaccatgggagcttccagacgcggccaagctgacggcgagcgagtggtacttcttcagcttcagggaccgcaagtacgcgaccgggccgcgcacgaaccgcgccaccaagacgggctactggaaggccaccggcaaggaccgcgaggtgcgcgacccggccgcccgcgccgtcgtcgtcggcatgcggaagacgctcgtcttctaccagggccgtgcccccagcggcgtcaagtcatgctgggtcatgcacgagttccgcctcgactcgccgcgtacgacgacgacgccaccgaaggaggactgggtgctgtgcagggtgttccagaagcggaaagtcgacggcagcgagcaagacaacggcgtctccccctcgccgccggtctttgccggcgcatcgcagtcgcagggggtcgtcctgccgccggaccagccctgcgtggtggacgcgtacgtcgtggtagaccagccgggctcttcttccgtcggactcgcgccgccgcaggagaacctcggtagcggcctggacgcgttgctgacgaacggagcgatgtggcagtacacctcgtcggtcttcggtcacttgttgccgcaggaggcgaccagctccccgccggtgatggacctaggctccaggggaggagaaggaggagactacgggtgcagcttcttctacgacagcagcttcgaggacatggccaacatcgggttccgacaagggtggatgggctgatccaggaccaggaagcacacgtacgtgcgtgcagtcatgcgatatggaatgtgcatttgtgaaggaagtgattgaattaattgattccattagtagtagcaccctctagtgttgtacagtaggtacgtatatagtgtgagattagattattattgggaattgttagagtgcaccggcctctcaaatccaaagaagtaacagcggaaagaaaagctagtagctagagcacacatgtatatatttgcacaaggtagatggtttg

SEQ ID NO: 3139 - protein, 293 aa, Zea mays subsp. mays
  peptide (1)..(293): Ceres Seq. ID no. 12356100
MGLREIESTLPPGFRFYPSDEELVCHYLYRKVANERSVQGTLVEVDLHAREPWELPDAAKLTASEWYFFSFRDRKYATGPRTNRATKTGYWKATGKDREVRDPAARAVVVGMRKTLVFYQGRAPSGVKSCWVMHEFRLDSPRTTTTPPKEDWVLCRVFQKRKVDGSEQDNGVSPSPPVFAGASQSQGVVLPPDQPCVVDAYVVVDQPGSSSVGLAPPQENLGSGLDALLTNGAMWQYTSSVFGHLLPQEATSSPPVMDLGSRGGEGGDYGCSFFYDSSFEDMANIGFRQGWMG

SEQ ID NO: 3140 - protein, 198 aa, Zea mays subsp. mays
  peptide (1)..(198): Ceres Seq. ID no. 12356101
MPLPLQEGGQRALRAGDAGGGRPARAGTMGASRRGQADGERVVLLQLQGPQVRDRAAHEPRHQDGLLEGHRQGPRGARPGRPRRRRRHAEDARLLPGPCPQRRQVMLGHARVPPRLAAYDDDATEGGLGAVQGVPEAESRRQRARQRRLPLAAGLCRRIAVAGGRPAAGPALRGGRVRRGRPAGLFFRRTRAAAGEPR

SEQ ID NO: 3141 - protein, 182 aa, Zea mays subsp. mays
  peptide (1)..(182): Ceres Seq. ID no. 12356102
MRKTLVFYQGRAPSGVKSCWVMHEFRLDSPRTTTTPPKEDWVLCRVFQKRKVDGSEQDNGVSPSPPVFAGASQSQGVVLPPDQPCVVDAYVVVDQPGSSSVGLAPPQENLGSGLDALLTNGAMWQYTSSVFGHLLPQEATSSPPVMDLGSRGGEGGDYGCSFFYDSSFEDMANIGFRQGWMG

SEQ ID NO: 3142 - DNA, 1312 bp, Zea mays subsp. mays
  misc_feature (1)..(1312): Ceres Seq. ID no. 12410390
  misc_feature (1)..(1312): Ortholog of  Ceres SEQ ID NO 13582388 as cited in SEQ ID NO 56812
  misc_feature (1)..(1312): Ortholog of  Ceres SEQ ID NO 14305353 as cited in SEQ ID NO 57710
aatcatgctagttgttctcgttcccttgttagttgagctctttcccttcctcgcttggaaccaaatcaaatcggagcggcggagcaatacgatccctcgcctcgcttccattcgaatcatctcgaacggggcactaatcgggaagctaatgtcgcgcaattcgcgagatctgtagcgccactcggcttcaccggcggcgcggcgggcatggaagcgcagaacggctccggcgtaggggcgcccgtggtgctcaacgtgtacgaccttacgcccatgaacaactacctctactggttcggcctcggtattttccactccggaatcgaagtccacggcatggagtacggatatggagcacacgagtttccaacaagtggggtatttgaggtggaaccaaagagctgtcctggtttcacctacagaagatctgtgtggatgggcacaactgacttgtctagaacagagttccgctcgttcattgaaaaccttgcaggaaagtacaatggcaacacataccatttgatttcaaagaactgcaaccattttacagatgatgtctgtaagaacttgaccaggaaatcaatccctgggtgggtcaatcggctagcaagagtgggttcatttttcaactgtcttctaccagaaagcatccaagtttccacagtaagacacgtccctactcatcctgcattttctgatgatgatatggattcggtatcttcatcggttattggagacagtgatctggaagagctggaccaacaccttctgccatcaactgctgacgtccattctatagacgtgccgccaaagctagcgaaagatcttctctgagttattcagcactttgggttttcacatagcaaggataacttggactgctgcagtggatgtccgctgagtgcttctctgggtggcgcagccgcgcaggactccaggaatgtcgaatgctgctaattgtatcgattcttttgccactgaggtccttacatgcacacagagctctcgacagaaatgacacgctttctaatcctttgcctgttacttgtatgttgtgacttcatcctaggtattttgtgttcgagtgatactgtatgcattcagaatgccgtcaatggcgtgtctggttcgaggcatacaaagtagtatcttgtgttcgagtgatactgtaggcactgagaatgccgtcaatggtgtgtgtgtttgaggggtcacaggtaatccatcgagtgtagttaaaccaaacaaatcttaatatcatctgacttcaatccgtgcagcttttcctagtgatatatataatttttgtttt

SEQ ID NO: 3143 - protein, 208 aa, Zea mays subsp. mays
  peptide (1)..(208): Ceres Seq. ID no. 12410391
MEAQNGSGVGAPVVLNVYDLTPMNNYLYWFGLGIFHSGIEVHGMEYGYGAHEFPTSGVFEVEPKSCPGFTYRRSVWMGTTDLSRTEFRSFIENLAGKYNGNTYHLISKNCNHFTDDVCKNLTRKSIPGWVNRLARVGSFFNCLLPESIQVSTVRHVPTHPAFSDDDMDSVSSSVIGDSDLEELDQHLLPSTADVHSIDVPPKLAKDLL

SEQ ID NO: 3144 - protein, 186 aa, Zea mays subsp. mays
  peptide (1)..(186): Ceres Seq. ID no. 12410392
MNNYLYWFGLGIFHSGIEVHGMEYGYGAHEFPTSGVFEVEPKSCPGFTYRRSVWMGTTDLSRTEFRSFIENLAGKYNGNTYHLISKNCNHFTDDVCKNLTRKSIPGWVNRLARVGSFFNCLLPESIQVSTVRHVPTHPAFSDDDMDSVSSSVIGDSDLEELDQHLLPSTADVHSIDVPPKLAKDLL

SEQ ID NO: 3145 - protein, 165 aa, Zea mays subsp. mays
  peptide (1)..(165): Ceres Seq. ID no. 12410393
MEYGYGAHEFPTSGVFEVEPKSCPGFTYRRSVWMGTTDLSRTEFRSFIENLAGKYNGNTYHLISKNCNHFTDDVCKNLTRKSIPGWVNRLARVGSFFNCLLPESIQVSTVRHVPTHPAFSDDDMDSVSSSVIGDSDLEELDQHLLPSTADVHSIDVPPKLAKDLL

SEQ ID NO: 3146 - DNA, 1058 bp, Zea mays subsp. mays
  misc_feature (1)..(1058): Ceres Seq. ID no. 12406184
  misc_feature (1)..(1058): Ortholog of  Ceres SEQ ID NO 14302396 as cited in SEQ ID NO 66907
  misc_feature (1)..(1058): Ortholog of  Ceres SEQ ID NO 13496281 as cited in SEQ ID NO 69175
gctagggttttctcgcaatccagcccctctgtcatggccaagacgaagcaagggaagcgggatgtcgacgcctataccatcaagggcaccaacaaggtggtccgagtgggggactgcgtgctgatgcggccagcggacacggacaacccgccgtacgtggcgcgggtggagcggatggagtcggacgggcgcggcagcgtgagggtgcgggtgcgctggtactaccgccccgaggaggccaagggcggccgacgcccgttccacggtgccaaggagctcttcctctccgaccacttcgacacgcagagcgcccacaccattgagggcaagtgcatcgttcactccttcaagagctacaccaagctcgacaacgttggtccggaggacttctactgccgatttgactacaaggccgccaccggtgcattcacccccgaccgtgtcgccgtatattgcaagtgtgagatgccgtacaacccggatgacctcatggtgcagtgtgaaggatgcaaggactggttccatccgtcttgtatgggaatgaccattgagcaagcaaaaaagatagatcattacatgtgctcggattgtgctaaagaaaatggtgcaaagagaccctcaaattcatactcagtttcaccaaactcagattctaagattgaatcaaagaggcgcaagagataaatgctgcggcagaagcacccctggcaaaggagatgcggtatttatggtgtcagctcctcattactggtgcatatttgagatgttgatgtgtacactgcgagagaagagccaagccaattgtagggcaaaacctatttgacttatcattcttctgtgtattctgcctagacattagtgtgatgagtacgtgagttccccgttgcggcgtgtgcatgatcagctgctggaggcgggatgtcgggaaatgctagaattatgctgactcttgtcgatgtaagtgtatcgtgtgtgtgtgttaacatatgcactggctggaaacgttcccatgtgtgaatggaggatgctgatgatagcttgactgttgtttcatattc

SEQ ID NO: 3147 - protein, 227 aa, Zea mays subsp. mays
  peptide (1)..(227): Ceres Seq. ID no. 12406185
ARVFSQSSPSVMAKTKQGKRDVDAYTIKGTNKVVRVGDCVLMRPADTDNPPYVARVERMESDGRGSVRVRVRWYYRPEEAKGGRRPFHGAKELFLSDHFDTQSAHTIEGKCIVHSFKSYTKLDNVGPEDFYCRFDYKAATGAFTPDRVAVYCKCEMPYNPDDLMVQCEGCKDWFHPSCMGMTIEQAKKIDHYMCSDCAKENGAKRPSNSYSVSPNSDSKIESKRRKR

SEQ ID NO: 3148 - protein, 216 aa, Zea mays subsp. mays
  peptide (1)..(216): Ceres Seq. ID no. 12406186
MAKTKQGKRDVDAYTIKGTNKVVRVGDCVLMRPADTDNPPYVARVERMESDGRGSVRVRVRWYYRPEEAKGGRRPFHGAKELFLSDHFDTQSAHTIEGKCIVHSFKSYTKLDNVGPEDFYCRFDYKAATGAFTPDRVAVYCKCEMPYNPDDLMVQCEGCKDWFHPSCMGMTIEQAKKIDHYMCSDCAKENGAKRPSNSYSVSPNSDSKIESKRRKR

SEQ ID NO: 3149 - protein, 186 aa, Zea mays subsp. mays
  peptide (1)..(186): Ceres Seq. ID no. 12406187
MRPADTDNPPYVARVERMESDGRGSVRVRVRWYYRPEEAKGGRRPFHGAKELFLSDHFDTQSAHTIEGKCIVHSFKSYTKLDNVGPEDFYCRFDYKAATGAFTPDRVAVYCKCEMPYNPDDLMVQCEGCKDWFHPSCMGMTIEQAKKIDHYMCSDCAKENGAKRPSNSYSVSPNSDSKIESKRRKR

SEQ ID NO: 3150 - DNA, 1316 bp, Zea mays subsp. mays
  misc_feature (1)..(1316): Ceres Seq. ID no. 12408232
  misc_feature (1)..(1316): Ortholog of  Ceres SEQ ID NO 13597467 as cited in SEQ ID NO 65081
aattcaaacttcacatagagccgttgctcagcactcgcgacccactaccaatcctccaagcacaacaaccaatctttgcaagccgtccaaagacgccgcagccgccgccgccgacgccatggggaaactcggagccaagtccgactacgagagtctccgcgacgcccgcatctccgagaacatggcccggatggagatgctcggccttctccgctgcgcgggggagctcagcgacatcgcctccgcctccagccaccgcgcggcagggagcgcgacgcctcggaagacccccaggccacgggtgacgagcatgaccccgctccgccgctccggccgcctcctcgccgcgacgccgacccgcccgaccggatccgcgtcgacgcaccgctgttccactcggctgaatggacagggcacaggggttctgagtaagttgacggcggcgggatcggaggatgaggatgatacatgggaagatgataaggaggggaagtgggcggtggcggtggccaaggagagggtacaggcgctgcaggagaggcggtgcgacagcagggggaggggcggcgtgtacgactctgttcttgggatctgctgccatttctgcaggcagaagaaattgtgcggcgaggaggactgcaagcgctgcggggaaggagacctgaagcagccatgcttaggaaagacggagtgctcatcttgccattcttctaatgggatactctgccgtggttgcctgaaagttaggtacggcgaagagatggaagaggtgcggaagaacaagaactggctgtgccctcactgcgttgaggagaagggtatcaagaaattctggatatgcaacagctccttctgcttgaagaagcggaagataccaccgactgggattgccatatataatgcaagggagcaaggatacgagtcagttgcgcaccttctgatggacaggctgaagcgacaagctttctgatgacgactggtgtaatggtgttggcacgttcacttctacagcgacgatgatgacatagagattgtagtggcagtctgttgtctgacgacgtatggttttgcatgtttcacttctgcagtggcttagtgatgatggtagattggtagaggttatagcgagagtccgtttgtctggcagttccgatagtaggcatcttagcctctaggagaaaatgtttctgttgaaatgagttagactttttggcccaagaagaatgtgaagctaactctcggtagtctgatgtttcagagaacaacctcagcggccttctgacttctgagtggcagcatgtctgtttattgtaacc

SEQ ID NO: 3151 - protein, 322 aa, Zea mays subsp. mays
  peptide (1)..(322): Ceres Seq. ID no. 12408233
IQTSHRAVAQHSRPTTNPPSTTTNLCKPSKDAAAAAADAMGKLGAKSDYESLRDARISENMARMEMLGLLRCAGELSDIASASSHRAAGSATPRKTPRPRVTSMTPLRRSGRLLAATPTRPTGSASTHRCSTRLNGQGTGVLSKLTAAGSEDEDDTWEDDKEGKWAVAVAKERVQALQERRCDSRGRGGVYDSVLGICCHFCRQKKLCGEEDCKRCGEGDLKQPCLGKTECSSCHSSNGILCRGCLKVRYGEEMEEVRKNKNWLCPHCVEEKGIKKFWICNSSFCLKKRKIPPTGIAIYNAREQGYESVAHLLMDRLKRQAF

SEQ ID NO: 3152 - protein, 283 aa, Zea mays subsp. mays
  peptide (1)..(283): Ceres Seq. ID no. 12408234
MGKLGAKSDYESLRDARISENMARMEMLGLLRCAGELSDIASASSHRAAGSATPRKTPRPRVTSMTPLRRSGRLLAATPTRPTGSASTHRCSTRLNGQGTGVLSKLTAAGSEDEDDTWEDDKEGKWAVAVAKERVQALQERRCDSRGRGGVYDSVLGICCHFCRQKKLCGEEDCKRCGEGDLKQPCLGKTECSSCHSSNGILCRGCLKVRYGEEMEEVRKNKNWLCPHCVEEKGIKKFWICNSSFCLKKRKIPPTGIAIYNAREQGYESVAHLLMDRLKRQAF

SEQ ID NO: 3153 - protein, 262 aa, Zea mays subsp. mays
  peptide (1)..(262): Ceres Seq. ID no. 12408235
MARMEMLGLLRCAGELSDIASASSHRAAGSATPRKTPRPRVTSMTPLRRSGRLLAATPTRPTGSASTHRCSTRLNGQGTGVLSKLTAAGSEDEDDTWEDDKEGKWAVAVAKERVQALQERRCDSRGRGGVYDSVLGICCHFCRQKKLCGEEDCKRCGEGDLKQPCLGKTECSSCHSSNGILCRGCLKVRYGEEMEEVRKNKNWLCPHCVEEKGIKKFWICNSSFCLKKRKIPPTGIAIYNAREQGYESVAHLLMDRLKRQAF

SEQ ID NO: 3154 - DNA, 1191 bp, Zea mays subsp. mays
  misc_feature (1)..(1191): Ceres Seq. ID no. 12410365
  misc_feature (1)..(1191): Ortholog of  Ceres SEQ ID NO 13590591 as cited in SEQ ID NO 68169
aaaccgcacacggcacctcctctcgtccgttcgccgcctggctcgcaccgctgacagtgcgtcagtccaggtcgatactccctctttccaagatccggtcattctctctcggggtcggctaccgccgccgccgtacgccaggtgccgactgccgagaccttctccgatctgtttgccggcgaagagcgcccgccaaatctgcccctggtttcaaccgattgaaccccgatgtccgacgtcgagaaccctggcgtgggtgggaagccgccgccgtacaaggaccctgacaatgggagtcagcgattcctactcgagttggagttcgtgcagtgcctcgccaaccctacctacatccactatctagcgcagaatagatatttcgaggatgaggcatttatcgggtacctcaagtatctaaaatactggcagcgaccagagtatatcaaatacataatgtatccacactgccttttctttcttgagcttctccaaaatgccaatttccgaaatgcaatggcacatccaacaaacaaggagcttgctcataggcagcaatatttcttctggaaaaactacaggaataacagactgaagcacatcataccgcgccctcctcctgaacctgcaccttcacaggcacctgctacattgcccctacaagcgtccgtgccgacacctgtagctccacctgttcctgcaccaacatcgtctatgccacctgtggtagcaggtggtgcatctgcaatgtctcctatgcagtttgtaggaactccaggcactaatatgccgaagaatgacatgagaaatgctatggacaatagaaaaaggaagatgggctaattgaagttcttgcgcaacttttcaacggacactgccggattcgagcacagttgctgcctcaggagccttattatttccttttgttttagtgctggttatttggccttgtagttgagggttcgtgagtttttagaatggaagcttctgacttagagtgaagttagaacaaatactccatgtcgcatgaacttgcacacgtgactttaggtgtcagcattctcctgaatgatcataccatttaccttaatgtttcagcatattgcttggcagcaggaaatatgtactgttcataaactatacatatgcccgttggccccaatacaaagttgacattttggcaatattctgttc

SEQ ID NO: 3155 - protein, 203 aa, Zea mays subsp. mays
  peptide (1)..(203): Ceres Seq. ID no. 12410366
MSDVENPGVGGKPPPYKDPDNGSQRFLLELEFVQCLANPTYIHYLAQNRYFEDEAFIGYLKYLKYWQRPEYIKYIMYPHCLFFLELLQNANFRNAMAHPTNKELAHRQQYFFWKNYRNNRLKHIIPRPPPEPAPSQAPATLPLQASVPTPVAPPVPAPTSSMPPVVAGGASAMSPMQFVGTPGTNMPKNDMRNAMDNRKRKMG

SEQ ID NO: 3156 - protein, 128 aa, Zea mays subsp. mays
  peptide (1)..(128): Ceres Seq. ID no. 12410367
MYPHCLFFLELLQNANFRNAMAHPTNKELAHRQQYFFWKNYRNNRLKHIIPRPPPEPAPSQAPATLPLQASVPTPVAPPVPAPTSSMPPVVAGGASAMSPMQFVGTPGTNMPKNDMRNAMDNRKRKMG

SEQ ID NO: 3157 - protein, 120 aa, Zea mays subsp. mays
  peptide (1)..(120): Ceres Seq. ID no. 12410368
NRTRHLLSSVRRLARTADSASVQVDTPSFQDPVILSRGRLPPPPYARCRLPRPSPICLPAKSARQICPWFQPIEPRCPTSRTLAWVGSRRRTRTLTMGVSDSYSSWSSCSASPTLPTSTI

SEQ ID NO: 3158 - DNA, 1583 bp, Zea mays subsp. mays
  misc_feature (1)..(1583): Ceres Seq. ID no. 12362521
  misc_feature (1)..(1583): Ortholog of  Ceres SEQ ID NO 14308049 as cited in SEQ ID NO 66203
gcacgagaccattacctagaacatcctaatcgaaaagaccaatcgttcctatgaagatcaccgtgcagtcgtcgaagctggtcacgggcagctccagcggcggtcgtccttcttccgccgatgccgccgaggcggtcccgctcacggtgttcgacaagctccactacgatctgtacgtgcatgccttatacttcttccacccgccagcgccgcccagctccgtcctcgaggccgggctcgccgccgcgctggccgagtacccggagtaggccgggcggctcggcgtggacgcgcgcggcaaccgcgccatcctgctcaacggcgcgggcgcgcggctcgtcgaagccacggccgccgccgccgacgtctgctcgctcgacagcgtcgtgccgccggagccagcgactcccgcgaccatgagcctgcaccccagcgccgaggacgccgtcgacggcgaggtcctgctgctccaggtcacgcggttcgcctgcggctccttcgtcgtgggcacggcggtgcagcatgtcgtcggcgacggcgccgccttccactgcttcgtgagcgcctggggccaggcctcgcgcggcgccgccgtggaccccgcgcccgtgcacgaccgcgtgtccttcttcgtgccccggcacccgcccttggtcgagttcgagcaccgcggcgcggagtacaagcggccgcctcgccctcgcgagggcgaggagaaggccgggggcagcgagtcaggggccaaggccaaggccaacgccgacgtcggcgaaaagcagctggtgacgcgtagggtgaactttagccgagagttcgtcgccgagctcaagacgagggcgtcagcgggggcgcccttgccgcggcggtacagcacgctgcagtgcgtggcggcgcacctgtggcggtgcgtgacgagggcgcggaggctcgacgcgcgcgcccgcaccaccctccgcatcgccgtgaacgggcggtcgcggatgaggaacccgcgggtgcccgaggcgtacgccggcaacgtcgtgctctgggcgcgggcgaccgcggccgcaggcggcctggtacggagcccgctcccggaggccgtgcggctcgtgtccgaggcggtggcggccgtggacgacgcctacttcaggtccgtcatcgacttcgccagctccggggccctggaggaggaaggcctggtgccggcggccgacccgttggagacggtgttcagcccggacgtcgaggtgtacagcctgctgggggcctcgttccaggacttcgacttcggcggtggcccgcccttcttcttcatgccgagctactcgcccgtggagggcgccgtattcgtcgtgtcgtctttctccggcgacggcagtatcgacgcctacgtccctctcttcagccacgcgatggacatcttcgacaaatgctgccactccctgcctgctgcggacgcacgactttaggcgcgttgactttgcttcgtccgagatgatacatttcgtgaaataatcatttgcaaaaaaaagaagtaagatggattcggttatcatgtcaggagatgaatattaaggtagataattaagatatttcct

SEQ ID NO: 3159 - protein, 345 aa, Zea mays subsp. mays
  peptide (1)..(345): Ceres Seq. ID no. 12362522
MSLHPSAEDAVDGEVLLLQVTRFACGSFVVGTAVQHVVGDGAAFHCFVSAWGQASRGAAVDPAPVHDRVSFFVPRHPPLVEFEHRGAEYKRPPRPREGEEKAGGSESGAKAKANADVGEKQLVTRRVNFSREFVAELKTRASAGAPLPRRYSTLQCVAAHLWRCVTRARRLDARARTTLRIAVNGRSRMRNPRVPEAYAGNVVLWARATAAAGGLVRSPLPEAVRLVSEAVAAVDDAYFRSVIDFASSGALEEEGLVPAADPLETVFSPDVEVYSLLGASFQDFDFGGGPPFFFMPSYSPVEGAVFVVSSFSGDGSIDAYVPLFSHAMDIFDKCCHSLPAADARL

SEQ ID NO: 3160 - DNA, 1743 bp, Zea mays subsp. mays
  misc_feature (1)..(1743): Ceres Seq. ID no. 12348976
  misc_feature (1)..(1743): Ortholog of  Ceres SEQ ID NO 13654142 as cited in SEQ ID NO 68310
acgacgctactcgtcctcatccagtcacgaaaaatcggaatctctgaaaaatcctccgtaccatgaagctccggttgcgatctatgcaggcgcgcggcggctccgccgccgtggagacccaccgcgtggacctgccgcccacggccactctggccgacgtgaagaccctcctcgcgtcgaagctctctgcggcgcaacccgtccccgccgagtccgtccgcctctccctcaaccgtagcgaggagctcgtctcgccggaccctgccgctacgctcccgtccctcggcctcgcgtccggtgatctcgtatttttcaccctatcccccctcacggccctagcgccgccggctcaggccctgccacggaaccctagcccgagctctggcgctgcagcgtcgatcgctgaggctgccgaccgcgggaagggttcgaagcaatctggtactggagatttctcttcctcgtcactggcgcaggctgtggttgtgagccctagctttccggtcgcttccggtacgcgggatgtggtgatggaggaggaggccgtcgatgccacaaagggctggtcgagttttgtgcttagggatctcaagagggagatggacaacgtcggggccgcggagggaaccgccgcaggtcgcctggttgcggccttgcatgcagctctgcttgatgccggttttctcaccgctaaactgacgggctctcacctttcgctgcctcagggctggccgtcaggtgctttgaagccattgaccatcaagtatactataccagagctttcatcaatggtatctgtgactgaggaaggaaaggtggtggtgctgaactactccttgatggccaatttcgtgatggtttatgggtatgttcctggggcacagtctgaggtttgccggttgtgcttggagttgccggggctggagcctctactttatctggatggcgatcagctgaatggagtgcatgagaagggagttcatgatctgtggagagtgctgaaggatgagatttgcctgccactgatgatatcattgtgccaactgaacggtctgccttgccgccttgcttgatggctttgcctgctgatctcaagactaaggtattggggtttttacctggggttgatcttgcaaaggttgagtgcacatgcaaggaaatgatgaatcttgcatcagatgatagtatctggaagaagcttgtatccaagtttgaaaattatggcgagggctctaggctggcaggcaagaatgcaaaggccatatttgtagaagcttggcaggccaataagagacggcagaagaggcccaatccaaccttttggaactatggctggggaaacagtccttatagccgcccacttaggctgccattgattggtggggactcggacagacttccttttattgggaatcatggttctgttgggcgccactttggaaatcaacgaaggaatatctcaccgaactgcattcttgatggtcaccgtcataacttcctttgaagccatgtcaatgagttttacttgtatgttaagagtgttttataaggacttcaatggtgcatatacggttagaccgccttgttcatatcgtcaagtcgcacacttatgcttgtgcacagcactcttatgatcttatcctaatatatccccttagtatcttagatcgtatctttactatctttttttggtaccaaatgtaatccagtgtcctagtaataaagtacccttgttctattctc

SEQ ID NO: 3161 - protein, 336 aa, Zea mays subsp. mays
  peptide (1)..(336): Ceres Seq. ID no. 12348977
MKLRLRSMQARGGSAAVETHRVDLPPTATLADVKTLLASKLSAAQPVPAESVRLSLNRSEELVSPDPAATLPSLGLASGDLVFFTLSPLTALAPPAQALPRNPSPSSGAAASIAEAADRGKGSKQSGTGDFSSSSLAQAVVVSPSFPVASGTRDVVMEEEAVDATKGWSSFVLRDLKREMDNVGAAEGTAAGRLVAALHAALLDAGFLTAKLTGSHLSLPQGWPSGALKPLTIKYTIPELSSMVSVTEEGKVVVLNYSLMANFVMVYGYVPGAQSEVCRLCLELPGLEPLLYLDGDQLNGVHEKGVHDLWRVLKDEICLPLMISLCQLNGLPCRLA

SEQ ID NO: 3162 - protein, 329 aa, Zea mays subsp. mays
  peptide (1)..(329): Ceres Seq. ID no. 12348978
MQARGGSAAVETHRVDLPPTATLADVKTLLASKLSAAQPVPAESVRLSLNRSEELVSPDPAATLPSLGLASGDLVFFTLSPLTALAPPAQALPRNPSPSSGAAASIAEAADRGKGSKQSGTGDFSSSSLAQAVVVSPSFPVASGTRDVVMEEEAVDATKGWSSFVLRDLKREMDNVGAAEGTAAGRLVAALHAALLDAGFLTAKLTGSHLSLPQGWPSGALKPLTIKYTIPELSSMVSVTEEGKVVVLNYSLMANFVMVYGYVPGAQSEVCRLCLELPGLEPLLYLDGDQLNGVHEKGVHDLWRVLKDEICLPLMISLCQLNGLPCRLA

SEQ ID NO: 3163 - protein, 180 aa, Zea mays subsp. mays
  peptide (1)..(180): Ceres Seq. ID no. 12348979
MEEEAVDATKGWSSFVLRDLKREMDNVGAAEGTAAGRLVAALHAALLDAGFLTAKLTGSHLSLPQGWPSGALKPLTIKYTIPELSSMVSVTEEGKVVVLNYSLMANFVMVYGYVPGAQSEVCRLCLELPGLEPLLYLDGDQLNGVHEKGVHDLWRVLKDEICLPLMISLCQLNGLPCRLA

SEQ ID NO: 3164 - DNA, 1993 bp, Zea mays subsp. mays
  misc_feature (1)..(1993): Ceres Seq. ID no. 12352173
  misc_feature (1)..(1993): Ortholog of  Ceres SEQ ID NO 12608463 as cited in SEQ ID NO 60238
attagaatagccaggggcctcgctcctctccaccacgtactccactccatccatccatcatcgtctatccatgaagagcttgcaggaggagagggcggcgttggtgccgtcgccgtggccccagcaacagagaaaggacggcggcgagcatgatccggagcagctgatggatgaggatgacggtgacgatgaggaggatctgcaggatgagcagcacacaagaacaattaggacgtcgaccaagacggcggaagcatcgtcatcagcggagcggcgggtgccggcgtggtggaggcggcggcgggcgcagaagctggtgcccaccagaggtgttggcctggtcatcgccggtctcctcgtgctggtcttgctcgtcgtcgtcggcggcggcggcaacaccagtcgtcgtcgctggatccacctcgactatgcatcgtcgtttctgctaggcagcggcggcggcggcggcttgaagcagcatcaatggcctcctcaccacgtcccttcacccgcagcggacctcgtgcccatacccttcagctgcggcggcaacggctcggcatgtccccgtcgtcaaaccgcaacatcacccccctctccgtcgccgtcatcgtcatcgccaccagcagccaccaagtcatcatcgtccaagaataaacaaccccctcctcagtgcccggattacttccgcttcatccactccgacctgtcgccgtggcgcgagacggggatcacgcgcgaggcggtggagcgggggcgccaccgggcggcgttccggctggtggtcgtggacggccgcgcgtacgtggagacgtaccaccgcgtgttccagacgcgtgacaccttcacgcagtggggcatcgcgcagctgctggcgcgctaccccggacgcgtcccggacctggacctcatgttcaactgcgaggacatgcccgaggtcaaggtcaagccgtcggaggagtcgtccgcgccgccgctgttccgctactgcaaggacgactccacggtggacatcgtgttcccggactggtccttctggggctggcccgaggtcaacatccgtccctgggcgccgctgctggaggagatggccgccgagatgggtcgcctgccgtgggcggaccgggagccgtacgcgtactggaagggcaaccccaccgtgtccgccgagcgcgccgacctccgccgctgcaacgactcctcgtcgtccggcggcacgcgcgtgttctggcaggactggggcgccgccatccgggacggcttccgggactccaacctggccaagcagtgccgctaccgctacaagatctacgtgcgtggccggtcctggtcggtcagcctcaagtacatcctcgcctgcgactcgccggtgctgctcatcgccacgcccttcaaggacttcttctcccggggcctcgtcgccggcaggcactactggcccatcgaccccggagcccgcaagtgcgccgacatcaacttcgccgtccacgactggggcaacgcgcacccggagcaggcgcgccggatggcggaggaaggcagcggcttcgcgcgccaccagctcagcatggactacgtctacgactacatgctgcacctgctcacccagtacgccggcctgctccgctacaagcccaccgtgccggagaacgccgtagagctgtgcgccgagaccgtcgcctgccccgctgcgcaccacagcaacaggagggagttcgacttcatgatgcagtccagggagaggtacatcgccgactaccagccctgcacgctgccgccgccctttaccgaccgtcacatcagggagatgacgcgaagagaccaggaggtgcgcgccaacgtgcacaagatgatgaccaccgtcactccatgacgtcaccaattaagggattctcttgttctctatctatctatctatcttgaatatccacttcgttatactacgtcctggtctctgtctctataatattaaaatatcagttttaatggtctt

SEQ ID NO: 3165 - protein, 600 aa, Zea mays subsp. mays
  peptide (1)..(600): Ceres Seq. ID no. 12352174
MKSLQEERAALVPSPWPQQQRKDGGEHDPEQLMDEDDGDDEEDLQDEQHTRTIRTSTKTAEASSSAERRVPAWWRRRRAQKLVPTRGVGLVIAGLLVLVLLVVVGGGGNTSRRRWIHLDYASSFLLGSGGGGGLKQHQWPPHHVPSPAADLVPIPFSCGGNGSACPRRQTATSPPSPSPSSSSPPAATKSSSSKNKQPPPQCPDYFRFIHSDLSPWRETGITREAVERGRHRAAFRLVVVDGRAYVETYHRVFQTRDTFTQWGIAQLLARYPGRVPDLDLMFNCEDMPEVKVKPSEESSAPPLFRYCKDDSTVDIVFPDWSFWGWPEVNIRPWAPLLEEMAAEMGRLPWADREPYAYWKGNPTVSAERADLRRCNDSSSSGGTRVFWQDWGAAIRDGFRDSNLAKQCRYRYKIYVRGRSWSVSLKYILACDSPVLLIATPFKDFFSRGLVAGRHYWPIDPGARKCADINFAVHDWGNAHPEQARRMAEEGSGFARHQLSMDYVYDYMLHLLTQYAGLLRYKPTVPENAVELCAETVACPAAHHSNRREFDFMMQSRERYIADYQPCTLPPPFTDRHIREMTRRDQEVRANVHKMMTTVTP

SEQ ID NO: 3166 - protein, 568 aa, Zea mays subsp. mays
  peptide (1)..(568): Ceres Seq. ID no. 12352175
MDEDDGDDEEDLQDEQHTRTIRTSTKTAEASSSAERRVPAWWRRRRAQKLVPTRGVGLVIAGLLVLVLLVVVGGGGNTSRRRWIHLDYASSFLLGSGGGGGLKQHQWPPHHVPSPAADLVPIPFSCGGNGSACPRRQTATSPPSPSPSSSSPPAATKSSSSKNKQPPPQCPDYFRFIHSDLSPWRETGITREAVERGRHRAAFRLVVVDGRAYVETYHRVFQTRDTFTQWGIAQLLARYPGRVPDLDLMFNCEDMPEVKVKPSEESSAPPLFRYCKDDSTVDIVFPDWSFWGWPEVNIRPWAPLLEEMAAEMGRLPWADREPYAYWKGNPTVSAERADLRRCNDSSSSGGTRVFWQDWGAAIRDGFRDSNLAKQCRYRYKIYVRGRSWSVSLKYILACDSPVLLIATPFKDFFSRGLVAGRHYWPIDPGARKCADINFAVHDWGNAHPEQARRMAEEGSGFARHQLSMDYVYDYMLHLLTQYAGLLRYKPTVPENAVELCAETVACPAAHHSNRREFDFMMQSRERYIADYQPCTLPPPFTDRHIREMTRRDQEVRANVHKMMTTVTP

SEQ ID NO: 3167 - protein, 320 aa, Zea mays subsp. mays
  peptide (1)..(320): Ceres Seq. ID no. 12352176
MFNCEDMPEVKVKPSEESSAPPLFRYCKDDSTVDIVFPDWSFWGWPEVNIRPWAPLLEEMAAEMGRLPWADREPYAYWKGNPTVSAERADLRRCNDSSSSGGTRVFWQDWGAAIRDGFRDSNLAKQCRYRYKIYVRGRSWSVSLKYILACDSPVLLIATPFKDFFSRGLVAGRHYWPIDPGARKCADINFAVHDWGNAHPEQARRMAEEGSGFARHQLSMDYVYDYMLHLLTQYAGLLRYKPTVPENAVELCAETVACPAAHHSNRREFDFMMQSRERYIADYQPCTLPPPFTDRHIREMTRRDQEVRANVHKMMTTVTP

SEQ ID NO: 3168 - DNA, 1676 bp, Zea mays subsp. mays
  misc_feature (1)..(1676): Ceres Seq. ID no. 12357283
  misc_feature (1)..(1676): Ortholog of  Ceres SEQ ID NO 14315257 as cited in SEQ ID NO 52552
  misc_feature (1)..(1676): Ortholog of  Ceres SEQ ID NO 14314636 as cited in SEQ ID NO 56924
  misc_feature (1)..(1676): Ortholog of  Ceres SEQ ID NO 15171614 as cited in SEQ ID NO 60106
  misc_feature (1)..(1676): Ortholog of  Ceres SEQ ID NO 15168421 as cited in SEQ ID NO 60131
  misc_feature (1)..(1676): Ortholog of  Ceres SEQ ID NO 13597574 as cited in SEQ ID NO 64677
  misc_feature (1)..(1676): Ortholog of  Ceres SEQ ID NO 13597843 as cited in SEQ ID NO 64850
  misc_feature (1)..(1676): Ortholog of  Ceres SEQ ID NO 13597678 as cited in SEQ ID NO 65375
  misc_feature (1)..(1676): Ortholog of  Ceres SEQ ID NO 15176787 as cited in SEQ ID NO 66468
  misc_feature (1)..(1676): Ortholog of  Ceres SEQ ID NO 13596180 as cited in SEQ ID NO 67941
  misc_feature (1)..(1676): Ortholog of  Ceres SEQ ID NO 13591190 as cited in SEQ ID NO 68044
  misc_feature (1)..(1676): Ortholog of  Ceres SEQ ID NO 13595961 as cited in SEQ ID NO 68223
cagatcttatcccttccagttccaggcagcatccccagcctgacgaaggaattgaggacgctcgagctcgagctacgtcaggatccaacaccaccatggttacgggaacaagaggacgttcgtgctctacccgtcgctgggcgtgggccacctgatcccgatggtggagctggccaagcacctcttgcgccacggccacggcgcgctcatcgccgtggtcaacccgcccgacaccgacgccgtgtcggccgccgcggtggagcgcctcgcggcggccaacccggccatcgcgttccgcctcctgccggtcccggccagcccggacgccggcgcggactgggtgaagcgcgacctggacacgctccggctcgccaaccccgtgctccgggacttcctgctccggtcccagcccgcagccgacgccgacgcgctcatcctcgacatgttctgcgtcgacgcgctcgacgtcgcggcggagctcggcgtcccggcctacttcttcttcgcctccgcggcgggggacctcgccatgttcctcaacctgccgtacctctaccccaccctgccgtcgttcagggacatgggcgaggcgccggtgcgctgccccggcatgccgccggtccgggcgatggacatgccgctgacggtgcaggacagggacagcgaccggaccaaggtccggatgtaccagttccgccgcatcccggaggggaggggcgtgctggtcaacagcttcgcctggctggagcccagggcactgagagcgctcggcgacggcgtctgcgtgcccggccgcccgacgccgagggtcttctgcgtcgggccactggtcaacgacggcagcagcacggcggggggcggggggaggcacgagtgcctggcgtggctggacgcgcagcctaagcggagcgtcgtgttcctctgcttcggcagcaagggctccttccccgccgcgcagttacaggagatcgcccacgggctggagagctccggccaccggttcctgtgggccgtgaggagcccgccggaagaaccggacacggacctggggaagctgcttcccgaagggttcctggacaggaacagagacagaggcatggtggtgaaggactgggtgccacaggcagaggtggtgcggcacgaggcggtccgcgcgttcgtcacgcactgcggctggaactccacgctcgaggccatcatgtctggcctgcccatgatatgctggccgctgtacgcggagcaggggctcaacaaggtgttcatggtggaggagtggaggatcggggtggagctgcgcgggtacgaaaagttcgtcaaggcggaggagctggaagcgaaggtcagactggtgatggaggctgaggaagggaggatcctccgggagaggctcgcggtggcgagggagaaggcgttgggggctactaaggaaggcgggtcttctgaagtggcattcgcggagttctttggagatttggacaagagcagctctccgtcggtaaacggagaatgcgattgaattgatcactggtgtgctggtgtggcagatggactgcgaacgtatatatactttaggattcaatatcacttagtattttgacagtacgagactaaaatattgcatctgtggtatgggaataaaattggattcaagcagagcgccacttgcgttgcgtgct

SEQ ID NO: 3169 - protein, 451 aa, Zea mays subsp. mays
  peptide (1)..(451): Ceres Seq. ID no. 12357284
MVELAKHLLRHGHGALIAVVNPPDTDAVSAAAVERLAAANPAIAFRLLPVPASPDAGADWVKRDLDTLRLANPVLRDFLLRSQPAADADALILDMFCVDALDVAAELGVPAYFFFASAAGDLAMFLNLPYLYPTLPSFRDMGEAPVRCPGMPPVRAMDMPLTVQDRDSDRTKVRMYQFRRIPEGRGVLVNSFAWLEPRALRALGDGVCVPGRPTPRVFCVGPLVNDGSSTAGGGGRHECLAWLDAQPKRSVVFLCFGSKGSFPAAQLQEIAHGLESSGHRFLWAVRSPPEEPDTDLGKLLPEGFLDRNRDRGMVVKDWVPQAEVVRHEAVRAFVTHCGWNSTLEAIMSGLPMICWPLYAEQGLNKVFMVEEWRIGVELRGYEKFVKAEELEAKVRLVMEAEEGRILRERLAVAREKALGATKEGGSSEVAFAEFFGDLDKSSSPSVNGECD

SEQ ID NO: 3170 - protein, 357 aa, Zea mays subsp. mays
  peptide (1)..(357): Ceres Seq. ID no. 12357285
MFCVDALDVAAELGVPAYFFFASAAGDLAMFLNLPYLYPTLPSFRDMGEAPVRCPGMPPVRAMDMPLTVQDRDSDRTKVRMYQFRRIPEGRGVLVNSFAWLEPRALRALGDGVCVPGRPTPRVFCVGPLVNDGSSTAGGGGRHECLAWLDAQPKRSVVFLCFGSKGSFPAAQLQEIAHGLESSGHRFLWAVRSPPEEPDTDLGKLLPEGFLDRNRDRGMVVKDWVPQAEVVRHEAVRAFVTHCGWNSTLEAIMSGLPMICWPLYAEQGLNKVFMVEEWRIGVELRGYEKFVKAEELEAKVRLVMEAEEGRILRERLAVAREKALGATKEGGSSEVAFAEFFGDLDKSSSPSVNGECD

SEQ ID NO: 3171 - protein, 328 aa, Zea mays subsp. mays
  peptide (1)..(328): Ceres Seq. ID no. 12357286
MFLNLPYLYPTLPSFRDMGEAPVRCPGMPPVRAMDMPLTVQDRDSDRTKVRMYQFRRIPEGRGVLVNSFAWLEPRALRALGDGVCVPGRPTPRVFCVGPLVNDGSSTAGGGGRHECLAWLDAQPKRSVVFLCFGSKGSFPAAQLQEIAHGLESSGHRFLWAVRSPPEEPDTDLGKLLPEGFLDRNRDRGMVVKDWVPQAEVVRHEAVRAFVTHCGWNSTLEAIMSGLPMICWPLYAEQGLNKVFMVEEWRIGVELRGYEKFVKAEELEAKVRLVMEAEEGRILRERLAVAREKALGATKEGGSSEVAFAEFFGDLDKSSSPSVNGECD

SEQ ID NO: 3172 - DNA, 914 bp, Zea mays subsp. mays
  misc_feature (1)..(914): Ceres Seq. ID no. 12352193
  misc_feature (1)..(914): Ortholog of  Ceres SEQ ID NO 14301905 as cited in SEQ ID NO 66620
atcccggggcacgaaaccctaactgaacccatggcgctctccgccgctcgccggctctccaccaccgcgtcctcctcctccgtcgccgaagcgccgccaaagctctcttcgctgttccagaacccgaagcctcgaccgctgcctgtccgcggcgtcgaggagccgcggcggggggccaggcccaggccgaggcagccctgggaggaggaggcgggggcgctgctgctgcggctccacaaggggaggtacctcccgggccccgacctctcgtcggcgccgcacgctgtctcacccgacgccgtcaagaccgccgccgagtggttcgggcatgaccaccagcccgtcgccaaatggctgtcagggagtgatttgaagaagcttgccttgtttgggtgtcccactgttgagcgaagaacggtttttgcatcaaaaagattaagagccttcttcaacatccaggaagacaaaatatgcggttcctgtaaactgagaagttcgtgcaagtttgtgaaccaggaagtggccaggcataatagagtgattctatcagatacgatgagaattatctccttgtttgtactggacgcttgcccacaagagctcgagattaccgctgagttaaaagccagtgtctgcaagctgctaaaggacgccataaatctcagcagttaactgctgagcattacggagcagaagtttgctagttttcttgtccttgtagttctaatagcgtgctgtcagcatttatctggacttatggaggaaattgccgaggcccatgtttgacgttgcgctcgcaatcgctccctgtgaaggttggagtggtgaaccccagcgacttccttctgatccgtgttttcttttgtgcaactaatatgaagatgaagtacagagtatgtaaaaacttaagatgc

SEQ ID NO: 3173 - protein, 223 aa, Zea mays subsp. mays
  peptide (1)..(223): Ceres Seq. ID no. 12352194
IPGHETLTEPMALSAARRLSTTASSSSVAEAPPKLSSLFQNPKPRPLPVRGVEEPRRGARPRPRQPWEEEAGALLLRLHKGRYLPGPDLSSAPHAVSPDAVKTAAEWFGHDHQPVAKWLSGSDLKKLALFGCPTVERRTVFASKRLRAFFNIQEDKICGSCKLRSSCKFVNQEVARHNRVILSDTMRIISLFVLDACPQELEITAELKASVCKLLKDAINLSS

SEQ ID NO: 3174 - protein, 213 aa, Zea mays subsp. mays
  peptide (1)..(213): Ceres Seq. ID no. 12352195
MALSAARRLSTTASSSSVAEAPPKLSSLFQNPKPRPLPVRGVEEPRRGARPRPRQPWEEEAGALLLRLHKGRYLPGPDLSSAPHAVSPDAVKTAAEWFGHDHQPVAKWLSGSDLKKLALFGCPTVERRTVFASKRLRAFFNIQEDKICGSCKLRSSCKFVNQEVARHNRVILSDTMRIISLFVLDACPQELEITAELKASVCKLLKDAINLSS

SEQ ID NO: 3175 - DNA, 1474 bp, Zea mays subsp. mays
  misc_feature (1)..(1474): Ceres Seq. ID no. 12410376
  misc_feature (1)..(1474): Ortholog of  Ceres SEQ ID NO 14306667 as cited in SEQ ID NO 52925
  misc_feature (1)..(1474): Ortholog of  Ceres SEQ ID NO 15177522 as cited in SEQ ID NO 0
agtcgaacacagagtcacttcgccacgaacaaaagcgcatcgatctcgctgtcgtcactcctcgtcacccagccacgaacagaggcaccacccagcatggccctgcaggcggcgctcctcccatccaccctctcatccgtccccaagaagtgcagcatcgccgtcgcggcgaaggacacggcattccttagcgtatcccagaagaaggtgcaggcggcgtcgctgtcggtgagaacgcgggtggcgacgacggcgcctgtggccacgccggggtccagcacggcggccaaggatgggaagaagaccgtgcggcagggcgtggtggtgatcacgggcgcgtcgtcggggttgggcctggcggcggccaaggcgctggcggagaccggcaagtggcacgtggtgatggcctgccgcgacttcctcaaggcggccaaggcggccaagggcgccggcatggcggacggcagctacaccatcatgcacctggacctggcctccctcgacagcgtgcggcagttcgtggacagcttccggcgcgccggcatgccgctcgactcgctcgtctgcaacgccgccatctaccggcccacggcaaggacgccgacgttcacggcggacggatacgagatgagcgtcggcgtcaaccacctgggccacttcctcctggcgcgcctgctcctggacgacatgcagaagtccgactacccgtcccgccgcctcatcatcctcggctccatcaccggcaacaccaacacgctggccgggaacatcccgcccaaggccgggctgggcgacctccgcggcctcgcggcggggctgcgcggccagaacggctctgccatgatcgacggctccgagagcttcgacggcgccaaggcgtacaaggacagcaagatctgcaacatgctcaccatgcaggagctgcaccggcggtaccacgaggagacgggcatcacgttcgcgtcgctctacccggggtgcatcgccaccacgggggctgttccgcgagcacatcccgctgttccgcctgctcttcccgcctttccagaagttcgtcaccaagggcttcgtgtcggaggcggagtccggcaagaggctggcgcatgtggtcagcgaccccagcctcaccaagtcgggggtgtactggagctggaacaaggactcggcgtcgttcgagaaccagctgtcgcaggaggccagcgatccggagaaggccaagaagctctgggagatcagcgagaagctcgtggggcttgcctgagctcgccggcacggcgacggcgacatgatgactctgtcgagcagaggagctttcgcttcgttgtattatgtgtaccattagcatccattttgtttgtttctagaagttggtaatgaccgtcggagaagagcctgtaattgttcgatcatgtattattgcttacaaaatttttttcaaaaaccgatgaaataaaacaacaggcttaacatctct

SEQ ID NO: 3176 - protein, 457 aa, Zea mays subsp. mays
  peptide (1)..(457): Ceres Seq. ID no. 12410377
SRTQSHFATNKSASISLSSLLVTQPRTEAPPSMALQAALLPSTLSSVPKKCSIAVAAKDTAFLSVSQKKVQAASLSVRTRVATTAPVATPGSSTAAKDGKKTVRQGVVVITGASSGLGLAAAKALAETGKWHVVMACRDFLKAAKAAKGAGMADGSYTIMHLDLASLDSVRQFVDSFRRAGMPLDSLVCNAAIYRPTARTPTFTADGYEMSVGVNHLGHFLLARLLLDDMQKSDYPSRRLIILGSITGNTNTLAGNIPPKAGLGDLRGLAAGLRGQNGSAMIDGSESFDGAKAYKDSKICNMLTMQELHRRYHEETGITFASLYPGCIATTGAVPRAHPAVPPALPAFPEVRHQGLRVGGGVRQEAGACGQRPQPHQVGGVLELEQGLGVVREPAVAGGQRSGEGQEALGDQREARGACLSSPARRRRHDDSVEQRSFRFVVLCVPLASILFVSRSW

SEQ ID NO: 3177 - protein, 425 aa, Zea mays subsp. mays
  peptide (1)..(425): Ceres Seq. ID no. 12410378
MALQAALLPSTLSSVPKKCSIAVAAKDTAFLSVSQKKVQAASLSVRTRVATTAPVATPGSSTAAKDGKKTVRQGVVVITGASSGLGLAAAKALAETGKWHVVMACRDFLKAAKAAKGAGMADGSYTIMHLDLASLDSVRQFVDSFRRAGMPLDSLVCNAAIYRPTARTPTFTADGYEMSVGVNHLGHFLLARLLLDDMQKSDYPSRRLIILGSITGNTNTLAGNIPPKAGLGDLRGLAAGLRGQNGSAMIDGSESFDGAKAYKDSKICNMLTMQELHRRYHEETGITFASLYPGCIATTGAVPRAHPAVPPALPAFPEVRHQGLRVGGGVRQEAGACGQRPQPHQVGGVLELEQGLGVVREPAVAGGQRSGEGQEALGDQREARGACLSSPARRRRHDDSVEQRSFRFVVLCVPLASILFVSRSW

SEQ ID NO: 3178 - protein, 323 aa, Zea mays subsp. mays
  peptide (1)..(323): Ceres Seq. ID no. 12410379
MACRDFLKAAKAAKGAGMADGSYTIMHLDLASLDSVRQFVDSFRRAGMPLDSLVCNAAIYRPTARTPTFTADGYEMSVGVNHLGHFLLARLLLDDMQKSDYPSRRLIILGSITGNTNTLAGNIPPKAGLGDLRGLAAGLRGQNGSAMIDGSESFDGAKAYKDSKICNMLTMQELHRRYHEETGITFASLYPGCIATTGAVPRAHPAVPPALPAFPEVRHQGLRVGGGVRQEAGACGQRPQPHQVGGVLELEQGLGVVREPAVAGGQRSGEGQEALGDQREARGACLSSPARRRRHDDSVEQRSFRFVVLCVPLASILFVSRSW

SEQ ID NO: 3179 - DNA, 669 bp, Zea mays subsp. mays
  misc_feature (1)..(669): Ceres Seq. ID no. 12367126
  misc_feature (1)..(669): Ortholog of  Ceres SEQ ID NO 13595226 as cited in SEQ ID NO 56331
  misc_feature (1)..(669): Ortholog of  Ceres SEQ ID NO 13661903 as cited in SEQ ID NO 61722
  misc_feature (1)..(669): Ortholog of  Ceres SEQ ID NO 15173940 as cited in SEQ ID NO 61934
agtacttactcactctccccccacccgcgccaggccagacagactaactgagcacccgctgcaaggagtccgcgcccatggcgagcaccaacatggcgtcggccacctcgcggttcatgctggccgcgggcgtgcccaccggcagcagcggcggccgcgtcaacttcgcctcggcgcccaaccggcttggcaggaggctcgtggcccgggccgacaacgaggccgccgcagctgaggcggcggaaggggagggtgccgtggccaccaagcccaaggccgagaagccgccgccgatcgggcccaataggggcgccaaggtgaagatccttaggagggagtcctactggtacaacgggatcggcaacgtcgtcaccgtcgatcaggatcccaacacccgctacccggtggttgtgcggttcaacaaggtgaactacgccggcgtgtccaccaacaactacgccttggacgaggtcttagaggtgaaatgagtggggccggccggctcaagggctccgcgctagctaccgtgtgattgatttgtagtagttgtgaaatgaggctgtgaagctgcatgctgtgctggctagcgtcacaacatcgatcctatgtgtaatagcataatccacataatcatatcatgtaattgcttgctttattcaccgtgtactc

SEQ ID NO: 3180 - protein, 136 aa, Zea mays subsp. mays
  peptide (1)..(136): Ceres Seq. ID no. 12367127
MASTNMASATSRFMLAAGVPTGSSGGRVNFASAPNRLGRRLVARADNEAAAAEAAEGEGAVATKPKAEKPPPIGPNRGAKVKILRRESYWYNGIGNVVTVDQDPNTRYPVVVRFNKVNYAGVSTNNYALDEVLEVK

SEQ ID NO: 3181 - protein, 131 aa, Zea mays subsp. mays
  peptide (1)..(131): Ceres Seq. ID no. 12367128
MASATSRFMLAAGVPTGSSGGRVNFASAPNRLGRRLVARADNEAAAAEAAEGEGAVATKPKAEKPPPIGPNRGAKVKILRRESYWYNGIGNVVTVDQDPNTRYPVVVRFNKVNYAGVSTNNYALDEVLEVK

SEQ ID NO: 3182 - protein, 123 aa, Zea mays subsp. mays
  peptide (1)..(123): Ceres Seq. ID no. 12367129
MLAAGVPTGSSGGRVNFASAPNRLGRRLVARADNEAAAAEAAEGEGAVATKPKAEKPPPIGPNRGAKVKILRRESYWYNGIGNVVTVDQDPNTRYPVVVRFNKVNYAGVSTNNYALDEVLEVK

SEQ ID NO: 3183 - DNA, 1377 bp, Zea mays subsp. mays
  misc_feature (1)..(1377): Ceres Seq. ID no. 12345470
  misc_feature (1)..(1377): Ortholog of  Ceres SEQ ID NO 15171430 as cited in SEQ ID NO 51500
  misc_feature (1)..(1377): Ortholog of  Ceres SEQ ID NO 15172476 as cited in SEQ ID NO 54945
  misc_feature (1)..(1377): Ortholog of  Ceres SEQ ID NO 15176106 as cited in SEQ ID NO 60324
  misc_feature (1)..(1377): Ortholog of  Ceres SEQ ID NO 13654989 as cited in SEQ ID NO 63117
  misc_feature (1)..(1377): Ortholog of  Ceres SEQ ID NO 13584744 as cited in SEQ ID NO 69137
aaaacaaagcttttgttgtctctcacctactattcttcttgcctcctccctccaccagcatccctgagtctgccatgggcaactgctggggaaccaagattagctctgacaccgccgcctccccttccacatcaccgttccctcgcagcgagggtgagattctccggtgtgccaatgtcaggagcttcaccttgacggagctgatgacctccacccggaacttccggcccgacagcgtcctcggcgagggaggcttcggctccgtcttcaaggggtggatcgacgagaccaccttcgccccggccaggcccggcacagggatggtcatcgctgtcaagaagctcaaccagcagggattgcaggggcacagggagtggctggctgaagtcaactacctgggccagttgtctcaccccagtctcgtaaggctcgtagggtactgcctccaagacgagcagcgccttctcgtctacgagttcatgccgcgaggaagcttggagaaccatcttttcaggacctcacgtttccagccgctctcctggaacctacgaatcaaagtttgccctgggagcagccaagggccttgcgttcttgcacagcgacaaggccagagttatctaccgagatttcaagacatccaacgtgctcctggattcgacttttgtgtgtgttttcagaactacaacgccaagctgtctgacttcggtttggcaaaggacgggccaaccggcgaccagagccacgtgtccaccagagtcatgggcacctacggatatgctgctccggaatatctcgcaacaggtcatctcacgccgaagagcgacgtctacagcttcggcgtcgtgctgctggagatgctgtcgggccgccgcgccatggacaagaaccgcccggccaccgagcacaacctcgtcgactgggcgcgcccctacctcagcagcaagcgccgcgtctcccgcatcctggacgaccgcctggccggccactacccgctgccggccgtccaaagggcggcagcgctggcgctgcagtgcctctccgaggactccaggaagaggccaaccatggaccaggtcgtcgcgtcgctgcagcaactcacagccgcccaggaccacgacgatgcccaccggtcgtcgcgcaggtacccaaaagatcaccgtcaggctgcggcgctcaacaaccggaatctgaacgctcatcgccgcctgtccgccttgcctctacccgagtgaactaccatattcatattcgatcatcttttgtatcttcacaaaagtagtatgtaaatccgtggtgaagacctgggtaattagtgataaaacacaacttgattgttgattagatgtaaatggtggcttcaacttaaccggtttatgg

SEQ ID NO: 3184 - protein, 409 aa, Zea mays subsp. mays
  peptide (1)..(409): Ceres Seq. ID no. 12345471
NKAFVVSHLLFFLPPPSTSIPESAMGNCWGTKISSDTAASPSTSPFPRSEGEILRCANVRSFTLTELMTSTRNFRPDSVLGEGGFGSVFKGWIDETTFAPARPGTGMVIAVKKLNQQGLQGHREWLAEVNYLGQLSHPSLVRLVGYCLQDEQRLLVYEFMPRGSLENHLFRTSRFQPLSWNLRIKVCPGSSQGPCVLAQRQGQSYLPRFQDIQRAPGFDFCVCFQNYNAKLSDFGLAKDGPTGDQSHVSTRVMGTYGYAAPEYLATGHLTPKSDVYSFGVVLLEMLSGRRAMDKNRPATEHNLVDWARPYLSSKRRVSRILDDRLAGHYPLPAVQRAAALALQCLSEDSRKRPTMDQVVASLQQLTAAQDHDDAHRSSRRYPKDHRQAAALNNRNLNAHRRLSALPLPE

SEQ ID NO: 3185 - protein, 385 aa, Zea mays subsp. mays
  peptide (1)..(385): Ceres Seq. ID no. 12345472
MGNCWGTKISSDTAASPSTSPFPRSEGEILRCANVRSFTLTELMTSTRNFRPDSVLGEGGFGSVFKGWIDETTFAPARPGTGMVIAVKKLNQQGLQGHREWLAEVNYLGQLSHPSLVRLVGYCLQDEQRLLVYEFMPRGSLENHLFRTSRFQPLSWNLRIKVCPGSSQGPCVLAQRQGQSYLPRFQDIQRAPGFDFCVCFQNYNAKLSDFGLAKDGPTGDQSHVSTRVMGTYGYAAPEYLATGHLTPKSDVYSFGVVLLEMLSGRRAMDKNRPATEHNLVDWARPYLSSKRRVSRILDDRLAGHYPLPAVQRAAALALQCLSEDSRKRPTMDQVVASLQQLTAAQDHDDAHRSSRRYPKDHRQAAALNNRNLNAHRRLSALPLPE

SEQ ID NO: 3186 - protein, 342 aa, Zea mays subsp. mays
  peptide (1)..(342): Ceres Seq. ID no. 12345473
MTSTRNFRPDSVLGEGGFGSVFKGWIDETTFAPARPGTGMVIAVKKLNQQGLQGHREWLAEVNYLGQLSHPSLVRLVGYCLQDEQRLLVYEFMPRGSLENHLFRTSRFQPLSWNLRIKVCPGSSQGPCVLAQRQGQSYLPRFQDIQRAPGFDFCVCFQNYNAKLSDFGLAKDGPTGDQSHVSTRVMGTYGYAAPEYLATGHLTPKSDVYSFGVVLLEMLSGRRAMDKNRPATEHNLVDWARPYLSSKRRVSRILDDRLAGHYPLPAVQRAAALALQCLSEDSRKRPTMDQVVASLQQLTAAQDHDDAHRSSRRYPKDHRQAAALNNRNLNAHRRLSALPLPE

SEQ ID NO: 3187 - DNA, 1221 bp, Zea mays subsp. mays
  misc_feature (1)..(1221): Ceres Seq. ID no. 12367375
  misc_feature (1)..(1221): Ortholog of  Ceres SEQ ID NO 13597604 as cited in SEQ ID NO 65175
cgcctgggccggctgcatctttctcctcccaccatcacctcctcctctttatccatctgccagggcgcacgaggagaacggcggcgtctgagatcgcgaggccgaggcttgtcccgtcctcgctcggctccgctcctctcacccacggtttctggaggacaattctttgctatctagccttcctcaaaagtaaaaagggtaaatgggatcagaaggaccttcagttgtgactgtccatgttactggatttaagaagttccatggggttgctgagaacccaactgagaaaattgtgaccaatcttaaatctttcttggaaaagcgagggttgccaaaaaatcttgtcctcggaagctgcacagttctcgaaacagcaggggaaggggcacttgccacattatataaggttttagagtctgctgttgcagacagaggaactgggtcctcggcacagggacaagtaatttggatccactttggggtcaacagtggcgcaataaggtttgcccttgagaaccaagctgttaatgaggctaccttccggtgtccagatgagctaggatggaaaccacagagggtccctattgtgccctctgatggaagcatctcacggacgagagagactaccctgccagtcaatgaattaaccaagtcactccggaagataggctacgacgtggtgccctccggcgacgccggtcggtttgtatgcaactacgtgtactaccactctcttcggttcgcggagcaacacggcatcaaatccctgttcgtgcatgttcccctcttcttgacgatcgacgaggaggtccagatgcacttcgtcgcttccctccttgaagtcatcgctttctcctccaactaggaacagcagttggaagatcagcgtctgaattcctatctcaaggatggatgtaaagctggaatgctgcatgtaggctgaataaggtggtgtggtcattggcgatagatgttaatcttgctccagagggtgtgtttgggaatcgggagagaaaaaaagagaggtcattggcgatagatgttgatcttgctccagagggtgtgtttgggaattgggagggggaaaaaagaggaaattgctgcatagagtcagacggtgtatcagcttgtacgccatcaatcaagtgctgtaaacatgcctgggaaataattggggacctggatttgaataagatttgagttgttgggggcggacgcgct

SEQ ID NO: 3188 - protein, 220 aa, Zea mays subsp. mays
  peptide (1)..(220): Ceres Seq. ID no. 12367376
MGSEGPSVVTVHVTGFKKFHGVAENPTEKIVTNLKSFLEKRGLPKNLVLGSCTVLETAGEGALATLYKVLESAVADRGTGSSAQGQVIWIHFGVNSGAIRFALENQAVNEATFRCPDELGWKPQRVPIVPSDGSISRTRETTLPVNELTKSLRKIGYDVVPSGDAGRFVCNYVYYHSLRFAEQHGIKSLFVHVPLFLTIDEEVQMHFVASLLEVIAFSSN

SEQ ID NO: 3189 - DNA, 1711 bp, Zea mays subsp. mays
  misc_feature (1)..(1711): Ceres Seq. ID no. 12342793
  misc_feature (1)..(1711): Ortholog of  Ceres SEQ ID NO 14315257 as cited in SEQ ID NO 52552
  misc_feature (1)..(1711): Ortholog of  Ceres SEQ ID NO 14314636 as cited in SEQ ID NO 56924
  misc_feature (1)..(1711): Ortholog of  Ceres SEQ ID NO 14314755 as cited in SEQ ID NO 59919
  misc_feature (1)..(1711): Ortholog of  Ceres SEQ ID NO 15171614 as cited in SEQ ID NO 60106
  misc_feature (1)..(1711): Ortholog of  Ceres SEQ ID NO 15168421 as cited in SEQ ID NO 60131
  misc_feature (1)..(1711): Ortholog of  Ceres SEQ ID NO 13597574 as cited in SEQ ID NO 64677
  misc_feature (1)..(1711): Ortholog of  Ceres SEQ ID NO 13597843 as cited in SEQ ID NO 64850
  misc_feature (1)..(1711): Ortholog of  Ceres SEQ ID NO 13597678 as cited in SEQ ID NO 65375
  misc_feature (1)..(1711): Ortholog of  Ceres SEQ ID NO 15176787 as cited in SEQ ID NO 66468
  misc_feature (1)..(1711): Ortholog of  Ceres SEQ ID NO 13596180 as cited in SEQ ID NO 67941
  misc_feature (1)..(1711): Ortholog of  Ceres SEQ ID NO 13591190 as cited in SEQ ID NO 68044
  misc_feature (1)..(1711): Ortholog of  Ceres SEQ ID NO 13595961 as cited in SEQ ID NO 68223
  misc_feature (1)..(1711): Ortholog of  Ceres SEQ ID NO 14313563 as cited in SEQ ID NO 68700
agaaacgtactgactgtccaccactccgctaaccaaagtccaaagccaacgcaagcaatccttcggacttcggtgggggaaatggaggccgccgcagccgccgagacggggctcgcccagaaaccggttgtgctgtacccttcgccggggatgggccacctggtctccatgatcgagcttggcaagatcctcggcgcgcggggactgtccgtaataattgtcgtcgtcgagcctcccttcaacacgggcgctacggcgcctttcctcgccggcgtctccgcggccaacccgtccatctccttccaccgcctgcccaaagtcgagcgcctcccgcccgtcaagacgaagcaccaggaggcgctcaccttcgaggtcacccgcgtctccaatccgcacctccgcgagttcctggccgccgcgtccccagccgtgctcgtcgtcgacttcttctgcagcatcgccctggacgtggcggaggagctccgcgtgcccgcctacttcttcttcacctcgggcgccgaggtcctggccttcttcctgcacctcccggcgatccacgagcggaccgccgcgagcttccaggacatggggaaggagctcgtgcacgtgccgggcatcccgtcattcccggcgacgcactccatcctgcccaccatggagcgcgacgacgtggcctacgacggcttcctaaagggctgcaccgacctctgccgctcccagggcatcatggtcaacacgttccgctcgctggagcagcgcgccgtcgagaccgtggccgcgggccactgcacgccccccggcctcccgaccccgcccatctactgcatcgggccgctcatcaagtccgaggaggtgctgggcaagggcggcgaggagtgcctggcgtggctggacgcgcagcccagggccagcgtggtgttcctctgcttcggcagcatcggccggttcagcgtggagcagatcagggaggtggcggccggcctggaagccagcgggcagcggttcttgtgggtggtccgagccccgcccagcgacgacccggccaagaagttcgagaggccgccggagccggacctggatgcgctcctcccggaggggttcctagcccggaccaaggataggggtctcgtggtcaggtcgtgggcgccgcagcgggacgtgctggcgcacgcgtccgtgggcggcttcgtgacgcactgcggctggaactcggtcctggaggcggtgatggcgggcgtgccgatggtggcgtggccgctctacgcggagcagcggctcaaccgggtgtttctggagaaggagatgcagctggccgtggccgtggaagggtacgacagcgacgagggcctcgtggcggccgaggaggttgctgccaaggtgcgatggctcatggagtccgatggcgggaggatgctccggaagcgcacgctggcggccatgcggcaggccaaggacgcgctgcgtgagggcggtgagtcggaggccacactgaccggattggtggacgagtggaaacgcatttgacgcggtatgtggggattgggaacgtgtgacgttacgcgacggatgaagtgccggtcatcatttttttaaataaaatatatattagtaatatattcatgtatttttcaataaaagatacaatttattgcattatactcgtgcgtgcggcgtgccaacaataataagatatctactctttattagattg

SEQ ID NO: 3190 - protein, 507 aa, Zea mays subsp. mays
  peptide (1)..(507): Ceres Seq. ID no. 12342794
RNVLTVHHSANQSPKPTQAILRTSVGEMEAAAAAETGLAQKPVVLYPSPGMGHLVSMIELGKILGARGLSVIIVVVEPPFNTGATAPFLAGVSAANPSISFHRLPKVERLPPVKTKHQEALTFEVTRVSNPHLREFLAAASPAVLVVDFFCSIALDVAEELRVPAYFFFTSGAEVLAFFLHLPAIHERTAASFQDMGKELVHVPGIPSFPATHSILPTMERDDVAYDGFLKGCTDLCRSQGIMVNTFRSLEQRAVETVAAGHCTPPGLPTPPIYCIGPLIKSEEVLGKGGEECLAWLDAQPRASVVFLCFGSIGRFSVEQIREVAAGLEASGQRFLWVVRAPPSDDPAKKFERPPEPDLDALLPEGFLARTKDRGLVVRSWAPQRDVLAHASVGGFVTHCGWNSVLEAVMAGVPMVAWPLYAEQRLNRVFLEKEMQLAVAVEGYDSDEGLVAAEEVAAKVRWLMESDGGRMLRKRTLAAMRQAKDALREGGESEATLTGLVDEWKRI

SEQ ID NO: 3191 - protein, 480 aa, Zea mays subsp. mays
  peptide (1)..(480): Ceres Seq. ID no. 12342795
MEAAAAAETGLAQKPVVLYPSPGMGHLVSMIELGKILGARGLSVIIVVVEPPFNTGATAPFLAGVSAANPSISFHRLPKVERLPPVKTKHQEALTFEVTRVSNPHLREFLAAASPAVLVVDFFCSIALDVAEELRVPAYFFFTSGAEVLAFFLHLPAIHERTAASFQDMGKELVHVPGIPSFPATHSILPTMERDDVAYDGFLKGCTDLCRSQGIMVNTFRSLEQRAVETVAAGHCTPPGLPTPPIYCIGPLIKSEEVLGKGGEECLAWLDAQPRASVVFLCFGSIGRFSVEQIREVAAGLEASGQRFLWVVRAPPSDDPAKKFERPPEPDLDALLPEGFLARTKDRGLVVRSWAPQRDVLAHASVGGFVTHCGWNSVLEAVMAGVPMVAWPLYAEQRLNRVFLEKEMQLAVAVEGYDSDEGLVAAEEVAAKVRWLMESDGGRMLRKRTLAAMRQAKDALREGGESEATLTGLVDEWKRI

SEQ ID NO: 3192 - protein, 457 aa, Zea mays subsp. mays
  peptide (1)..(457): Ceres Seq. ID no. 12342796
MGHLVSMIELGKILGARGLSVIIVVVEPPFNTGATAPFLAGVSAANPSISFHRLPKVERLPPVKTKHQEALTFEVTRVSNPHLREFLAAASPAVLVVDFFCSIALDVAEELRVPAYFFFTSGAEVLAFFLHLPAIHERTAASFQDMGKELVHVPGIPSFPATHSILPTMERDDVAYDGFLKGCTDLCRSQGIMVNTFRSLEQRAVETVAAGHCTPPGLPTPPIYCIGPLIKSEEVLGKGGEECLAWLDAQPRASVVFLCFGSIGRFSVEQIREVAAGLEASGQRFLWVVRAPPSDDPAKKFERPPEPDLDALLPEGFLARTKDRGLVVRSWAPQRDVLAHASVGGFVTHCGWNSVLEAVMAGVPMVAWPLYAEQRLNRVFLEKEMQLAVAVEGYDSDEGLVAAEEVAAKVRWLMESDGGRMLRKRTLAAMRQAKDALREGGESEATLTGLVDEWKRI

SEQ ID NO: 3193 - DNA, 2047 bp, Zea mays subsp. mays
  misc_feature (1)..(2047): Ceres Seq. ID no. 12356085
  misc_feature (1)..(2047): Ortholog of  Ceres SEQ ID NO 14309934 as cited in SEQ ID NO 20583
  misc_feature (1)..(2047): Ortholog of  Ceres SEQ ID NO 14304944 as cited in SEQ ID NO 53041
  misc_feature (1)..(2047): Ortholog of  Ceres SEQ ID NO 15170354 as cited in SEQ ID NO 54190
  misc_feature (1)..(2047): Ortholog of  Ceres SEQ ID NO 14307164 as cited in SEQ ID NO 54775
  misc_feature (1)..(2047): Ortholog of  Ceres SEQ ID NO 14307253 as cited in SEQ ID NO 54783
  misc_feature (1)..(2047): Ortholog of  Ceres SEQ ID NO 12583314 as cited in SEQ ID NO 56435
  misc_feature (1)..(2047): Ortholog of  Ceres SEQ ID NO 15171508 as cited in SEQ ID NO 58526
  misc_feature (1)..(2047): Ortholog of  Ceres SEQ ID NO 14312300 as cited in SEQ ID NO 58632
  misc_feature (1)..(2047): Ortholog of  Ceres SEQ ID NO 15225226 as cited in SEQ ID NO 58693
  misc_feature (1)..(2047): Ortholog of  Ceres SEQ ID NO 15226720 as cited in SEQ ID NO 58707
  misc_feature (1)..(2047): Ortholog of  Ceres SEQ ID NO 15168378 as cited in SEQ ID NO 59129
  misc_feature (1)..(2047): Ortholog of  Ceres SEQ ID NO 13654989 as cited in SEQ ID NO 63117
  misc_feature (1)..(2047): Ortholog of  Ceres SEQ ID NO 13655640 as cited in SEQ ID NO 63844
  misc_feature (1)..(2047): Ortholog of  Ceres SEQ ID NO 13656662 as cited in SEQ ID NO 65594
  misc_feature (1)..(2047): Ortholog of  Ceres SEQ ID NO 13584744 as cited in SEQ ID NO 69137
acaaacttccctgaattcctgttcgctaccttcgcttccgctccaaaaaccaaataaaaaacgcacctttccttcccttctcctccccttcgctttcccccgtcctcccttccctcgatcccctcgccggaaaagatcccattccatccacctccacgtcccggcgcaatcagagtttccggcggcaaagcaggaaggcggaagcgaaaggaatgttgcacctttaagtagcgcggcgacctggtgtttcttcctggccggcgatgggctgcttcccgtgcttcgactccccggcagatgagcagcttaaccccaaattcggtggcgccggtgggtacggcggcacgtcctctgccgtcgcggcgtacggaaacggcacaggcgccggcgtcagcatcggccggcacggggacagggggtacccggacctgcagcaggcgcccatggcggctccgcgcgtcgagaagctctcagcagcggctgagaaagcaagagtaaagagcaatgggctcaccaaagaggctttggtgccaaaggatgccaatggcaatgccatctcagcgcaaactttcaccttccgtgagcttgctaccgccaccaggaacttcaggcccgagtgcttcctgggagagggaggttttggacgtgtttacaagggccgccttgagagcacaggccaggttgttgctataaagcagcttaacagggatgggcttcaaggaaacagagaatttctagtagaagttctcatgctcagcttactacatcatcaaaacctggttaatttgattggttattgtgctgatggagaccagagacttcttgtttatgaatatatgccttctggatcacttgaagatcatttgcacgatctacctcttgataaagaggccttggactggaacaccaggatgaaaattgcagcaggtgctgccaaaggactggagtaccttcatgacaaagctaatccaccagttatttatagggatttcaagtcatcgaacattctgttggatgaaagtttccacccgaagctgtctgattttggacttgctaagttgggtccagttggcgacaaatcacatgtctcaacacgtgtaatgggtacatatggttattgtgcaccagaatatgctatgacagggcagctgacagtgaagtctgacgtgtatagttttggggttgtcttgctagagttgattactggccgtagggctattgacagcaccagaccacatggagaacaaaatcttgtctcatgggcacgtcctctgtttaacgacagaagaaagctccctaagatggctgacccgaggctggaagggcgataccccatgcgtgggctttaccaagcccttgcagtggcttcgatgtgcattcagtcggaggctgcttcacgcccactgattgcagatgtcgtgactgctctgtcctacttggcatcccagccatatgatcccaacgcagctcttgcttcaaggaagccaggcggcgatcagcgaagcaagcctggcgagaacggcagggcagtttccaggaatgatgaaactggaagctccggccacaaaacacctgccaaggaccgagaggactcacctagggacctcccagcgatcctgaacaaggaccttgaccgggagcgcatggtggccgaggcgaagatgtggggcgaccgggagcgcatggtggccgaggctaagatgtggggcgaccgagagcgcatggtggctgaggcgaagatgtggggtgaaaattggcgtgacaagcggcgtgcagagattgggcaggggagcctggattcggttactgggaacagctagggggcaattaagcgaacagaaacgtgacatccacccatgcatttcgtttgtttatttccaggtccattttcgttctggcggcggtcggcaggccccagggttgtacatttctaggtcagggaagagtgggaaagcggcagcgttgtactggacagtgaatgcatgtggttgtacatgtaaattctcagaaaagttttgtgagaatgaaaggacatatttgagttccg

SEQ ID NO: 3194 - protein, 518 aa, Zea mays subsp. mays
  peptide (1)..(518): Ceres Seq. ID no. 12356086
MGCFPCFDSPADEQLNPKFGGAGGYGGTSSAVAAYGNGTGAGVSIGRHGDRGYPDLQQAPMAAPRVEKLSAAAEKARVKSNGLTKEALVPKDANGNAISAQTFTFRELATATRNFRPECFLGEGGFGRVYKGRLESTGQVVAIKQLNRDGLQGNREFLVEVLMLSLLHHQNLVNLIGYCADGDQRLLVYEYMPSGSLEDHLHDLPLDKEALDWNTRMKIAAGAAKGLEYLHDKANPPVIYRDFKSSNILLDESFHPKLSDFGLAKLGPVGDKSHVSTRVMGTYGYCAPEYAMTGQLTVKSDVYSFGVVLLELITGRRAIDSTRPHGEQNLVSWARPLFNDRRKLPKMADPRLEGRYPMRGLYQALAVASMCIQSEAASRPLIADVVTALSYLASQPYDPNAALASRKPGGDQRSKPGENGRAVSRNDETGSSGHKTPAKDREDSPRDLPAILNKDLDRERMVAEAKMWGDRERMVAEAKMWGDRERMVAEAKMWGENWRDKRRAEIGQGSLDSVTGNS

SEQ ID NO: 3195 - protein, 458 aa, Zea mays subsp. mays
  peptide (1)..(458): Ceres Seq. ID no. 12356087
MAAPRVEKLSAAAEKARVKSNGLTKEALVPKDANGNAISAQTFTFRELATATRNFRPECFLGEGGFGRVYKGRLESTGQVVAIKQLNRDGLQGNREFLVEVLMLSLLHHQNLVNLIGYCADGDQRLLVYEYMPSGSLEDHLHDLPLDKEALDWNTRMKIAAGAAKGLEYLHDKANPPVIYRDFKSSNILLDESFHPKLSDFGLAKLGPVGDKSHVSTRVMGTYGYCAPEYAMTGQLTVKSDVYSFGVVLLELITGRRAIDSTRPHGEQNLVSWARPLFNDRRKLPKMADPRLEGRYPMRGLYQALAVASMCIQSEAASRPLIADVVTALSYLASQPYDPNAALASRKPGGDQRSKPGENGRAVSRNDETGSSGHKTPAKDREDSPRDLPAILNKDLDRERMVAEAKMWGDRERMVAEAKMWGDRERMVAEAKMWGENWRDKRRAEIGQGSLDSVTGNS

SEQ ID NO: 3196 - protein, 356 aa, Zea mays subsp. mays
  peptide (1)..(356): Ceres Seq. ID no. 12356088
MLSLLHHQNLVNLIGYCADGDQRLLVYEYMPSGSLEDHLHDLPLDKEALDWNTRMKIAAGAAKGLEYLHDKANPPVIYRDFKSSNILLDESFHPKLSDFGLAKLGPVGDKSHVSTRVMGTYGYCAPEYAMTGQLTVKSDVYSFGVVLLELITGRRAIDSTRPHGEQNLVSWARPLFNDRRKLPKMADPRLEGRYPMRGLYQALAVASMCIQSEAASRPLIADVVTALSYLASQPYDPNAALASRKPGGDQRSKPGENGRAVSRNDETGSSGHKTPAKDREDSPRDLPAILNKDLDRERMVAEAKMWGDRERMVAEAKMWGDRERMVAEAKMWGENWRDKRRAEIGQGSLDSVTGNS

SEQ ID NO: 3197 - DNA, 1313 bp, Zea mays subsp. mays
  misc_feature (1)..(1313): Ceres Seq. ID no. 13564341
  misc_feature (1)..(1313): Ortholog of  Ceres SEQ ID NO 13598443 as cited in SEQ ID NO 69024
atcgcccgctgctcctctatccctttactgctgctgctactaccttaagctatcactatcatggccttgatgctgctagcgcgcaacctgcgctcccgccgccgcccaccgctcgccgccgccgcggcgttctcgtcggccgcggcggaggcggagagggcgatacgggacgggccgcggaacgactggagccggcccgagatccaggccgtctacgactcaccgctcctcgacctcctctttcacggggctcaggtccacagaaatgtccataaattcagagaagtgcagcaatgcacacttctttcaatcaagactggtggatgcagtgaagattgttcttactgtcctcagtcatcaagatacaacactggattgaaggcccaaaaattgatgaacaaagatgctgtcttggaagcagcaaaaaaggcaaaagagtctgggagcacccgtttttgcatgggagctgcatggagagaaaccattggcaggaaatcaaacttcaaccagattcttgaatatgtcaaggaaataaggggtatggacatggaggtctgttgcacactaggcatgatagagaaacaacaagctgaagaactcaagaaggctggacttacagcatataatcataacctagatacatcaagagagtattatcccaacattattaccacaagatcatatgatgatagactgcagactcttgagcatgtccgtgaagctggaataagcatctgctcaggtggaatcattggtcttggtgaagcagaggaggaccgggtagggttgttgcataccctagctaccttgcctacacacccagagagcgttcctattaatgcattggttgctgtaaaaggcacacctcttgaggaccagaagcctgtagagatctgggaaatgatccgcatgatcgccactgctcggatcacgatgccaaaggcaatggtgaggctttcagcaggccgagtacggttctcgatgccagaacaagcgctgtgcttcctcgctggggccaactccatctttgccggcgagaaacttctcacaaccgcaaacaacgactttgatgcggaccaggcgatgttcaagatccttggcctgatccccaaggctccaagctttggcgaggaagaggcgtctgcggcggctcccacagaatccgagaggtctgagcaagctgcttcgatgtagaatatatacatatcattaccgattatccgtatcacggttggggcgaaactagaactaccgttgtagctagagcattggattgtagaaaccacaacatttcattattttgtaattgcttg

SEQ ID NO: 3198 - protein, 377 aa, Zea mays subsp. mays
  peptide (1)..(377): Ceres Seq. ID no. 13564342
MALMLLARNLRSRRRPPLAAAAAFSSAAAEAERAIRDGPRNDWSRPEIQAVYDSPLLDLLFHGAQVHRNVHKFREVQQCTLLSIKTGGCSEDCSYCPQSSRYNTGLKAQKLMNKDAVLEAAKKAKESGSTRFCMGAAWRETIGRKSNFNQILEYVKEIRGMDMEVCCTLGMIEKQQAEELKKAGLTAYNHNLDTSREYYPNIITTRSYDDRLQTLEHVREAGISICSGGIIGLGEAEEDRVGLLHTLATLPTHPESVPINALVAVKGTPLEDQKPVEIWEMIRMIATARITMPKAMVRLSAGRVRFSMPEQALCFLAGANSIFAGEKLLTTANNDFDADQAMFKILGLIPKAPSFGEEEASAAAPTESERSEQAASM

SEQ ID NO: 3199 - protein, 374 aa, Zea mays subsp. mays
  peptide (1)..(374): Ceres Seq. ID no. 13564343
MLLARNLRSRRRPPLAAAAAFSSAAAEAERAIRDGPRNDWSRPEIQAVYDSPLLDLLFHGAQVHRNVHKFREVQQCTLLSIKTGGCSEDCSYCPQSSRYNTGLKAQKLMNKDAVLEAAKKAKESGSTRFCMGAAWRETIGRKSNFNQILEYVKEIRGMDMEVCCTLGMIEKQQAEELKKAGLTAYNHNLDTSREYYPNIITTRSYDDRLQTLEHVREAGISICSGGIIGLGEAEEDRVGLLHTLATLPTHPESVPINALVAVKGTPLEDQKPVEIWEMIRMIATARITMPKAMVRLSAGRVRFSMPEQALCFLAGANSIFAGEKLLTTANNDFDADQAMFKILGLIPKAPSFGEEEASAAAPTESERSEQAASM

SEQ ID NO: 3200 - protein, 266 aa, Zea mays subsp. mays
  peptide (1)..(266): Ceres Seq. ID no. 13564344
MNKDAVLEAAKKAKESGSTRFCMGAAWRETIGRKSNFNQILEYVKEIRGMDMEVCCTLGMIEKQQAEELKKAGLTAYNHNLDTSREYYPNIITTRSYDDRLQTLEHVREAGISICSGGIIGLGEAEEDRVGLLHTLATLPTHPESVPINALVAVKGTPLEDQKPVEIWEMIRMIATARITMPKAMVRLSAGRVRFSMPEQALCFLAGANSIFAGEKLLTTANNDFDADQAMFKILGLIPKAPSFGEEEASAAAPTESERSEQAASM

SEQ ID NO: 3201 - DNA, 1382 bp, Zea mays subsp. mays
  misc_feature (1)..(1382): Ceres Seq. ID no. 12356032
  misc_feature (1)..(1382): Ortholog of  Ceres SEQ ID NO 13596370 as cited in SEQ ID NO 68071
atcccaccccgaagggcgtcgccgagctagccattgccgcctcccggctcgcgactcgcgagtcacaggcgcagccgagcgttccttggggacgaggctacatcgcgatgtggtggagggcggtgaggcgccggtgggtcgcgacggcgcggcccgcgtcctccgcggcggcgggggcggagaagagctgccgcgccgtggtggtgccgcgtttcggtgggccggaggtgctcgaggtcaggcagggcatgcctgtgcccgatctgaagccgcaggaggtgctcgtgcgcgcacgcgctgtctctatcaaccccctggaccttcgaatgcgatgtggctatgggcgctccatattcgaaccactcctacctctgatcattggtcgggacattagcggtgaagttgcggccaccggaactttggcatcgtctttttctattggccaagaagtgtttggttcgttgcatccaactgctctcagagggacatatgctgattatgctatcctgtcactggacgagcttactctcaaaccatctacactcagtcatgtggaggctagtgcaatcccgtttgctgctttgactgcatggcgcgctttacatggtacggctcgtatttctgaaggacaaagagttcttgtgattggtggaggaggagcggttggattagctgctgttcaacttgcggtggctgctgggtgtgtggtttctgctacctgtggaacacaaagtattgagcgagttatgggagttggtgctgaacaagctattgactacactgctgaggatactgaagcagcaattaaaggaaagtttgatgctgttttagacaccataggagtacctgagacagaaagaattggcatcaatgttcttaggagaggtggacactatatgacccttcagggagaagcagctgccctagcagataggtatggattggctgtagggcttcctgctgctactgctgttttactaaagaaacagatgcagtatcgttattctcatggaatagagtattggtggacatacatgagagctgacgccgaaggccttcacgagatccaaaggctatctggagctgggaaactacagatacctgtggagaagacctttcccatcagccatgtaagagaagctcatgcggccaaggagaaaaagttggctcctggcaaggtggttctggaattcgattaatgttattaagattttgtccattgggacctgaagggctgtgcgtttgcaaatcatgatagttttttttgtaaaaaaataaatctgaatctctctgccgacttcaggttccattttatcgttccgtttcagtagaaatacggtaaataatcatatcagctatggcctatgggcacgattttcctg

SEQ ID NO: 3202 - protein, 398 aa, Zea mays subsp. mays
  peptide (1)..(398): Ceres Seq. ID no. 12356033
PTPKGVAELAIAASRLATRESQAQPSVPWGRGYIAMWWRAVRRRWVATARPASSAAAGAEKSCRAVVVPRFGGPEVLEVRQGMPVPDLKPQEVLVRARAVSINPLDLRMRCGYGRSIFEPLLPLIIGRDISGEVAATGTLASSFSIGQEVFGSLHPTALRGTYADYAILSLDELTLKPSTLSHVEASAIPFAALTAWRALHGTARISEGQRVLVIGGGGAVGLAAVQLAVAAGCVVSATCGTQSIERVMGVGAEQAIDYTAEDTEAAIKGKFDAVLDTIGVPETERIGINVLRRGGHYMTLQGEAAALADRYGLAVGLPAATAVLLKKQMQYRYSHGIEYWWTYMRADAEGLHEIQRLSGAGKLQIPVEKTFPISHVREAHAAKEKKLAPGKVVLEFD

SEQ ID NO: 3203 - protein, 363 aa, Zea mays subsp. mays
  peptide (1)..(363): Ceres Seq. ID no. 12356034
MWWRAVRRRWVATARPASSAAAGAEKSCRAVVVPRFGGPEVLEVRQGMPVPDLKPQEVLVRARAVSINPLDLRMRCGYGRSIFEPLLPLIIGRDISGEVAATGTLASSFSIGQEVFGSLHPTALRGTYADYAILSLDELTLKPSTLSHVEASAIPFAALTAWRALHGTARISEGQRVLVIGGGGAVGLAAVQLAVAAGCVVSATCGTQSIERVMGVGAEQAIDYTAEDTEAAIKGKFDAVLDTIGVPETERIGINVLRRGGHYMTLQGEAAALADRYGLAVGLPAATAVLLKKQMQYRYSHGIEYWWTYMRADAEGLHEIQRLSGAGKLQIPVEKTFPISHVREAHAAKEKKLAPGKVVLEFD

SEQ ID NO: 3204 - protein, 316 aa, Zea mays subsp. mays
  peptide (1)..(316): Ceres Seq. ID no. 12356035
MPVPDLKPQEVLVRARAVSINPLDLRMRCGYGRSIFEPLLPLIIGRDISGEVAATGTLASSFSIGQEVFGSLHPTALRGTYADYAILSLDELTLKPSTLSHVEASAIPFAALTAWRALHGTARISEGQRVLVIGGGGAVGLAAVQLAVAAGCVVSATCGTQSIERVMGVGAEQAIDYTAEDTEAAIKGKFDAVLDTIGVPETERIGINVLRRGGHYMTLQGEAAALADRYGLAVGLPAATAVLLKKQMQYRYSHGIEYWWTYMRADAEGLHEIQRLSGAGKLQIPVEKTFPISHVREAHAAKEKKLAPGKVVLEFD

SEQ ID NO: 3205 - DNA, 1779 bp, Zea mays subsp. mays
  misc_feature (1)..(1779): Ceres Seq. ID no. 12387104
  misc_feature (1)..(1779): Ortholog of  Ceres SEQ ID NO 14303366 as cited in SEQ ID NO 54418
  misc_feature (1)..(1779): Ortholog of  Ceres SEQ ID NO 13503610 as cited in SEQ ID NO 62416
  misc_feature (1)..(1779): Ortholog of  Ceres SEQ ID NO 13657610 as cited in SEQ ID NO 66165
  misc_feature (1)..(1779): Ortholog of  Ceres SEQ ID NO 13598312 as cited in SEQ ID NO 68448
  misc_feature (1)..(1779): Ortholog of  Ceres SEQ ID NO 13596100 as cited in SEQ ID NO 68573
agacgcgcgccaggcaagcaacaatggccaagcttctcaagccttggtacgcggccttcgtgaacagattcctcgccgtggtcgcggtggcatctatcgtagccgccgcgctccggcgggcgtggccagcattcagcatggacgatgtcgtcggcagccttggcgccgcgcggccggtccacgtgctcatggcggtcatcctggctgccggcgtggcgaagctgaggcgcctgcgccggccgcgggacgtgtacctggtggagtacggctgcttccgaccgcggccgtgcttccgggcgccgttcgccacgtgcctggagcacgtgcacctcctgccgtacctggtggacgacgagagcgtcagcttcgccatccgcctgctcgagcgctcggggctcggcgacgagacgtgcctgccctactcctaccactacatgcctccggaccgcagcctcgaggcggcccgggaggaggccgagctggtcatcttctccgcagtggacgaggtgttcgccagggcgagcgtgaggcccgaggagatcgacgtgctcatcgtcaactgcagcatcttcacgcccacgccggtcttcgccgacatggtcgtcaacaggtacgggctccgcgccgacgtgcagtgcctgaacctgtccgggatgggctgcggcgcggggctcgtctccatcggcctggccaagaacctcctccaggtggcgccgccaggcacgcgcgtcctgacggtgtccacggagatcctctcgtcgcagtactacgtcgggagcgagcgcgcgatgctgctgcccaactgcctcttccgcatgggggccgccgccacgatcctctccaacagccccgagcgcgcgcggttccggctcggccgcctcgtccgcaccatgaccgccgcgcgggacgccgactaccgctgcatattccaggaggaagacggcgagggcatcctgggcgttcgcctctccaaggacctcaccacaacggccggccatgcgctcaagcggaacatcgcggcgttcggccccctcgtgctgccggtctcggagcagctcctggtggcgatgtcgctgctcaagcgcaagttcatgagcggccggcgcgccagggtgaggctgtaccgcccggacttccgcaaggcgtttgagcacttctgcatccacgccggcggccgcgcggtgatcgacgaggtgcagcgcgggctcggcctgtccgacgaggacgtggaggcgtcgcggatgacgctgcaccggttcgggaacacgtccagcagcctggtgctgtacgagctggcctacatcgaggccaaggcccggatgagggcgggcgatcgggtgtggatgatctccttcggcgccggattcgagtgcagctgtgtggcattggagtgcgtcaagccgccggccgacgccggcgggccctgggccgactgcatcgaccgctacccggtgcagctccccgaagtcgccaaggacaacatctgatcaaccccttcttctggatctggggcatgctgcatcatgctggacatgaacatgcccaaggcttccgtcgtcgtcgatgtcgtcgtccttagtgccgggctgtcggccaccgcccaacatgtcgtgctctgtctatgatcgatctcttggaaataatgtagccctacccctacggtgtccaaaacgcaagtatggcgcgtttgtgtttgttaccactgcacttgtttaccacgctgcactgcgtttgtgtttgttaccactgcacaaagttaattaagcgccagttacgatc

SEQ ID NO: 3206 - protein, 494 aa, Zea mays subsp. mays
  peptide (1)..(494): Ceres Seq. ID no. 12387105
TRARQATMAKLLKPWYAAFVNRFLAVVAVASIVAAALRRAWPAFSMDDVVGSLGAARPVHVLMAVILAAGVAKLRRLRRPRDVYLVEYGCFRPRPCFRAPFATCLEHVHLLPYLVDDESVSFAIRLLERSGLGDETCLPYSYHYMPPDRSLEAAREEAELVIFSAVDEVFARASVRPEEIDVLIVNCSIFTPTPVFADMVVNRYGLRADVQCLNLSGMGCGAGLVSIGLAKNLLQVAPPGTRVLTVSTEILSSQYYVGSERAMLLPNCLFRMGAAATILSNSPERARFRLGRLVRTMTAARDADYRCIFQEEDGEGILGVRLSKDLTTTAGHALKRNIAAFGPLVLPVSEQLLVAMSLLKRKFMSGRRARVRLYRPDFRKAFEHFCIHAGGRAVIDEVQRGLGLSDEDVEASRMTLHRFGNTSSSLVLYELAYIEAKARMRAGDRVWMISFGAGFECSCVALECVKPPADAGGPWADCIDRYPVQLPEVAKDNI

SEQ ID NO: 3207 - protein, 487 aa, Zea mays subsp. mays
  peptide (1)..(487): Ceres Seq. ID no. 12387106
MAKLLKPWYAAFVNRFLAVVAVASIVAAALRRAWPAFSMDDVVGSLGAARPVHVLMAVILAAGVAKLRRLRRPRDVYLVEYGCFRPRPCFRAPFATCLEHVHLLPYLVDDESVSFAIRLLERSGLGDETCLPYSYHYMPPDRSLEAAREEAELVIFSAVDEVFARASVRPEEIDVLIVNCSIFTPTPVFADMVVNRYGLRADVQCLNLSGMGCGAGLVSIGLAKNLLQVAPPGTRVLTVSTEILSSQYYVGSERAMLLPNCLFRMGAAATILSNSPERARFRLGRLVRTMTAARDADYRCIFQEEDGEGILGVRLSKDLTTTAGHALKRNIAAFGPLVLPVSEQLLVAMSLLKRKFMSGRRARVRLYRPDFRKAFEHFCIHAGGRAVIDEVQRGLGLSDEDVEASRMTLHRFGNTSSSLVLYELAYIEAKARMRAGDRVWMISFGAGFECSCVALECVKPPADAGGPWADCIDRYPVQLPEVAKDNI

SEQ ID NO: 3208 - protein, 449 aa, Zea mays subsp. mays
  peptide (1)..(449): Ceres Seq. ID no. 12387107
MDDVVGSLGAARPVHVLMAVILAAGVAKLRRLRRPRDVYLVEYGCFRPRPCFRAPFATCLEHVHLLPYLVDDESVSFAIRLLERSGLGDETCLPYSYHYMPPDRSLEAAREEAELVIFSAVDEVFARASVRPEEIDVLIVNCSIFTPTPVFADMVVNRYGLRADVQCLNLSGMGCGAGLVSIGLAKNLLQVAPPGTRVLTVSTEILSSQYYVGSERAMLLPNCLFRMGAAATILSNSPERARFRLGRLVRTMTAARDADYRCIFQEEDGEGILGVRLSKDLTTTAGHALKRNIAAFGPLVLPVSEQLLVAMSLLKRKFMSGRRARVRLYRPDFRKAFEHFCIHAGGRAVIDEVQRGLGLSDEDVEASRMTLHRFGNTSSSLVLYELAYIEAKARMRAGDRVWMISFGAGFECSCVALECVKPPADAGGPWADCIDRYPVQLPEVAKDNI

SEQ ID NO: 3209 - DNA, 1170 bp, Zea mays subsp. mays
  misc_feature (1)..(1170): Ceres Seq. ID no. 12356036
  misc_feature (1)..(1170): Ortholog of  Ceres SEQ ID NO 14315060 as cited in SEQ ID NO 60039
  misc_feature (1)..(1170): Ortholog of  Ceres SEQ ID NO 13597809 as cited in SEQ ID NO 64598
  misc_feature (1)..(1170): Ortholog of  Ceres SEQ ID NO 12617960 as cited in SEQ ID NO 69051
  misc_feature (1)..(1170): Ortholog of  Ceres SEQ ID NO 13589401 as cited in SEQ ID NO 0
gttccctctttcctctcctctttccccatccgtccaatcaaccgggctgctctgctgcctctccggcgccattgacgagcaagagagtgctccgacacctggtccgtcgcgtgccgtgcccacccgctaaggccagggcgccccgactcgagctcaccgcgtcgaactcgaaccgctgctgttcctcggcagggggcagggtcgtcgaggatgccggagcactcagagaacgcggcggcggacctgatgggcaacatcatggagaccatcgcggagaacctcccgaggcagaagtccgtgcggttcgacgacggcgacggctcctccatctccgagcaggccaagaagctgttcagcggcggcgagagcaggaagaagtcggtccaccacgtgctgggcggcggcaaatccgccgacgtgctgctgtggcggaacaagaagatctcgtccagcgtgctgggcgtggcgacgctggtgtgggtgttcttcgagtggctggactaccacttcctcaccatcctctgcttcgtgctcgcgctcggcatggccgtccagttcgcctggtccatcttctcgtccagcgtgcctcgcgtgcagctgccggaggagctgttcgcgagcgccggcgcggccgccggcgcccaggtgaacagggcgctgggcttcctccaggacgtggcctgcggacgcgacctcaagcggctggtcatcgtgatcgccgggttcttcgctgcggcggtcgtcggcagcttctgcaacctcctgacggtcatctacatcgggttcgtgtgcgcgcacaccctgccggtgctgtacgagaggtaccaggaccaggtggacgagttcctgtacaacatgctagggctggtgcagagccagtacagcaagctggacagcaagggcatcctcaaggggggcgtcaagttcaggaagagcgactagctgatttcctcccatctacgactacgatttgattcatcctgggaatcttgatcgatcgacacttgttctgttctgtacagcgagtaacaaccgctgctgctagctacattctttactgtactgtacttgtgtgatgacatcatatcttcgcgtcgcgtgtactgaagaaactacacattgcactaaggttgctttcgtacgtgtacgtgctcatctttcttccttggt

SEQ ID NO: 3210 - protein, 323 aa, Zea mays subsp. mays
  peptide (1)..(323): Ceres Seq. ID no. 12356037
SLFPLLFPHPSNQPGCSAASPAPLTSKRVLRHLVRRVPCPPAKARAPRLELTASNSNRCCSSAGGRVVEDAGALRERGGGPDGQHHGDHRGEPPEAEVRAVRRRRRLLHLRAGQEAVQRRREQEEVGPPRAGRRQIRRRAAVAEQEDLVQRAGRGDAGVGVLRVAGLPLPHHPLLRARARHGRPVRLVHLLVQRASRAAAGGAVRERRRGRRRPGEQGAGLPPGRGLRTRPQAAGHRDRRVLRCGGRRQLLQPPDGHLHRVRVRAHPAGAVREVPGPGGRVPVQHARAGAEPVQQAGQQGHPQGGRQVQEERLADFLPSTTTI

SEQ ID NO: 3211 - protein, 243 aa, Zea mays subsp. mays
  peptide (1)..(243): Ceres Seq. ID no. 12356038
MPEHSENAAADLMGNIMETIAENLPRQKSVRFDDGDGSSISEQAKKLFSGGESRKKSVHHVLGGGKSADVLLWRNKKISSSVLGVATLVWVFFEWLDYHFLTILCFVLALGMAVQFAWSIFSSSVPRVQLPEELFASAGAAAGAQVNRALGFLQDVACGRDLKRLVIVIAGFFAAAVVGSFCNLLTVIYIGFVCAHTLPVLYERYQDQVDEFLYNMLGLVQSQYSKLDSKGILKGGVKFRKSD

SEQ ID NO: 3212 - protein, 231 aa, Zea mays subsp. mays
  peptide (1)..(231): Ceres Seq. ID no. 12356039
MGNIMETIAENLPRQKSVRFDDGDGSSISEQAKKLFSGGESRKKSVHHVLGGGKSADVLLWRNKKISSSVLGVATLVWVFFEWLDYHFLTILCFVLALGMAVQFAWSIFSSSVPRVQLPEELFASAGAAAGAQVNRALGFLQDVACGRDLKRLVIVIAGFFAAAVVGSFCNLLTVIYIGFVCAHTLPVLYERYQDQVDEFLYNMLGLVQSQYSKLDSKGILKGGVKFRKSD

SEQ ID NO: 3213 - DNA, 1127 bp, Zea mays subsp. mays
  misc_feature (1)..(1127): Ceres Seq. ID no. 12410358
  misc_feature (1)..(1127): Ortholog of  Ceres SEQ ID NO 15176306 as cited in SEQ ID NO 52784
  misc_feature (1)..(1127): Ortholog of  Ceres SEQ ID NO 13582624 as cited in SEQ ID NO 56287
  misc_feature (1)..(1127): Ortholog of  Ceres SEQ ID NO 14316536 as cited in SEQ ID NO 60272
  misc_feature (1)..(1127): Ortholog of  Ceres SEQ ID NO 13597264 as cited in SEQ ID NO 63897
  misc_feature (1)..(1127): Ortholog of  Ceres SEQ ID NO 13598570 as cited in SEQ ID NO 65434
  misc_feature (1)..(1127): Ortholog of  Ceres SEQ ID NO 13656452 as cited in SEQ ID NO 65745
  misc_feature (1)..(1127): Ortholog of  Ceres SEQ ID NO 13596238 as cited in SEQ ID NO 68834
  misc_feature (1)..(1127): Ortholog of  Ceres SEQ ID NO 15174329 as cited in SEQ ID NO 0
aaatcacctcacacaacaagctgcaccgcagcaacgaacacgaaccttggcagaacgaagctgaagtagttcgctgtgaacccagtatggcaaacgcgccgaggatcctggccctcggcctgctagcgctcctgtgcgctgccgccggcccggccgccgcgcagaactgcggctgccagccaaacttctgctgcagcaagttcggctactgcggcacgaccgacgcctactgcggcgacgggtgccagtcgggcccgtgccgctcggacggcggcggcggcggcggcggcggcggaggcggcggaggcagtggcggtgcgaacgtggctaatgtggtcaccgacgcgttcttcaacggcatcaagaaccaggccgggagcgggtgcgagggcaagaacttctacacccggagcgcgttcctgagcgccgtcaacaagtacccgggcttcgcccatggcgggacggaggtggagggcaagcgcgagatcgccgccttcttcgcgcacgtcacgcacgagaccggacatttctgctacatcagcgagatcaacaagagcaacgcctactgcgacgcgagcaacaggcagtggccgtgcgcggcggggcagaagtactacgggcgcggcccgctgcagatctcgtggaactacaactacgggcccgccgggagggacatcggcttcaacgggctcgccgaccccaacagggtggcgcaggacgccgtgatcgcgttcaagacggcgctctggttctggatgaacaacgtgcaccgtgtgatgccgcagggcttcggcgccaccatcagggccatcaacggcgccctcgagtgcaacgggaacaaccccgcccagatgaacgcgcgcgtcggctactacaagcagtactgccagcagctccgcgtcgacccagggcccaacctcacttgctaggccagcagctcctgctagctcgtccacaataaatgttcggcgtcgcaccctcgcgaaaccaagagtttactgactagtacgagctagctagcatgcagtaataataatcatcgtaataataataataaaacgacggggctgagccactttgttcgacctgtatgaataatgaaacaactgtatgttccctcggtacgc

SEQ ID NO: 3214 - protein, 308 aa, Zea mays subsp. mays
  peptide (1)..(308): Ceres Seq. ID no. 12410359
ITSHNKLHRSNEHEPWQNEAEVVRCEPSMANAPRILALGLLALLCAAAGPAAAQNCGCQPNFCCSKFGYCGTTDAYCGDGCQSGPCRSDGGGGGGGGGGGGGSGGANVANVVTDAFFNGIKNQAGSGCEGKNFYTRSAFLSAVNKYPGFAHGGTEVEGKREIAAFFAHVTHETGHFCYISEINKSNAYCDASNRQWPCAAGQKYYGRGPLQISWNYNYGPAGRDIGFNGLADPNRVAQDAVIAFKTALWFWMNNVHRVMPQGFGATIRAINGALECNGNNPAQMNARVGYYKQYCQQLRVDPGPNLTC

SEQ ID NO: 3215 - protein, 280 aa, Zea mays subsp. mays
  peptide (1)..(280): Ceres Seq. ID no. 12410360
MANAPRILALGLLALLCAAAGPAAAQNCGCQPNFCCSKFGYCGTTDAYCGDGCQSGPCRSDGGGGGGGGGGGGGSGGANVANVVTDAFFNGIKNQAGSGCEGKNFYTRSAFLSAVNKYPGFAHGGTEVEGKREIAAFFAHVTHETGHFCYISEINKSNAYCDASNRQWPCAAGQKYYGRGPLQISWNYNYGPAGRDIGFNGLADPNRVAQDAVIAFKTALWFWMNNVHRVMPQGFGATIRAINGALECNGNNPAQMNARVGYYKQYCQQLRVDPGPNLTC

SEQ ID NO: 3216 - DNA, 1103 bp, Zea mays subsp. mays
  misc_feature (1)..(1103): Ceres Seq. ID no. 12349943
  misc_feature (1)..(1103): Ortholog of  Ceres SEQ ID NO 13595881 as cited in SEQ ID NO 67709
  misc_feature (1)..(1103): Ortholog of  Ceres SEQ ID NO 12614145 as cited in SEQ ID NO 67937
aaagccctcctctcctctcccctctccctcgcggcctcgccttatccccttcgtcactcacctcgaccaccgccatggccatggccttggcctccgcgaccgccgccgcactcttccgctccgccctgtccgcgccacacggcgccggcgcgcgcgtccggccgcagcgccggcagccgttcttggctccgctccacgcggcgaagggccccggctcggcgccggtggtgctggagggcaaggccaagggaaagaagaagaaggggcccagctccgggaaccttcccgcagccctcgacgtcgagatcagggaggcgcaggagtacctcgacagcgaccagcaggaacctgttccagaaaactttccatttgaattaatcgacgaagagggtatgagcgtggttattttgagaagggactacaaggacgagaaggtcgaggttactgtcagcatgcctaatttagaaggaggccccgagtttggtgatgaggatggcgagggcgatggtgagagcgctgccaaggacgacggagaagcagaagaagatgacgagagtgccggggagagcagcatctctcttaaggtggtagtttccaaagactctggcccagagctcgagttcacatgcacagccttccgcgaggagatcaccatcgatgatatgctgatagtggagaaaacagacgacgacgacggagaagagaagttcccctacgagggccccgagttcaccgagctccctgtgaatgttcagaaaggcctgttcaagtacctggagcaaagaggggtaacgctgtcggctaccaactatatgcacgattacatggtgactaagcaggctcaggagtacatccggtggatgactaagctgaaggatttcgtggcgcagtgaggaacagcgtcgtgattcggcagcattgtttggttagcctagccttagcatgtgttacagccttacaggaacactacgactacaccgaattggccacactccccaaaaaacaaaaaagggggagcattgtatctgcttcaatgtatctgtatcagctggcaaaacagtagcaagtagatttccagtaatgtttagtggtgggcattaggt

SEQ ID NO: 3217 - protein, 296 aa, Zea mays subsp. mays
  peptide (1)..(296): Ceres Seq. ID no. 12349944
SPPLLSPLPRGLALSPSSLTSTTAMAMALASATAAALFRSALSAPHGAGARVRPQRRQPFLAPLHAAKGPGSAPVVLEGKAKGKKKKGPSSGNLPAALDVEIREAQEYLDSDQQEPVPENFPFELIDEEGMSVVILRRDYKDEKVEVTVSMPNLEGGPEFGDEDGEGDGESAAKDDGEAEEDDESAGESSISLKVVVSKDSGPELEFTCTAFREEITIDDMLIVEKTDDDDGEEKFPYEGPEFTELPVNVQKGLFKYLEQRGVTLSATNYMHDYMVTKQAQEYIRWMTKLKDFVAQ

SEQ ID NO: 3218 - protein, 272 aa, Zea mays subsp. mays
  peptide (1)..(272): Ceres Seq. ID no. 12349945
MAMALASATAAALFRSALSAPHGAGARVRPQRRQPFLAPLHAAKGPGSAPVVLEGKAKGKKKKGPSSGNLPAALDVEIREAQEYLDSDQQEPVPENFPFELIDEEGMSVVILRRDYKDEKVEVTVSMPNLEGGPEFGDEDGEGDGESAAKDDGEAEEDDESAGESSISLKVVVSKDSGPELEFTCTAFREEITIDDMLIVEKTDDDDGEEKFPYEGPEFTELPVNVQKGLFKYLEQRGVTLSATNYMHDYMVTKQAQEYIRWMTKLKDFVAQ

SEQ ID NO: 3219 - protein, 270 aa, Zea mays subsp. mays
  peptide (1)..(270): Ceres Seq. ID no. 12349946
MALASATAAALFRSALSAPHGAGARVRPQRRQPFLAPLHAAKGPGSAPVVLEGKAKGKKKKGPSSGNLPAALDVEIREAQEYLDSDQQEPVPENFPFELIDEEGMSVVILRRDYKDEKVEVTVSMPNLEGGPEFGDEDGEGDGESAAKDDGEAEEDDESAGESSISLKVVVSKDSGPELEFTCTAFREEITIDDMLIVEKTDDDDGEEKFPYEGPEFTELPVNVQKGLFKYLEQRGVTLSATNYMHDYMVTKQAQEYIRWMTKLKDFVAQ

SEQ ID NO: 3220 - DNA, 1055 bp, Zea mays subsp. mays
  misc_feature (1)..(1055): Ceres Seq. ID no. 12356111
  misc_feature (1)..(1055): Ortholog of  Ceres SEQ ID NO 14306675 as cited in SEQ ID NO 52939
  misc_feature (1)..(1055): Ortholog of  Ceres SEQ ID NO 12608114 as cited in SEQ ID NO 57218
gctctgctttgctcccgttcccatgctgatttttttaggcggctgctggcctgcctgtctccactggaagctccggattacgtagaaaaggggcgggcggcatgaggatccagtgcgacgcgtgcgaggccgcggcggccgcggtggtgtgctgcgccgacgaggcggcgctgtgcgcgcgctgcgacgtggagatccacgccgccaacaagctcgccagcaagcaccagcggctcccgctcggcgacgccgcggcgctccccgccagcctcccgcgctgcgacgtgtgccaggagaggccggccttcatcttctgcgtcgaggacagggcgctcctctgccgccgactgcgacgagcccatccacgtccccggcacgctctccggcaaccaccagcgctacctcgccaccggcatccgcgtcggcttcagctccgtctgcggcgccagcgccgagggcctcccgccggcgccgcccaagggcagctccaagcccgcggccgtcgtcagcgcgccagctgccgggacgaccaccaaaacaaggacggtcaaggacgcgctgccgcaggaggtgccgtcctcgccgttcctgccaccgtccggttgggccgtcgaggacctcctcgagctgtcggactacgaatccagcgacaagaaagactcgtctcttgggctcaaggagctggagtggttcgaggacatcgacctgttccacgcccattcgccagctaaaactgccatggcggagttcttcgcctcgccgcagccagtgagtaacgccgggttctacaaggcgaacggggcgcgcctgttcaagaagtcacggatggaagtgcctgacgacgacgacgaggactacttcatcgttcctgatcttggctgagatgagagatctctgcatgattctccagtcatgtgatgtgtgtatgtatgcaaaatatgtatgtatgccatcatggggtgcactgacgcttacgttggacatatgtaattatccagtcatgtgatgtgtatgtacgcaaaatatgtatgtatgccatcatgggatgcactggc

SEQ ID NO: 3221 - protein, 209 aa, Zea mays subsp. mays
  peptide (1)..(209): Ceres Seq. ID no. 12356112
MRIQCDACEAAAAAVVCCADEAALCARCDVEIHAANKLASKHQRLPLGDAAALPASLPRCDVCQERPAFIFCVEDRALLCRRLRRAHPRPRHALRQPPALPRHRHPRRLQLRLRRQRRGPPAGAAQGQLQARGRRQRASCRDDHQNKDGQGRAAAGGAVLAVPATVRLGRRGPPRAVGLRIQRQERLVSWAQGAGVVRGHRPVPRPFAS

SEQ ID NO: 3222 - DNA, 1250 bp, Zea mays subsp. mays
  misc_feature (1)..(1250): Ceres Seq. ID no. 12402650
  misc_feature (1)..(1250): Ortholog of  Ceres SEQ ID NO 15226533 as cited in SEQ ID NO 59723
gtccttgtgcgttccttgtagccatctccgactccgcgcctccgctgcctcccgaaagcattgccagttcctccgcacaacatgacgcgcatccaccgcctccgccccctcttcctcttcgttctcttggcgtcgctgcaatgcggtgcggcgacggcggcggctggatacggaggtggcgccgaggggttctgctcggcggagccgtccagcaagtgctccggggatcagccgctctactggaaggtcacccatcccaccctcgcgcccgcgcacctccaagatttacctggcttcacacgtagtgttttcaaaagggatcatgctttaataacaccagagagtcatgtattcagtcctttgcctgattggatcaatacagtaggagcatatttgatcagtccagctattggtgcacacttcattatgtatctagcaaacatgcaagatggttcaaaatcagccctaccaccgaaagatgttgaaaggtggattcttatggatatcttcctgcaaacacaaagcattctatgatctcagatgaaccaaccactcttgtaatatttgagaggaggtacaatgccattgaggattcccatcctgatctaattgtgggttcaacagataagcaaccccttctcgaaaccccgggagaggtatttcaactaaggaagctgctaccgacttctctgtcctatgactttaatatccatataatggactttcaaccaggcgaatatctcaatgtaaaggaggttcattataatcaacatggacttcttcttttagaggggcaagcaatataccgactgggagagagttggtatcccgtgcaagctggggataccatttggatggcaccgtttgttcctcagtggtatgctgcccttggtaagaccaggacgagatacttgctgtacaaagatgtcaataggaatccattgatatgatcaagaaaccagaacaaggagggaataaatcaaatgtcgagctgtgccaggtataaagaatttcaatgggagatgatcacaggaatgagaaaaggagatcttattgtatgctgaaaaatcttgaaaccaaaaataacgtgggaagttgaatgtgtacttgtgatgtccataactgtcaatctttggtgactagtgcgactggaattgtgatgtaacgtattctggacagcagatgccaagttggatatgctgtgacatttgtgaatggctaatcccatgaatttaggtgatgtttggttt

SEQ ID NO: 3223 - protein, 150 aa, Zea mays subsp. mays
  peptide (1)..(150): Ceres Seq. ID no. 12402651
MTRIHRLRPLFLFVLLASLQCGAATAAAGYGGGAEGFCSAEPSSKCSGDQPLYWKVTHPTLAPAHLQDLPGFTRSVFKRDHALITPESHVFSPLPDWINTVGAYLISPAIGAHFIMYLANMQDGSKSALPPKDVERWILMDIFLQTQSIL

SEQ ID NO: 3224 - protein, 139 aa, Zea mays subsp. mays
  peptide (1)..(139): Ceres Seq. ID no. 12402652
MISDEPTTLVIFERRYNAIEDSHPDLIVGSTDKQPLLETPGEVFQLRKLLPTSLSYDFNIHIMDFQPGEYLNVKEVHYNQHGLLLLEGQAIYRLGESWYPVQAGDTIWMAPFVPQWYAALGKTRTRYLLYKDVNRNPLI

SEQ ID NO: 3225 - protein, 100 aa, Zea mays subsp. mays
  peptide (1)..(100): Ceres Seq. ID no. 12402653
PCAFLVAISDSAPPLPPESIASSSAQHDAHPPPPPPLPLRSLGVAAMRCGDGGGWIRRWRRGVLLGGAVQQVLRGSAALLEGHPSHPRARAPPRFTWLHT

SEQ ID NO: 3226 - DNA, 686 bp, Zea mays subsp. mays
  misc_feature (1)..(686): Ceres Seq. ID no. 12345930
  misc_feature (1)..(686): Ortholog of  Ceres SEQ ID NO 13595818 as cited in SEQ ID NO 56698
tttttttttccccacctactacttcctctgctcgcggctcgccttcgtcggatcggatccacagcaagcagcaacagcctgcagccggcagtcctcgcctccgcctcctccaccctgaccgtcaacagaggaagacgaggatgtcgggatccaaggtgtacaccctcgaggaggtggctaagcacaacaccaaggacgactgctggctcgtcatcggcggcaaggtgtacaatgtgaccaagtttctggaggatcaccctggaggcgatgatgttctgctgtcttccactgccaaggatgctaccgatgatttcgaagatgtggggcacagcagcactgcccgtgcaatgatggacgagtacttagtgggtgagattgatgcagccacgatacccaccaaggtgaagtacacgccccccaagcagccgcactacaaccaggacaagacccaggagttcgtcatcaagatcctccagtttttggtccccctcgcaatactgggtctgggccgtcgctgtaaggatgtacaccaagtcggaatctgcctagtctcttgtcatcaacgcttcaaacatcattcacaaactgaataagttagtgttgaaatgctgcaaagatcattaattctgaaacttgagtctttgctgtcgtgtgagacgtacgtctattagtataaaatcacttct

SEQ ID NO: 3227 - protein, 196 aa, Zea mays subsp. mays
  peptide (1)..(196): Ceres Seq. ID no. 12345931
FFSPPTTSSARGSPSSDRIHSKQQQPAAGSPRLRLLHPDRQQRKTRMSGSKVYTLEEVAKHNTKDDCWLVIGGKVYNVTKFLEDHPGGDDVLLSSTAKDATDDFEDVGHSSTARAMMDEYLVGEIDAATIPTKVKYTPPKQPHYNQDKTQEFVIKILQFLVPLAILGLGRRCKDVHQVGICLVSCHQRFKHHSQTE

SEQ ID NO: 3228 - protein, 150 aa, Zea mays subsp. mays
  peptide (1)..(150): Ceres Seq. ID no. 12345932
MSGSKVYTLEEVAKHNTKDDCWLVIGGKVYNVTKFLEDHPGGDDVLLSSTAKDATDDFEDVGHSSTARAMMDEYLVGEIDAATIPTKVKYTPPKQPHYNQDKTQEFVIKILQFLVPLAILGLGRRCKDVHQVGICLVSCHQRFKHHSQTE

SEQ ID NO: 3229 - DNA, 932 bp, Zea mays subsp. mays
  misc_feature (1)..(932): Ceres Seq. ID no. 12400274
  misc_feature (1)..(932): Ortholog of  Ceres SEQ ID NO 15170745 as cited in SEQ ID NO 52595
gccgccgtagctggtagctaagctacgtgaagaagatggttgggctcctccgtccactctccgccgccgccaccttactcctcgcccccgccacgccactcactggttcctcagtctccgctagttccgtcggcggcaggcggtggagaagcgtgagggcggacgccggcgggggctggctatccgggctgctgggcggcaagggcggcggcgcgtccacggcgatgatggtgacgccgggaaccgtgaaggccggcgaccccgtcctgcacgagcccgcgcaggaggtggcgccgggggacgtgctgtccgagaaggtgcagggcgtcatcgaccggatggtcgacgtcatgcgcagggccccaggcgtcggcctcgccgcccccgcagatcggcgtcccgctcaggattattgttctcgaggatacgcaggagtacatcagctatgcacccaagaaggacatcgaagcacaagaccgccgcccctttgatcttctcgtcggtcattatcaatccaaagattaagagcacgagtaaaagaaccgcgctgttctttgagggatgtctcagtgttgatggatacagggcggtcgtggagcggcatctggacgttgaagtttcaggtctggaccggaatgggagcaccatgaaggtacgggcttcaggatggcaagcgcgcatcctccagcatgaatgtgatcatcttgaaggcacgctgtatgttgacaagatggtagcaaggacattcagggtcgtcgagaacttggatttgccccttcccactggatgccctcaactaggtgcaagataatggggatagctttccatttttcctcgtcgaatagatgtgattctctctctctttttgaaaattacaacgtctcatgtacagtattgcattttgcttcccgtctaattgctgtgtttgttct

SEQ ID NO: 3230 - protein, 151 aa, Zea mays subsp. mays
  peptide (1)..(151): Ceres Seq. ID no. 12400275
MVGLLRPLSAAATLLLAPATPLTGSSVSASSVGGRRWRSVRADAGGGWLSGLLGGKGGGASTAMMVTPGTVKAGDPVLHEPAQEVAPGDVLSEKVQGVIDRMVDVMRRAPGVGLAAPADRRPAQDYCSRGYAGVHQLCTQEGHRSTRPPPL

SEQ ID NO: 3231 - protein, 121 aa, Zea mays subsp. mays
  peptide (1)..(121): Ceres Seq. ID no. 12400276
MHPRRTSKHKTAAPLIFSSVIINPKIKSTSKRTALFFEGCLSVDGYRAVVERHLDVEVSGLDRNGSTMKVRASGWQARILQHECDHLEGTLYVDKMVARTFRVVENLDLPLPTGCPQLGAR

SEQ ID NO: 3232 - protein, 88 aa, Zea mays subsp. mays
  peptide (1)..(88): Ceres Seq. ID no. 12400277
MMVTPGTVKAGDPVLHEPAQEVAPGDVLSEKVQGVIDRMVDVMRRAPGVGLAAPADRRPAQDYCSRGYAGVHQLCTQEGHRSTRPPPL

SEQ ID NO: 3233 - DNA, 921 bp, Zea mays subsp. mays
  misc_feature (1)..(921): Ceres Seq. ID no. 12588519
  misc_feature (1)..(921): Ortholog of  Ceres SEQ ID NO 14306032 as cited in SEQ ID NO 0
atcagaaccgatccttacagagagacacacccagcgcgcgagatatctacatcgatcatcatcaccagcgagcgagccggccgagcagcaccgatggcggcgtacatgcgcgtgacgcaccgcgacgaggaaggcaagaaggtgacggagaagatgccggtcccggagacgcggcgcccggacacggccaagcacttcgagcgcaagctggaggagcagggcctccaccgcttcgagcggcacccggcgaacgcgccccggggcgtgggcatcggcgccccgccgcccaagtccgggcgcggcggcaagtacacctgggagggccccggcagcgtcgtcgaggaccagctcgacccggcgcccgcccgccatcgaccccaacgaccccaactacgaggagggaggggcggcggacgaggacgacgaggcggccagtgagatcgccggattcgtggtgggtgccctgctgctcggcgccaccatcgctgcccccaaggtcgacggcttcatcgcctcctcccagagaaggtcactagggatgtgtaagaggtgcggtgaccttcggattgtagcatgctcgcagtgcaagggaacaggatcagctcggagcggagggatgctcagtttgggcgtgctggatgacctctacgagtctcttggagccgaagccaagactgagaatctggttccctgcacaaagtgcaggtcgagaggccgtctcatgtgtccagaatgctccaaggtcgcatgaccctggcctggagccgtgtactcggtcagaacacatgtacggctctgacaaacacaaatcactgctgtcactgtttgtgtttgaacattattatgtgcatggaattcctgacccgactactggtggttagggatggtccactgtctcaatgcagttgttttcagtgcttt

SEQ ID NO: 3234 - protein, 177 aa, Zea mays subsp. mays
  peptide (1)..(177): Ceres Seq. ID no. 12588520
QNRSLQRDTPSARDIYIDHHHQRASRPSSTDGGVHARDAPRRGRQEGDGEDAGPGDAAPGHGQALRAQAGGAGPPPLRAAPGERAPGRGHRRPAAQVRARRQVHLGGPRQRRRGPARPGARPPSTPTTPTTRREGRRTRTTRRPVRSPDSWWVPCCSAPPSLPPRSTASSPPPREGH

SEQ ID NO: 3235 - protein, 145 aa, Zea mays subsp. mays
  peptide (1)..(145): Ceres Seq. ID no. 12588521
IRTDPYRETHPAREISTSIIITSERAGRAAPMAAYMRVTHRDEEGKKVTEKMPVPETRRPDTAKHFERKLEEQGLHRFERHPANAPRGVGIGAPPPKSGRGGKYTWEGPGSVVEDQLDPAPARHRPQRPQLRGGRGGGRGRRGGQ

SEQ ID NO: 3236 - protein, 114 aa, Zea mays subsp. mays
  peptide (1)..(114): Ceres Seq. ID no. 12588522
MAAYMRVTHRDEEGKKVTEKMPVPETRRPDTAKHFERKLEEQGLHRFERHPANAPRGVGIGAPPPKSGRGGKYTWEGPGSVVEDQLDPAPARHRPQRPQLRGGRGGGRGRRGGQ

SEQ ID NO: 3237 - DNA, 1510 bp, Zea mays subsp. mays
  misc_feature (1)..(1510): Ceres Seq. ID no. 12364196
  misc_feature (1)..(1510): Ortholog of  Ceres SEQ ID NO 13502858 as cited in SEQ ID NO 65109
gcacgagaccattacctagaacatcctaatcgaaaacctgctgcagtgtgcaggactgcagggcaggccctgccgtctgccgcaaaagagagcactaggaaaagaagtgttgcggcgttgcgtggtgggggacgaggccagagcgccccaaaaccaaaaaccccagaaccccgacctagggttacgccatcgccatgggatctgttgcctccgccgctgtgccaccacctcctcctcaatcagcgctgcctcaggcgggcgcgccgccctacgggcccgggctcgccgggatcctcccgcagatgtcgaagggggaggagaagaaggatgagaaggtggactacctcaacctcccctgccccgtgcccttcgaggagatccagcgcgaggctctcatgtctttgaagcctgaactttttgaaggattgagatttgacttcacaaaaggattgaatcagaagttttctcttagccacagcatttttatgggctccttagaagttccagcccaggcatctgaaactattaaagttccaactgcacattatgaatttggcgccaattttttagatccaaagttaatgctcattggaagggtgatgacagatggaaggcttaatgctcgtgtgaaatgtgatttgacagacaatctgacgttgaaagtaaatgcacagcttacccaagaggcacattactcacaagggatgtttaacttcgactacaagggaagtgactatcgagcacaattccaaattgggaacaatgcattctatggtgcaaattatattcagagtgttactccgaacctatcaatgggaactgaaatgttctggcttggtcaccaaaggaagtctggaattggttttgcctctcgctacaacacagacaaaatggtgggcactctacaggtcgcaagcactggaatagttgccttaagttatgtccagaagatttccgagaaggtttcccttgcgtctgacttcatgtataaccatatgtcaagagatgtaactgccagctttggttatgattacttgcttaggcagtgccgcctaagaggcaaaatagactcgaatggtgttgttgccgcatacttggaagagaggttgaacatgggtgtcaacttccttctatctgctgagattgaccattgtaagaagaactacaagtttggttttggaatgaccgtaggagagtaattctgccaaaacaattgctgtgagcgcacatgagatacttatgcagtcggcttcgcgcgtatgttgacttgttaaagatatttcaggtctcagttttgactgatcaggttttgccattgcgccgtggaaaaacacaggccgttgctgctttacagggttttgtgttttttcagctacttgagcatgggggccatgattctttgttcatcttggatgtaactagctgattggtgttccaacaatgttgtattggcggaacaatttttacctttttaaatcactaccaatccacctcactaggccttttctgc

SEQ ID NO: 3238 - protein, 334 aa, Zea mays subsp. mays
  peptide (1)..(334): Ceres Seq. ID no. 12364197
MGSVASAAVPPPPPQSALPQAGAPPYGPGLAGILPQMSKGEEKKDEKVDYLNLPCPVPFEEIQREALMSLKPELFEGLRFDFTKGLNQKFSLSHSIFMGSLEVPAQASETIKVPTAHYEFGANFLDPKLMLIGRVMTDGRLNARVKCDLTDNLTLKVNAQLTQEAHYSQGMFNFDYKGSDYRAQFQIGNNAFYGANYIQSVTPNLSMGTEMFWLGHQRKSGIGFASRYNTDKMVGTLQVASTGIVALSYVQKISEKVSLASDFMYNHMSRDVTASFGYDYLLRQCRLRGKIDSNGVVAAYLEERLNMGVNFLLSAEIDHCKKNYKFGFGMTVGE

SEQ ID NO: 3239 - protein, 298 aa, Zea mays subsp. mays
  peptide (1)..(298): Ceres Seq. ID no. 12364198
MSKGEEKKDEKVDYLNLPCPVPFEEIQREALMSLKPELFEGLRFDFTKGLNQKFSLSHSIFMGSLEVPAQASETIKVPTAHYEFGANFLDPKLMLIGRVMTDGRLNARVKCDLTDNLTLKVNAQLTQEAHYSQGMFNFDYKGSDYRAQFQIGNNAFYGANYIQSVTPNLSMGTEMFWLGHQRKSGIGFASRYNTDKMVGTLQVASTGIVALSYVQKISEKVSLASDFMYNHMSRDVTASFGYDYLLRQCRLRGKIDSNGVVAAYLEERLNMGVNFLLSAEIDHCKKNYKFGFGMTVGE

SEQ ID NO: 3240 - protein, 267 aa, Zea mays subsp. mays
  peptide (1)..(267): Ceres Seq. ID no. 12364199
MSLKPELFEGLRFDFTKGLNQKFSLSHSIFMGSLEVPAQASETIKVPTAHYEFGANFLDPKLMLIGRVMTDGRLNARVKCDLTDNLTLKVNAQLTQEAHYSQGMFNFDYKGSDYRAQFQIGNNAFYGANYIQSVTPNLSMGTEMFWLGHQRKSGIGFASRYNTDKMVGTLQVASTGIVALSYVQKISEKVSLASDFMYNHMSRDVTASFGYDYLLRQCRLRGKIDSNGVVAAYLEERLNMGVNFLLSAEIDHCKKNYKFGFGMTVGE

SEQ ID NO: 3241 - DNA, 1559 bp, Zea mays subsp. mays
  misc_feature (1)..(1559): Ceres Seq. ID no. 12367597
  misc_feature (1)..(1559): Ortholog of  Ceres SEQ ID NO 14312212 as cited in SEQ ID NO 54399
  misc_feature (1)..(1559): Ortholog of  Ceres SEQ ID NO 15225341 as cited in SEQ ID NO 55222
  misc_feature (1)..(1559): Ortholog of  Ceres SEQ ID NO 14311755 as cited in SEQ ID NO 57271
  misc_feature (1)..(1559): Ortholog of  Ceres SEQ ID NO 15171156 as cited in SEQ ID NO 58259
  misc_feature (1)..(1559): Ortholog of  Ceres SEQ ID NO 14302212 as cited in SEQ ID NO 66507
  misc_feature (1)..(1559): Ortholog of  Ceres SEQ ID NO 13653980 as cited in SEQ ID NO 69253
cctaatcgaaaactggtctgaaagccctcactccaaatctcgcgcactgtcagctgacgccaccgcctgcgccagccctcgccaagccggtgaaaacctcgtgccctccgccgcctccgcccgcctcttccagagtaccgcggtctcatctcctcccgggacgggcatgcagagcgcggctgccatcggtctcgttcggccatgcgccgcgcggccgctccccacctaccctagcccacggcgcggcgccggcgcgtgcagcggcgccgcccagccgatcctcgcgccccgcggcctctgcctctccgcccgcgccagcctactgccggcctcgccgctggaggaggagtaccggagatgcagggccggccggcacgtgccggcgcgggaaggtggccgcggctgatggggccgtagaggaagcggggggagggctcgtcaagacgctgcagctggggtcgctcttcgggctctggtacctcttcaacatctacttcaacatctacaacaagcaggttctgaaggttctgccataccctataaacatcaccacagtgcagtttgccgttggaagtgccattgctttgtttatgtggatcaccggtatccttaaaaggccaaagatttctggtgcccagctttttgctatccttcctctagctatcgttcataccatgggcaatcttttcacaaacatgagccttggaaaggttgcggtgtcatttacacatactatcaaggccatggaacctttcttctcagttctcctttcagcaattttccttggtgagttgcctacgccttgggttgtgttgtctcttcttccgatcgttggtggtgtggcattggcatcccttactgaggcctcctttaactgggctggattttggagtgcaatggcttcaaatgtaaccttccagtcaaggaatgtgctaagcaagaaacttatggtgaagaaagaggaatctctcgacaacattaatctattttcgataattacagtcatgtcattcttcctgttggccccagtaaccttacttacagaaggtgttaaagttagtccagcagttttgcagtctgctggtttgaacttgaaacagatatacacaaggtcattgattgctgcatgctgcttccatgcataccaacaggtgtcatacatgatcctcgccagggtatccccagtcacacattcagtgggcaattgcgtcaagcgtgtggtggtcattgtgacctctgttctgttcttcaggacccctgtttctcccatcaactcactcggtaccgggatcgctcttgctggagttttcctatactcgcaattgaagaggcttaagcccaagcccaaggctgcttgatcatagacctttgcaggtccatccaatagaacttttgaagttatgctatgccattggaatgattagtgagtgccgtagttagaatgatgtttaaagaagagctaccacttcagcagataatttgtgacttgcttgcattttttggacggatttgttcgtgtattaataattttgcagtgacgatacttctgttgtgctgtt

SEQ ID NO: 3242 - protein, 255 aa, Zea mays subsp. mays
  peptide (1)..(255): Ceres Seq. ID no. 12367598
MWITGILKRPKISGAQLFAILPLAIVHTMGNLFTNMSLGKVAVSFTHTIKAMEPFFSVLLSAIFLGELPTPWVVLSLLPIVGGVALASLTEASFNWAGFWSAMASNVTFQSRNVLSKKLMVKKEESLDNINLFSIITVMSFFLLAPVTLLTEGVKVSPAVLQSAGLNLKQIYTRSLIAACCFHAYQQVSYMILARVSPVTHSVGNCVKRVVVIVTSVLFFRTPVSPINSLGTGIALAGVFLYSQLKRLKPKPKAA

SEQ ID NO: 3243 - protein, 227 aa, Zea mays subsp. mays
  peptide (1)..(227): Ceres Seq. ID no. 12367599
MGNLFTNMSLGKVAVSFTHTIKAMEPFFSVLLSAIFLGELPTPWVVLSLLPIVGGVALASLTEASFNWAGFWSAMASNVTFQSRNVLSKKLMVKKEESLDNINLFSIITVMSFFLLAPVTLLTEGVKVSPAVLQSAGLNLKQIYTRSLIAACCFHAYQQVSYMILARVSPVTHSVGNCVKRVVVIVTSVLFFRTPVSPINSLGTGIALAGVFLYSQLKRLKPKPKAA

SEQ ID NO: 3244 - protein, 220 aa, Zea mays subsp. mays
  peptide (1)..(220): Ceres Seq. ID no. 12367600
MSLGKVAVSFTHTIKAMEPFFSVLLSAIFLGELPTPWVVLSLLPIVGGVALASLTEASFNWAGFWSAMASNVTFQSRNVLSKKLMVKKEESLDNINLFSIITVMSFFLLAPVTLLTEGVKVSPAVLQSAGLNLKQIYTRSLIAACCFHAYQQVSYMILARVSPVTHSVGNCVKRVVVIVTSVLFFRTPVSPINSLGTGIALAGVFLYSQLKRLKPKPKAA

SEQ ID NO: 3245 - DNA, 1225 bp, Zea mays subsp. mays
  misc_feature (1)..(1225): Ceres Seq. ID no. 13499081
  misc_feature (1)..(1225): Ortholog of  Ceres SEQ ID NO 13639033 as cited in SEQ ID NO 55960
aattttatgaccgtcgaaaaccaaaatttagataggccacccaaatccaggtgcaaatcccaacctccctccctcccaggccccctccccacctccacctccaggcaccactggtcccacctcctcacctgcgaggatgctgctcgtgagtcaggcagcgaacggctccctctccgcgcggcgctgccgtcgaagccgccggggccgtccaccaccaacccctacccgctcttcgccaaccctcgcctcctgcgccgccgcctggcgctctccggcgntggcgccgaccaagccccgcgccgcgccgcgccgaccccagccgccgcgggcgagggcccctccgcctcctccaccgaggacccggtccttgtccgcgtcnccgacgacggcgtgccgctcgagggcgtcatccagattgagaagcccggggatgcggccgccgagtccaagctcgtctcctacgcgaagctgggtcttctggccggcggggacgtgttctgccttctgctgttctctgcgattggaaggttcagccatggcctgcccgtcctcgacgccgagacgttcaagacggccgaccccttcattgctgagtggctgctgagcgcctaccttcttggcggatttggcgatgatgccaaagggcgcaatggcgtcggaagcgcggttatcaccgcagctaaatcatgggctgttgggataccgttgggacttgctatccgagcagtgacgtctggtcatcttccaccaactccttttatcttggtaaccatgggaagtacaggggtcttgttaactgcatggcgtgctttggtatcacaactgttttccaaccagcaaaagcagcaggatgatgtctaccggcgtggaagtccttttgagctttttgagctactcacatcgctggtgcggaggtggtgacatctgaaggctgaagcctatagaaggtaagaagggcattgttccgctctggtatccgcaatcatcaggttcagccatctgtgtctattgtgtaagtacaattttgaaggtgaagaagagcaggctaaaacctagtttggagcatttgccgaacccaaaaaaaatgtttggcaataacacgcccgcgatgttggtttagtatattatattatattcataagatgtactcatattcctgatcttccacttgtaaaattgtatccagcttaacaaatcctaatcgataagaccgttgcctcttgtt

SEQ ID NO: 3246 - protein, 306 aa, Zea mays subsp. mays
  peptide (1)..(306): Ceres Seq. ID no. 13499082
  misc_feature (93)..(93): Xaa is any aa, unknown or other
  misc_feature (127)..(127): Xaa is any aa, unknown or other
NFMTVENQNLDRPPKSRCKSQPPSLPGPLPTSTSRHHWSHLLTCEDAARESGSERLPLRAALPSKPPGPSTTNPYPLFANPRLLRRRLALSGXGADQAPRRAAPTPAAAGEGPSASSTEDPVLVRVXDDGVPLEGVIQIEKPGDAAAESKLVSYAKLGLLAGGDVFCLLLFSAIGRFSHGLPVLDAETFKTADPFIAEWLLSAYLLGGFGDDAKGRNGVGSAVITAAKSWAVGIPLGLAIRAVTSGHLPPTPFILVTMGSTGVLLTAWRALVSQLFSNQQKQQDDVYRRGSPFELFELLTSLVRRW

SEQ ID NO: 3247 - protein, 304 aa, Zea mays subsp. mays
  peptide (1)..(304): Ceres Seq. ID no. 13499083
  misc_feature (91)..(91): Xaa is any aa, unknown or other
  misc_feature (125)..(125): Xaa is any aa, unknown or other
MTVENQNLDRPPKSRCKSQPPSLPGPLPTSTSRHHWSHLLTCEDAARESGSERLPLRAALPSKPPGPSTTNPYPLFANPRLLRRRLALSGXGADQAPRRAAPTPAAAGEGPSASSTEDPVLVRVXDDGVPLEGVIQIEKPGDAAAESKLVSYAKLGLLAGGDVFCLLLFSAIGRFSHGLPVLDAETFKTADPFIAEWLLSAYLLGGFGDDAKGRNGVGSAVITAAKSWAVGIPLGLAIRAVTSGHLPPTPFILVTMGSTGVLLTAWRALVSQLFSNQQKQQDDVYRRGSPFELFELLTSLVRRW

SEQ ID NO: 3248 - protein, 155 aa, Zea mays subsp. mays
  peptide (1)..(155): Ceres Seq. ID no. 13499084
  misc_feature (48)..(48): Xaa is any aa, unknown or other
  misc_feature (81)..(81): Xaa is any aa, unknown or other
MLLVSQAANGSLSARRCRRSRRGRPPPTPTRSSPTLASCAAAWRSPAXAPTKPRAAPRRPQPPRARAPPPPPPRTRSLSAXPTTACRSRASSRLRSPGMRPPSPSSSPTRSWVFWPAGTCSAFCCSLRLEGSAMACPSSTPRRSRRPTPSLLSGC

SEQ ID NO: 3249 - DNA, 925 bp, Zea mays subsp. mays
  misc_feature (1)..(925): Ceres Seq. ID no. 12351451
  misc_feature (1)..(925): Ortholog of  Ceres SEQ ID NO 15176514 as cited in SEQ ID NO 1114
  misc_feature (1)..(925): Ortholog of  Ceres SEQ ID NO 15173688 as cited in SEQ ID NO 61918
  misc_feature (1)..(925): Ortholog of  Ceres SEQ ID NO 13662513 as cited in SEQ ID NO 63303
  misc_feature (1)..(925): Ortholog of  Ceres SEQ ID NO 12616929 as cited in SEQ ID NO 63962
  misc_feature (1)..(925): Ortholog of  Ceres SEQ ID NO 15225803 as cited in SEQ ID NO 67623
  misc_feature (1)..(925): Ortholog of  Ceres SEQ ID NO 15174088 as cited in SEQ ID NO 0
gccagttcacctccgcctccgctcctcccctccccctcccgtcctgccatggccaccgcagcacgcgccctcgtcgccgcacgcccggcacggccgctgctgccgtctcggcgcctcccgtcctcctcttccatccgtcccgcgcggcaacgtgctggcgtcgggtgcgtccgctgcatggctcggcggccggattccacctattccccgctgcgttcgggccagggcggtgaccgtgcaccgactgaaatggcgcctctgttccctggctgcgactacgagcactggctcatcgtcatggacaagcccgggggcgagggcgccaccaagcagcaaatgatagattgttacatccagacccttgcccaggtggtagggagtgaagaggaggcgaagaagaggatatataatgtgtcctgcgagcgctattttggattcggatgcgaaattgacgaggagacctcccaacaaactcgaaggccttccaggggttctttttgtgcttcctgactcttacgttgatgctgagaacaaggattatggtgctgagttatttgtgaacggtgaaatcgttcagcgatctccagaaaggcagagaagggtggagccagtgcctcagagagctcaggatcgaccacggtacagtgaccggacccgctatgtgaagcggagggagaaccaatcttaccagagatgatgtttccgtctctgaagatgtaaaatgtcacggtttccacaagtgtccaaatgcggtactgaagatgcagcagcaactccccactactcatatgagaatggcatccgttctgtttgccgcgcattttaagctgtatatgcttattatgcatttgggcttgtacctcagtcgatatgaacgatgtatcctttgaactaacgcattataatttttgaaaccgttttagcc

SEQ ID NO: 3250 - protein, 169 aa, Zea mays subsp. mays
  peptide (1)..(169): Ceres Seq. ID no. 12351452
ASSPPPPLLPSPSRPAMATAARALVAARPARPLLPSRRLPSSSSIRPARQRAGVGCVRCMARRPDSTYSPLRSGQGGDRAPTEMAPLFPGCDYEHWLIVMDKPGGEGATKQQMIDCYIQTLAQVVGSEEEAKKRIYNVSCERYFGFGCEIDEETSQQTRRPSRGSFCAS

SEQ ID NO: 3251 - protein, 153 aa, Zea mays subsp. mays
  peptide (1)..(153): Ceres Seq. ID no. 12351453
MATAARALVAARPARPLLPSRRLPSSSSIRPARQRAGVGCVRCMARRPDSTYSPLRSGQGGDRAPTEMAPLFPGCDYEHWLIVMDKPGGEGATKQQMIDCYIQTLAQVVGSEEEAKKRIYNVSCERYFGFGCEIDEETSQQTRRPSRGSFCAS

SEQ ID NO: 3252 - protein, 112 aa, Zea mays subsp. mays
  peptide (1)..(112): Ceres Seq. ID no. 12351454
PVHLRLRSSPPPPVLPWPPQHAPSSPHARHGRCCRLGASRPPLPSVPRGNVLASGASAAWLGGRIPPIPRCVRARAVTVHRLKWRLCSLAATTSTGSSSWTSPGARAPPSSK

SEQ ID NO: 3253 - DNA, 748 bp, Zea mays subsp. mays
  misc_feature (1)..(748): Ceres Seq. ID no. 12405725
  misc_feature (1)..(748): Ortholog of  Ceres SEQ ID NO 15171235 as cited in SEQ ID NO 52469
  misc_feature (1)..(748): Ortholog of  Ceres SEQ ID NO 15172705 as cited in SEQ ID NO 56069
  misc_feature (1)..(748): Ortholog of  Ceres SEQ ID NO 12627215 as cited in SEQ ID NO 60976
  misc_feature (1)..(748): Ortholog of  Ceres SEQ ID NO 13654980 as cited in SEQ ID NO 63094
  misc_feature (1)..(748): Ortholog of  Ceres SEQ ID NO 15174852 as cited in SEQ ID NO 67166
  misc_feature (1)..(748): Ortholog of  Ceres SEQ ID NO 12589584 as cited in SEQ ID NO 0
  misc_feature (1)..(748): Ortholog of  Ceres SEQ ID NO 12635657 as cited in SEQ ID NO 0
  misc_feature (1)..(748): Ortholog of  Ceres SEQ ID NO 12635879 as cited in SEQ ID NO 0
  misc_feature (1)..(748): Ortholog of  Ceres SEQ ID NO 13599649 as cited in SEQ ID NO 0
  misc_feature (1)..(748): Ortholog of  Ceres SEQ ID NO 14309205 as cited in SEQ ID NO 0
  misc_feature (1)..(748): Ortholog of  Ceres SEQ ID NO 15177492 as cited in SEQ ID NO 0
aacttaaccactactccgcatctactgacgccgccgccgccgccgccgcgctctctccgtcggactagtcagagcatccgtcatggcgaagaaccccaaggtgttcttcgacatcctcatcggcaagtccaaggccgggcgggtcgtgatggagctcttcgccgacaaggtgcccaagacggccgagaacttccgctgcctgtgcacgggcgagaagggcctgggctccgcggggaagccgctgcactacaagggctcggccttccaccgcgtcatcccgggcttcatgtgccagggcggcgacttcacccggggcaacggcacgggcggcgagtccatctacggcgccaggttcgccgacgagaacttcaagctgcgccacacgggacccggcgtgctctccatggccaacgcggggcccgacaccaacggctcccagttcttcatctgcaccgcgcagacgccctggcttgacggcaagcacgtcgtcttcggcaaggtcgtcgatggctacgccgtcgtggacaagatggaggctgtcggttctcagtcaggtgccacggccgagagcgtacgcatcgaggactgcggccagcttgccgacgactgagggcctcgctgtgtccgattgtaaccaaatgaatgatcaataaatttctttctttcattcttttgtttctgtggagatggataccggcctgtagttaattaaccaatataaactatggatggatggggcggtgatttg

SEQ ID NO: 3254 - protein, 175 aa, Zea mays subsp. mays
  peptide (1)..(175): Ceres Seq. ID no. 12405726
MAKNPKVFFDILIGKSKAGRVVMELFADKVPKTAENFRCLCTGEKGLGSAGKPLHYKGSAFHRVIPGFMCQGGDFTRGNGTGGESIYGARFADENFKLRHTGPGVLSMANAGPDTNGSQFFICTAQTPWLDGKHVVFGKVVDGYAVVDKMEAVGSQSGATAESVRIEDCGQLADD

SEQ ID NO: 3255 - protein, 157 aa, Zea mays subsp. mays
  peptide (1)..(157): Ceres Seq. ID no. 12405727
NLTTTPHLLTPPPPPPRSLRRTSQSIRHGEEPQGVLRHPHRQVQGRAGRDGALRRQGAQDGRELPLPVHGREGPGLRGEAAALQGLGLPPRHPGLHVPGRRLHPGQRHGRRVHLRRQVRRRELQAAPHGTRRALHGQRGARHQRLPVLHLHRADALA

SEQ ID NO: 3256 - protein, 153 aa, Zea mays subsp. mays
  peptide (1)..(153): Ceres Seq. ID no. 12405728
MELFADKVPKTAENFRCLCTGEKGLGSAGKPLHYKGSAFHRVIPGFMCQGGDFTRGNGTGGESIYGARFADENFKLRHTGPGVLSMANAGPDTNGSQFFICTAQTPWLDGKHVVFGKVVDGYAVVDKMEAVGSQSGATAESVRIEDCGQLADD

SEQ ID NO: 3257 - DNA, 1712 bp, Zea mays subsp. mays
  misc_feature (1)..(1712): Ceres Seq. ID no. 12346894
  misc_feature (1)..(1712): Ortholog of  Ceres SEQ ID NO 14302321 as cited in SEQ ID NO 68547
acaaatcgggtttgccgtgcggcacttgcgtttcgggtcgggtacggacccgcaaaaagagctccgtcagttcctctacctcctctgtaggagcacacttgtttcggaaaggaacgcagattcacgccacgccgccgcctcaattatatggcgccggcgttctcggcacaggtccccgcgctccgacgggcagcactgcgcgtgcggtgggtcacggctgcgctgttctcatcggggattctcgccggcaacaagccgattctggtgcgtgacttcgtgaggtcagcgttgtacgaccccaaccatggctacttctccaagcgggcggggccggtgggcgttcttgacgccagcatccgcttcaaccagctcgaggggaggagtgcatatatacagcaccttgataagctgtataagaagcatgatatcgcttggtttactcccgtggagctctttaagccatggtatgcctacgcaatagcagcatcgattctgcgtacagcaaatctttcagtcccattgaagatatacgagattggtggtggctctggaacatgcgcaaagtgcatacttgattacatgatgctgaatgcgccaccaaaagtctacaatgatatgaaatacatctcagtagagattagctcctctcttgctgagaagcaattggaaactgttggtgaagtgcaaagccatttgtcaaagttcacggtggagcaccgggatgcaattaacagacctggatggggccgcacggatcctcacccatgttgggtgcttatgcttgaggtacttgacaatctaccacatgaccttgtctattcaccagatcaggtctctccatggatggaagtgtggattgaaaaagtaaaaggcagtttacaagcctccgaagtctataagccattacaagacccattgatttctcgctgtgttgatattattggcatgaatgaagacaaagcttctgtcagtgaaaaactagcatttgctgcaaaaggagttctatcaaaagtattcccaaagcctcgtagagcttggttgcccaccggctgcttgaaactaatggatactctacatcaagctttaccgagcatgtcccttattgcttcagacttcagctatcttccagacgttagcatacctggtgacagggctccattggtttcatcaaagaacgatggaaagacatcagatcatcgcaactactttgatgctcagggtgacgcggacatcttcttcccaaccgatttccggctcctggagcagatcgaccataactgcgctggcttctcaaaggagcagaagaatcccggcgcattcaaacccgtgaagaagaggagaacgatcatacttgatactgcagccttcatggaggagtttggcatgccgctgaagacgaggaccaaagacgggtataatccgcttctcgacgatttcaagaacacaaagttctatctcagcgtccctacacacaacgttcctacccatagcaggaggaactagtcttctttccttttgctgatgcgtcacgagtcaggaaaagacgtctgccaggctagaatcggtctgtcattttgagcagtctgaatttgcaagttttcttaccttaaggtgttgaaaattttatagtttctcttttttgtagaacaaagtttttattatcatttttgacattgatgcatgggtaataaaaggtggaagaagactgactg

SEQ ID NO: 3258 - protein, 451 aa, Zea mays subsp. mays
  peptide (1)..(451): Ceres Seq. ID no. 12346895
MAPAFSAQVPALRRAALRVRWVTAALFSSGILAGNKPILVRDFVRSALYDPNHGYFSKRAGPVGVLDASIRFNQLEGRSAYIQHLDKLYKKHDIAWFTPVELFKPWYAYAIAASILRTANLSVPLKIYEIGGGSGTCAKCILDYMMLNAPPKVYNDMKYISVEISSSLAEKQLETVGEVQSHLSKFTVEHRDAINRPGWGRTDPHPCWVLMLEVLDNLPHDLVYSPDQVSPWMEVWIEKVKGSLQASEVYKPLQDPLISRCVDIIGMNEDKASVSEKLAFAAKGVLSKVFPKPRRAWLPTGCLKLMDTLHQALPSMSLIASDFSYLPDVSIPGDRAPLVSSKNDGKTSDHRNYFDAQGDADIFFPTDFRLLEQIDHNCAGFSKEQKNPGAFKPVKKRRTIILDTAAFMEEFGMPLKTRTKDGYNPLLDDFKNTKFYLSVPTHNVPTHSRRN

SEQ ID NO: 3259 - protein, 307 aa, Zea mays subsp. mays
  peptide (1)..(307): Ceres Seq. ID no. 12346896
MMLNAPPKVYNDMKYISVEISSSLAEKQLETVGEVQSHLSKFTVEHRDAINRPGWGRTDPHPCWVLMLEVLDNLPHDLVYSPDQVSPWMEVWIEKVKGSLQASEVYKPLQDPLISRCVDIIGMNEDKASVSEKLAFAAKGVLSKVFPKPRRAWLPTGCLKLMDTLHQALPSMSLIASDFSYLPDVSIPGDRAPLVSSKNDGKTSDHRNYFDAQGDADIFFPTDFRLLEQIDHNCAGFSKEQKNPGAFKPVKKRRTIILDTAAFMEEFGMPLKTRTKDGYNPLLDDFKNTKFYLSVPTHNVPTHSRRN

SEQ ID NO: 3260 - protein, 306 aa, Zea mays subsp. mays
  peptide (1)..(306): Ceres Seq. ID no. 12346897
MLNAPPKVYNDMKYISVEISSSLAEKQLETVGEVQSHLSKFTVEHRDAINRPGWGRTDPHPCWVLMLEVLDNLPHDLVYSPDQVSPWMEVWIEKVKGSLQASEVYKPLQDPLISRCVDIIGMNEDKASVSEKLAFAAKGVLSKVFPKPRRAWLPTGCLKLMDTLHQALPSMSLIASDFSYLPDVSIPGDRAPLVSSKNDGKTSDHRNYFDAQGDADIFFPTDFRLLEQIDHNCAGFSKEQKNPGAFKPVKKRRTIILDTAAFMEEFGMPLKTRTKDGYNPLLDDFKNTKFYLSVPTHNVPTHSRRN

SEQ ID NO: 3261 - DNA, 1318 bp, Zea mays subsp. mays
  misc_feature (1)..(1318): Ceres Seq. ID no. 12356113
  misc_feature (1)..(1318): Ortholog of  Ceres SEQ ID NO 14304573 as cited in SEQ ID NO 53242
  misc_feature (1)..(1318): Ortholog of  Ceres SEQ ID NO 15171148 as cited in SEQ ID NO 58167
atccaatcgaagctctggaacctcctccactcccagcttccgccgacgctcgcttcagctgctgctttccttcccatccttcaacaggtgcaatttgcatttcccatggagctcactgattaataacgtcccttgggttcatctatgccggtaaagagggcgcatttgaagccacatgccgcagacatcaagaggaacccccatgtacatgagctttacaaattggtttaccgacttccggagaaccttagctggctgttggcaccaccagaaattcctaaaagacctgcctcaaagaagaaaaaacaaaaagacgaaatagtggccggtaacagctttggtgtgatcttggagtgggagggagttgttgtggatgatgatgatccagacttggagccccgggtttggtatgttctatcactagaagaggggaagtctttccctccagatgcattgctgaagaaaatcgagggaatgagaactgaccaggctattgcagaagtcttatgttggtcagaagattcagcagaaatccaaaggttggcaacacacaaggaggttatatatcaaaaactccaaggcggatactaccagctgcgaccacatgtgcttgatttcttgaacacccttgtgggttttgacattccaatagcaattgcagctcctcgctcaaggaagagccttgaagaagggatcaaaactgttggtctgcaaggctacttcgatgctataattgcattggatgacttctgcctagggaaacctgatggtgagatgtttgaagtcgcagcggagcaacttggtctggagccagatgtctgtgttgtgtttggtaactcaaacttgacgacggaatctgcacataacgctgggatgaggtgtgtggcagttgcaggccgacaccctgcctatgagctccaatcagcaaaccatgttgtgagatggcttgaccagctctctattgttgacttgcagaggcttgctaatggtgaagttattggtcgcaggggtagagaatctgacatggatatggaaattgtgattgaggaatgatgatgtttctgcaaaaatgacgcactaatatattgttgtgcttataatctgatacacctaagtaatgcgttacattttctaaacaggccaagcagtgcaagttccggactaaggatactctggagtttgcattaccttcctggtttgcttgtgatgaattggaattcgcctaaaactcttttagtcattagagttggaagtgaagacaactcccacccgtaacttgtgtatgtacagtatatatatgtattacctattcttcccc

SEQ ID NO: 3262 - protein, 302 aa, Zea mays subsp. mays
  peptide (1)..(302): Ceres Seq. ID no. 12356114
MPVKRAHLKPHAADIKRNPHVHELYKLVYRLPENLSWLLAPPEIPKRPASKKKKQKDEIVAGNSFGVILEWEGVVVDDDDPDLEPRVWYVLSLEEGKSFPPDALLKKIEGMRTDQAIAEVLCWSEDSAEIQRLATHKEVIYQKLQGGYYQLRPHVLDFLNTLVGFDIPIAIAAPRSRKSLEEGIKTVGLQGYFDAIIALDDFCLGKPDGEMFEVAAEQLGLEPDVCVVFGNSNLTTESAHNAGMRCVAVAGRHPAYELQSANHVVRWLDQLSIVDLQRLANGEVIGRRGRESDMDMEIVIEE

SEQ ID NO: 3263 - protein, 192 aa, Zea mays subsp. mays
  peptide (1)..(192): Ceres Seq. ID no. 12356115
MRTDQAIAEVLCWSEDSAEIQRLATHKEVIYQKLQGGYYQLRPHVLDFLNTLVGFDIPIAIAAPRSRKSLEEGIKTVGLQGYFDAIIALDDFCLGKPDGEMFEVAAEQLGLEPDVCVVFGNSNLTTESAHNAGMRCVAVAGRHPAYELQSANHVVRWLDQLSIVDLQRLANGEVIGRRGRESDMDMEIVIEE

SEQ ID NO: 3264 - DNA, 1338 bp, Zea mays subsp. mays
  misc_feature (1)..(1338): Ceres Seq. ID no. 12410332
  misc_feature (1)..(1338): Ortholog of  Ceres SEQ ID NO 14307022 as cited in SEQ ID NO 54437
aagcccattcgcgtcccgtcccgtcccgtcaaacaagcactcaaacctccctcccaagccctcttttttccctcgccgcggcgcaggcagagcagaggcagcagcatgccgccgttcgccgcccgcctggccgcaccggtcgccttggccgcgctgctgctcgccctcctgctcgcggcgccggcctcggccgccaacttcacctgcgccacggtgggcaaaacgtgccagtcggcgatcgggtacgcggtgcccaacggcgaccacgtacggggagctggtggcgcggttcaacgccaccacgacgctggcggagctgctgggcgccaacggcctccccgccacgacgccggcctcgacgccgctggcggccaaggccacggtgcgcgtgccgttccggtgccggtgcgggagcaacggcgtggggcagtcggacgggggacccttctacgtggtgtacccgctggacgggctggaccacatcgcgcgggaggtgttcggcgccttcgtcacctaccaggagatcgccaccgccaacaacatcaccaacgtcaacctcatcgtcgtcgggcagaagctcaggatcccgctgccctgcacctgcgaccaggtggacggcgccgacgtcatgcacttcgcctacagcgtcgccaagggggacgacccgcccggcatcgccgccaggttcggggtcaccgagaccacgctgctgagtgtgaataagatcaccgaccccaagaccagcctgcagcaggggcagatcctggatgtccccctccctgtgtgcaagtcatcggtcggcaacgcctcggctgactacaacctgctcgtcccgaacggcacctacgtgctcaccgccgacgactgcatccagtgcagctgcagcgcgagcaactacgagcaactgcactccggtgaaaggcggaaggtgcccggcggtgccgccgtgcagtggaggcctgacgctcgggcaggtcaacggcaccggttgcgcgtccaggatgtgcgcttacagcggttataccaacaccacgtccctcaccatacataccagccttgtgcctgcaaatgagactgcgtgccagaagggaggagctgcgagagcggagtttgccgggtccgtgttgaggacgtctctcatcgccttcatcatgtcgctgatcctcatctgcttgctatagacgttagagcagtagatggtgtattatatgccactgtcagatactcagattgctgttgtggtctattcattggcgattggtctagctgtttgaataaagcaaacattaaagtttgcatctgtgagtgaatacgtatttattagaattgggatgatcc

SEQ ID NO: 3265 - protein, 356 aa, Zea mays subsp. mays
  peptide (1)..(356): Ceres Seq. ID no. 12410333
SPFASRPVPSNKHSNLPPKPSFFPRRGAGRAEAAACRRSPPAWPHRSPWPRCCSPSCSRRRPRPPTSPAPRWAKRASRRSGTRCPTATTYGELVARFNATTTLAELLGANGLPATTPASTPLAAKATVRVPFRCRCGSNGVGQSDGGPFYVVYPLDGLDHIAREVFGAFVTYQEIATANNITNVNLIVVGQKLRIPLPCTCDQVDGADVMHFAYSVAKGDDPPGIAARFGVTETTLLSVNKITDPKTSLQQGQILDVPLPVCKSSVGNASADYNLLVPNGTYVLTADDCIQCSCSASNYEQLHSGERRKVPGGAAVQWRPDARAGQRHRLRVQDVRLQRLYQHHVPHHTYQPCACK

SEQ ID NO: 3266 - protein, 240 aa, Zea mays subsp. mays
  peptide (1)..(240): Ceres Seq. ID no. 12410334
KPIRVPSRPVKQALKPPSQALFFPSPRRRQSRGSSMPPFAARLAAPVALAALLLALLLAAPASAANFTCATVGKTCQSAIGYAVPNGDHVRGAGGAVQRHHDAGGAAGRQRPPRHDAGLDAAGGQGHGARAVPVPVREQRRGAVGRGTLLRGVPAGRAGPHRAGGVRRLRHLPGDRHRQQHHQRQPHRRRAEAQDPAALHLRPGGRRRRHALRLQRRQGGRPARHRRQVRGHRDHAAECE

SEQ ID NO: 3267 - protein, 236 aa, Zea mays subsp. mays
  peptide (1)..(236): Ceres Seq. ID no. 12410335
AHSRPVPSRQTSTQTSLPSPLFSLAAAQAEQRQQHAAVRRPPGRTGRLGRAAARPPARGAGLGRQLHLRHGGQNVPVGDRVRGAQRRPRTGSWWRGSTPPRRWRSCWAPTASPPRRRPRRRWRPRPRCACRSGAGAGATAWGSRTGDPSTWCTRWTGWTTSRGRCSAPSSPTRRSPPPTTSPTSTSSSSGRSSGSRCPAPATRWTAPTSCTSPTASPRGTTRPASPPGSGSPRPRC

SEQ ID NO: 3268 - DNA, 1719 bp, Zea mays subsp. mays
  misc_feature (1)..(1719): Ceres Seq. ID no. 12348980
  misc_feature (1)..(1719): Ortholog of  Ceres SEQ ID NO 13592852 as cited in SEQ ID NO 20709
  misc_feature (1)..(1719): Ortholog of  Ceres SEQ ID NO 13532807 as cited in SEQ ID NO 53012
  misc_feature (1)..(1719): Ortholog of  Ceres SEQ ID NO 14313425 as cited in SEQ ID NO 54973
  misc_feature (1)..(1719): Ortholog of  Ceres SEQ ID NO 13663060 as cited in SEQ ID NO 60964
  misc_feature (1)..(1719): Ortholog of  Ceres SEQ ID NO 13656849 as cited in SEQ ID NO 65764
  misc_feature (1)..(1719): Ortholog of  Ceres SEQ ID NO 13500573 as cited in SEQ ID NO 67431
  misc_feature (1)..(1719): Ortholog of  Ceres SEQ ID NO 13656501 as cited in SEQ ID NO 69206
cccggcccgcgcctcgctctctcttgtctcgcccgctagctcccatcccagcctcccaccgcgcccgcctgccccaacatcccccctccccgctccgctccacgcacggctccagatctgctacggcggcggccggtggacgccgcgccgcgcgtgccggaggcggtgacgtgagcggcggatcctgcccggccgtgccatcctggcgacgatgacagcgtaagcgggcggcggacgaccgcgtccccccggcccctactcccgaggtcattggcgtgtgctccttggcagaaaatggcgatgatggtggatccccccaatggcatggcaagtcaaggaaagcattactatactatgtggcagacactgtttgagatcgacaccaagtacgtgccgatcaagcccatcggaagaggagcttacggaatcgtttgctcatctgttaaccgcgagaccaatgaaaaagtcgcgataaaaaagataaacaacgtctttgacaaccgtgtggatgcgctaaggacgctgagagagctgaaactccttcggcacctgaggcacgagaatgttattgctctcaaggacataatgatgcctgcgcatagaaggagcttcaaggacgtttacttggtttatgagctcatggacactgatctgcatcaaataattaagtcatctcaaccactatccaatgaccactgccagtatttcctttttcagctgctccgaggcctgaagtacctccattcagccgggatactccacagagacctaaagccagggaacctcctggtcaacgcaaactgtgacctgaagatatgcgacttcgggctcgcccgcacgaacaacaccaagggccagttcatgacggagtacgtggtgacccgctggtacagggcacccgagctgctgctctgctgcgacaactacggcacgtccattgacgtctggtctgtggggtgcatattcgcggagctgcttggccgcaagccgatcttcccaggaaccgagtgcctgaaccagctcaagctcatcgtcaacgtcctcggcaccatgggcgaggccgacctcgcgttcatcgacaacccgaaggcccgcaagtacatcaagtcccttccgtacgccccgggcgcccccttcaccggcatgtaccctcaggcgcaccctctcgccatcgacctgctgcagaagatgctcgtgttcgacccgtccaagaggatcagcgtcaccgaggcgctggagcacccgtacatgtctccgctctatgacccgagcgcgaaccctcccgcgcaggtgccgatcgacctcgacatcgacgagaacctcggcgtcgacatgatcagggagatgatgtggcaggagatgatccactaccaccccgaggtcctcacgagaatcagcatgtgagtatgtgatgtgaccagacaggcagcaatgaaacatgtggacagaggtctgctgcgccaggatcatcacatgttcgcccttcttacgagcttaactgcgattacggcaccgagtcgaggtatcactacatgtatcggaaccgtcaggcggtctcttgtgtaaatatgcgctgaataagatgtgtggcaatctcttgttttttggttgtacatggacctcgctgttgtacgagtctgtgaagtggaaccctggtactaagacctgtaatttcagaccctaatctgttgtatggaaatctgaaggccttgactcccg

SEQ ID NO: 3269 - protein, 369 aa, Zea mays subsp. mays
  peptide (1)..(369): Ceres Seq. ID no. 12348981
MAMMVDPPNGMASQGKHYYTMWQTLFEIDTKYVPIKPIGRGAYGIVCSSVNRETNEKVAIKKINNVFDNRVDALRTLRELKLLRHLRHENVIALKDIMMPAHRRSFKDVYLVYELMDTDLHQIIKSSQPLSNDHCQYFLFQLLRGLKYLHSAGILHRDLKPGNLLVNANCDLKICDFGLARTNNTKGQFMTEYVVTRWYRAPELLLCCDNYGTSIDVWSVGCIFAELLGRKPIFPGTECLNQLKLIVNVLGTMGEADLAFIDNPKARKYIKSLPYAPGAPFTGMYPQAHPLAIDLLQKMLVFDPSKRISVTEALEHPYMSPLYDPSANPPAQVPIDLDIDENLGVDMIREMMWQEMIHYHPEVLTRISM

SEQ ID NO: 3270 - protein, 367 aa, Zea mays subsp. mays
  peptide (1)..(367): Ceres Seq. ID no. 12348982
MMVDPPNGMASQGKHYYTMWQTLFEIDTKYVPIKPIGRGAYGIVCSSVNRETNEKVAIKKINNVFDNRVDALRTLRELKLLRHLRHENVIALKDIMMPAHRRSFKDVYLVYELMDTDLHQIIKSSQPLSNDHCQYFLFQLLRGLKYLHSAGILHRDLKPGNLLVNANCDLKICDFGLARTNNTKGQFMTEYVVTRWYRAPELLLCCDNYGTSIDVWSVGCIFAELLGRKPIFPGTECLNQLKLIVNVLGTMGEADLAFIDNPKARKYIKSLPYAPGAPFTGMYPQAHPLAIDLLQKMLVFDPSKRISVTEALEHPYMSPLYDPSANPPAQVPIDLDIDENLGVDMIREMMWQEMIHYHPEVLTRISM

SEQ ID NO: 3271 - protein, 366 aa, Zea mays subsp. mays
  peptide (1)..(366): Ceres Seq. ID no. 12348983
MVDPPNGMASQGKHYYTMWQTLFEIDTKYVPIKPIGRGAYGIVCSSVNRETNEKVAIKKINNVFDNRVDALRTLRELKLLRHLRHENVIALKDIMMPAHRRSFKDVYLVYELMDTDLHQIIKSSQPLSNDHCQYFLFQLLRGLKYLHSAGILHRDLKPGNLLVNANCDLKICDFGLARTNNTKGQFMTEYVVTRWYRAPELLLCCDNYGTSIDVWSVGCIFAELLGRKPIFPGTECLNQLKLIVNVLGTMGEADLAFIDNPKARKYIKSLPYAPGAPFTGMYPQAHPLAIDLLQKMLVFDPSKRISVTEALEHPYMSPLYDPSANPPAQVPIDLDIDENLGVDMIREMMWQEMIHYHPEVLTRISM

SEQ ID NO: 3272 - DNA, 1291 bp, Zea mays subsp. mays
  misc_feature (1)..(1291): Ceres Seq. ID no. 12406180
  misc_feature (1)..(1291): Ortholog of  Ceres SEQ ID NO 12582601 as cited in SEQ ID NO 51064
  misc_feature (1)..(1291): Ortholog of  Ceres SEQ ID NO 14311671 as cited in SEQ ID NO 51251
  misc_feature (1)..(1291): Ortholog of  Ceres SEQ ID NO 14304791 as cited in SEQ ID NO 53562
  misc_feature (1)..(1291): Ortholog of  Ceres SEQ ID NO 14307355 as cited in SEQ ID NO 54610
  misc_feature (1)..(1291): Ortholog of  Ceres SEQ ID NO 13581092 as cited in SEQ ID NO 54771
  misc_feature (1)..(1291): Ortholog of  Ceres SEQ ID NO 13594298 as cited in SEQ ID NO 57803
  misc_feature (1)..(1291): Ortholog of  Ceres SEQ ID NO 14301894 as cited in SEQ ID NO 61677
  misc_feature (1)..(1291): Ortholog of  Ceres SEQ ID NO 13503476 as cited in SEQ ID NO 61978
  misc_feature (1)..(1291): Ortholog of  Ceres SEQ ID NO 12578438 as cited in SEQ ID NO 62201
  misc_feature (1)..(1291): Ortholog of  Ceres SEQ ID NO 12617675 as cited in SEQ ID NO 64656
atataaataaagtactcaagcaatcctcgagcctcaggcccaagcaaagcatccagcggancacaccacaccacccttggtccggcactagcactagctatccagtggagacgaagatggcgacggcgcggtggctgcaggttgccgccatggcggtggcgctgctggcggagtgggcgacggcggcggcgcctcggaagcccgtggacgtgccgttccagaagaactacgtgccgacgtgggcgcaggaccacatccactacatcgacggcgggcgggaggtgcagctgtacctggacaagtccaccggcacgggcttccagacgcggggctcctacctcttcggccacttcagcatgcacatgaagctcgtcggcggcgactccgcgggcaccgtcacggccttctacctgtcgtcgcagaactcgggagcacgacgagatcgacttcgagttcctgggcaaccggacggggcagccctacatcctgcagaccaacgtgttcaccggcggcaagggcgaccgcgagcagcggatctacctctggttcgaccccaccaaggagtaccactcctactccgtcctctggaacctctacatgatcgcgttcttcgtggacgacgtgccgatccgggtgttcaagaacacgagcgccgacctgggcgtgcggtacccgttcagccagccgatgaagctctactccagcctgtggaacgccgacgactgggcgacccgcggcgggcgcgagaagacggactggtccaacgcgcccttcgtcgcctcctaccgcggcttccacgtcgacggctgcgaggcctccgcggaggcgcgcttctgcgccacccagggcgcgcgctggtgggaccagccggagttcagggacctcgacgccgcgcagtaccgccgcctggccgaggtcaggcgccgctacaccatctacaactactgcaccgatcgcgaccgctacggcgccgccgtgccgcccgagtgcgcccgcgaccgcgacgtctgatgatgatgcgttgggccggcaagctgcttgatcgagagcagcctgtaatgtatgtatggtatggtattgttgtgtgtcaggttcgtcgtcgtgggtctgcagagacagagagagtccgatccggcgcgtacgtgtgcccgcgtgggcacatgcatacgtacatgcttgtgttgtactgtacgctcgtatctcctcacaccgaaatgaattgcgattaagtatcgaaatttcggcagcttatccatcatgtaatgagttcctctgcagtacttaaaactct

SEQ ID NO: 3273 - protein, 408 aa, Zea mays subsp. mays
  peptide (1)..(408): Ceres Seq. ID no. 12406181
  misc_feature (20)..(20): Xaa is any aa, unknown or other
INKVLKQSSSLRPKQSIQRXTPHHPWSGTSTSYPVETKMATARWLQVAAMAVALLAEWATAAAPRKPVDVPFQKNYVPTWAQDHIHYIDGGREVQLYLDKSTGTGFQTRGSYLFGHFSMHMKLVGGDSAGTVTAFYLSSQNSGARRDRLRVPGQPDGAALHPADQRVHRRQGRPRAADLPLVRPHQGVPLLLRPLEPLHDRVLRGRRADPGVQEHERRPGRAVPVQPADEALLQPVERRRLGDPRRAREDGLVQRALRRLLPRLPRRRLRGLRGGALLRHPGRALVGPAGVQGPRRRAVPPPGRGQAPLHHLQLLHRSRPLRRRRAARVRPRPRRLMMMRWAGKLLDREQPVMYVWYGIVVCQVRRRGSAETERVRSGAYVCPRGHMHTYMLVLYCTLVSPHTEMNCD

SEQ ID NO: 3274 - protein, 370 aa, Zea mays subsp. mays
  peptide (1)..(370): Ceres Seq. ID no. 12406182
MATARWLQVAAMAVALLAEWATAAAPRKPVDVPFQKNYVPTWAQDHIHYIDGGREVQLYLDKSTGTGFQTRGSYLFGHFSMHMKLVGGDSAGTVTAFYLSSQNSGARRDRLRVPGQPDGAALHPADQRVHRRQGRPRAADLPLVRPHQGVPLLLRPLEPLHDRVLRGRRADPGVQEHERRPGRAVPVQPADEALLQPVERRRLGDPRRAREDGLVQRALRRLLPRLPRRRLRGLRGGALLRHPGRALVGPAGVQGPRRRAVPPPGRGQAPLHHLQLLHRSRPLRRRRAARVRPRPRRLMMMRWAGKLLDREQPVMYVWYGIVVCQVRRRGSAETERVRSGAYVCPRGHMHTYMLVLYCTLVSPHTEMNCD

SEQ ID NO: 3275 - protein, 359 aa, Zea mays subsp. mays
  peptide (1)..(359): Ceres Seq. ID no. 12406183
MAVALLAEWATAAAPRKPVDVPFQKNYVPTWAQDHIHYIDGGREVQLYLDKSTGTGFQTRGSYLFGHFSMHMKLVGGDSAGTVTAFYLSSQNSGARRDRLRVPGQPDGAALHPADQRVHRRQGRPRAADLPLVRPHQGVPLLLRPLEPLHDRVLRGRRADPGVQEHERRPGRAVPVQPADEALLQPVERRRLGDPRRAREDGLVQRALRRLLPRLPRRRLRGLRGGALLRHPGRALVGPAGVQGPRRRAVPPPGRGQAPLHHLQLLHRSRPLRRRRAARVRPRPRRLMMMRWAGKLLDREQPVMYVWYGIVVCQVRRRGSAETERVRSGAYVCPRGHMHTYMLVLYCTLVSPHTEMNCD

SEQ ID NO: 3276 - DNA, 1481 bp, Zea mays subsp. mays
  misc_feature (1)..(1481): Ceres Seq. ID no. 12410320
  misc_feature (1)..(1481): Ortholog of  Ceres SEQ ID NO 13582332 as cited in SEQ ID NO 59890
  misc_feature (1)..(1481): Ortholog of  Ceres SEQ ID NO 13598278 as cited in SEQ ID NO 68456
gccaaccgatcctcctcctcctcgctcgacgagtcgtctgtgagaacaatggcaactgccgcgggtggagccaccgccggctcgcgccgtcgggcgctgctcctgatcgcgaactacgccgcgctgctggtggggtccgtctcgtcgagcctgctgtccaggttctacttcgcgcgaggcgggcggaaccggtgggtggtgacgctggtgcagtcggcgggcttcccactgctggtcgtcgccgtcctcgtcgccggccgccccgccgccgcgccgcgccccttcacgtggttctcgaggcggttcctcacggtgtgcctcgtcatcggcgcgctcatgggcgccaacaacctgctcttctcgtacagcacgtcgttcctgcccgtgtccacgtcgtcgctgctgctgtcgacgcagttggcgttcacgctcgtgctggccgccgtcatcgtccgccacccgctcaccttcgtcaacctcaatgccgtcgtgctcctgaccgtcagctccgtgctcctggcgctccgctcgggggactccggcgagaacccggacgggggcggcgcggccgcggcgcactacttcgccgggtacgtggtcacgctgggcgcggcggggctgttcgccgcgtacctgcccgtcatggagctcctgtaccgccaggccgtgtccggcgggttcgtcctggccgtggaggtgcaggcggtgatgcaggccatggcctcgctggtggcggcgatcgggctggcggccaagggaggcctgggcggcgacgtggcgcgctggaagggctcggcggcgctctactgggtcgtggtgtccaccctggtcctgacttggcaggcgtgcttcatgggcacggcgggggtgatctacctcacgtcgtcgctacacagcggcgtgtgcatgaccgccgtgctgacggcgaacgtgctgggcggcgtgttggtgttcggcgacccattcggcgccgagaagggcatcgcgaccgcgctctgcgcctggggcctcgcctcctacctctacggcgagtacaccaagaaaaagaaagaagaagaggatgaggccgtcgccgacgcgtccgcttccgacgccgacagcgtccggaagagccttacaggcggcgccggagacgagctagaagacgtctgaaaacaaactaaaggccacaggggaatgaaccgtgtgatcagggacgaagcaagaatggaaactgaaaagggtgtagctgcagttgttgagtcatgttagatcgatggattataggcaaagttacaagcaaccaaacttgtaactgatggccagctcttctggctgctagctagtagctattaatctagtcatgaggtttcactagcggtttaagtgatcagggtttagtactttagtgtagtgtggggtgggtggaatacaacatgtaaaccagctgttcctcctccttactcactgtcgtcatcaatattcaatagccgccgttgttg

SEQ ID NO: 3277 - protein, 383 aa, Zea mays subsp. mays
  peptide (1)..(383): Ceres Seq. ID no. 12410321
ANRSSSSSLDESSVRTMATAAGGATAGSRRRALLLIANYAALLVGSVSSSLLSRFYFARGGRNRWVVTLVQSAGFPLLVVAVLVAGRPAAAPRPFTWFSRRFLTVCLVIGALMGANNLLFSYSTSFLPVSTSSLLLSTQLAFTLVLAAVIVRHPLTFVNLNAVVLLTVSSVLLALRSGDSGENPDGGGAAAAHYFAGYVVTLGAAGLFAAYLPVMELLYRQAVSGGFVLAVEVQAVMQAMASLVAAIGLAAKGGLGGDVARWKGSAALYWVVVSTLVLTWQACFMGTAGVIYLTSSLHSGVCMTAVLTANVLGGVLVFGDPFGAEKGIATALCAWGLASYLYGEYTKKKKEEEDEAVADASASDADSVRKSLTGGAGDELEDV

SEQ ID NO: 3278 - protein, 367 aa, Zea mays subsp. mays
  peptide (1)..(367): Ceres Seq. ID no. 12410322
MATAAGGATAGSRRRALLLIANYAALLVGSVSSSLLSRFYFARGGRNRWVVTLVQSAGFPLLVVAVLVAGRPAAAPRPFTWFSRRFLTVCLVIGALMGANNLLFSYSTSFLPVSTSSLLLSTQLAFTLVLAAVIVRHPLTFVNLNAVVLLTVSSVLLALRSGDSGENPDGGGAAAAHYFAGYVVTLGAAGLFAAYLPVMELLYRQAVSGGFVLAVEVQAVMQAMASLVAAIGLAAKGGLGGDVARWKGSAALYWVVVSTLVLTWQACFMGTAGVIYLTSSLHSGVCMTAVLTANVLGGVLVFGDPFGAEKGIATALCAWGLASYLYGEYTKKKKEEEDEAVADASASDADSVRKSLTGGAGDELEDV

SEQ ID NO: 3279 - protein, 353 aa, Zea mays subsp. mays
  peptide (1)..(353): Ceres Seq. ID no. 12410323
QPILLLLARRVVCENNGNCRGWSHRRLAPSGAAPDRELRRAAGGVRLVEPAVQVLLRARRAEPVGGDAGAVGGLPTAGRRRPRRRPPRRRAAPLHVVLEAVPHGVPRHRRAHGRQQPALLVQHVVPARVHVVAAAVDAVGVHARAGRRHRPPPAHLRQPQCRRAPDRQLRAPGAPLGGLRREPGRGRRGRGALLRRVRGHAGRGGAVRRVPARHGAPVPPGRVRRVRPGRGGAGGDAGHGLAGGGDRAGGQGRPGRRRGALEGLGGALLGRGVHPGPDLAGVLHGHGGGDLPHVVATQRRVHDRRADGERAGRRVGVRRPIRRREGHRDRALRLGPRLLPLRRVHQEKERRRG

SEQ ID NO: 3280 - DNA, 1900 bp, Zea mays subsp. mays
  misc_feature (1)..(1900): Ceres Seq. ID no. 13493214
  misc_feature (1)..(1900): Ortholog of  Ceres SEQ ID NO 13664362 as cited in SEQ ID NO 66523
aacttcacataacggctgtgtcctgttcctgtagctgctctcttttatggttgatggttacgacctgaacagatcgatcgtccttcctgtcgtttcgttttctcgccggcagggcactgggtacgccgccgccgcctcaacgccaccacgctgccgccgcgccagttcgtcaccgcgagacacaagacacgtgcctcgcttccctcgggccggttggccgtggccggccgtcgctgttctgttcctatttcttggcaactccgcccgtttcacctccggaggaccgacagcgacggcgccagtagatagatgcactactgacgccactggccacctcgagttcgagtgccaagggacgccacgagaccaaccgtgaggacaggacaacggtcgcctttgcccgcggatccgcggatttcgtcttcttgggtgccatggatccagtcgccggcacggcggagcatcggggcccgttggaagtgcgcgcccgcgcgcccggcaagatcatcctcgcgggcgagcacgccgtcgtccacggctccgccgccgtcgccgctgccatcgatctctacaccaactcctccctcctcctccgccccgcaggcccaggagatggtggcggcgctggctccggcgcggtggagctggacctcagggactcgggcctcaccttctcgtggccgtgctcgcgcctccgcggggcgctgggggaggagatcagcgccaaccccggggctccggcgccgtgctcccctgaccagctggccgccattgccaggctcttgcaggaccaggagatccctgaggccaagatctggctctccgccggcctctccgccttccttttcctctacgcctccattttgggatgcaggcctggcaaggcagtggtgtcctcggacctgcccatgggcgcagggctcggctcatcagcggcattttgtgtctccatgtcgggggcgctattgactgctgctggtgcagtaagtgttggagcatgcatgggtgctgagggttgggaggtgttggagaagggtgctcttgagctggtcaaccaatgggcgttccaaggggaaaagattattcatggcaagccttctggcattgacaattccgtcagcacttttgggaaaatgatcaaattcaagaagggggaactgacaaaccttgagtcctggaacccagtcaaaatgcttattactgatacaagagttggtaggaacacaaaggcattggttgctggtgtgtctgaaagggcgtctaggcatccagatgctatggcttctgtcttccatgcagtgaactctattagtgaagagctttcaagcattgtcgagttagcagccgaggatgagatagccatcacctctaaggaggataagctagcggagcttatggagatgaaccaaggtttgcttcagtgtatgggagtcagccattcttctatagaaactgtgttgcggaccactctgaaatatagcttggtctcaaagctaactggagctggtggtggaggctgtgtgttgactctaatacccgacgttatcggccaatactgttctggagaaagtcaccacagatctcgaatctcacggttatcgctgcttcaaagttgaggttggtgggcgaggtctccaagtattccgtgtataacactcatcctatttcaaggagatgttgtaccaaacttagatggcttacctgcactgaagctgtttagattctcttcttgagttattccaagatcatgataggatattcttctcctaagcctagcggctagcaggttctgtatccagtacttgagttgctccaggattaggacattcttatgctatccctagcgatcttgtatcaaataagctcatagatgcatgatcattgctggtgtgattgttgt

SEQ ID NO: 3281 - protein, 393 aa, Zea mays subsp. mays
  peptide (1)..(393): Ceres Seq. ID no. 13493215
MDPVAGTAEHRGPLEVRARAPGKIILAGEHAVVHGSAAVAAAIDLYTNSSLLLRPAGPGDGGGAGSGAVELDLRDSGLTFSWPCSRLRGALGEEISANPGAPAPCSPDQLAAIARLLQDQEIPEAKIWLSAGLSAFLFLYASILGCRPGKAVVSSDLPMGAGLGSSAAFCVSMSGALLTAAGAVSVGACMGAEGWEVLEKGALELVNQWAFQGEKIIHGKPSGIDNSVSTFGKMIKFKKGELTNLESWNPVKMLITDTRVGRNTKALVAGVSERASRHPDAMASVFHAVNSISEELSSIVELAAEDEIAITSKEDKLAELMEMNQGLLQCMGVSHSSIETVLRTTLKYSLVSKLTGAGGGGCVLTLIPDVIGQYCSGESHHRSRISRLSLLQS

SEQ ID NO: 3282 - protein, 235 aa, Zea mays subsp. mays
  peptide (1)..(235): Ceres Seq. ID no. 13493216
MGAGLGSSAAFCVSMSGALLTAAGAVSVGACMGAEGWEVLEKGALELVNQWAFQGEKIIHGKPSGIDNSVSTFGKMIKFKKGELTNLESWNPVKMLITDTRVGRNTKALVAGVSERASRHPDAMASVFHAVNSISEELSSIVELAAEDEIAITSKEDKLAELMEMNQGLLQCMGVSHSSIETVLRTTLKYSLVSKLTGAGGGGCVLTLIPDVIGQYCSGESHHRSRISRLSLLQS

SEQ ID NO: 3283 - protein, 221 aa, Zea mays subsp. mays
  peptide (1)..(221): Ceres Seq. ID no. 13493217
MSGALLTAAGAVSVGACMGAEGWEVLEKGALELVNQWAFQGEKIIHGKPSGIDNSVSTFGKMIKFKKGELTNLESWNPVKMLITDTRVGRNTKALVAGVSERASRHPDAMASVFHAVNSISEELSSIVELAAEDEIAITSKEDKLAELMEMNQGLLQCMGVSHSSIETVLRTTLKYSLVSKLTGAGGGGCVLTLIPDVIGQYCSGESHHRSRISRLSLLQS

SEQ ID NO: 3284 - DNA, 1565 bp, Zea mays subsp. mays
  misc_feature (1)..(1565): Ceres Seq. ID no. 12356044
  misc_feature (1)..(1565): Ortholog of  Ceres SEQ ID NO 15171275 as cited in SEQ ID NO 51428
  misc_feature (1)..(1565): Ortholog of  Ceres SEQ ID NO 14307678 as cited in SEQ ID NO 59456
  misc_feature (1)..(1565): Ortholog of  Ceres SEQ ID NO 13586716 as cited in SEQ ID NO 0
gccgcaacgaattcccagtctccagccaaccaccgcagacaagatcctctcttccgcgtccccaaaccctcgagttcgcacgggctccggccagattcgcgcagtctaagcttcgaatcggcgcatggaggcggcagcagtagccgcggcgctcaggtcgcctaccgccaccaccgccgccgccgccgctggccccacgtggcggcccgctgccccgggcgccgcctcgctcgcctttgaccggagacgcagcttcgccttcggctccgtcaagggtctcgggcggcagcagcagctcacctctaggtctactaggaggcgaagcagtgtggtcagggcatcctggtccccctcggagtctctgccaccgtcctcgccgatcgcgcctctcaggatggaatcgccggcggggcagctactctcgcaaatcctgcacacgcacccgcacttgctgtctgccgctgccgagcagcagctcgagcagctccagactgaccgcgaggccgacaaggagaaggataaggagagcgatgctggcgacaagctggctccgacaggtggcaacctcgtgctgtacaggcggattgctgaagtaaaagagaaggaacggagaaggactttggaggagatactctatgctctggttgttcagaagttcgttgaagctggtgtctctctggttccagcactctcacgctccaccgatccttctggaagagttgatcagtgggcagaaactgtggaagaaaatcttcaacgtctgcactcgcacgaggcctatgaaatgatcgagaatcacctcaccctcattctggggcagcgtcaaggtgacgccactatcgcagccataagtaagctccgtgttggccaggtctatgctgcatctgtgatgtacggttatttcctgaagagagttgaccagaggttccagctcgagaagacaatgaagggcctcccttggggatcagaagaggaagacagcgctttgaatcaagttatgatgaccgacttgatgccttcagctcagacttctagctctcatccagagatgggctcgtggaccgcgcctgccttcagcacaggagggcccagccaatctatcaagccttgccgccttaggtcgtatgtcatgtcgtttgattccgatacgctccagaggtatgcgacagtcaggtcaaaggaggccttcggcatcattgagaagcacacggaagcgctatttgggaagccagagattgtgatcacacctgaaggcacccttgattcttccaaggatgagcatattaggataagctttgctgggctgagaaggctgatcctggaggctgttaccttcggatcgttcctctgggacgttgagagctttgtggattcccggtaccatttcgtgaccagctaagatggtcatcctaagtgaagaacgattcatggtttacggatcttgtctcacaatgtctatgggcttcggaaaggctgttgtacaatgatgttagactgttaccactccccttaggccatgtttttcaccgttaatatatgtgaattggatggtattgagttgattt

SEQ ID NO: 3285 - protein, 424 aa, Zea mays subsp. mays
  peptide (1)..(424): Ceres Seq. ID no. 12356045
MEAAAVAAALRSPTATTAAAAAGPTWRPAAPGAASLAFDRRRSFAFGSVKGLGRQQQLTSRSTRRRSSVVRASWSPSESLPPSSPIAPLRMESPAGQLLSQILHTHPHLLSAAAEQQLEQLQTDREADKEKDKESDAGDKLAPTGGNLVLYRRIAEVKEKERRRTLEEILYALVVQKFVEAGVSLVPALSRSTDPSGRVDQWAETVEENLQRLHSHEAYEMIENHLTLILGQRQGDATIAAISKLRVGQVYAASVMYGYFLKRVDQRFQLEKTMKGLPWGSEEEDSALNQVMMTDLMPSAQTSSSHPEMGSWTAPAFSTGGPSQSIKPCRLRSYVMSFDSDTLQRYATVRSKEAFGIIEKHTEALFGKPEIVITPEGTLDSSKDEHIRISFAGLRRLILEAVTFGSFLWDVESFVDSRYHFVTS

SEQ ID NO: 3286 - protein, 334 aa, Zea mays subsp. mays
  peptide (1)..(334): Ceres Seq. ID no. 12356046
MESPAGQLLSQILHTHPHLLSAAAEQQLEQLQTDREADKEKDKESDAGDKLAPTGGNLVLYRRIAEVKEKERRRTLEEILYALVVQKFVEAGVSLVPALSRSTDPSGRVDQWAETVEENLQRLHSHEAYEMIENHLTLILGQRQGDATIAAISKLRVGQVYAASVMYGYFLKRVDQRFQLEKTMKGLPWGSEEEDSALNQVMMTDLMPSAQTSSSHPEMGSWTAPAFSTGGPSQSIKPCRLRSYVMSFDSDTLQRYATVRSKEAFGIIEKHTEALFGKPEIVITPEGTLDSSKDEHIRISFAGLRRLILEAVTFGSFLWDVESFVDSRYHFVTS

SEQ ID NO: 3287 - DNA, 1446 bp, Zea mays subsp. mays
  misc_feature (1)..(1446): Ceres Seq. ID no. 12407308
  misc_feature (1)..(1446): Ortholog of  Ceres SEQ ID NO 13598326 as cited in SEQ ID NO 68812
ctttattttgcgaggagggggcacaacatctcagacctccagtcttcgagtcctcgttgtgcctctcttgatctcctcgcgtccatggctcctgtgcgaggtgccaagaagaggaagcggccggagaagcccgccccggcgcctactccagggttgccgctgccgccgctgccggacggtagcgattggtggggcgtcttctaccgaagggttgcaggacattccccttttccaagagaacaccagaacatggagtctgtcctgaagatgtcaagaagaaccttcgactacatctgctcacttgttaagaaggacctgacaacaaagacatacggtttcagaaacttcaggtttggtgacaagaaagtccttggggtggaggatcaggtggcggtggctctgatgaggctgactactggtgagtcgctgcagaacataggaatgtggtttggcatgaaccactctgccatctcgaacatcacatggcggttcatcgagtccgtggaggagcgtgccatctgccacctgaaatggccgagccctgaggagatggcgaccatcaagacaaggtttgacaaggtttacgggctccctaactgctgcggcgccattgacaccacacacatcctcatgtgttcctcggctcagcccaacagcaaggtctggctggacaatgagaacaaaaacagcatggtgctgcaggccgttgtggatgcagacttgcggttcagagacgtcgtcagtggctggcctgggagcatggacgacacgtgcatccttcgcacttcaggcctgtacaggttgtgtgagaagggcctcaggcttggggggcagatggagcttcccggaggttccgcggttagggagtacctagtcggagatgcaagctacccgctacttccctggctcatgaccccgtaccgggaacatggcctccaggcggccaaggtggaattcaacaagcggcacacggccgcggcggcggtggtgcagaccgcattggcgacgctcaaagggaggtggcgtgtcattcagggagagctgtggaggcctgacaaacaccggctgccacggatcatctttgtctgctgcttgataaccaacatcatcatcgacatggaagggactccaagcagagacgaactggtttcaggcaaccatgaccttggctacaagcagcagttcagtgacgccgcagatgacaatgcaatcaagcagagagacgacctgtctcgacatgtcgacaatgcaatcaagcggagagacgatctgtctcaccatgtcaccgccggcgagtaaacactcaccgtcaccctttgctttttgcacccattaatataaaaaacagggatacaaaattgtaaggtgaatttttagcagattccaataatgttttggtttcagggagacattaccatcttaaacaaagtgtagccctaatttgcc

SEQ ID NO: 3288 - protein, 432 aa, Zea mays subsp. mays
  peptide (1)..(432): Ceres Seq. ID no. 12407309
LYFARRGHNISDLQSSSPRCASLDLLASMAPVRGAKKRKRPEKPAPAPTPGLPLPPLPDGSDWWGVFYRRVAGHSPFPREHQNMESVLKMSRRTFDYICSLVKKDLTTKTYGFRNFRFGDKKVLGVEDQVAVALMRLTTGESLQNIGMWFGMNHSAISNITWRFIESVEERAICHLKWPSPEEMATIKTRFDKVYGLPNCCGAIDTTHILMCSSAQPNSKVWLDNENKNSMVLQAVVDADLRFRDVVSGWPGSMDDTCILRTSGLYRLCEKGLRLGGQMELPGGSAVREYLVGDASYPLLPWLMTPYREHGLQAAKVEFNKRHTAAAAVVQTALATLKGRWRVIQGELWRPDKHRLPRIIFVCCLITNIIIDMEGTPSRDELVSGNHDLGYKQQFSDAADDNAIKQRDDLSRHVDNAIKRRDDLSHHVTAGE

SEQ ID NO: 3289 - protein, 404 aa, Zea mays subsp. mays
  peptide (1)..(404): Ceres Seq. ID no. 12407310
MAPVRGAKKRKRPEKPAPAPTPGLPLPPLPDGSDWWGVFYRRVAGHSPFPREHQNMESVLKMSRRTFDYICSLVKKDLTTKTYGFRNFRFGDKKVLGVEDQVAVALMRLTTGESLQNIGMWFGMNHSAISNITWRFIESVEERAICHLKWPSPEEMATIKTRFDKVYGLPNCCGAIDTTHILMCSSAQPNSKVWLDNENKNSMVLQAVVDADLRFRDVVSGWPGSMDDTCILRTSGLYRLCEKGLRLGGQMELPGGSAVREYLVGDASYPLLPWLMTPYREHGLQAAKVEFNKRHTAAAAVVQTALATLKGRWRVIQGELWRPDKHRLPRIIFVCCLITNIIIDMEGTPSRDELVSGNHDLGYKQQFSDAADDNAIKQRDDLSRHVDNAIKRRDDLSHHVTAGE

SEQ ID NO: 3290 - protein, 349 aa, Zea mays subsp. mays
  peptide (1)..(349): Ceres Seq. ID no. 12407311
MESVLKMSRRTFDYICSLVKKDLTTKTYGFRNFRFGDKKVLGVEDQVAVALMRLTTGESLQNIGMWFGMNHSAISNITWRFIESVEERAICHLKWPSPEEMATIKTRFDKVYGLPNCCGAIDTTHILMCSSAQPNSKVWLDNENKNSMVLQAVVDADLRFRDVVSGWPGSMDDTCILRTSGLYRLCEKGLRLGGQMELPGGSAVREYLVGDASYPLLPWLMTPYREHGLQAAKVEFNKRHTAAAAVVQTALATLKGRWRVIQGELWRPDKHRLPRIIFVCCLITNIIIDMEGTPSRDELVSGNHDLGYKQQFSDAADDNAIKQRDDLSRHVDNAIKRRDDLSHHVTAGE

SEQ ID NO: 3291 - DNA, 1331 bp, Zea mays subsp. mays
  misc_feature (1)..(1331): Ceres Seq. ID no. 12352196
  misc_feature (1)..(1331): Ortholog of  Ceres SEQ ID NO 14311579 as cited in SEQ ID NO 51717
aaaaaggggaagttctcgccagcgtgctgccttgcaagctgctaactagaataggaattcgacgtcgcccccgcccccccctgtgaaaattcgtgatgcggagaacagctaccgccgccctcgtcctcgtccccctcctcgctgcggcggtacagacctccgccctgcctttcatcgtcctgcacgggattggggaccagtgcgccaaccatggcgttgccaagttcactaaacttctcgccgattggtccggctccgacggctactgcctagagattggcagaggaacatgggactcttgggtcatgcctcttcaacaacaggctgatataatctgcaacaaggtcaaggaaatgaaacaactgagaggtggctacaacatagttggtctgtctcaggggaacttgattggtcgagcagtggttgagtactgtgatgatggaccgccggtcaagaatttcatctctctaggaggtcctcatgctggtaccgcttcagtgcctctttgtggttctggatttttttgcattattgttgatgctctgatcaaattggagatctactcagactatgtgcaggaacatcttgcacctagtggctacctcaaaatcccaactgatatggcagattatctgaagagttgtaggtttcttccaaaacttaacaatgaaattccagataaaagaaatgccacctacaaggaaagattcagtagcttagagaatttggttctgattatgtttcaggatgatgcagtcctgataccacgagaaacggcatggtttggttactaccctgatggagcctttgatccagttctaccacctcagaagacgaaactgtatgaggaagactggattggtttgaagacactggatgaagcagggcgggtgaagtttgtgtctgtgccgggaggtcatcttggtatctccaaaggtgacatgaagaagtacattgtgccttacctgacaaacaaaaaggcatcggtgacggtttctgatttgctagttgccatttggcacgctgtgcttgggctggcactggcagagggtgatgacgctgttttgatttgatgcatgggcttccgacagtggcttggattgttacgctgcctctgcttggttggcttggcactcagtcacaaataagattcatctcatctcatattctgttctgttggaaggccctttgattcatggtcacagaaataacagaatgcatgcatgcatgcatccaactagctagctagcttatagtcggagacaatctgtgcggtgcagctagttaattatctatctatacagggcaggcccatgccatgagtattgttg

SEQ ID NO: 3292 - protein, 325 aa, Zea mays subsp. mays
  peptide (1)..(325): Ceres Seq. ID no. 12352197
MRRTATAALVLVPLLAAAVQTSALPFIVLHGIGDQCANHGVAKFTKLLADWSGSDGYCLEIGRGTWDSWVMPLQQQADIICNKVKEMKQLRGGYNIVGLSQGNLIGRAVVEYCDDGPPVKNFISLGGPHAGTASVPLCGSGFFCIIVDALIKLEIYSDYVQEHLAPSGYLKIPTDMADYLKSCRFLPKLNNEIPDKRNATYKERFSSLENLVLIMFQDDAVLIPRETAWFGYYPDGAFDPVLPPQKTKLYEEDWIGLKTLDEAGRVKFVSVPGGHLGISKGDMKKYIVPYLTNKKASVTVSDLLVAIWHAVLGLALAEGDDAVLI

SEQ ID NO: 3293 - protein, 255 aa, Zea mays subsp. mays
  peptide (1)..(255): Ceres Seq. ID no. 12352198
MPLQQQADIICNKVKEMKQLRGGYNIVGLSQGNLIGRAVVEYCDDGPPVKNFISLGGPHAGTASVPLCGSGFFCIIVDALIKLEIYSDYVQEHLAPSGYLKIPTDMADYLKSCRFLPKLNNEIPDKRNATYKERFSSLENLVLIMFQDDAVLIPRETAWFGYYPDGAFDPVLPPQKTKLYEEDWIGLKTLDEAGRVKFVSVPGGHLGISKGDMKKYIVPYLTNKKASVTVSDLLVAIWHAVLGLALAEGDDAVLI

SEQ ID NO: 3294 - protein, 239 aa, Zea mays subsp. mays
  peptide (1)..(239): Ceres Seq. ID no. 12352199
MKQLRGGYNIVGLSQGNLIGRAVVEYCDDGPPVKNFISLGGPHAGTASVPLCGSGFFCIIVDALIKLEIYSDYVQEHLAPSGYLKIPTDMADYLKSCRFLPKLNNEIPDKRNATYKERFSSLENLVLIMFQDDAVLIPRETAWFGYYPDGAFDPVLPPQKTKLYEEDWIGLKTLDEAGRVKFVSVPGGHLGISKGDMKKYIVPYLTNKKASVTVSDLLVAIWHAVLGLALAEGDDAVLI

SEQ ID NO: 3295 - DNA, 1030 bp, Zea mays subsp. mays
  misc_feature (1)..(1030): Ceres Seq. ID no. 12361972
  misc_feature (1)..(1030): Ortholog of  Ceres SEQ ID NO 13584519 as cited in SEQ ID NO 64685
cccagattttcccgcgttcgtggtctccactctccagttctccgttccccaaccccaacctagcatccttgcatcccggggctcagttagcgttgccgccgcaccgtactacacctccggtggccggtgcgcccatttcccgccgatcaagcgcgatggcctcgacgagggatctagccatagcttctctctcagctgcgaccggcgccgttgttgccgccgctgcactgcgcctcttgtcttcccgcagaacatcctccgtcagaccccagaacctccccgccgccgctaacggatctgcctccgagcgcccgctggctcagtcccccttcgatcctgtcaagagggaaggatatatttcctgggacgactacttcatggcgatcgccttcctttcggctgagcgatctaaggatcctaaccggcaggttggagcatgcttggttagccaagagggaataatcctaggaattggctacaatggcttccctagaggttgttccgatgacaagcttccttgggcaaagaaatctgcaagtggagatccattagagacaaaattcccctacgttgtccatgctgaggttaatgcaattctaaataccaaccatgcttcagcggctggacagaaattatatgtcaccatgttcccatgcaatgaatgtgccaagattattattcagtcaggcgtatctgaggtcatatatttcgttgaaaaaaagattgacaactcagctcacgtttatgttgcctctcacaagctattgtcgatggctggtgtcaaggtcaggaagcatcagccccagatggcgcaaataccgatccagttccaggagccatgaagccggtactagttccagccttccagaagcactagtgagcgaataaacagtgcaagatacctgttgaccgcggcacctgtgacaaccgacaatggccgacccgcagcggtctcggtatgcggcgtcgatccctctccctccctcagaggctgttgtaaaactatagctagaatgagtaaagtttggcg

SEQ ID NO: 3296 - protein, 279 aa, Zea mays subsp. mays
  peptide (1)..(279): Ceres Seq. ID no. 12361973
QIFPRSWSPLSSSPFPNPNLASLHPGAQLALPPHRTTPPVAGAPISRRSSAMASTRDLAIASLSAATGAVVAAAALRLLSSRRTSSVRPQNLPAAANGSASERPLAQSPFDPVKREGYISWDDYFMAIAFLSAERSKDPNRQVGACLVSQEGIILGIGYNGFPRGCSDDKLPWAKKSASGDPLETKFPYVVHAEVNAILNTNHASAAGQKLYVTMFPCNECAKIIIQSGVSEVIYFVEKKIDNSAHVYVASHKLLSMAGVKVRKHQPQMAQIPIQFQEP

SEQ ID NO: 3297 - protein, 228 aa, Zea mays subsp. mays
  peptide (1)..(228): Ceres Seq. ID no. 12361974
MASTRDLAIASLSAATGAVVAAAALRLLSSRRTSSVRPQNLPAAANGSASERPLAQSPFDPVKREGYISWDDYFMAIAFLSAERSKDPNRQVGACLVSQEGIILGIGYNGFPRGCSDDKLPWAKKSASGDPLETKFPYVVHAEVNAILNTNHASAAGQKLYVTMFPCNECAKIIIQSGVSEVIYFVEKKIDNSAHVYVASHKLLSMAGVKVRKHQPQMAQIPIQFQEP

SEQ ID NO: 3298 - protein, 154 aa, Zea mays subsp. mays
  peptide (1)..(154): Ceres Seq. ID no. 12361975
MAIAFLSAERSKDPNRQVGACLVSQEGIILGIGYNGFPRGCSDDKLPWAKKSASGDPLETKFPYVVHAEVNAILNTNHASAAGQKLYVTMFPCNECAKIIIQSGVSEVIYFVEKKIDNSAHVYVASHKLLSMAGVKVRKHQPQMAQIPIQFQEP

SEQ ID NO: 3299 - DNA, 1628 bp, Zea mays subsp. mays
  misc_feature (1)..(1628): Ceres Seq. ID no. 13498801
  misc_feature (1)..(1628): Ortholog of  Ceres SEQ ID NO 15176596 as cited in SEQ ID NO 55168
  misc_feature (1)..(1628): Ortholog of  Ceres SEQ ID NO 14301576 as cited in SEQ ID NO 62362
gcagcagccactcgctctccccacctcgtctctcttccactcatcccctccctcgccccttcgcctcgcctctcttcttcggatcgagcagcagtactgcactgcatgccgccgatacaaatcccatcctctccctcctctactgcacctgcaccacagtagctagctagctatctttgctacggcggctctgtaatctggtccactagcgctccattcgaccccacccacagccatggctgccgtgaccgcggcggccgtctctctgccctcctcctcctcctcccctgccgccgccaaggccaaggcgtccgcgtccgcgtccccgtcgtctccatgcggccacctccagttcccgcggcggcacggcggcccgcgcgcggtgcggctgcgcgtgcaggtgtccaccaccgagaccgcggaggcggagccggtcaagaagctggagaaggtgtccaagaagcaggaggaggggctcgtcaccaacaagtacaagcccaaggagccgtacgtcgggaggtgcctgctcaacaccaggatcaccggcgaccaagcgcccggggagacgtggcacatggtcttcagcacagaaggcgaggtcccctacagagagggccagtccatcggcgtcatcgcggatggcgaggacaagaacggcaagccgcacaagctcaggctctactccatcgccagcagcgccctcggagatttcggcgactccaagacggtgtcgctgtgcgtgaagaggctggtctacaccaacgatcagggggaggtcgtcaaaggagtctgctcgaacttcctctgtgacttgaagccaggcgctgaggtgaagatcacagggccagtgggcaaggagatgctcatgcccaaagaccccaacgcaacaatcatcatgctcgcaacgggtaccggcatcgctccgttccgctccttcttgtggaagatgttcttcgaggagcacgaggactacaagtacaccgggctggcgtggctgttcctgggcgtcccgaccagcgacaccctgctgtacaaggaggagctggagaagatgaaggagatggcgccggacaacttccggctggacttcgcggtgagccgggagcagacgaacgcggccggggagaagatgtacatccagacgcgcatggcggagtacaaggaggagctgtgggagctgctcaagaaggacaacacctacgtctacatgtgcgggctcaagggcatggagaagggcatcgacgacatcatgctcgacctcgcagccaaggacgggatcaactggttggactacaagaagcagctcaagaagagcgagcaatggaacgtcgaagtctactgatgatgatccttcattgtattgttcagctcaagcaatctggtggtgatgagtttgcattgcattgtacgtagtattgcggagatcaatcgaatcgtttggctcgtcgtcattctatcgatgtacatacattatatatgatgaaagacatatataatcgtttctttcaggaatttgttgtctctctgcacgtgaatttgttgcgagaaagaaaggacacacattagccttttctttattagggcaattatgaattatacccttctctgattctgattttacttttttc

SEQ ID NO: 3300 - protein, 368 aa, Zea mays subsp. mays
  peptide (1)..(368): Ceres Seq. ID no. 13498802
MAAVTAAAVSLPSSSSSPAAAKAKASASASPSSPCGHLQFPRRHGGPRAVRLRVQVSTTETAEAEPVKKLEKVSKKQEEGLVTNKYKPKEPYVGRCLLNTRITGDQAPGETWHMVFSTEGEVPYREGQSIGVIADGEDKNGKPHKLRLYSIASSALGDFGDSKTVSLCVKRLVYTNDQGEVVKGVCSNFLCDLKPGAEVKITGPVGKEMLMPKDPNATIIMLATGTGIAPFRSFLWKMFFEEHEDYKYTGLAWLFLGVPTSDTLLYKEELEKMKEMAPDNFRLDFAVSREQTNAAGEKMYIQTRMAEYKEELWELLKKDNTYVYMCGLKGMEKGIDDIMLDLAAKDGINWLDYKKQLKKSEQWNVEVY

SEQ ID NO: 3301 - protein, 255 aa, Zea mays subsp. mays
  peptide (1)..(255): Ceres Seq. ID no. 13498803
MVFSTEGEVPYREGQSIGVIADGEDKNGKPHKLRLYSIASSALGDFGDSKTVSLCVKRLVYTNDQGEVVKGVCSNFLCDLKPGAEVKITGPVGKEMLMPKDPNATIIMLATGTGIAPFRSFLWKMFFEEHEDYKYTGLAWLFLGVPTSDTLLYKEELEKMKEMAPDNFRLDFAVSREQTNAAGEKMYIQTRMAEYKEELWELLKKDNTYVYMCGLKGMEKGIDDIMLDLAAKDGINWLDYKKQLKKSEQWNVEVY

SEQ ID NO: 3302 - DNA, 1181 bp, Zea mays subsp. mays
  misc_feature (1)..(1181): Ceres Seq. ID no. 12434843
  misc_feature (1)..(1181): Ortholog of  Ceres SEQ ID NO 14311671 as cited in SEQ ID NO 51251
  misc_feature (1)..(1181): Ortholog of  Ceres SEQ ID NO 14304791 as cited in SEQ ID NO 53562
  misc_feature (1)..(1181): Ortholog of  Ceres SEQ ID NO 14307355 as cited in SEQ ID NO 54610
  misc_feature (1)..(1181): Ortholog of  Ceres SEQ ID NO 13594298 as cited in SEQ ID NO 57803
  misc_feature (1)..(1181): Ortholog of  Ceres SEQ ID NO 14301894 as cited in SEQ ID NO 61677
  misc_feature (1)..(1181): Ortholog of  Ceres SEQ ID NO 13503476 as cited in SEQ ID NO 61978
  misc_feature (1)..(1181): Ortholog of  Ceres SEQ ID NO 12578438 as cited in SEQ ID NO 62201
  misc_feature (1)..(1181): Ortholog of  Ceres SEQ ID NO 12617675 as cited in SEQ ID NO 64656
atcccaacccactcacagtctcacgctactatcgctatctagagctccggccgtcacagacacgagctagagctagagctgcagggaagaagaagaaggaggaggaggagaagatgagggcgtccgcgctggtctgcttcgtggcggtgtcggcgtgcatagcgtgcatcgcgcatggcggcaacttctaccaggacacggagatgacctgggggcaggggcgcggcaaggtggtggacggcgggcgcgggctggacctgagcctggacagggcctccgggtccgggttccagtccaaggacgagtacctgttcggcaagatcgagatgcagatgaagctggtgcctggcaactcggcgggcaccgtgacgaccttgtacctgtcgtcgcagggcgacgcgcacgacgagatcgacctggagttcctgggcaacgtgtcgggcgagccctacacgctgcacacgaacgtgttcacgcgcgggcgggggcagcgggagcancagttccgcctctggttcgaccccaccgccgacttccacacctactccgtggtgtggaacccgcggcacgtcatcttcgcggtggacggcacgccggtgagggacttcgccaaccgcgaggcccgcggggtggcgttcccgcggacgcagcccatgcgggtgtacgccagcctctggaacgccgacgactgggccacgcagggcggccgcgtcaaggcggactgggcgcgggcgccgttcgtcgcctcgttccgcgggttcagcgccgacgcctgcgtctggtccggcggcaggtcgcagtgccccgtcggcaccatggaggaggcgggaggaggcggcggctggtggaaccagcagctcaccgacgccagctaccgccgcatgcgctgggtgcagaggaagttcatgatctacaactactgcaccgacgccaagcggttcccgcagggccggggcgtgcccgctgaatgcaggctccggcgataaaggtggctggatgagcgaacgcgaagccacctgcgtgcgtgcacgacgatcgatcccctcgtcgtcgttcacttcagaccagagatcggtggtctggcgaataatgtttgggtttttttttttgccatgggcgatggcaatgtaaatgtagcacgtgacgcacgtcgcagtgatattctttcatctgttttctgc

SEQ ID NO: 3303 - protein, 327 aa, Zea mays subsp. mays
  peptide (1)..(327): Ceres Seq. ID no. 12434844
  misc_feature (166)..(166): Xaa is any aa, unknown or other
PNPLTVSRYYRYLELRPSQTRARARAAGKKKKEEEEKMRASALVCFVAVSACIACIAHGGNFYQDTEMTWGQGRGKVVDGGRGLDLSLDRASGSGFQSKDEYLFGKIEMQMKLVPGNSAGTVTTLYLSSQGDAHDEIDLEFLGNVSGEPYTLHTNVFTRGRGQREXQFRLWFDPTADFHTYSVVWNPRHVIFAVDGTPVRDFANREARGVAFPRTQPMRVYASLWNADDWATQGGRVKADWARAPFVASFRGFSADACVWSGGRSQCPVGTMEEAGGGGGWWNQQLTDASYRRMRWVQRKFMIYNYCTDAKRFPQGRGVPAECRLRR

SEQ ID NO: 3304 - protein, 290 aa, Zea mays subsp. mays
  peptide (1)..(290): Ceres Seq. ID no. 12434845
  misc_feature (129)..(129): Xaa is any aa, unknown or other
MRASALVCFVAVSACIACIAHGGNFYQDTEMTWGQGRGKVVDGGRGLDLSLDRASGSGFQSKDEYLFGKIEMQMKLVPGNSAGTVTTLYLSSQGDAHDEIDLEFLGNVSGEPYTLHTNVFTRGRGQREXQFRLWFDPTADFHTYSVVWNPRHVIFAVDGTPVRDFANREARGVAFPRTQPMRVYASLWNADDWATQGGRVKADWARAPFVASFRGFSADACVWSGGRSQCPVGTMEEAGGGGGWWNQQLTDASYRRMRWVQRKFMIYNYCTDAKRFPQGRGVPAECRLRR

SEQ ID NO: 3305 - protein, 260 aa, Zea mays subsp. mays
  peptide (1)..(260): Ceres Seq. ID no. 12434846
  misc_feature (99)..(99): Xaa is any aa, unknown or other
MTWGQGRGKVVDGGRGLDLSLDRASGSGFQSKDEYLFGKIEMQMKLVPGNSAGTVTTLYLSSQGDAHDEIDLEFLGNVSGEPYTLHTNVFTRGRGQREXQFRLWFDPTADFHTYSVVWNPRHVIFAVDGTPVRDFANREARGVAFPRTQPMRVYASLWNADDWATQGGRVKADWARAPFVASFRGFSADACVWSGGRSQCPVGTMEEAGGGGGWWNQQLTDASYRRMRWVQRKFMIYNYCTDAKRFPQGRGVPAECRLRR

SEQ ID NO: 3306 - DNA, 1029 bp, Zea mays subsp. mays
  misc_feature (1)..(1029): Ceres Seq. ID no. 13496156
  misc_feature (1)..(1029): Ortholog of  Ceres SEQ ID NO 12564952 as cited in SEQ ID NO 63211
atgaattgctgctgggtgctggccgttgcgggcgaacccgaaaatcacgagcgcgagagatcggagcacggcatgtcggaggagcagttcctcgccgtggcggtggaagccgccaagagcgccggcgagattattcgcaagggattctaccagaccaagaacgtcgagcacaagggccaggtggatttggtgacggagacggacaaggcctgcgaggacctcatcttcaaccacctccggaagcacttcccggaccacaagttcatcggggaggaggagtccgcggcgctcggggccaccgctgacctcaccgacgaccccacctggatcgtcgatcccctcgacgggaccactaatttcgtccatggtttcccatttgtatgtgtctccgttggcctcaccattgggaaaattcccactgtcggagtcgtcttcaaccccatcatgaacgagcttttcacggcggttcgtggaaaaggggctttcctgaatggctctccaattaaagcatcatctcaagatgagttagtgaaggctcttctggtaacagaggctggaaccaatagagacaagaccactgtggatgatacaaccaacagaatcaacaggctactatacaagattcgatccatacggatgtgtggatcattggctttaaacatgtgtggagttgcctgtggtagactagatttgtgttatgagataggatttggtggtccatgggatgttgctgctggtgctgtaattcttcaggaagccggtggccttgtttttgacccaagcggcggagagtttgatttgatgtcgcgaagaatggcaggatcaaacagcttgctgaaggataagttcgtcaaggaactgggggatactaattgaaacaaatgttagtattattcgtggaacagattaagacaataaggttgccccgccgcatggtgattaacttattgtttgggcaacaaaattccatgtaattctgcacctgtacaactatgttggacgcagaacattttattgagttttgtgatt

SEQ ID NO: 3307 - protein, 291 aa, Zea mays subsp. mays
  peptide (1)..(291): Ceres Seq. ID no. 13496157
MNCCWVLAVAGEPENHERERSEHGMSEEQFLAVAVEAAKSAGEIIRKGFYQTKNVEHKGQVDLVTETDKACEDLIFNHLRKHFPDHKFIGEEESAALGATADLTDDPTWIVDPLDGTTNFVHGFPFVCVSVGLTIGKIPTVGVVFNPIMNELFTAVRGKGAFLNGSPIKASSQDELVKALLVTEAGTNRDKTTVDDTTNRINRLLYKIRSIRMCGSLALNMCGVACGRLDLCYEIGFGGPWDVAAGAVILQEAGGLVFDPSGGEFDLMSRRMAGSNSLLKDKFVKELGDTN

SEQ ID NO: 3308 - protein, 267 aa, Zea mays subsp. mays
  peptide (1)..(267): Ceres Seq. ID no. 13496158
MSEEQFLAVAVEAAKSAGEIIRKGFYQTKNVEHKGQVDLVTETDKACEDLIFNHLRKHFPDHKFIGEEESAALGATADLTDDPTWIVDPLDGTTNFVHGFPFVCVSVGLTIGKIPTVGVVFNPIMNELFTAVRGKGAFLNGSPIKASSQDELVKALLVTEAGTNRDKTTVDDTTNRINRLLYKIRSIRMCGSLALNMCGVACGRLDLCYEIGFGGPWDVAAGAVILQEAGGLVFDPSGGEFDLMSRRMAGSNSLLKDKFVKELGDTN

SEQ ID NO: 3309 - DNA, 1615 bp, Zea mays subsp. mays
  misc_feature (1)..(1615): Ceres Seq. ID no. 13498314
  misc_feature (1)..(1615): Ortholog of  Ceres SEQ ID NO 14313038 as cited in SEQ ID NO 59520
  misc_feature (1)..(1615): Ortholog of  Ceres SEQ ID NO 13595464 as cited in SEQ ID NO 59792
  misc_feature (1)..(1615): Ortholog of  Ceres SEQ ID NO 14316416 as cited in SEQ ID NO 60078
gtcccttagttgtaccatcgtgtccttttcctcctacctcctccttggctggccctcttccccgtcttcctccctcttccttcgtctctccgtttcaagccctaccgacaggcatttgcttctgctccagtgatcagccccctcccctcctggcctcctctccacccggccaaaaactgatctttttttttcggttctggtaccatagctattagtagtcgtagcggctaacttgcaagccgattgtctctagcacgcaagtgtttttccctcccctgagattggtgggtgatcgagagttcgagacagtgtacacatacatactctgctcgtctgctgaggatcgatcgcttggtctcgttgttgcgtagataggtactagaggactatagctactagtaggactaggagaggatccgagggagagagagcaaggccaagatgatgcgcgcgaaccgggagcagagagtggccttctcgtcgacgaaggaggccgccgcggtgcccaaggaggaggtgtgggaggtccggcccggcgggatgctggtgcagaagcggagccccgacgcggacccgccccccggcggcgcgcccgtgcccaccatccgcgtcaaggtcaagttcaacggcgtctaccacgagatctacatcaactcccaggcatccttcggcgagctcaagaagctgctgtcggagaagacgggcctgcacccggacgaccagaaggtggtgtacaaggacaaggagagggactccaaggcgttcctggacatggccggcgtcaaggaccgctccaagatggtcatgctcgaggaccccgccgccaaggccaagcgcctcctcgaggagcgccggaccggcaaggccgagcgcgccgccaaggccatcgcccgcgccgccctcgacgtcgacaagctcgcaaccaaggtgtcggcgctggagacgatcgtgagcaagggcggcaaggtcgtggacncggacgtggtgacgctgaccgaggcgctgatgaacgagctggtgaagctggactccgtcnncgnngaaggggaggtgaaggcggcgcggcgggcgcaggagaagcgggtgcagaagtacgtggagacgctggacgccatccgcgccaagaacaaggcggcggcggcggcggngccggccaaggcccgctagcggcannaacaaggcgcggccgccgcgcccgcccccggcttcggcgcacgcgcatcagagccagcagcagcgccggcagttccagccgccggcgccggtgtcgcagacccagacggcgagctgggagacgttcgacctcctgtcgtcagtgccgtcgacgtcggcggcccccgtgacgaccatggcccccgcgaccagcaccacgccgtccccgcgcttcgactgggagctcttctagatggctcctcaaggcgccagcctgccacacccccctggcctggcccccatctctcgccacttgtgtgcctgtccattggctcggccagtaccttctcctgttcgccttggccatggtgcatgtcaatcgccattgtttctttctttctttccttcccgctctctttattctgtcattcttgctgtcctttgagcgattgaaagtctgtgt

SEQ ID NO: 3310 - protein, 241 aa, Zea mays subsp. mays
  peptide (1)..(241): Ceres Seq. ID no. 13498315
  misc_feature (179)..(179): Xaa is any aa, unknown or other
  misc_feature (199)..(199): Xaa is any aa, unknown or other
  misc_feature (200)..(200): Xaa is any aa, unknown or other
  misc_feature (236)..(236): Xaa is any aa, unknown or other
MMRANREQRVAFSSTKEAAAVPKEEVWEVRPGGMLVQKRSPDADPPPGGAPVPTIRVKVKFNGVYHEIYINSQASFGELKKLLSEKTGLHPDDQKVVYKDKERDSKAFLDMAGVKDRSKMVMLEDPAAKAKRLLEERRTGKAERAAKAIARAALDVDKLATKVSALETIVSKGGKVVDXDVVTLTEALMNELVKLDSVXXEGEVKAARRAQEKRVQKYVETLDAIRAKNKAAAAAXPAKAR

SEQ ID NO: 3311 - protein, 240 aa, Zea mays subsp. mays
  peptide (1)..(240): Ceres Seq. ID no. 13498316
  misc_feature (178)..(178): Xaa is any aa, unknown or other
  misc_feature (198)..(198): Xaa is any aa, unknown or other
  misc_feature (199)..(199): Xaa is any aa, unknown or other
  misc_feature (235)..(235): Xaa is any aa, unknown or other
MRANREQRVAFSSTKEAAAVPKEEVWEVRPGGMLVQKRSPDADPPPGGAPVPTIRVKVKFNGVYHEIYINSQASFGELKKLLSEKTGLHPDDQKVVYKDKERDSKAFLDMAGVKDRSKMVMLEDPAAKAKRLLEERRTGKAERAAKAIARAALDVDKLATKVSALETIVSKGGKVVDXDVVTLTEALMNELVKLDSVXXEGEVKAARRAQEKRVQKYVETLDAIRAKNKAAAAAXPAKAR

SEQ ID NO: 3312 - protein, 208 aa, Zea mays subsp. mays
  peptide (1)..(208): Ceres Seq. ID no. 13498317
  misc_feature (146)..(146): Xaa is any aa, unknown or other
  misc_feature (166)..(166): Xaa is any aa, unknown or other
  misc_feature (167)..(167): Xaa is any aa, unknown or other
  misc_feature (203)..(203): Xaa is any aa, unknown or other
MLVQKRSPDADPPPGGAPVPTIRVKVKFNGVYHEIYINSQASFGELKKLLSEKTGLHPDDQKVVYKDKERDSKAFLDMAGVKDRSKMVMLEDPAAKAKRLLEERRTGKAERAAKAIARAALDVDKLATKVSALETIVSKGGKVVDXDVVTLTEALMNELVKLDSVXXEGEVKAARRAQEKRVQKYVETLDAIRAKNKAAAAAXPAKAR

SEQ ID NO: 3313 - DNA, 1884 bp, Zea mays subsp. mays
  misc_feature (1)..(1884): Ceres Seq. ID no. 12379414
  misc_feature (1)..(1884): Ortholog of  Ceres SEQ ID NO 13594380 as cited in SEQ ID NO 58039
  misc_feature (1)..(1884): Ortholog of  Ceres SEQ ID NO 13597407 as cited in SEQ ID NO 64106
  misc_feature (1)..(1884): Ortholog of  Ceres SEQ ID NO 15180690 as cited in SEQ ID NO 0
gcacgagaccattacctagaacatcctaatcaaaaagagctgttcggtgacgatggtagctagctagctactactgtagtaggtaaagcctgcggcgctcgagcgagcaggaagacaaaggcaagcatggccgggggtggcttcgccgtggccgatggcccgtccgtcgactacggcggccgggtgaccttctcggtcgtcgtgacctgcctcatggcggcctccggcggcctcatcttcggttacgacatcggcatctcggggggcgtgacggcgatggagtcgttcctgtcggccttcttcccgggggtgctgcgcaggatggccgcggcgcggcgggacgagtactgcgtctacgacagccacgtcctcacggcgttcacctcgtcgctgtacctggccgggctggccgcctctctcgtcgccagccgcgtcaccagggcgatcggcaggcaggccgtcatgctcgcgggcggcgcgctcttcttcgccggcgccgccgtcaacgccgccgccgtcaacgtcgctatgctcatcgtcggacgcatgctgctgggcttcggcatcggctttaccaaccaggcggcgccggtgtacctggcggagacggcgccggccaagtggcggggcgccttcacgacggggttccagctcttcctcagcatcggcaacctggcggcgaacctggtgaactacggcacctcgcgcatcccggcgtgggggtggcgcctctcgctgggcctggccgcggcgcccgccgccgtcatcctcgcgggggcgctgctcatcccggacacgcccagcagcctcctcgtgcgcgggcgcgcggaggaggcccgcgccgcgctgcggcgcgtcaggggcgccaaggcggacgtggacgcggagctggaggacgtggcccgcgccgtggaggccgcgcgcgcccacgagcagggcgcgttccgcaggatcctccggcgggagcaccggcaccacctggccgtggccgtggcggtcccgctgttccagcagctcacgggggtcatcgtcatcgccttcttctcgcccgtgctgttccagacggccgggttcggcagcaacgccgcgctcatgggcgccgtcatcctcggcgccgtcaacctcgcctccacgctcttgtccatcgtcacggtcgaccggtacggccggcggccgctgttcctcaccggcggcttcgtcatgatcgtttgccaggtcgcggtcgcgtggatcatggggtcccagatcggggccgacggcgggtccgcgatggccaggccctactccctcgcggtgctggcgctgacgtgcgtcttctcggcggcgttcggctggtcgtggggcccgctgacctgggtgatcccaggcgagatattccccgtggagatccggtcggcggggcagggcatcagcgtggccgtcaacctgggcgccacgttcctgctcacgcagacgttcctctccatgctgtgcacgctcaagtacgccaccttcatctactacgcggcctgggtagccgtcatgaccgccttcgtcgtggcgttcctgccggagaccaagggggtgccgctcgaggccatgggcgccatctgggagcgccactggtactggagacggttcgtgcagccttctgttgcggaggacccctgatgagtgactgatgcggccttctgttgtggacgtgacacgcttccggacgttgtgtgtgtcaatggttgcagtttgtctgctgtggtcgtcgtctgaggaagagttgtctgtggacgaaggctggaaatcaatgcgtgtgccctgtccgtggtttttctaatacaggagtacgtcatgcaaggttgttaatgttaagcgaacgttcgcagtgatatagacgttatattttaagtt

SEQ ID NO: 3314 - protein, 507 aa, Zea mays subsp. mays
  peptide (1)..(507): Ceres Seq. ID no. 12379415
MAGGGFAVADGPSVDYGGRVTFSVVVTCLMAASGGLIFGYDIGISGGVTAMESFLSAFFPGVLRRMAAARRDEYCVYDSHVLTAFTSSLYLAGLAASLVASRVTRAIGRQAVMLAGGALFFAGAAVNAAAVNVAMLIVGRMLLGFGIGFTNQAAPVYLAETAPAKWRGAFTTGFQLFLSIGNLAANLVNYGTSRIPAWGWRLSLGLAAAPAAVILAGALLIPDTPSSLLVRGRAEEARAALRRVRGAKADVDAELEDVARAVEAARAHEQGAFRRILRREHRHHLAVAVAVPLFQQLTGVIVIAFFSPVLFQTAGFGSNAALMGAVILGAVNLASTLLSIVTVDRYGRRPLFLTGGFVMIVCQVAVAWIMGSQIGADGGSAMARPYSLAVLALTCVFSAAFGWSWGPLTWVIPGEIFPVEIRSAGQGISVAVNLGATFLLTQTFLSMLCTLKYATFIYYAAWVAVMTAFVVAFLPETKGVPLEAMGAIWERHWYWRRFVQPSVAEDP

SEQ ID NO: 3315 - protein, 478 aa, Zea mays subsp. mays
  peptide (1)..(478): Ceres Seq. ID no. 12379416
MAASGGLIFGYDIGISGGVTAMESFLSAFFPGVLRRMAAARRDEYCVYDSHVLTAFTSSLYLAGLAASLVASRVTRAIGRQAVMLAGGALFFAGAAVNAAAVNVAMLIVGRMLLGFGIGFTNQAAPVYLAETAPAKWRGAFTTGFQLFLSIGNLAANLVNYGTSRIPAWGWRLSLGLAAAPAAVILAGALLIPDTPSSLLVRGRAEEARAALRRVRGAKADVDAELEDVARAVEAARAHEQGAFRRILRREHRHHLAVAVAVPLFQQLTGVIVIAFFSPVLFQTAGFGSNAALMGAVILGAVNLASTLLSIVTVDRYGRRPLFLTGGFVMIVCQVAVAWIMGSQIGADGGSAMARPYSLAVLALTCVFSAAFGWSWGPLTWVIPGEIFPVEIRSAGQGISVAVNLGATFLLTQTFLSMLCTLKYATFIYYAAWVAVMTAFVVAFLPETKGVPLEAMGAIWERHWYWRRFVQPSVAEDP

SEQ ID NO: 3316 - protein, 457 aa, Zea mays subsp. mays
  peptide (1)..(457): Ceres Seq. ID no. 12379417
MESFLSAFFPGVLRRMAAARRDEYCVYDSHVLTAFTSSLYLAGLAASLVASRVTRAIGRQAVMLAGGALFFAGAAVNAAAVNVAMLIVGRMLLGFGIGFTNQAAPVYLAETAPAKWRGAFTTGFQLFLSIGNLAANLVNYGTSRIPAWGWRLSLGLAAAPAAVILAGALLIPDTPSSLLVRGRAEEARAALRRVRGAKADVDAELEDVARAVEAARAHEQGAFRRILRREHRHHLAVAVAVPLFQQLTGVIVIAFFSPVLFQTAGFGSNAALMGAVILGAVNLASTLLSIVTVDRYGRRPLFLTGGFVMIVCQVAVAWIMGSQIGADGGSAMARPYSLAVLALTCVFSAAFGWSWGPLTWVIPGEIFPVEIRSAGQGISVAVNLGATFLLTQTFLSMLCTLKYATFIYYAAWVAVMTAFVVAFLPETKGVPLEAMGAIWERHWYWRRFVQPSVAEDP

SEQ ID NO: 3317 - DNA, 1439 bp, Zea mays subsp. mays
  misc_feature (1)..(1439): Ceres Seq. ID no. 12343992
  misc_feature (1)..(1439): Ortholog of  Ceres SEQ ID NO 15177291 as cited in SEQ ID NO 52286
  misc_feature (1)..(1439): Ortholog of  Ceres SEQ ID NO 13595164 as cited in SEQ ID NO 56222
  misc_feature (1)..(1439): Ortholog of  Ceres SEQ ID NO 14315021 as cited in SEQ ID NO 57018
  misc_feature (1)..(1439): Ortholog of  Ceres SEQ ID NO 15177783 as cited in SEQ ID NO 58894
  misc_feature (1)..(1439): Ortholog of  Ceres SEQ ID NO 13591068 as cited in SEQ ID NO 69043
  misc_feature (1)..(1439): Ortholog of  Ceres SEQ ID NO 13623041 as cited in SEQ ID NO 0
atctttgcgcttggggcaatgacgcagcttatgaggtcataccgaggcgcgtcaattgctggttgaaaactatttccaaaccccctctttggcccactgggccactgagaatttctggaagggctccttttcctcggataagcaatcttgagtcctgggtcttcgctgccagtgccagcacgcttgtggccaagaaacgttgggggcagtttggacctcggagcagcatcatccatggcgggagaggaggccgggaggaggggcgttccctctctgctgaacccgccgtccgcttccagcgaggggcagcaagagcacatcgcctctgatgtcacacagctcatcggatggacacctctggtcgagctcaagcgaatcgccgccaaggaaggggtatgcgcgcgcatcgtcggcaaggtggaggcgtaccagcctctgtgctccgtcaaggatcgcagcgctctgagaatgatcgaagacgcagaggagagggggctgatctcgcccggcaccacgacgctcgtggagccgacgagcggcaacctggggctgggcctggtcctcgtcgccctccgcaagggctacaggttcgtcgcggtcatgccaggccagtactcgctcgacaagcagatcctgctgacatacatgggcgcagagctgtacgtaacagatccatccctcgggttcccgggcataaccgccaaggtcgaggagctcaagaaggagctgcccaacgtgcacgtcctcgaccagttctccaacagagcgaatcctgaagcgcatgttagatggactgggcctgagatctggaaggacaccgccggcaaggtggacgtattcgtggccggttcaggctcgggaggcacggtgtctggcgtcggcaagtacctcaagacgcagaaccccagcgtcaaggtcatctgcgttgagcctgccgagagcccagttgtttcaggcggggaaccaggcagccacaagatccagggaatagggccgggattcataccggaagtgctggacacctccgtcatcgacgaggccgtcacggtgaccaccgaggaggcgatggcgggcgcccggaggctggccagggaggagggcctgctcgtcggcatctcttccggagccaacctggcggcctgcttgaaggtcgcggcgcgagaagagagcaaggggaagatgatcgtcaccgtgtttccgagcgggggcgagaggtacatgacctccgacctgttcgccgccgccagagaggagtgtattgccatgacgttttgatcttcccccccaccccacagaaacatgtacggattaactggaggataaaaggacaaccgatatgttactccctcagttattgaaatagtattcgttttggccttgtaaccttttgttttgcaatcagctaaagttggttacaagaattgatgtgctctaacttt

SEQ ID NO: 3318 - protein, 346 aa, Zea mays subsp. mays
  peptide (1)..(346): Ceres Seq. ID no. 12343993
MAGEEAGRRGVPSLLNPPSASSEGQQEHIASDVTQLIGWTPLVELKRIAAKEGVCARIVGKVEAYQPLCSVKDRSALRMIEDAEERGLISPGTTTLVEPTSGNLGLGLVLVALRKGYRFVAVMPGQYSLDKQILLTYMGAELYVTDPSLGFPGITAKVEELKKELPNVHVLDQFSNRANPEAHVRWTGPEIWKDTAGKVDVFVAGSGSGGTVSGVGKYLKTQNPSVKVICVEPAESPVVSGGEPGSHKIQGIGPGFIPEVLDTSVIDEAVTVTTEEAMAGARRLAREEGLLVGISSGANLAACLKVAAREESKGKMIVTVFPSGGERYMTSDLFAAAREECIAMTF

SEQ ID NO: 3319 - protein, 268 aa, Zea mays subsp. mays
  peptide (1)..(268): Ceres Seq. ID no. 12343994
MIEDAEERGLISPGTTTLVEPTSGNLGLGLVLVALRKGYRFVAVMPGQYSLDKQILLTYMGAELYVTDPSLGFPGITAKVEELKKELPNVHVLDQFSNRANPEAHVRWTGPEIWKDTAGKVDVFVAGSGSGGTVSGVGKYLKTQNPSVKVICVEPAESPVVSGGEPGSHKIQGIGPGFIPEVLDTSVIDEAVTVTTEEAMAGARRLAREEGLLVGISSGANLAACLKVAAREESKGKMIVTVFPSGGERYMTSDLFAAAREECIAMTF

SEQ ID NO: 3320 - protein, 224 aa, Zea mays subsp. mays
  peptide (1)..(224): Ceres Seq. ID no. 12343995
MPGQYSLDKQILLTYMGAELYVTDPSLGFPGITAKVEELKKELPNVHVLDQFSNRANPEAHVRWTGPEIWKDTAGKVDVFVAGSGSGGTVSGVGKYLKTQNPSVKVICVEPAESPVVSGGEPGSHKIQGIGPGFIPEVLDTSVIDEAVTVTTEEAMAGARRLAREEGLLVGISSGANLAACLKVAAREESKGKMIVTVFPSGGERYMTSDLFAAAREECIAMTF

SEQ ID NO: 3321 - DNA, 1104 bp, Zea mays subsp. mays
  misc_feature (1)..(1104): Ceres Seq. ID no. 12410301
  misc_feature (1)..(1104): Ortholog of  Ceres SEQ ID NO 13638599 as cited in SEQ ID NO 51866
atccgccccgatccgaacccattcaattccaaattcacaaccctgccagtggttggcccgccgctgccaaatcgaatcggactccgatccgtgcagcccaccggcgagacggcgagacgccgaagctagcacacttcatgccatctgtctgacgtgatgcgtgtggcctctctgcttttactggatccctagccagctcaggagaaactcagaatagtactatagccaagtccatccagtcctttcgcggcgtcttccttgctcaccgcggctccggcgatgtcggccgccggctcggcggctctacctctccgtctacaactgggtcgtcttctccgtctacaacagccgccatcatggagattcttcatgggcttgtagggttggtgagttctccagcgtccacaactcttccagaaattggatccagattattccttatgtgaggtatcttctggagttttcccgagacccagtcacatcttcttgctactgccctgatcataagctggtctgtcactgagatcatcaggtactctttctttgcaatgaaggaggcatttggctctgcaccttcctggctatcatggcttaggtacaccgatcctactagaaaaccgaagaggtataggtatgcatgctgttcacatctcataactaccattttatttatgttccgggtaagcctttccgtcctcgaccgccctccatttttttttttctgttcgcttcagtgccttagactatctccagcagtttatttatactcgtacttgtattcaaactttactctacaaacagtgtgttaccgtgcttatagataaactttaagtaaactgctggaccaccgccgcatgcaggaagtccgcacatgtactgttacatgctctcccagaggaagaaggcactgtcaaaggccaaagcagcataattctgctcaagagctgtagaatggtagaatcaagttctcgacatttcaggtagaatctagtggttcacatgaattgcgccataggtgttgtacccggatttgtattggctatcagctgtgttcgatggttaaattgtaatttgctctgaatcacccccagttgtatcagggcc

SEQ ID NO: 3322 - protein, 91 aa, Zea mays subsp. mays
  peptide (1)..(91): Ceres Seq. ID no. 12410302
MKEAFGSAPSWLSWLRYTDPTRKPKRYRYACCSHLITTILFMFRVSLSVLDRPPFFFFCSLQCLRLSPAVYLYSYLYSNFTLQTVCYRAYR

SEQ ID NO: 3323 - protein, 51 aa, Zea mays subsp. mays
  peptide (1)..(51): Ceres Seq. ID no. 12410303
SAPIRTHSIPNSQPCQWLARRCQIESDSDPCSPPARRRDAEASTLHAICLT

SEQ ID NO: 3324 - protein, 50 aa, Zea mays subsp. mays
  peptide (1)..(50): Ceres Seq. ID no. 12410304
MFRVSLSVLDRPPFFFFCSLQCLRLSPAVYLYSYLYSNFTLQTVCYRAYR

SEQ ID NO: 3325 - DNA, 1631 bp, Zea mays subsp. mays
  misc_feature (1)..(1631): Ceres Seq. ID no. 12410297
  misc_feature (1)..(1631): Ortholog of  Ceres SEQ ID NO 14310460 as cited in SEQ ID NO 55105
  misc_feature (1)..(1631): Ortholog of  Ceres SEQ ID NO 13597740 as cited in SEQ ID NO 64482
  misc_feature (1)..(1631): Ortholog of  Ceres SEQ ID NO 15179888 as cited in SEQ ID NO 66879
  misc_feature (1)..(1631): Ortholog of  Ceres SEQ ID NO 13596056 as cited in SEQ ID NO 68307
  misc_feature (1)..(1631): Ortholog of  Ceres SEQ ID NO 12388689 as cited in SEQ ID NO 0
gcgcagcaatcctgcctcgcttccctccaaattcccaaagctctcgcgcgcggtgccatggcggagcgcctcgccgcctccctcctccctgccgcctcgccgtccccgtccgcccgccgcgcaacggtcgcagccgcagccgccgcctctttcccctccccatgctccgcccgcgcggggctgcgcctacgctcccgcccgcccctcttctcgcagaaggcggccgggcgcgggtgtggcctgcgggtggtgcggtgcatggcagcgtcggacgcggcgcagctcaaggccgcgcgggaggacatcaaggaactccttaagagcacatactgccaccccatcatggtccgtctggggtggcatgattctggtacctatgacaaggatattaaggactggccacagcgaggtggagctaatggaagtttaaggttcgatgctgagctgagtcatggagccaatgccggcctgattaatgcattgaagcttatccagcctatcaaggacaaatacccaggtatcacttatgcagatttgttccagttagcaagtgctacggcgattgaggaagctggtggtccaaaacttccaatgaaatatggacgtgttgatgtcacagcagctgaacagtgtccgcccgaggggaggcttcctgatgctggcccacgtgatcctgctgaacaccttagggaggtattttatagaatgggccttgatgacaaggaaattgttgcactatctggagcacacacacttggaagagcaaggcctgaccggagtggctggggaaagctagaaacaaaatatactaaggatgggcctggtgagcctggagggcaatcatggacagttgagtggttgaagtttgataatagttacttcaaggagatgaagttattttttttgaacgaaattcaggacatgaagtttttgagccagcttccctggaaagagcagaaggaacaggatcttctagttttgcctacagatgctgcattatttgaggacccatcgttcaaggtatacgcagaaaagtatgcagatgaccaggaagcgttctttaaagactatggtgaagctcatgctaagctgagcgatcttggtgcaaagtttgatcctcctgagggattctcactcgacgatgacacaagctcttcaccttccgacgagaagacggaagaacctacactggtagcggtaggagcggcagtagcaacagcgacagcggacgacaacaacggcgcagctccgcagccggagcccttcgtcgctgccaaatactcgtatggaaagagggagttgtcggatgcgatgaagcaaaagatcagggcggagtacgaggggtttggaggcagcccggacaagcccatgcagtccaactacttcctcaacatcatgatcctgattgcggggttggcgttcttgacatctctgcttgggaactgagtgttatatcatcatatgattatgatccgatttctgaagtctacgagtgtccactattgcaaactctgtaaacgtatgaaacatatctacgactagcattagagctacgtacactgtgcaaacagtttttttttttcgcgaattttggagagagacgagcaaaagaaatgtataacgagtgttcg

SEQ ID NO: 3326 - protein, 481 aa, Zea mays subsp. mays
  peptide (1)..(481): Ceres Seq. ID no. 12410298
AQQSCLASLQIPKALARGAMAERLAASLLPAASPSPSARRATVAAAAAASFPSPCSARAGLRLRSRPPLFSQKAAGRGCGLRVVRCMAASDAAQLKAAREDIKELLKSTYCHPIMVRLGWHDSGTYDKDIKDWPQRGGANGSLRFDAELSHGANAGLINALKLIQPIKDKYPGITYADLFQLASATAIEEAGGPKLPMKYGRVDVTAAEQCPPEGRLPDAGPRDPAEHLREVFYRMGLDDKEIVALSGAHTLGRARPDRSGWGKLETKYTKDGPGEPGGQSWTVEWLKFDNSYFKEMKLFFLNEIQDMKFLSQLPWKEQKEQDLLVLPTDAALFEDPSFKVYAEKYADDQEAFFKDYGEAHAKLSDLGAKFDPPEGFSLDDDTSSSPSDEKTEEPTLVAVGAAVATATADDNNGAAPQPEPFVAAKYSYGKRELSDAMKQKIRAEYEGFGGSPDKPMQSNYFLNIMILIAGLAFLTSLLGN

SEQ ID NO: 3327 - protein, 462 aa, Zea mays subsp. mays
  peptide (1)..(462): Ceres Seq. ID no. 12410299
MAERLAASLLPAASPSPSARRATVAAAAAASFPSPCSARAGLRLRSRPPLFSQKAAGRGCGLRVVRCMAASDAAQLKAAREDIKELLKSTYCHPIMVRLGWHDSGTYDKDIKDWPQRGGANGSLRFDAELSHGANAGLINALKLIQPIKDKYPGITYADLFQLASATAIEEAGGPKLPMKYGRVDVTAAEQCPPEGRLPDAGPRDPAEHLREVFYRMGLDDKEIVALSGAHTLGRARPDRSGWGKLETKYTKDGPGEPGGQSWTVEWLKFDNSYFKEMKLFFLNEIQDMKFLSQLPWKEQKEQDLLVLPTDAALFEDPSFKVYAEKYADDQEAFFKDYGEAHAKLSDLGAKFDPPEGFSLDDDTSSSPSDEKTEEPTLVAVGAAVATATADDNNGAAPQPEPFVAAKYSYGKRELSDAMKQKIRAEYEGFGGSPDKPMQSNYFLNIMILIAGLAFLTSLLGN

SEQ ID NO: 3328 - protein, 395 aa, Zea mays subsp. mays
  peptide (1)..(395): Ceres Seq. ID no. 12410300
MAASDAAQLKAAREDIKELLKSTYCHPIMVRLGWHDSGTYDKDIKDWPQRGGANGSLRFDAELSHGANAGLINALKLIQPIKDKYPGITYADLFQLASATAIEEAGGPKLPMKYGRVDVTAAEQCPPEGRLPDAGPRDPAEHLREVFYRMGLDDKEIVALSGAHTLGRARPDRSGWGKLETKYTKDGPGEPGGQSWTVEWLKFDNSYFKEMKLFFLNEIQDMKFLSQLPWKEQKEQDLLVLPTDAALFEDPSFKVYAEKYADDQEAFFKDYGEAHAKLSDLGAKFDPPEGFSLDDDTSSSPSDEKTEEPTLVAVGAAVATATADDNNGAAPQPEPFVAAKYSYGKRELSDAMKQKIRAEYEGFGGSPDKPMQSNYFLNIMILIAGLAFLTSLLGN

SEQ ID NO: 3329 - DNA, 770 bp, Zea mays subsp. mays
  misc_feature (1)..(770): Ceres Seq. ID no. 12412983
  misc_feature (1)..(770): Ortholog of  Ceres SEQ ID NO 13584734 as cited in SEQ ID NO 65573
gaattcccctgcgcctctcacctccctgctcgaatccagcgctcacccgcgccgcgtcgagacatgtcgaagaaaatcgtggtgaagctggacctgcacgacaacaaggacaagcagaaggcgctgaaggccatctccgtgctcgtcggcatcgacgccgtgtcggtggacatggcggcgcacaagatgacggtgatcgggacggtggacccggtgcaggtggtgagcaagctgcgcanaagntcgtgggcggcgcacatcgactccgtcgggccggccaaggagcccgagaagaaggaggagaagaaggacggcggcggcgagaagaaggacggcggcggtggcgagggcaagaaggaggaaggggacgggaagaaggacggcggcggcggtggcgacggcaagaaagacggcgagggcaagaaggaggacggcgacggcaagaagcaggacggcgagggcaagaaggaggatggcgatggcaagaaggacgacaagaaggacggcggcggcggcggcgcagaggagaagaagcccgccgccgcggtgcccctgcccaagaagaccgctgagaaggcggcggccaaggaggccaagtcgcccaagaaggccgccaagtcccccaagaaggcatagaggggcgggcgcctttaccgctgtgatgttgaatgctcgtgttcagtagatctttacgtctgtagtgtcgtcgttgttattggaactggttagtagatctgtgcattgtggttgaaacgtgattccctgatttc

SEQ ID NO: 3330 - protein, 211 aa, Zea mays subsp. mays
  peptide (1)..(211): Ceres Seq. ID no. 12412984
  misc_feature (80)..(80): Xaa is any aa, unknown or other
  misc_feature (81)..(81): Xaa is any aa, unknown or other
EFPCASHLPARIQRSPAPRRDMSKKIVVKLDLHDNKDKQKALKAISVLVGIDAVSVDMAAHKMTVIGTVDPVQVVSKLRXXSWAAHIDSVGPAKEPEKKEEKKDGGGEKKDGGGGEGKKEEGDGKKDGGGGGDGKKDGEGKKEDGDGKKQDGEGKKEDGDGKKDDKKDGGGGGAEEKKPAAAVPLPKKTAEKAAAKEAKSPKKAAKSPKKA

SEQ ID NO: 3331 - protein, 190 aa, Zea mays subsp. mays
  peptide (1)..(190): Ceres Seq. ID no. 12412985
  misc_feature (59)..(59): Xaa is any aa, unknown or other
  misc_feature (60)..(60): Xaa is any aa, unknown or other
MSKKIVVKLDLHDNKDKQKALKAISVLVGIDAVSVDMAAHKMTVIGTVDPVQVVSKLRXXSWAAHIDSVGPAKEPEKKEEKKDGGGEKKDGGGGEGKKEEGDGKKDGGGGGDGKKDGEGKKEDGDGKKQDGEGKKEDGDGKKDDKKDGGGGGAEEKKPAAAVPLPKKTAEKAAAKEAKSPKKAAKSPKKA

SEQ ID NO: 3332 - protein, 189 aa, Zea mays subsp. mays
  peptide (1)..(189): Ceres Seq. ID no. 12412986
  misc_feature (79)..(79): Xaa is any aa, unknown or other
  misc_feature (81)..(81): Xaa is any aa, unknown or other
IPLRLSPPCSNPALTRAASRHVEENRGEAGPARQQGQAEGAEGHLRARRHRRRVGGHGGAQDDGDRDGGPGAGGEQAAXKXVGGAHRLRRAGQGAREEGGEEGRRRREEGRRRWRGQEGGRGREEGRRRRWRRQERRRGQEGGRRRQEAGRRGQEGGWRWQEGRQEGRRRRRRRGEEARRRGAPAQEDR

SEQ ID NO: 3333 - DNA, 1206 bp, Zea mays subsp. mays
  misc_feature (1)..(1206): Ceres Seq. ID no. 12406176
  misc_feature (1)..(1206): Ortholog of  Ceres SEQ ID NO 14313302 as cited in SEQ ID NO 51621
gcacgagaccattacctagaacatcctaatcaaaagatcgggctgccctgccgcctcttgctcccttcctcctctcgcccagcagcctagctacttgagcgagacgagctccagctgaggaagtgagaggtcgtggtccgagaggcgtgcgtgcgtggccatggacggcgccgaggacgacgggacggagtggatgatgcatggtgccggagggaagggaaaaggcggcggcgcgctcgacaagaacaagaagcgcttcagcgacgagcagaccaagtcgctggagtccatgttcgcgacgcaggccaagctggagccgcgccagaagctgcagctggcgcgggagctcggcctgcagccgcgccaggtcgccatctggttccagaacaagcgcgcgcgctggaagtccaagcagctggagcgcgagtactcggcgctgcgcgacgactaccacgcgctcctctgcagctacgagtccctcaaggacgagaagcgcgcgctcctcaagcagctggagaagctggccgagatgctgcacgagccgccgcagggcaagtactacggcggcaatgcggacgacgtgcgctcgggcggcgtcggcggcacgaaggaggaggaggagtccacagacgcctgcgccggggccgcgctctactcgtccgagtgcgctggcggtggcaggttcatcgcgcacttcttggcggacgacgacgtgggagcagccctcttccggccgccgtcgtctccgcagccgaccgctggcttactcacgtcgtcggggccgccggagcaccagccgttccagttccactccggctactgctggccgtcgtcgtcggcggagcagacctgcagcggctcgcaatggtgggagttcgagtccctcagcgagtgacgtacgatgatcacaagcggccgggggtcactcggttccaagcacacgtaagggccgggccaatacgagttcgttcgtagcggtctcgtcactcgtcagctagccctgcagagcaacggtgtatgcatagcttcagtagatcgaagtccaggtccaggactgcccatcaagcagtttcttcttctcgccatcgatcatcgatcatgcatgcaaaagatttttttttctctcccttgctatcagatcatgtaatccagcagaggaacatgtagagaaagatcaaacgaggttatagagagaaggtcgcctgc

SEQ ID NO: 3334 - protein, 244 aa, Zea mays subsp. mays
  peptide (1)..(244): Ceres Seq. ID no. 12406177
MDGAEDDGTEWMMHGAGGKGKGGGALDKNKKRFSDEQTKSLESMFATQAKLEPRQKLQLARELGLQPRQVAIWFQNKRARWKSKQLEREYSALRDDYHALLCSYESLKDEKRALLKQLEKLAEMLHEPPQGKYYGGNADDVRSGGVGGTKEEEESTDACAGAALYSSECAGGGRFIAHFLADDDVGAALFRPPSSPQPTAGLLTSSGPPEHQPFQFHSGYCWPSSSAEQTCSGSQWWEFESLSE

SEQ ID NO: 3335 - protein, 234 aa, Zea mays subsp. mays
  peptide (1)..(234): Ceres Seq. ID no. 12406178
MVPEGREKAAARSTRTRSASATSRPSRWSPCSRRRPSWSRARSCSWRGSSACSRARSPSGSRTSARAGSPSSWSASTRRCATTTTRSSAATSPSRTRSARSSSSWRSWPRCCTSRRRASTTAAMRTTCARAASAARRRRRSPQTPAPGPRSTRPSALAVAGSSRTSWRTTTWEQPSSGRRRLRSRPLAYSRRRGRRSTSRSSSTPATAGRRRRRSRPAAARNGGSSSPSASDVR

SEQ ID NO: 3336 - protein, 233 aa, Zea mays subsp. mays
  peptide (1)..(233): Ceres Seq. ID no. 12406179
MMHGAGGKGKGGGALDKNKKRFSDEQTKSLESMFATQAKLEPRQKLQLARELGLQPRQVAIWFQNKRARWKSKQLEREYSALRDDYHALLCSYESLKDEKRALLKQLEKLAEMLHEPPQGKYYGGNADDVRSGGVGGTKEEEESTDACAGAALYSSECAGGGRFIAHFLADDDVGAALFRPPSSPQPTAGLLTSSGPPEHQPFQFHSGYCWPSSSAEQTCSGSQWWEFESLSE

SEQ ID NO: 3337 - DNA, 1343 bp, Zea mays subsp. mays
  misc_feature (1)..(1343): Ceres Seq. ID no. 12410293
  misc_feature (1)..(1343): Ortholog of  Ceres SEQ ID NO 15174863 as cited in SEQ ID NO 51281
  misc_feature (1)..(1343): Ortholog of  Ceres SEQ ID NO 12614972 as cited in SEQ ID NO 61986
  misc_feature (1)..(1343): Ortholog of  Ceres SEQ ID NO 14302317 as cited in SEQ ID NO 63244
  misc_feature (1)..(1343): Ortholog of  Ceres SEQ ID NO 12625706 as cited in SEQ ID NO 64144
  misc_feature (1)..(1343): Ortholog of  Ceres SEQ ID NO 13584933 as cited in SEQ ID NO 65009
  misc_feature (1)..(1343): Ortholog of  Ceres SEQ ID NO 12634984 as cited in SEQ ID NO 0
  misc_feature (1)..(1343): Ortholog of  Ceres SEQ ID NO 13599377 as cited in SEQ ID NO 0
atatcttagttgcacggttaggtaagacatatggacacaggcagttgcgtctctgtctcttatatacatatgctagatttgctatattgagttgacatgccgttagttgcgatttgcgaagctagctcccaccatctgcgacgccatgtcttcttcctctgtccaacaaacggcctttcccgagcaagaagccgatgcggaaggcgaaacgaaccctgagctctaccagcatttcgccaacttggtctcctccctgccgagctccaaaggcttgtccaacaacaaattctaccgccacgaccaaggctggcactgcagcgtggtgggcatagtgggcgccatggtcgccgacgcgtgcttcagcgcgcgcccctcggacgtcatcgtcgccaccctgcccaagtccggcaccacgtggatgaagtcgctcctgtacgccaccgtgcaccggagagagcgtcccgtcgtcggcgccgccgccgaccagcatcctctcaacagctggggcccccacgaactcatcaagttcttcgagtaccagctctacacgcgggacagggtcccggacctggacaggctccccgaccctcggctcttcgcgacgcacgtccctttcgtgtcgctgccgagctccgtggtcgccacgccgggctgcaagatcgtctacgtgtgccgcgaccccaaggaccacctcgtctccctgtgggacttcgtcaacaaatacttcagggtcaaggatgggctcgagcctctctccgtggaggccgccgccgagctgttctgcgccggcctgaccccgttcgggccgtactgggaccacgtgctcggctactggcgcgcgcaccgcgcggaccccgacaaggtgctcttcttcaggtacgaggagatgcagagggaccccgcggcgcacgtccgcaggctggcggagttcgtcggcctcccattcagctccgaggaggaggacggcggcgtggtggatgccgtcgtggggctgtgctcgttcgagcgcatgaggggcatggcgccgaccaaggcgtggcaggactgagttcccgatcggcgtggtgcccaacagctccttcttccggcagggcgtggtgggggactgggtgaaccacctgtcaccggagatggcgcgccgcattgacgcgatcactgcagacaagttcaggggttcgagtctcgtcgtctagctagctgttacggatcaatcatcactcatcatcagtgcgccactctaccgtggtttctcaaatgctcaataatgcaaggactacctattagtattctatatctatactattctattaataagaacttatatatgttgctatcgcggctcc

SEQ ID NO: 3338 - protein, 300 aa, Zea mays subsp. mays
  peptide (1)..(300): Ceres Seq. ID no. 12410294
MSSSSVQQTAFPEQEADAEGETNPELYQHFANLVSSLPSSKGLSNNKFYRHDQGWHCSVVGIVGAMVADACFSARPSDVIVATLPKSGTTWMKSLLYATVHRRERPVVGAAADQHPLNSWGPHELIKFFEYQLYTRDRVPDLDRLPDPRLFATHVPFVSLPSSVVATPGCKIVYVCRDPKDHLVSLWDFVNKYFRVKDGLEPLSVEAAAELFCAGLTPFGPYWDHVLGYWRAHRADPDKVLFFRYEEMQRDPAAHVRRLAEFVGLPFSSEEEDGGVVDAVVGLCSFERMRGMAPTKAWQD

SEQ ID NO: 3339 - protein, 235 aa, Zea mays subsp. mays
  peptide (1)..(235): Ceres Seq. ID no. 12410295
MVADACFSARPSDVIVATLPKSGTTWMKSLLYATVHRRERPVVGAAADQHPLNSWGPHELIKFFEYQLYTRDRVPDLDRLPDPRLFATHVPFVSLPSSVVATPGCKIVYVCRDPKDHLVSLWDFVNKYFRVKDGLEPLSVEAAAELFCAGLTPFGPYWDHVLGYWRAHRADPDKVLFFRYEEMQRDPAAHVRRLAEFVGLPFSSEEEDGGVVDAVVGLCSFERMRGMAPTKAWQD

SEQ ID NO: 3340 - protein, 209 aa, Zea mays subsp. mays
  peptide (1)..(209): Ceres Seq. ID no. 12410296
MKSLLYATVHRRERPVVGAAADQHPLNSWGPHELIKFFEYQLYTRDRVPDLDRLPDPRLFATHVPFVSLPSSVVATPGCKIVYVCRDPKDHLVSLWDFVNKYFRVKDGLEPLSVEAAAELFCAGLTPFGPYWDHVLGYWRAHRADPDKVLFFRYEEMQRDPAAHVRRLAEFVGLPFSSEEEDGGVVDAVVGLCSFERMRGMAPTKAWQD

SEQ ID NO: 3341 - DNA, 1332 bp, Zea mays subsp. mays
  misc_feature (1)..(1332): Ceres Seq. ID no. 12407298
  misc_feature (1)..(1332): Ortholog of  Ceres SEQ ID NO 14306066 as cited in SEQ ID NO 57378
  misc_feature (1)..(1332): Ortholog of  Ceres SEQ ID NO 14311969 as cited in SEQ ID NO 58929
  misc_feature (1)..(1332): Ortholog of  Ceres SEQ ID NO 14309357 as cited in SEQ ID NO 0
aatataggcaccccgcaccccgttggcgtttgcccgtcctgactcctcgtccccgtgcacaccaccctcgtctccgcgcccgcgccactcacatcgtgatcgagacgacccgcgtcctccgcggtccgcgcccgcgcaccatctcgcctcgcattcccgaaagtatctgtattccttgatcaacatgtcgcgggaggagaatgtttatatggccaagctggctgagcaagcagaacggtacgaggaaatggttgaatacatggagaaggtggctaagaccacagatgtgcaagagctcactgttgaggagcgtaaccttctatctgttgcctacaagaatgtgattgcggccccccgtgcctcatggcgcattatctcctccatcgagcagaaagaggagtcccgtaagaatgaggaacatgttgcacagatcaaggaataccgtggcaagattgaggctgaattgagcaacatttgtgatggtatcctaaagctgcttgacacgcaccttgtgccttcctccactgccacagagtcgaaggtgttttacctcaagatgaagggtgattatcacaggtaccttgctgagtttaagactggtgctgagaggaaggaatctgcagagagcacaatggtagcttataaggcagctcaggatattgcattggctgaactgccacctattcatcccataaggcttggacttgcacttaacttctcagttttctattacgagattcagaactctccagacaaagcttgcaatcttgccaaggaggcgtttgatgaagctatttctcagttggacatgcttggtgaggattcctacaaagatagcaacttgattatgcagctcctgagggacaacttgaccctctggacggaggacggcattgaggagggcttagaatcctctaagggcgatgctggtgagggtcagtagcctggtaaacttagattgatggttcgacgtgtttctcaagcacatcgtgttggacgcccagtgctgacaaaaggcttttgctgctccatgcattccaagcttctgccccctcgttcgcaccctctttatgttgttggctggtagtggtcagatttagtcccattggtttagttggccctgggtccatctgaactgatgtattgttactgctatggaagtcattcctttagttttgctctggcagtggattgctgttgggtcgtgttttcagtctttattggtttccgatcggacgctgttgcgggcaaaccacccctgtagatactcttcacatgctgaagaaaactaccagcagccgtttagcctgaataattgctaaatgataggtt

SEQ ID NO: 3342 - protein, 252 aa, Zea mays subsp. mays
  peptide (1)..(252): Ceres Seq. ID no. 12407299
MSREENVYMAKLAEQAERYEEMVEYMEKVAKTTDVQELTVEERNLLSVAYKNVIAAPRASWRIISSIEQKEESRKNEEHVAQIKEYRGKIEAELSNICDGILKLLDTHLVPSSTATESKVFYLKMKGDYHRYLAEFKTGAERKESAESTMVAYKAAQDIALAELPPIHPIRLGLALNFSVFYYEIQNSPDKACNLAKEAFDEAISQLDMLGEDSYKDSNLIMQLLRDNLTLWTEDGIEEGLESSKGDAGEGQ

SEQ ID NO: 3343 - protein, 244 aa, Zea mays subsp. mays
  peptide (1)..(244): Ceres Seq. ID no. 12407300
MAKLAEQAERYEEMVEYMEKVAKTTDVQELTVEERNLLSVAYKNVIAAPRASWRIISSIEQKEESRKNEEHVAQIKEYRGKIEAELSNICDGILKLLDTHLVPSSTATESKVFYLKMKGDYHRYLAEFKTGAERKESAESTMVAYKAAQDIALAELPPIHPIRLGLALNFSVFYYEIQNSPDKACNLAKEAFDEAISQLDMLGEDSYKDSNLIMQLLRDNLTLWTEDGIEEGLESSKGDAGEGQ

SEQ ID NO: 3344 - protein, 231 aa, Zea mays subsp. mays
  peptide (1)..(231): Ceres Seq. ID no. 12407301
MVEYMEKVAKTTDVQELTVEERNLLSVAYKNVIAAPRASWRIISSIEQKEESRKNEEHVAQIKEYRGKIEAELSNICDGILKLLDTHLVPSSTATESKVFYLKMKGDYHRYLAEFKTGAERKESAESTMVAYKAAQDIALAELPPIHPIRLGLALNFSVFYYEIQNSPDKACNLAKEAFDEAISQLDMLGEDSYKDSNLIMQLLRDNLTLWTEDGIEEGLESSKGDAGEGQ

SEQ ID NO: 3345 - DNA, 1538 bp, Zea mays subsp. mays
  misc_feature (1)..(1538): Ceres Seq. ID no. 12410280
  misc_feature (1)..(1538): Ortholog of  Ceres SEQ ID NO 14301572 as cited in SEQ ID NO 66173
gcgatctcggtttttacccaaagacgaagccgacgacaaggagaacagagactccggcgagccccagccaccgtgaagccgcgcgaattgcaggagcgaagcaaaggagatgcttctcgaggagctgctccggtgccaaatccacgagtggtacccggccttccgtcgccactccatccccaccgtcatcatcccgctccccgccgccttcctccgctacctcgccggccagcgggcctaccccaacgccgacgccgacgctgaagatggcgctgatgaggagccactaccgttcctccttccggcgataacttccggccgccagcccttcgcgcccatccacgcgcaccaccccgaccccgactctctcctcaactccgacttgttcttcggctccagcagcgaagacgtcttcgaccccgacgccgaccacccgctccggccggaattcccggagctggaggtggccatcgactccgccatcgccgagctaggcggcgccgcgctccccaagctcaactggagcgcgcccaaggatgccaccttcatgtctgccgatggcacgagtcggtgcacgtgcttcgccgaggttgccatgctgctccgctcctccgactgtgtagcccacgaccttgcctccgcgcgacaatcatgcaaggatttcgtgcgcccggagggtgctcgacggaatgcccaaaaagttagtgccggttctgaggaaggtgctcgaccaaatgccgatgggattcgtggctgcgaaggcaccaatggagcaccaagtaattcaagcaagacaggtgaggagggaggcaagacaaatgatggggactgtgatgttgaagatgcaaccgaagaagaacataacgagaatacttgggtggacgatgggttccaatactaccttgccctccgcaagtggtacccaggcctacgccctgagtcagagttccgatgcttcgttcgggagcagaagctggttgctgtgtcccagagagacccatcagcttactacccatcactgcctggatggagttccgaggtgcaaccgaaaattgaggctttcttcaacgaagtgattgagccacagtttgcttcaaacaattatacgtttgatgtgtatgtgaggacagatgggcgagtcaagctcatagatttcaatccatggggtggttataccttgccgctgctgtttacttgggaggagcttgagaaggggagagggtctgagctggagtttcgggtggtcatgcagcagggtgcagtgaggccaggattgatgacagctgtgccatatgatatgctggattggggtgaggggagtggctgggatgtttttctgaagaaggctgacgaggagcttgacagacagatatgaactccctggatggtgattcatgattgtggttcgaaaaaaaagtcttaattatgctgtaggcacacaatttaaagtgatgactgctgttttttttacctgctactgtgctacatactagcagtcacctcctttcttaaaattgctatgcagtctcttgccattt

SEQ ID NO: 3346 - protein, 421 aa, Zea mays subsp. mays
  peptide (1)..(421): Ceres Seq. ID no. 12410281
MLLEELLRCQIHEWYPAFRRHSIPTVIIPLPAAFLRYLAGQRAYPNADADAEDGADEEPLPFLLPAITSGRQPFAPIHAHHPDPDSLLNSDLFFGSSSEDVFDPDADHPLRPEFPELEVAIDSAIAELGGAALPKLNWSAPKDATFMSADGTSRCTCFAEVAMLLRSSDCVAHDLASARQSCKDFVRPEGARRNAQKVSAGSEEGARPNADGIRGCEGTNGAPSNSSKTGEEGGKTNDGDCDVEDATEEEHNENTWVDDGFQYYLALRKWYPGLRPESEFRCFVREQKLVAVSQRDPSAYYPSLPGWSSEVQPKIEAFFNEVIEPQFASNNYTFDVYVRTDGRVKLIDFNPWGGYTLPLLFTWEELEKGRGSELEFRVVMQQGAVRPGLMTAVPYDMLDWGEGSGWDVFLKKADEELDRQI

SEQ ID NO: 3347 - protein, 275 aa, Zea mays subsp. mays
  peptide (1)..(275): Ceres Seq. ID no. 12410282
MSADGTSRCTCFAEVAMLLRSSDCVAHDLASARQSCKDFVRPEGARRNAQKVSAGSEEGARPNADGIRGCEGTNGAPSNSSKTGEEGGKTNDGDCDVEDATEEEHNENTWVDDGFQYYLALRKWYPGLRPESEFRCFVREQKLVAVSQRDPSAYYPSLPGWSSEVQPKIEAFFNEVIEPQFASNNYTFDVYVRTDGRVKLIDFNPWGGYTLPLLFTWEELEKGRGSELEFRVVMQQGAVRPGLMTAVPYDMLDWGEGSGWDVFLKKADEELDRQI

SEQ ID NO: 3348 - protein, 259 aa, Zea mays subsp. mays
  peptide (1)..(259): Ceres Seq. ID no. 12410283
MLLRSSDCVAHDLASARQSCKDFVRPEGARRNAQKVSAGSEEGARPNADGIRGCEGTNGAPSNSSKTGEEGGKTNDGDCDVEDATEEEHNENTWVDDGFQYYLALRKWYPGLRPESEFRCFVREQKLVAVSQRDPSAYYPSLPGWSSEVQPKIEAFFNEVIEPQFASNNYTFDVYVRTDGRVKLIDFNPWGGYTLPLLFTWEELEKGRGSELEFRVVMQQGAVRPGLMTAVPYDMLDWGEGSGWDVFLKKADEELDRQI

SEQ ID NO: 3349 - DNA, 1885 bp, Zea mays subsp. mays
  misc_feature (1)..(1885): Ceres Seq. ID no. 13629041
  misc_feature (1)..(1885): Ortholog of  Ceres SEQ ID NO 15178728 as cited in SEQ ID NO 67280
accgagtcgagtccacagtccacaccaccaccgcgaggtccactaaaaaaacaagagcattaccggcaccaatcaatcaggctggcagtggagtgacagcggcggcaacaccacgcccacgcggcgccggagccgaagccgatcccccgatggatctcccgccgctctcccaccaggccctcttcgccggccgtccgatccgccgacgcgcccgccgtccgcgcgctcctggtcgacgccgaggcgtcgggcacctcgttggccgcgctcgccgccgctcagacggacgccggggaaaccgcgctgtacgttgccgcggaggccggaagcgaggaggtcgtgcgcctcctcctcccgctctacgacttcgaggcagccaccgtccgctcacgccttgacctcgacgccttccatgtcgccgccaagcagggccacaccggggttgtgaaagagttcttggggcggtggccagggctttgctcagtctgtgactcttccaacactagtcccctctactctgctgctgtcaaggatcacttggatgtggtaaatgctatactggacactgatgatagctgcataaagattgtgcggaagaatgggaaaacatccctacatactgctgcaagaattggataccatcgtattgtcaaagcactcatagagagagatccaggaattgttccgatcaatgataggaagggacaaactgcacttcacatggctgtgaagggcaaaaatacagatgtagtggaagagttattgatggctgatgtttccattctcaatgtgagggacaagaaaggaaatactgctttgcacatagctacacggaaatggaggccccagatggtacagcttcttcttagctatgaatcacttgaagttaatgctatcaacagtcaaaatgaaacagctatggatttggctgacaaagttccttatggtgagtctaaaacggaaataatagagtggctgacagaagctggtgcaaagaatgccagaaatgttgggaaaattgatgaggcatcagaactgaggagaactgtgagcgatatcaagcacaatgttcaggcacagcttagcgagaatgctaagaccaacaaacgggtgactgggattcgcaaagagttgcagaaactgcatagagaagctatccagaacaccatcaattcagtcaccttggtagcgaccctgatcgcctccattgccttcgtcgccatattcaatctgccaggtcaatacttccaggatgtgaatagtgggggagatattggtgaggctgaaatagccaagcttaccggtttccgtgtcttctgccttctgaacgctactgctctcttcatctccctcgcggtggtcgtggtgcagatcaccttggttgcctgggaaactggtgcccagaagcaagttatcaagatcgtgaataagctcatgtggacggcatgccttagcacgggtgtggcttttatctcgctggcctatgttgtagttggcccgcagcatgcctggatggccttcacggcatcagccatcggagggccgatcatgattggaactttcctgttcctagcctatctgctgttgcgcccacggttcaagttcggcgaagacagacagcgccgcatcaagagggcaagcggcagcaaatccttctcctggtcaatccatgatgggttttcagatctggaagccttctctgatcacgagaagaggatctatgccctgtaggagggtgtaacagtaactactcctgcaagaggcaactgggagagtacaaatggttcatgtatatatttggtttagccgttttagcctagccgctgttagacctttctccccatgtacaatatctaataatgaagagctgcagctattgtaaagc

SEQ ID NO: 3350 - protein, 336 aa, Zea mays subsp. mays
  peptide (1)..(336): Ceres Seq. ID no. 13629042
MAVKGKNTDVVEELLMADVSILNVRDKKGNTALHIATRKWRPQMVQLLLSYESLEVNAINSQNETAMDLADKVPYGESKTEIIEWLTEAGAKNARNVGKIDEASELRRTVSDIKHNVQAQLSENAKTNKRVTGIRKELQKLHREAIQNTINSVTLVATLIASIAFVAIFNLPGQYFQDVNSGGDIGEAEIAKLTGFRVFCLLNATALFISLAVVVVQITLVAWETGAQKQVIKIVNKLMWTACLSTGVAFISLAYVVVGPQHAWMAFTASAIGGPIMIGTFLFLAYLLLRPRFKFGEDRQRRIKRASGSKSFSWSIHDGFSDLEAFSDHEKRIYAL

SEQ ID NO: 3351 - protein, 321 aa, Zea mays subsp. mays
  peptide (1)..(321): Ceres Seq. ID no. 13629043
MADVSILNVRDKKGNTALHIATRKWRPQMVQLLLSYESLEVNAINSQNETAMDLADKVPYGESKTEIIEWLTEAGAKNARNVGKIDEASELRRTVSDIKHNVQAQLSENAKTNKRVTGIRKELQKLHREAIQNTINSVTLVATLIASIAFVAIFNLPGQYFQDVNSGGDIGEAEIAKLTGFRVFCLLNATALFISLAVVVVQITLVAWETGAQKQVIKIVNKLMWTACLSTGVAFISLAYVVVGPQHAWMAFTASAIGGPIMIGTFLFLAYLLLRPRFKFGEDRQRRIKRASGSKSFSWSIHDGFSDLEAFSDHEKRIYAL

SEQ ID NO: 3352 - protein, 293 aa, Zea mays subsp. mays
  peptide (1)..(293): Ceres Seq. ID no. 13629044
MVQLLLSYESLEVNAINSQNETAMDLADKVPYGESKTEIIEWLTEAGAKNARNVGKIDEASELRRTVSDIKHNVQAQLSENAKTNKRVTGIRKELQKLHREAIQNTINSVTLVATLIASIAFVAIFNLPGQYFQDVNSGGDIGEAEIAKLTGFRVFCLLNATALFISLAVVVVQITLVAWETGAQKQVIKIVNKLMWTACLSTGVAFISLAYVVVGPQHAWMAFTASAIGGPIMIGTFLFLAYLLLRPRFKFGEDRQRRIKRASGSKSFSWSIHDGFSDLEAFSDHEKRIYAL

SEQ ID NO: 3353 - DNA, 1519 bp, Zea mays subsp. mays
  misc_feature (1)..(1519): Ceres Seq. ID no. 13577756
  misc_feature (1)..(1519): Ortholog of  Ceres SEQ ID NO 14314925 as cited in SEQ ID NO 57985
  misc_feature (1)..(1519): Ortholog of  Ceres SEQ ID NO 13591365 as cited in SEQ ID NO 62720
gtctcgtttctcccttcctcagctgctggcccccctgcctgcagccattgccccgctcctcgaggtcaaatggcccctgcccccgctctcaccgccacatccgtcctgaagcgatcccacctacccggcgtccactcgttggccggtcgccggcagccggggcggggaccgcgtctcggtgctttctccagcgatcccgccgccccgcgtttcatggcagcaaggatctggagtggttgctaagaggctcctctgggcgagtgcgagtggttccttcgagaaagataacatcggggaggacgtggtgttgccttctcagatagcggtggagaataaagtagatttgttgaagattttgaagagtgccaactcaattattccccatatagtgctggggagtacaattctcgcgctggtgtacccgccttcgttcacatggttcactaccaggtactatgcaccagctttggggttcttgatgtttgctgttggtgtaaactcaagcgccaatgatttcattgaagcaataaaaaggccagatgctattgctgcgggctatatcggacagtttgtcattaagcctttgtttggattcctttttgacactcttgcagttgcagttcttaacctcccagctgctctaggtgctggcataatgttggtttcatgcgtgagcggagcacaactttcaaactacgcaactttcttgacggatccacatatggctcctctcagcattgttatgacgtcattgtcaacagctactgcagtttttgtcaccccaacattatcttactttcttattggccagaaattacctgtagatgtcaaggggatgatgtccagcatcattcaaatagttgttgctccaattgctgccggattgcttctgaatagattccttccaaggctctgtgcagctattcagccatttctcccttcgatgtcggtgtttgtcactgccctgtgtgttggctcaccattggcaataaatatcaaggctgttttgtcgccatttggattaaccatagtgctgctcctttttgcattccacacctcatcttttgtagctggttatcatcttgctggtacttggtttagcaagtcagacgacgtaaaggcactacaaaggacaatatctttcgagacaggaatgcaaagcagccttcttgctcttgctttagcaaataagttcttcccagatccactagtgggtgtgcctccagccatatcggttgtgttgatgtccttaatgggatttgctcttgtcatggtatggtccaagaaaagagaagcctaattttctgaatcaattaagcgctgttgttttctgctcttatttatgtagagtaggcagaattttcatggttcaaatttgaaactcttgtatcgttccttctctcctctgagtgagcttgcaagggctctctctctctctcgctaaattattttccagatttacattttttttttgaatcgtgctggcatgccgccccaagagctgatggagttcaattcc

SEQ ID NO: 3354 - protein, 273 aa, Zea mays subsp. mays
  peptide (1)..(273): Ceres Seq. ID no. 13577757
MFAVGVNSSANDFIEAIKRPDAIAAGYIGQFVIKPLFGFLFDTLAVAVLNLPAALGAGIMLVSCVSGAQLSNYATFLTDPHMAPLSIVMTSLSTATAVFVTPTLSYFLIGQKLPVDVKGMMSSIIQIVVAPIAAGLLLNRFLPRLCAAIQPFLPSMSVFVTALCVGSPLAINIKAVLSPFGLTIVLLLFAFHTSSFVAGYHLAGTWFSKSDDVKALQRTISFETGMQSSLLALALANKFFPDPLVGVPPAISVVLMSLMGFALVMVWSKKREA

SEQ ID NO: 3355 - protein, 214 aa, Zea mays subsp. mays
  peptide (1)..(214): Ceres Seq. ID no. 13577758
MLVSCVSGAQLSNYATFLTDPHMAPLSIVMTSLSTATAVFVTPTLSYFLIGQKLPVDVKGMMSSIIQIVVAPIAAGLLLNRFLPRLCAAIQPFLPSMSVFVTALCVGSPLAINIKAVLSPFGLTIVLLLFAFHTSSFVAGYHLAGTWFSKSDDVKALQRTISFETGMQSSLLALALANKFFPDPLVGVPPAISVVLMSLMGFALVMVWSKKREA

SEQ ID NO: 3356 - protein, 192 aa, Zea mays subsp. mays
  peptide (1)..(192): Ceres Seq. ID no. 13577759
MAPLSIVMTSLSTATAVFVTPTLSYFLIGQKLPVDVKGMMSSIIQIVVAPIAAGLLLNRFLPRLCAAIQPFLPSMSVFVTALCVGSPLAINIKAVLSPFGLTIVLLLFAFHTSSFVAGYHLAGTWFSKSDDVKALQRTISFETGMQSSLLALALANKFFPDPLVGVPPAISVVLMSLMGFALVMVWSKKREA

SEQ ID NO: 3357 - DNA, 1432 bp, Zea mays subsp. mays
  misc_feature (1)..(1432): Ceres Seq. ID no. 12406172
  misc_feature (1)..(1432): Ortholog of  Ceres SEQ ID NO 13654191 as cited in SEQ ID NO 68235
atgtccacggtcaccgtggcgagggcagccccgccgagcgttagtcacagttgttgcctgcctaccatgcggctctaactcgatccgtgcagcagacgccgagtcgcggcaaggagtagctaggaactaggaaggaggaggcagggaaaggccaggccatggcgctcgaagctgtggtgttcccgaagagcacccggggtgtacggcggtcaaggcgcgcccggcgtcgctgggctgcggcttccacaccgaggagctcgaggtcgaggacaangncggcgtggttctgcaagganaagccgccgacgcgctgccgccgcccggtggtgccgccaccacgtnggactgggacgcggtgctctgnccgtgctccactacaccagctgcaggcgccgtggaggagtgctgggacgtgcatgcagcancagcatcagctcctgtccgtgtccccgccgccctcgtccgccgtcgcagcgtcgtcgtctgggcgccgcaaggctgccgcgtcggaggcggcgcggcgacggcggcgacgccccaaggcggtgaggaacacggacgagatggagagccagcgccgcaaccacattgccgtggagcgcaaccggcggcggcagatgaacgagtacctctccgtgctccgctccgccatgccgccttcctacacgcagcggggtgaccaggcgtcgatcgtggctggtgccatcaacttcgtcaaggagctggagcaactgctgcagtcgctggaggcgcagaagcggcgacagaggtgcaccgagccattggcggcgtcgtcgttcgccggcttcttcatcttccctcagtactccaccaccgccgcgacgagtggtgcggttggctctagtagcgacagcgctggctccggcggcgatcagagtggcggcggcgggggagcgcggcgaggcgtggccgacatcgaggtgtccctggcggagagccacgccaacgtgaaggtgctcgcggcgcggcnggccgcggcagctgctgaggatggtggtggcgctgcagtgcctnggccctcaccgtgctcccacctcaccgtgaccaccaccgccgaccacctggccttgtactccctcagcctcaagatgggaggacgagtgccggctgtcgccgtcggtcgacgacatcgccgccgcggtgaacgagatactcgacgagtgcgcccgcgggggggcccactgatgattagccgcttagcctaatatatatcttagcgagtgccatgtattgttgtgacgtacgtcgatttgatcctagtacacggataacactggcaagctagcgtggcagctcgctcgcgccactgtcaggcaggcggtaccactaccactccatatgtttgcgtgcaagtaaacatgtaccgattggaccagcttacgtactactacgactctttttttgcagcgcc

SEQ ID NO: 3358 - protein, 355 aa, Zea mays subsp. mays
  peptide (1)..(355): Ceres Seq. ID no. 12406173
  misc_feature (39)..(39): Xaa is any aa, unknown or other
  misc_feature (40)..(40): Xaa is any aa, unknown or other
  misc_feature (46)..(46): Xaa is any aa, unknown or other
  misc_feature (62)..(62): Xaa is any aa, unknown or other
  misc_feature (69)..(69): Xaa is any aa, unknown or other
  misc_feature (89)..(89): Xaa is any aa, unknown or other
  misc_feature (278)..(278): Xaa is any aa, unknown or other
  misc_feature (293)..(293): Xaa is any aa, unknown or other
MALEAVVFPKSTRGVRRSRRARRRWAAASTPRSSRSRTXXAWFCKXKPPTRCRRPVVPPPRXTGTRCSXRAPLHQLQAPWRSAGTCMQXQHQLLSVSPPPSSAVAASSSGRRKAAASEAARRRRRRPKAVRNTDEMESQRRNHIAVERNRRRQMNEYLSVLRSAMPPSYTQRGDQASIVAGAINFVKELEQLLQSLEAQKRRQRCTEPLAASSFAGFFIFPQYSTTAATSGAVGSSSDSAGSGGDQSGGGGGARRGVADIEVSLAESHANVKVLAARXAAAAAEDGGGAAVPXPSPCSHLTVTTTADHLALYSLSLKMGGRVPAVAVGRRHRRRGERDTRRVRPRGGPLMISRLA

SEQ ID NO: 3359 - protein, 269 aa, Zea mays subsp. mays
  peptide (1)..(269): Ceres Seq. ID no. 12406174
  misc_feature (3)..(3): Xaa is any aa, unknown or other
  misc_feature (192)..(192): Xaa is any aa, unknown or other
  misc_feature (207)..(207): Xaa is any aa, unknown or other
MQXQHQLLSVSPPPSSAVAASSSGRRKAAASEAARRRRRRPKAVRNTDEMESQRRNHIAVERNRRRQMNEYLSVLRSAMPPSYTQRGDQASIVAGAINFVKELEQLLQSLEAQKRRQRCTEPLAASSFAGFFIFPQYSTTAATSGAVGSSSDSAGSGGDQSGGGGGARRGVADIEVSLAESHANVKVLAARXAAAAAEDGGGAAVPXPSPCSHLTVTTTADHLALYSLSLKMGGRVPAVAVGRRHRRRGERDTRRVRPRGGPLMISRLA

SEQ ID NO: 3360 - protein, 220 aa, Zea mays subsp. mays
  peptide (1)..(220): Ceres Seq. ID no. 12406175
  misc_feature (143)..(143): Xaa is any aa, unknown or other
  misc_feature (158)..(158): Xaa is any aa, unknown or other
MESQRRNHIAVERNRRRQMNEYLSVLRSAMPPSYTQRGDQASIVAGAINFVKELEQLLQSLEAQKRRQRCTEPLAASSFAGFFIFPQYSTTAATSGAVGSSSDSAGSGGDQSGGGGGARRGVADIEVSLAESHANVKVLAARXAAAAAEDGGGAAVPXPSPCSHLTVTTTADHLALYSLSLKMGGRVPAVAVGRRHRRRGERDTRRVRPRGGPLMISRLA

SEQ ID NO: 3361 - DNA, 996 bp, Zea mays subsp. mays
  misc_feature (1)..(996): Ceres Seq. ID no. 12413160
  misc_feature (1)..(996): Ortholog of  Ceres SEQ ID NO 13596185 as cited in SEQ ID NO 67997
aatcaaaaaccccgaaggttcggactgaatgaagcgaaagcccaaatccccttccccttccccctcttcgtctccgtcggcggcgtcggaccgaacccgatcccgcagccctaactaaccctaggaggcaggcggcggcggggatggtgtactacgcgctgttggtgggcgcggagctggatggcctcaccaacctgcagcccccgccacggctgcgacgaccccagcttcccctactacctcaagctcaagtgcgagaactgcggggaggtcaccgccaagtccacctacgtcaccctcagcgagcaagtcgacctgcccagaggacacggcgccgctcacctcgtccagaagtgcaagctttgtgggagagatggaacaattgtgatgattcctggtcaggggacaccacttactattgagcagagccagaaagaggagaagacttgtttgatggtgtttgactgcagaggctatgaacctgttgagttttcctttggcactggctggaaggctgaatctgtgcatgggactccttttgaaattgactgctctgaaggtgaattttctgagtatgatgagaagggagaatgccccgttgagctaggcaagctgcagtcaacattcaaagtggtgaagaagcatgagaagggtgggaagactagatttgtctagatcgagtgacttggaatctggcagatattggagttggcggtgtgtataaatggtagatttgggctgaaggtcatgcgtgatccgacctcctttttcttctatctgttgattctgtggatgcagtgaaccatgcgaagctttcggtgatagtgtccacaggggcattaccctgtaccgaaactgatctttataacttaccaccaatgctcgaacatgttgctggttgctggtatttttagcactgttctctctggctaatgggtctgaagacatctcaaggggatatgtggtgcaatctgagttctttaaagggcatcgtct

SEQ ID NO: 3362 - protein, 164 aa, Zea mays subsp. mays
  peptide (1)..(164): Ceres Seq. ID no. 12413161
MASPTCSPRHGCDDPSFPYYLKLKCENCGEVTAKSTYVTLSEQVDLPRGHGAAHLVQKCKLCGRDGTIVMIPGQGTPLTIEQSQKEEKTCLMVFDCRGYEPVEFSFGTGWKAESVHGTPFEIDCSEGEFSEYDEKGECPVELGKLQSTFKVVKKHEKGGKTRFV

SEQ ID NO: 3363 - protein, 95 aa, Zea mays subsp. mays
  peptide (1)..(95): Ceres Seq. ID no. 12413162
MIPGQGTPLTIEQSQKEEKTCLMVFDCRGYEPVEFSFGTGWKAESVHGTPFEIDCSEGEFSEYDEKGECPVELGKLQSTFKVVKKHEKGGKTRFV

SEQ ID NO: 3364 - protein, 92 aa, Zea mays subsp. mays
  peptide (1)..(92): Ceres Seq. ID no. 12413163
MVYYALLVGAELDGLTNLQPPPRLRRPQLPLLPQAQVRELRGGHRQVHLRHPQRASRPAQRTRRRSPRPEVQALWERWNNCDDSWSGDTTYY

SEQ ID NO: 3365 - DNA, 1277 bp, Zea mays subsp. mays
  misc_feature (1)..(1277): Ceres Seq. ID no. 12406397
  misc_feature (1)..(1277): Ortholog of  Ceres SEQ ID NO 14303097 as cited in SEQ ID NO 66460
  misc_feature (1)..(1277): Ortholog of  Ceres SEQ ID NO 15226238 as cited in SEQ ID NO 68840
  misc_feature (1)..(1277): Ortholog of  Ceres SEQ ID NO 12635175 as cited in SEQ ID NO 0
  misc_feature (1)..(1277): Ortholog of  Ceres SEQ ID NO 14306100 as cited in SEQ ID NO 0
actcatcaaacccgcccttacagtcttatccatcgcggcctcgccgtccagcagctagctacgacctagctctgggcctctggccctgtgcctcgcccgagctgcagctccactccggtgcaccatggccgtcctgacgaaggtgcttctccgtctcttcttcaccactggcggcctcatcgtcttcctgttgtgtcccgcgtcctgccttgctcgtcctcctcattccagcagcaactccaactactactgcgactggtgccctcgccgttccaccgcctcccccgacctcgacgcgtcgttgctgcgttcttgtggaactagtagagacggcgacgacggtggcttcggctgcgggtacggggctgcggagcagctggacggaggtggagctccccacgtcgctgccgcgggcgccgactccttcagcgctggcgctggctgcggcgcctgctaccagttgaggtgcagagaccggagggtgtgcggcgacggcggcgtcaaggtcgtcgtggtagccggcttggccaaccggacggggttcttgctcaccagggaggccttcgctgcgatgatggccaggccgcgcgtgtcgtccaatgaccaactgctgcccggcttgggtggcaatgttgttgaggtcgacttcaggaggataccttgcgagtacaagaacagaaacctgtcggtacgcatcgacgaggaagggagccggcacccggcgcacctggccatcaccttcctgtaccagggcgggcagacggacatcgcggccgtcgagctctcgcacgcgcacgcgcagccgccgtcgtggcggcccatggcgcccgtgggcaggcgcggcatcgtgacgtggcgcacctcaagcgcgccggcggggccgctgcagctccgcctcgtcgtcacggccggcgtcggcggcaagtggctgcgggccggcggggacgtgctgccggcggactggcggcctgggcaggtgcacgacacggggctccggatccgcgacgtcgccctgagctcctgcgcccgctcctgccgcggcgccgctacagccggcgccagcgaggagctcaggtagtagagtagattagatgtaggcatggcatacaatggcattgggctggaggcgagcgagattagcttgctgcttgagtgcccatgaaggatgctcgtgctcgtccattgaggaaaattaaaagcaaaccagcagagagctgatctctgatgatctgacgcagtccatggaaatggaagcaaattaagttggtttcttgctg

SEQ ID NO: 3366 - protein, 317 aa, Zea mays subsp. mays
  peptide (1)..(317): Ceres Seq. ID no. 12406398
MAVLTKVLLRLFFTTGGLIVFLLCPASCLARPPHSSSNSNYYCDWCPRRSTASPDLDASLLRSCGTSRDGDDGGFGCGYGAAEQLDGGGAPHVAAAGADSFSAGAGCGACYQLRCRDRRVCGDGGVKVVVVAGLANRTGFLLTREAFAAMMARPRVSSNDQLLPGLGGNVVEVDFRRIPCEYKNRNLSVRIDEEGSRHPAHLAITFLYQGGQTDIAAVELSHAHAQPPSWRPMAPVGRRGIVTWRTSSAPAGPLQLRLVVTAGVGGKWLRAGGDVLPADWRPGQVHDTGLRIRDVALSSCARSCRGAATAGASEELR

SEQ ID NO: 3367 - protein, 168 aa, Zea mays subsp. mays
  peptide (1)..(168): Ceres Seq. ID no. 12406399
MMARPRVSSNDQLLPGLGGNVVEVDFRRIPCEYKNRNLSVRIDEEGSRHPAHLAITFLYQGGQTDIAAVELSHAHAQPPSWRPMAPVGRRGIVTWRTSSAPAGPLQLRLVVTAGVGGKWLRAGGDVLPADWRPGQVHDTGLRIRDVALSSCARSCRGAATAGASEELR

SEQ ID NO: 3368 - protein, 167 aa, Zea mays subsp. mays
  peptide (1)..(167): Ceres Seq. ID no. 12406400
MARPRVSSNDQLLPGLGGNVVEVDFRRIPCEYKNRNLSVRIDEEGSRHPAHLAITFLYQGGQTDIAAVELSHAHAQPPSWRPMAPVGRRGIVTWRTSSAPAGPLQLRLVVTAGVGGKWLRAGGDVLPADWRPGQVHDTGLRIRDVALSSCARSCRGAATAGASEELR

SEQ ID NO: 3369 - DNA, 1057 bp, Zea mays subsp. mays
  misc_feature (1)..(1057): Ceres Seq. ID no. 12410273
  misc_feature (1)..(1057): Ortholog of  Ceres SEQ ID NO 15178847 as cited in SEQ ID NO 1145
  misc_feature (1)..(1057): Ortholog of  Ceres SEQ ID NO 14311253 as cited in SEQ ID NO 56483
  misc_feature (1)..(1057): Ortholog of  Ceres SEQ ID NO 13597435 as cited in SEQ ID NO 64073
  misc_feature (1)..(1057): Ortholog of  Ceres SEQ ID NO 13656209 as cited in SEQ ID NO 64393
catgcaaatttagtcgtggccagcgtcgctgtctttttttcttccgttacctctccaggcagctcctctccctctctgtcgccgacgactacgccaggtcttcttcggggcccaggtcgctgccgcctacatcaggggccccaagttttcctaggacccctcgccggcgacgagcaccaccagcttggttcactcccaacaaaatgtcagccaatgtgggtgaatcaactagcggtgtcagcagcagcgatgcagctggggggagctttgagtgcaacatatgcttcgagctgcctcaggagccaatagtgactctctgtggccacctcttctgctggccgtgcctttaccggtggctgcacattcacgcacactcgccagagtgcccagtgtgcaaggccctcgtggaggaggacaagctcgtccccctttatgggcgtggcaaggatcgcgtcgacccgaggtcgaagaacatgcccgagggcgagattcctcaccgcccaacgggccagaggcctgccacagccccccgggcccatgctaacagcaactttgccaatgccaatgccaatgccaatccatggttcccgggcgcaggagtccctctggcaaatgcgcgatgggggaactacgcattctcagctgctttcgggggactgttccctatgcttagcttccaagttcatgggtttccagatgccgccgcttacgcgcagcctgctgggttccactatgaatacgggcatgggcatgggcatgggttccaccatggcgggcatatgggacaagcacaagcccatggcgtccaccgacaggcaccgttggggcaacaacagcagcaggcagatatttatctgaaggccctgctcttcatgattgtaattctagtgctcgcaagcctcctcgcgttttaaagcttgtttggcaacgtctcctcgtcatggtttggaaattgtaattctggggagtgctcctcctggcatttcagtgctgttggcatggcagtttgacattgtgatggcgtattggcctatgagaatcgccagaatatttcact

SEQ ID NO: 3370 - protein, 303 aa, Zea mays subsp. mays
  peptide (1)..(303): Ceres Seq. ID no. 12410274
CKFSRGQRRCLFFFRYLSRQLLSLSVADDYARSSSGPRSLPPTSGAPSFPRTPRRRRAPPAWFTPNKMSANVGESTSGVSSSDAAGGSFECNICFELPQEPIVTLCGHLFCWPCLYRWLHIHAHSPECPVCKALVEEDKLVPLYGRGKDRVDPRSKNMPEGEIPHRPTGQRPATAPRAHANSNFANANANANPWFPGAGVPLANARWGNYAFSAAFGGLFPMLSFQVHGFPDAAAYAQPAGFHYEYGHGHGHGFHHGGHMGQAQAHGVHRQAPLGQQQQQADIYLKALLFMIVILVLASLLAF

SEQ ID NO: 3371 - protein, 236 aa, Zea mays subsp. mays
  peptide (1)..(236): Ceres Seq. ID no. 12410275
MSANVGESTSGVSSSDAAGGSFECNICFELPQEPIVTLCGHLFCWPCLYRWLHIHAHSPECPVCKALVEEDKLVPLYGRGKDRVDPRSKNMPEGEIPHRPTGQRPATAPRAHANSNFANANANANPWFPGAGVPLANARWGNYAFSAAFGGLFPMLSFQVHGFPDAAAYAQPAGFHYEYGHGHGHGFHHGGHMGQAQAHGVHRQAPLGQQQQQADIYLKALLFMIVILVLASLLAF

SEQ ID NO: 3372 - DNA, 1981 bp, Zea mays subsp. mays
  misc_feature (1)..(1981): Ceres Seq. ID no. 12410269
  misc_feature (1)..(1981): Ortholog of  Ceres SEQ ID NO 13587235 as cited in SEQ ID NO 0
atcgaccccatcgcgttgccggatcgagctcagctctatctcgaaccttggttcgccgcacggcaccagaagcacggccgtgttctcatcccctccacacgtttccgcctcccgatccacgtccgccgttagccgcggccgacacagctcctcctcctcctcgcagctcttctccagctctcggaggcccgaggtttcatcgacccgcgctccttcatcctcgacacctcactccggcggcgcgggtccgcagtgctgcacatcgcgagccgcgcggcacagccgcacttgttgtccttcgtgcgtggggtgcggttcgacgcgggcggcgggatggcggcgagcgcgcgggacagcaccgatgcagcggagcgagttgtggatgaccacgacggctgggcgtcggacgccgagatggacgtggagatggatgtggtggaaggcgagttccacgaccgcgatgccgaccggagggacggcggcgcggatggtgatgatgagtacttgctgctcactaggataagggacacatcagcagctgaagcaagggcaggaaaggatatacaaggtataccatgggagaggatacacatagccaggcaagattaccgaaaagctaggttggaacagtataagaactatgaaaatttccctcaatcaggagagctcatggataagctgtgcaagcaagtggagaagagcagcaagtattatgaatttcagcacaacactagatcagtgaagccatcaattctccattttcaggaatttgttatgggcaacatcgaagcatgatgtctattttatgtcaaattccacagtaagccactggtcatcattgtctcacaaattatcagaggttcttgacttctctgggcatgttgctccagcggagaagtatcctggcagtttactagaaggtttctctggtgttcaagttagcacacttgctgtgaatgagggtttggtggtagctggtggttttcaaggagaactaattggcaaagatgtggaaggctgtagtgtaaaattctgtatgaggacaactttgagtgacaatgccataacaaatgccatagatatacacagatcgataagtggaagcctgcacattacagtatctaacaacgattgtggtgttcgtgaatatgatatggagagatatcagctcgtgaaccactaccgatataactggccggttaatcacacatccgtgagcccagataagaaacttttggctgtggttggagatgatcgagatgctcttcttgtggattcacgaaatggaaaggtaacctctaccctagttggccatctggactactcatttgctacggcatggcacccggacagccggacattcgcgaccgggaaccaggacaaaacctgccgcatctgggacacccgcaacttgtcgacctcacttgcagtactgcggggcaacatcggcgcgatccggtgcatccgctactcctccgacgggcggttcctggtgttctcggagcctgccgacttcgtccatgtgtacagtgtggctgcggactacaagaaacggcaggagattgacttctttggtgaggtgtccgggatcacgctcagcccggacgatgagtccctgttcatcggagtgtgcgaccgcgtctatgccagcctgttgcagtacaggatgatccgcggattcgactatcttgactcatacgtgtgaagaactgagctttggtgactggtgttgtgctaggtgctggctgaaggttctgatgcgcggttcagggaatatatctgcctgctcttagttcatggcgaatgatggttcggtgggactcgacgccagcgaatctgccgtgtaaatagtttagaatttgaagcgtagtgtagtgctgtggaccaatgctgtctctgaacatacatatgatcagagtaatgtgtgtttgcgctgttagtttcagactccggaatacaaatagttttggaccaaattcct

SEQ ID NO: 3373 - protein, 299 aa, Zea mays subsp. mays
  peptide (1)..(299): Ceres Seq. ID no. 12410270
MSNSTVSHWSSLSHKLSEVLDFSGHVAPAEKYPGSLLEGFSGVQVSTLAVNEGLVVAGGFQGELIGKDVEGCSVKFCMRTTLSDNAITNAIDIHRSISGSLHITVSNNDCGVREYDMERYQLVNHYRYNWPVNHTSVSPDKKLLAVVGDDRDALLVDSRNGKVTSTLVGHLDYSFATAWHPDSRTFATGNQDKTCRIWDTRNLSTSLAVLRGNIGAIRCIRYSSDGRFLVFSEPADFVHVYSVAADYKKRQEIDFFGEVSGITLSPDDESLFIGVCDRVYASLLQYRMIRGFDYLDSYV

SEQ ID NO: 3374 - protein, 222 aa, Zea mays subsp. mays
  peptide (1)..(222): Ceres Seq. ID no. 12410271
MRTTLSDNAITNAIDIHRSISGSLHITVSNNDCGVREYDMERYQLVNHYRYNWPVNHTSVSPDKKLLAVVGDDRDALLVDSRNGKVTSTLVGHLDYSFATAWHPDSRTFATGNQDKTCRIWDTRNLSTSLAVLRGNIGAIRCIRYSSDGRFLVFSEPADFVHVYSVAADYKKRQEIDFFGEVSGITLSPDDESLFIGVCDRVYASLLQYRMIRGFDYLDSYV

SEQ ID NO: 3375 - protein, 183 aa, Zea mays subsp. mays
  peptide (1)..(183): Ceres Seq. ID no. 12410272
MERYQLVNHYRYNWPVNHTSVSPDKKLLAVVGDDRDALLVDSRNGKVTSTLVGHLDYSFATAWHPDSRTFATGNQDKTCRIWDTRNLSTSLAVLRGNIGAIRCIRYSSDGRFLVFSEPADFVHVYSVAADYKKRQEIDFFGEVSGITLSPDDESLFIGVCDRVYASLLQYRMIRGFDYLDSYV

SEQ ID NO: 3376 - DNA, 857 bp, Zea mays subsp. mays
  misc_feature (1)..(857): Ceres Seq. ID no. 12412972
  misc_feature (1)..(857): Ortholog of  Ceres SEQ ID NO 15178083 as cited in SEQ ID NO 56185
  misc_feature (1)..(857): Ortholog of  Ceres SEQ ID NO 15173586 as cited in SEQ ID NO 61901
atcgccgcaactgcccgtctgctcctgcttttcatccagtcgcaaaacaaagagaagagatctccgcgtccgcaaccgcatcgcttccctcccggcagaagaagaagattcggttgggttgtttgtctcttgcaaaccgcaatggctgctgctgccactgctactccggccgtggcgccggaggccggcgaccggaaggcggtggcaccgccggtcgacgcggtggatctggagctggagctggaggagaagcacgtgctggcggtggacgacagctccgtggaccgcgcggtgatcgccaagatcctacgcagctccaaatacagagtgacgaccgtggactcggcgacgcgcgcgctggagctgctggcgctggggctggtccccgacgtgaacatgatcatcacggactactggatgcccgggatgaccgggtacgagctgctgaagcacgtgaaggagtcgtcggcgctgcgggccatcccgggtggtgatcatgtcgtcggagaacgtgcccacccgcatcagccggtgcctggaggagggcgccgaggacttcctcctcaagcccgtccgccccgccgacgtctcccgcctctgcagccggatccggtgaccgcccgcgcaaggatggaggatctggttgcgcgctctgacttaattagaggagttgttaggatccaattttttgtgtgttcgttcgttcgttcgttcttttctttctttcttcttggacatagatctgctgccgccgctgctgccgtcgactgaaacaagaagctaacttagttttagggtccaggttgttgttgttgttgttaggaaggcgagtcgttgggggcagcagatctatgtcc

SEQ ID NO: 3377 - protein, 256 aa, Zea mays subsp. mays
  peptide (1)..(256): Ceres Seq. ID no. 12412973
IAATARLLLLFIQSQNKEKRSPRPQPHRFPPGRRRRFGWVVCLLQTAMAAAATATPAVAPEAGDRKAVAPPVDAVDLELELEEKHVLAVDDSSVDRAVIAKILRSSKYRVTTVDSATRALELLALGLVPDVNMIITDYWMPGMTGYELLKHVKESSALRAIPGGDHVVGERAHPHQPVPGGGRRGLPPQARPPRRRLPPLQPDPVTARARMEDLVARSDLIRGVVRIQFFVCSFVRSFFSFFLLGHRSAAAAAAVD

SEQ ID NO: 3378 - protein, 209 aa, Zea mays subsp. mays
  peptide (1)..(209): Ceres Seq. ID no. 12412974
MAAAATATPAVAPEAGDRKAVAPPVDAVDLELELEEKHVLAVDDSSVDRAVIAKILRSSKYRVTTVDSATRALELLALGLVPDVNMIITDYWMPGMTGYELLKHVKESSALRAIPGGDHVVGERAHPHQPVPGGGRRGLPPQARPPRRRLPPLQPDPVTARARMEDLVARSDLIRGVVRIQFFVCSFVRSFFSFFLLGHRSAAAAAAVD

SEQ ID NO: 3379 - protein, 163 aa, Zea mays subsp. mays
  peptide (1)..(163): Ceres Seq. ID no. 12412975
RRNCPSAPAFHPVAKQREEISASATASLPSRQKKKIRLGCLSLANRNGCCCHCYSGRGAGGRRPEGGGTAGRRGGSGAGAGGEARAGGGRQLRGPRGDRQDPTQLQIQSDDRGLGDARAGAAGAGAGPRREHDHHGLLDARDDRVRAAEAREGVVGAAGHPGW

SEQ ID NO: 3380 - DNA, 978 bp, Zea mays subsp. mays
  misc_feature (1)..(978): Ceres Seq. ID no. 12356047
  misc_feature (1)..(978): Ortholog of  Ceres SEQ ID NO 12563124 as cited in SEQ ID NO 57104
  misc_feature (1)..(978): Ortholog of  Ceres SEQ ID NO 13598373 as cited in SEQ ID NO 62185
  misc_feature (1)..(978): Ortholog of  Ceres SEQ ID NO 12584664 as cited in SEQ ID NO 62232
  misc_feature (1)..(978): Ortholog of  Ceres SEQ ID NO 15169537 as cited in SEQ ID NO 64197
gctcgatctgttttcgttttgtaagattcattcacgtctgcgctgtggctctattcagatttggtcgagatttctgggtttgaccagctgatggctgatgtcgacgagtaccgttgcttcattgggaacctgtcctggtcaacgactgatgaaagcctcaaggatgcgttcagcaaattcggcaacctcactgaggcaaaggtggttcttgacaaattttcaggacgttctcgtggtttcggctttgtaacttttgatgagaagcaagccatggaggatgctattgagggaatgaatggactggacttggacgggaggaacatcactgttgataaagctcagccacaaggacctggtagagaccgtaatggtgaccgtgattatgaccgcgagcgtggatctcgttatgaacgtggtcgtgactatggtggtgggcgtgcaccgcgaggtggtggtggtggtggtggtggtggtggtgactgcttcaagtgtgggaaacctggtcattttgctagagagtgcccatctggggatggtgggagaggggacagatatggtgggagagatgacaggtatggtggcggtggcggtggcggtcgttatggttctgaccgtggtggtgaccgatactctggccgtagccgagatggcggcagctatgggggtggcgatcgctacagccgtgaccgatcaggtccttactgatggccttagttcttgattgagaagtatgtgccatccaggtatgaaagtctatctactattataaggcttgttattgtgtctggaactttgttatcctgtagttggagtcgacatgtaccgtgagaaatcagctgctttgttatagaccgtattactgaccggtttattatcgtttcctgcttgccaggcatatgacttggtcatagtgcttggcgcttggatcctgcatgtttgcttgatgtgctatttggctattaaaagatggattttgtc

SEQ ID NO: 3381 - protein, 204 aa, Zea mays subsp. mays
  peptide (1)..(204): Ceres Seq. ID no. 12356048
MADVDEYRCFIGNLSWSTTDESLKDAFSKFGNLTEAKVVLDKFSGRSRGFGFVTFDEKQAMEDAIEGMNGLDLDGRNITVDKAQPQGPGRDRNGDRDYDRERGSRYERGRDYGGGRAPRGGGGGGGGGGDCFKCGKPGHFARECPSGDGGRGDRYGGRDDRYGGGGGGGRYGSDRGGDRYSGRSRDGGSYGGGDRYSRDRSGPY

SEQ ID NO: 3382 - protein, 144 aa, Zea mays subsp. mays
  peptide (1)..(144): Ceres Seq. ID no. 12356049
MEDAIEGMNGLDLDGRNITVDKAQPQGPGRDRNGDRDYDRERGSRYERGRDYGGGRAPRGGGGGGGGGGDCFKCGKPGHFARECPSGDGGRGDRYGGRDDRYGGGGGGGRYGSDRGGDRYSGRSRDGGSYGGGDRYSRDRSGPY

SEQ ID NO: 3383 - protein, 141 aa, Zea mays subsp. mays
  peptide (1)..(141): Ceres Seq. ID no. 12356050
MDWTWTGGTSLLIKLSHKDLVETVMVTVIMTASVDLVMNVVVTMVVGVHREVVVVVVVVVVTASSVGNLVILLESAHLGMVGEGTDMVGEMTGMVAVAVAVVMVLTVVVTDTLAVAEMAAAMGVAIATAVTDQVLTDGLSS

SEQ ID NO: 3384 - DNA, 1930 bp, Zea mays subsp. mays
  misc_feature (1)..(1930): Ceres Seq. ID no. 12367909
  misc_feature (1)..(1930): Ortholog of  Ceres SEQ ID NO 14316204 as cited in SEQ ID NO 59644
aggcaggcagcgggctggcggaaaagcctagtgcgcgctcgtgctcgtgctccccgaccagactagaccagcttgctagcgccagcaaggcgagcggcgatgctcgcacgatctactacagctgccgccgcggccgccgccgggatctgcctgtgattaaggatgtcggcgtcgcggagcgggaggcggcggaccggtagcgtggcgctcggagaccttctgcagcgggaggcgtcggcggagcgggccgcgttgggatgcggcgagcggccctcggtcgcggcggggcaggcctgccgggcgaagaagggcgaggacttcgcgctgctcaagcccgcctgcgagcgacgccccggcgcgccgtccacctccttctccgccttcgccctgttcgatgggcataacgggagcgccgccgcggtgtacgccaaggagcacctcctcggcaacgtgctcagctgcgtcccgaccgatctggcctgggacgactggctcgccgcgctgccgagggccctcgtcgcggggttcgtcaagaccgacaaggatttccagactaaagctcattcctcggggacaaccgtgacgcttgccataattgatggctccgttgtaactgttgcatctgttggtgattcacgttgtgtccttgaagctgagggatccatctactatttgtcggctgaccatcgcttcgacgctaatgaagaggaggtgggacgtgtaaccgaatgtggaggtgaagttggaaggctaaatgtcgtcggtggtgctgagattggtccccttagatgttggccaggtggtttatgcctctcaagatcgattggtgatcaggatgtaggtgaatttattattccggttccttatgtgaagcaaattaagctgtctaatgctggaggccgtcttattatttcaagcgacggtgtttgggatgctttgactgcagaaatggcttttaaatgtgcacgagggcttcctcctgaggctgcagctgagcaaattgttaaagaagcagttgaagcaaaaggattgagagatgatacaacttgcattgtcattgacataatatcaccagagaaaccaaaacgcactatacaatctcaaagatcgccaagaaaaggccttgtgcttctaaaaaatttctttttaaggaaaacagcatctgactcgttgtctctccctgataaggataattatcctgagccagatttagaggaggtctttgaggacggatgcccatccctttcaaggaggcttaattctgagtatcctgtccgagacatgttcaaactttttgcatgtgcaatttgtcaaattgacttggaatctggccaaggcatatccatacacgagggtttgtcaaggccaggaaagctgcgtccctgggatggccctttcctttgtcacagctgccaggaaaagaaagaggcgatggaggggaagcgccattcacgagattcctcgtcgagaaatagcgggtcaagtgaatcgtgactgaagccgagaatcatcttgaggcaaacgcctagcggtgtgacgagctaattattgttgctgctgtcgttcttgcagcactttctcatggattaccattgaattgagacatgttggaagtcgccatgcctatatatatgttggagctgtacggtactggaccgtagagcaaatccaatcgcctctagataccacaccagcgtcttcggcagggcttgtggcagcagctcacgcagggaatgatgacaagaggttgttattattagtgaagaatgtcgacagtggccaatagtcatgtaaattattcgtcgtgtagaggtgcaagtgacaaatagccacggttttgtaattctcaactaggattaggtattgagacctgtaattcgtctgggcagacctcaaactgaaggtcaacaacgtagcgtggccctattgt

SEQ ID NO: 3385 - protein, 443 aa, Zea mays subsp. mays
  peptide (1)..(443): Ceres Seq. ID no. 12367910
MSASRSGRRRTGSVALGDLLQREASAERAALGCGERPSVAAGQACRAKKGEDFALLKPACERRPGAPSTSFSAFALFDGHNGSAAAVYAKEHLLGNVLSCVPTDLAWDDWLAALPRALVAGFVKTDKDFQTKAHSSGTTVTLAIIDGSVVTVASVGDSRCVLEAEGSIYYLSADHRFDANEEEVGRVTECGGEVGRLNVVGGAEIGPLRCWPGGLCLSRSIGDQDVGEFIIPVPYVKQIKLSNAGGRLIISSDGVWDALTAEMAFKCARGLPPEAAAEQIVKEAVEAKGLRDDTTCIVIDIISPEKPKRTIQSQRSPRKGLVLLKNFFLRKTASDSLSLPDKDNYPEPDLEEVFEDGCPSLSRRLNSEYPVRDMFKLFACAICQIDLESGQGISIHEGLSRPGKLRPWDGPFLCHSCQEKKEAMEGKRHSRDSSSRNSGSSES

SEQ ID NO: 3386 - DNA, 1961 bp, Zea mays subsp. mays
  misc_feature (1)..(1961): Ceres Seq. ID no. 12410265
  misc_feature (1)..(1961): Ortholog of  Ceres SEQ ID NO 14304867 as cited in SEQ ID NO 54375
atatatttatattagaaaagaaaactctgttcaaccacccgccgagttcagcagcactctcctccgccctcttccaggtccagcagagattgggggcgcgtgggcatcggagattgcctcgggagcgcgtttcctggtcaactaaggccggcatgaagggctgctcagagcgcttgctgtttctgctgctgctgctggcatcgtcgtcgttactgtccgctgtgattgccgcgcagcagacttgccccgccgacctcgacagcaaatgcgatggtggcgcgtctgatgatgattgggagggggagttcttccccggcgtcccgaaaatcaagtatgagggtccaacaagcaagaaccctcttgcttataagtggtataacaaggaggaagtgattctcggtaagaagatgaaggattggatgcgcttcagtgttgcgttctggcacacgttccgcggtactggcgctgatcctttcggtgctcctacaaagacttggccttgggaggatggcacaaattcgttggccatggctaagagaagaatgagagctcactttgagttcatggagaagttgggagtcgacaaatggtgcttccatgacagggatattgccccggatgggaagacacttgaagaaacaaattctaacttggatgagatagtccagctggcaaagcagctgcagggtgagaccaatataaagccattgtggggtaccgcacagctctttatgcatccacgttacatgcatggtgctgctacgagcccagaggttaaagtatatgcttatgcggctgcacaagttaagaaagctttggaggtcactcactacctaggtggtgaaaactatgtgttctggggtggaagagagggttaccaaactcttctgaatactgatatgaagagagaacttgaccatctggctaactttcttcaagctgctgttgactacaagaagaagattggattcaacggaacactattgatagagcctaaaccacaggaaccaacaaaacaccagtatgactgggatgttgcgactacgtttgcttttctacagaagtacggtcttacaggagagttcaagattaatgttgagtgcaaccatgctactctatctggacacagctgccatcatgaattggagactgcacggattaatgggctgcttggaaatatcgatgcaaacactggtgatcctcaagttggttgggacacagatcagttcatgacagacattgcagaggctactttggttatgtcaagtgtagttaagaatggtggacttgcacctggtggtttcaactttgatgccaaattgcggagggaaagtactgatgttgaggacatgtttcttgtccatatctccggaatggacaccctggcacgtggcctccgcaacgttgccaagctgattgaggatggttccctagatgatcttgtccgcaagcggtaccagagctttgatagtgatatcggtgccttgatcgaggctgggaaaggagactttgagacgctagaaaagaaggttctagagtggggtgagcccactgttgcatccggcaagcaggaactggcggagattctgttccagtctgccctatagatggtgccatgtccataggtccaggaataagcaagggtgcgccctcctccgaacacgcactcgtcctcctcatcacggggatgttatggttccgtgcgatggactacctacaataagcatggaactgagataattaggatgtaatctgtcagaaaatttccagaattgttacctccttttgtttagagtggattagtggaatcaaactggagttagttaaagcttatcctgcattttggtgtggcgatcgtgtttggtccttccttgaatgctgtttcatagcgtggcaacgatgttgctgcttagtcctacaactggtggtagtaatggatcatagttcgaatgtttcttccc

SEQ ID NO: 3387 - protein, 534 aa, Zea mays subsp. mays
  peptide (1)..(534): Ceres Seq. ID no. 12410266
IFILEKKTLFNHPPSSAALSSALFQVQQRLGARGHRRLPRERVSWSTKAGMKGCSERLLFLLLLLASSSLLSAVIAAQQTCPADLDSKCDGGASDDDWEGEFFPGVPKIKYEGPTSKNPLAYKWYNKEEVILGKKMKDWMRFSVAFWHTFRGTGADPFGAPTKTWPWEDGTNSLAMAKRRMRAHFEFMEKLGVDKWCFHDRDIAPDGKTLEETNSNLDEIVQLAKQLQGETNIKPLWGTAQLFMHPRYMHGAATSPEVKVYAYAAAQVKKALEVTHYLGGENYVFWGGREGYQTLLNTDMKRELDHLANFLQAAVDYKKKIGFNGTLLIEPKPQEPTKHQYDWDVATTFAFLQKYGLTGEFKINVECNHATLSGHSCHHELETARINGLLGNIDANTGDPQVGWDTDQFMTDIAEATLVMSSVVKNGGLAPGGFNFDAKLRRESTDVEDMFLVHISGMDTLARGLRNVAKLIEDGSLDDLVRKRYQSFDSDIGALIEAGKGDFETLEKKVLEWGEPTVASGKQELAEILFQSAL

SEQ ID NO: 3388 - protein, 484 aa, Zea mays subsp. mays
  peptide (1)..(484): Ceres Seq. ID no. 12410267
MKGCSERLLFLLLLLASSSLLSAVIAAQQTCPADLDSKCDGGASDDDWEGEFFPGVPKIKYEGPTSKNPLAYKWYNKEEVILGKKMKDWMRFSVAFWHTFRGTGADPFGAPTKTWPWEDGTNSLAMAKRRMRAHFEFMEKLGVDKWCFHDRDIAPDGKTLEETNSNLDEIVQLAKQLQGETNIKPLWGTAQLFMHPRYMHGAATSPEVKVYAYAAAQVKKALEVTHYLGGENYVFWGGREGYQTLLNTDMKRELDHLANFLQAAVDYKKKIGFNGTLLIEPKPQEPTKHQYDWDVATTFAFLQKYGLTGEFKINVECNHATLSGHSCHHELETARINGLLGNIDANTGDPQVGWDTDQFMTDIAEATLVMSSVVKNGGLAPGGFNFDAKLRRESTDVEDMFLVHISGMDTLARGLRNVAKLIEDGSLDDLVRKRYQSFDSDIGALIEAGKGDFETLEKKVLEWGEPTVASGKQELAEILFQSAL

SEQ ID NO: 3389 - protein, 399 aa, Zea mays subsp. mays
  peptide (1)..(399): Ceres Seq. ID no. 12410268
MKDWMRFSVAFWHTFRGTGADPFGAPTKTWPWEDGTNSLAMAKRRMRAHFEFMEKLGVDKWCFHDRDIAPDGKTLEETNSNLDEIVQLAKQLQGETNIKPLWGTAQLFMHPRYMHGAATSPEVKVYAYAAAQVKKALEVTHYLGGENYVFWGGREGYQTLLNTDMKRELDHLANFLQAAVDYKKKIGFNGTLLIEPKPQEPTKHQYDWDVATTFAFLQKYGLTGEFKINVECNHATLSGHSCHHELETARINGLLGNIDANTGDPQVGWDTDQFMTDIAEATLVMSSVVKNGGLAPGGFNFDAKLRRESTDVEDMFLVHISGMDTLARGLRNVAKLIEDGSLDDLVRKRYQSFDSDIGALIEAGKGDFETLEKKVLEWGEPTVASGKQELAEILFQSAL

SEQ ID NO: 3390 - DNA, 1465 bp, Zea mays subsp. mays
  misc_feature (1)..(1465): Ceres Seq. ID no. 12410261
  misc_feature (1)..(1465): Ortholog of  Ceres SEQ ID NO 14312258 as cited in SEQ ID NO 57251
  misc_feature (1)..(1465): Ortholog of  Ceres SEQ ID NO 14302404 as cited in SEQ ID NO 66143
acggcagagccaccaccagcagcagccccagaaatcgagcaaacacaagctgctccatggcctcaccaacccgaacaccatcgcctccgccggcggtcgagcccatcgcgccttctctctcttcagaacatccgcctgtcaacccctcctgtgacggatccttctcgccggagaacccagcgccagctccacctcctccccctgctactccgcatcctcatactcccggcgatagctctccttcctcaattccgcatccctcggcgccacagcctcttccatctccgcctcctcatactcccgacgatagctctccttcctcaactccgcatccctcggcgccacagcccccaccatctccgcctccgccgagcgctgatgtttctcctcccctctcgcgacagggcgaaacgtcaccgcggcgcccattgccccctccctcacccgctccagtatccccgcctactccagcgccggcgtcctcggaagccaagtcggagcaggaggaggcggaatcggctagcgaatcggggagcatgacgctagccatcgttctagccaaaactgaagatgcaacgccgcctaaggcctcctcggccgaggcgtccccaaccagatcgccgcagaaggaatcggccgtcaccatcgcgaagctcctctccgccgaagacctcgcggcgatggaggctaaggccacgccggacaaggttacacctccgagcgacgctgggtccctcgccgccgccgttactaccgttgggggagtcagtggcggcgtggggtccaagaggtggctcctaggcggcgtcccggagaaggtgcggcgcgctgagctgaggagggccgagctagggtttagggtttcggccgccgtgttctgcctggtcgcgctctccgtcatggcggccgataccacgacgggctggtccggcgactccttccgccgctacaacgagtacaggtacgtacttgctgcgagcgtcgtgacttttacctactgtggattccagttggtagccgaggtgcattacgttgtcacagggagacacatgattcgagccccattccgcagctacttcaatcttgccatggatcagatgttagcttacctcctgttgtcagcatcttcagcagcgctttctcgtaatggtgtttggatgtcacggtttggaggggatcagtttaccaaactgatcaatgtctcggcttccatggcattcctagctttcattgctctgggtcttaactcggtgatctctgcttactgcttcttcagcttggtttcatagagctaccgttgtgcattgcatgatgtgaataatactacctgtatgcttcttggagcactgaaccttgattcatgtgaaatttctacatgatttctgtgaaatccctaaactccaaagtgggcctatattgtagcagtacattgagtcaaggttggcctttaaaattttggaagcgg

SEQ ID NO: 3391 - protein, 428 aa, Zea mays subsp. mays
  peptide (1)..(428): Ceres Seq. ID no. 12410262
GRATTSSSPRNRANTSCSMASPTRTPSPPPAVEPIAPSLSSEHPPVNPSCDGSFSPENPAPAPPPPPATPHPHTPGDSSPSSIPHPSAPQPLPSPPPHTPDDSSPSSTPHPSAPQPPPSPPPPSADVSPPLSRQGETSPRRPLPPPSPAPVSPPTPAPASSEAKSEQEEAESASESGSMTLAIVLAKTEDATPPKASSAEASPTRSPQKESAVTIAKLLSAEDLAAMEAKATPDKVTPPSDAGSLAAAVTTVGGVSGGVGSKRWLLGGVPEKVRRAELRRAELGFRVSAAVFCLVALSVMAADTTTGWSGDSFRRYNEYRYVLAASVVTFTYCGFQLVAEVHYVVTGRHMIRAPFRSYFNLAMDQMLAYLLLSASSAALSRNGVWMSRFGGDQFTKLINVSASMAFLAFIALGLNSVISAYCFFSLVS

SEQ ID NO: 3392 - protein, 410 aa, Zea mays subsp. mays
  peptide (1)..(410): Ceres Seq. ID no. 12410263
MASPTRTPSPPPAVEPIAPSLSSEHPPVNPSCDGSFSPENPAPAPPPPPATPHPHTPGDSSPSSIPHPSAPQPLPSPPPHTPDDSSPSSTPHPSAPQPPPSPPPPSADVSPPLSRQGETSPRRPLPPPSPAPVSPPTPAPASSEAKSEQEEAESASESGSMTLAIVLAKTEDATPPKASSAEASPTRSPQKESAVTIAKLLSAEDLAAMEAKATPDKVTPPSDAGSLAAAVTTVGGVSGGVGSKRWLLGGVPEKVRRAELRRAELGFRVSAAVFCLVALSVMAADTTTGWSGDSFRRYNEYRYVLAASVVTFTYCGFQLVAEVHYVVTGRHMIRAPFRSYFNLAMDQMLAYLLLSASSAALSRNGVWMSRFGGDQFTKLINVSASMAFLAFIALGLNSVISAYCFFSLVS

SEQ ID NO: 3393 - protein, 250 aa, Zea mays subsp. mays
  peptide (1)..(250): Ceres Seq. ID no. 12410264
MTLAIVLAKTEDATPPKASSAEASPTRSPQKESAVTIAKLLSAEDLAAMEAKATPDKVTPPSDAGSLAAAVTTVGGVSGGVGSKRWLLGGVPEKVRRAELRRAELGFRVSAAVFCLVALSVMAADTTTGWSGDSFRRYNEYRYVLAASVVTFTYCGFQLVAEVHYVVTGRHMIRAPFRSYFNLAMDQMLAYLLLSASSAALSRNGVWMSRFGGDQFTKLINVSASMAFLAFIALGLNSVISAYCFFSLVS

SEQ ID NO: 3394 - DNA, 1529 bp, Zea mays subsp. mays
  misc_feature (1)..(1529): Ceres Seq. ID no. 12407871
  misc_feature (1)..(1529): Ortholog of  Ceres SEQ ID NO 12636774 as cited in SEQ ID NO 372
  misc_feature (1)..(1529): Ortholog of  Ceres SEQ ID NO 13582350 as cited in SEQ ID NO 56734
  misc_feature (1)..(1529): Ortholog of  Ceres SEQ ID NO 12476493 as cited in SEQ ID NO 58163
  misc_feature (1)..(1529): Ortholog of  Ceres SEQ ID NO 12582113 as cited in SEQ ID NO 58349
  misc_feature (1)..(1529): Ortholog of  Ceres SEQ ID NO 15175861 as cited in SEQ ID NO 59381
  misc_feature (1)..(1529): Ortholog of  Ceres SEQ ID NO 13596470 as cited in SEQ ID NO 62158
  misc_feature (1)..(1529): Ortholog of  Ceres SEQ ID NO 12578315 as cited in SEQ ID NO 62451
  misc_feature (1)..(1529): Ortholog of  Ceres SEQ ID NO 12615466 as cited in SEQ ID NO 62761
  misc_feature (1)..(1529): Ortholog of  Ceres SEQ ID NO 12615907 as cited in SEQ ID NO 62860
  misc_feature (1)..(1529): Ortholog of  Ceres SEQ ID NO 13597295 as cited in SEQ ID NO 63743
  misc_feature (1)..(1529): Ortholog of  Ceres SEQ ID NO 12617090 as cited in SEQ ID NO 64005
  misc_feature (1)..(1529): Ortholog of  Ceres SEQ ID NO 13597233 as cited in SEQ ID NO 64370
  misc_feature (1)..(1529): Ortholog of  Ceres SEQ ID NO 13584577 as cited in SEQ ID NO 65298
  misc_feature (1)..(1529): Ortholog of  Ceres SEQ ID NO 13598327 as cited in SEQ ID NO 68040
  misc_feature (1)..(1529): Ortholog of  Ceres SEQ ID NO 13600370 as cited in SEQ ID NO 0
accacacgaattgcacatctccacagctcacgattccaacactagctacatatatatgtagctttctaggctactatatacactcaccaccaagtgtgaagtgtgtatatatagtgacagctactgcaatatatacatacgcgtcacctatatattagccaagctagctatatgagcttggttgcggcgccaatggcgatcgtcgacgtggccaacgcccagctgcagcaagcagcagcagcagctgccaagaaagacgaggacggccatgagcagcaggagtcgtcctacgactacggcgcgctgatgaaaggcgtgaggcacctgtcggacagcggcattaccaggctgcccgacaggtacgtcctgcccgcgtccgaccgccccggcgtccttgccgtctcgtcgtccgtgggcgggcagcggcagggtcaagctccctgtcgtcaacctcgccggcctccgcgacccctgccagcgcgccgccgtgctggccacgctcgacgccgcgtgccgggagtacggcttctttcaggtggtaaaccacgggttcgggagcgacgtgagcggcgggatgctggacgtggcgcagcgcttcttcgagctgccgctggccgagcgagcgcggcacatgtcggcggacgtgcgggcgccggtgcgctacggcaccagcttcaaccaggccaaggacgacgtgctctgctggcgcgacttcctcaagctcgtctgccagccgctgcaggcggtgctcccgtactggccccagcagccggcggacctcagggacgtggccaccaggtacgccacggcgagccaccggctgttcatggaggtcatggaggcggcgctggaggccctgggcatccccacggccggcggcgtgctcggggagctggcagcgtcgtcgtcgcacatgatgacggtgaactgctacccggcttgcccgcagcctgagctcacgctggggatgccctcgcactcggactacggcctcttcacgttcgtcctgcaggaccacgtcgagggcctccaggtcatgcacgacggccgctggctcaccatcgaccccatcccgggatcgttcgtcgtcaacgtcggcgaccacctagagatctacagcaacgggcggtacaagagcgcgctgcaccgggtgcacgtgaactccacgcggccgcgcatctcggtggcgtcgttccacagcctgccggcggagcgagtgatcgggccggcgccggagctggtggacgacgaggccggcaacccgcggcggtacatggacaccgacttcgctaccttcctcgcctacctcgcatccgcggacggcaagaacaagaccttcctccagtcaaggaagctgcctgctgctgctcctccatgcctctagctaactagatagctgcttattaatctgacagaataaaattaatcagttcagcgcacaattccacaagcgaaaacaaacctggatttgttttaattagctctgcccttcattattacattcaagctagctcttggtcaacgcatgc

SEQ ID NO: 3395 - protein, 269 aa, Zea mays subsp. mays
  peptide (1)..(269): Ceres Seq. ID no. 12407872
MLDVAQRFFELPLAERARHMSADVRAPVRYGTSFNQAKDDVLCWRDFLKLVCQPLQAVLPYWPQQPADLRDVATRYATASHRLFMEVMEAALEALGIPTAGGVLGELAASSSHMMTVNCYPACPQPELTLGMPSHSDYGLFTFVLQDHVEGLQVMHDGRWLTIDPIPGSFVVNVGDHLEIYSNGRYKSALHRVHVNSTRPRISVASFHSLPAERVIGPAPELVDDEAGNPRRYMDTDFATFLAYLASADGKNKTFLQSRKLPAAAPPCL

SEQ ID NO: 3396 - protein, 260 aa, Zea mays subsp. mays
  peptide (1)..(260): Ceres Seq. ID no. 12407873
MSLVAAPMAIVDVANAQLQQAAAAAAKKDEDGHEQQESSYDYGALMKGVRHLSDSGITRLPDRYVLPASDRPGVLAVSSSVGGQRQGQAPCRQPRRPPRPLPARRRAGHARRRVPGVRLLSGGKPRVRERRERRDAGRGAALLRAAAGRASAAHVGGRAGAGALRHQLQPGQGRRALLARLPQARLPAAAGGAPVLAPAAGGPQGRGHQVRHGEPPAVHGGHGGGAGGPGHPHGRRRARGAGSVVVAHDDGELLPGLPAA

SEQ ID NO: 3397 - protein, 253 aa, Zea mays subsp. mays
  peptide (1)..(253): Ceres Seq. ID no. 12407874
MAIVDVANAQLQQAAAAAAKKDEDGHEQQESSYDYGALMKGVRHLSDSGITRLPDRYVLPASDRPGVLAVSSSVGGQRQGQAPCRQPRRPPRPLPARRRAGHARRRVPGVRLLSGGKPRVRERRERRDAGRGAALLRAAAGRASAAHVGGRAGAGALRHQLQPGQGRRALLARLPQARLPAAAGGAPVLAPAAGGPQGRGHQVRHGEPPAVHGGHGGGAGGPGHPHGRRRARGAGSVVVAHDDGELLPGLPAA

SEQ ID NO: 3398 - DNA, 1334 bp, Zea mays subsp. mays
  misc_feature (1)..(1334): Ceres Seq. ID no. 12414173
  misc_feature (1)..(1334): Ortholog of  Ceres SEQ ID NO 14312281 as cited in SEQ ID NO 59172
  misc_feature (1)..(1334): Ortholog of  Ceres SEQ ID NO 14302299 as cited in SEQ ID NO 68665
  misc_feature (1)..(1334): Ortholog of  Ceres SEQ ID NO 15174396 as cited in SEQ ID NO 0
aaacaacttgggcgcggccggattcgtataggttagcagcacacagtagcaagctcgcgatctgtgcgcccaccatcaccaccaccgccgggaggagaggaccgaccgaccgaccgaagatgcggatgagctgcaacggctgccgcgtcctgcgcaagggctgcagcgacgcctgcaccatccgcccctgcctgcagtggatcgacagccccgaggcgcaggcaaacgccaccgtcttcctcgccaagttctacggccgcgcggggctgctcaacctgctggccgccgcgcccgacgacgccgcccgcccggccgtcttccgctccctgctctacgaggcgtgcggccgcatcgtcaaccccgtctacggctccgtcggcctgctctggtcgcgccggtggcagagctgcgtcgacgccgtcgaggccgtgctcaagggggaccccgtcgtgcaggtcgacgccggctccgaggccgccgccgccccggcgccgctgctcggcgccagcaggccagccgcgccgccggccgcctacgacatccgccacgtcgccagggatcccgacgccgccgccgccgccgacctcctccgcgtcgcgcgcggcggcggccgcaggaggttcaagcgcgccggctcgccttccaacgcctgcaaggcgaaacccctcaagggaaaggctagcagcaacgagcgcgcgtcgcccagccctactcagaggcagcatcagcaggagacggaggagctggagctggaaccggtgccgatggtcgtcgagcttgagcacggcgaggagtccgccggcagccacgaccaccaccaccaccacttgcagccgcagggatcgtcggaggacaccgacgtggaggccgcctcccacgtgagcccaggcccgaggccgagccgccggtcagcagccagagccaggcgctggtggcggacccaggagggagaggaggtcaggctggagctcacgctcggcttcgagccagtcgtcaggcagcagccgaggctgtcgtgctgcgactcgagcggcttgagcgccgcgtcgagcctcatcggcttgcggctgcagctgccagccgcctgagcagaggaggtcatctcatttcacaaggcacagtggcacaccaagtgcagttttgcaaccaatgcggtgtttgcttaaagaaaaggttttggacgccgagcagccgactatttcctaggttttgttttttcattttcttttcttggctgtaattgtaaaggctgatgaactgcacagttttagcgtcgtcataataggagttttgcaattccatatgagattataagctattaaaaagtttgattg

SEQ ID NO: 3399 - protein, 361 aa, Zea mays subsp. mays
  peptide (1)..(361): Ceres Seq. ID no. 12414174
TTWARPDSYRLAAHSSKLAICAPTITTTAGRRGPTDRPKMRMSCNGCRVLRKGCSDACTIRPCLQWIDSPEAQANATVFLAKFYGRAGLLNLLAAAPDDAARPAVFRSLLYEACGRIVNPVYGSVGLLWSRRWQSCVDAVEAVLKGDPVVQVDAGSEAAAAPAPLLGASRPAAPPAAYDIRHVARDPDAAAAADLLRVARGGGRRRFKRAGSPSNACKAKPLKGKASSNERASPSPTQRQHQQETEELELEPVPMVVELEHGEESAGSHDHHHHHLQPQGSSEDTDVEAASHVSPGPRPSRRSAARARRWWRTQEGEEVRLELTLGFEPVVRQQPRLSCCDSSGLSAASSLIGLRLQLPAA

SEQ ID NO: 3400 - protein, 322 aa, Zea mays subsp. mays
  peptide (1)..(322): Ceres Seq. ID no. 12414175
MRMSCNGCRVLRKGCSDACTIRPCLQWIDSPEAQANATVFLAKFYGRAGLLNLLAAAPDDAARPAVFRSLLYEACGRIVNPVYGSVGLLWSRRWQSCVDAVEAVLKGDPVVQVDAGSEAAAAPAPLLGASRPAAPPAAYDIRHVARDPDAAAAADLLRVARGGGRRRFKRAGSPSNACKAKPLKGKASSNERASPSPTQRQHQQETEELELEPVPMVVELEHGEESAGSHDHHHHHLQPQGSSEDTDVEAASHVSPGPRPSRRSAARARRWWRTQEGEEVRLELTLGFEPVVRQQPRLSCCDSSGLSAASSLIGLRLQLPAA

SEQ ID NO: 3401 - protein, 320 aa, Zea mays subsp. mays
  peptide (1)..(320): Ceres Seq. ID no. 12414176
MSCNGCRVLRKGCSDACTIRPCLQWIDSPEAQANATVFLAKFYGRAGLLNLLAAAPDDAARPAVFRSLLYEACGRIVNPVYGSVGLLWSRRWQSCVDAVEAVLKGDPVVQVDAGSEAAAAPAPLLGASRPAAPPAAYDIRHVARDPDAAAAADLLRVARGGGRRRFKRAGSPSNACKAKPLKGKASSNERASPSPTQRQHQQETEELELEPVPMVVELEHGEESAGSHDHHHHHLQPQGSSEDTDVEAASHVSPGPRPSRRSAARARRWWRTQEGEEVRLELTLGFEPVVRQQPRLSCCDSSGLSAASSLIGLRLQLPAA

SEQ ID NO: 3402 - DNA, 890 bp, Zea mays subsp. mays
  misc_feature (1)..(890): Ceres Seq. ID no. 12595102
  misc_feature (1)..(890): Ortholog of  Ceres SEQ ID NO 12610129 as cited in SEQ ID NO 55779
gcacgagaccattacctagaacatcctaatcgaaaacctaatcaaaaacagaatctctaattctctcaactcaaaaccctaacatccgtccccactccccaatcaacctgccgccgcccgccagcaccaaacttccatccgccccgagctctgcctccgccgccgccgcgccatgaggcctctcgacgagaaggagacgactcaggtattcgagaagctgttcaagttcacggggcccaacctgaagcacctcctggagcgccccgcagtggagggccccgacgcggagcccggccgctactgcctccggcttcaccgcaatcgcgtctactacgcctccgaggcgctcgtgcgccgcggccaccgccgtgtcccgaccgcgcctcgccggcgtggggacgcccatcggcaagttcacccaccacggcgcgttccaccttacggtccacgcgctcgacctcctcgctgcgcacgcgcgccgccgcgtctggctaaagcccgacaccgagcgttcctttctctttggcaactccgtgcccaagtcttctctcgctcgcatcaccgagaacaccaaggccggggacggggtggtcgtcatgtccatggctgacgtcccgctcgggttcggcattgcggcgaggtcggcgcaggattgcaggaaggccgacaccaacgccgtggtcgtgctgcaccagtcggacgccggggagtacctccgcaaggaggaggagctcatgtgaggtgagcgcataggcttggctggttaggtcatattcatgagtgaattatggaagattgtgccttactgttgtgtgttccaaggcttggggcatatatatatgtactgaatgattaatcactggttatgagatgcgattattgctgttgcc

SEQ ID NO: 3403 - protein, 145 aa, Zea mays subsp. mays
  peptide (1)..(145): Ceres Seq. ID no. 12595103
MRPLDEKETTQVFEKLFKFTGPNLKHLLERPAVEGPDAEPGRYCLRLHRNRVYYASEALVRRGHRRVPTAPRRRGDAHRQVHPPRRVPPYGPRARPPRCARAPPRLAKARHRAFLSLWQLRAQVFSRSHHREHQGRGRGGRHVHG

SEQ ID NO: 3404 - DNA, 872 bp, Zea mays subsp. mays
  misc_feature (1)..(872): Ceres Seq. ID no. 12406168
  misc_feature (1)..(872): Ortholog of  Ceres SEQ ID NO 13598305 as cited in SEQ ID NO 62209
atccattcccacagcaccaagcaagagcaaagagcaacacaaggcaaggcagcacacgacccgcggcgacgcaacaagagaagccagcagtcgtctggatccatcgattgacatggccatggcggcggcagcggagggcaagagccggaggttcgcgctggcctgcggggtgctgagccagtacgtgaaggccgagcagcagatggcggccgccggggcccctgccccgcgcgccccggccacgacgctgagcctcatgcccggcgcggacgtcggcgccgagcaggagccggccgccgcgagggggcaggagacggccgggtccgcctccacggcggcgccgctcaccatcttctacggcggcagggtggtcgtgttcgacgacttcccggcggagaaggcagccgaggtcatgcgcctcgcagctggcgccgagcgcccggcggccccggccccggcgccggcgccgcgcgacgacctgcctatcgcccggaaggcgtcgctgcagcggttcctggccaagcgcaaggaccgcctcgtggagcgcgccccctacgcccgcccgtccccatccgaggaggcggagaaggcgaagccggcctcctggctcgggctcggcggcacggacgccgagcgcctcaacatcgcgctgtgatttggatctcggttgctacccacccggatcgaccggtggcgatttgattggctgggttcctggcttcttttgggtcttgctggattggggttggtgtggagatcggagacggaggattgtagaaacgtattcttgttttttttctctctcccttacgagagagtttggctgttaattgattcgataatagaaagatggaggatgtacaattcgtgtc

SEQ ID NO: 3405 - protein, 217 aa, Zea mays subsp. mays
  peptide (1)..(217): Ceres Seq. ID no. 12406169
SIPTAPSKSKEQHKARQHTTRGDATREASSRLDPSIDMAMAAAAEGKSRRFALACGVLSQYVKAEQQMAAAGAPAPRAPATTLSLMPGADVGAEQEPAAARGQETAGSASTAAPLTIFYGGRVVVFDDFPAEKAAEVMRLAAGAERPAAPAPAPAPRDDLPIARKASLQRFLAKRKDRLVERAPYARPSPSEEAEKAKPASWLGLGGTDAERLNIAL

SEQ ID NO: 3406 - protein, 180 aa, Zea mays subsp. mays
  peptide (1)..(180): Ceres Seq. ID no. 12406170
MAMAAAAEGKSRRFALACGVLSQYVKAEQQMAAAGAPAPRAPATTLSLMPGADVGAEQEPAAARGQETAGSASTAAPLTIFYGGRVVVFDDFPAEKAAEVMRLAAGAERPAAPAPAPAPRDDLPIARKASLQRFLAKRKDRLVERAPYARPSPSEEAEKAKPASWLGLGGTDAERLNIAL

SEQ ID NO: 3407 - protein, 178 aa, Zea mays subsp. mays
  peptide (1)..(178): Ceres Seq. ID no. 12406171
MAAAAEGKSRRFALACGVLSQYVKAEQQMAAAGAPAPRAPATTLSLMPGADVGAEQEPAAARGQETAGSASTAAPLTIFYGGRVVVFDDFPAEKAAEVMRLAAGAERPAAPAPAPAPRDDLPIARKASLQRFLAKRKDRLVERAPYARPSPSEEAEKAKPASWLGLGGTDAERLNIAL

SEQ ID NO: 3408 - DNA, 1393 bp, Zea mays subsp. mays
  misc_feature (1)..(1393): Ceres Seq. ID no. 12359989
  misc_feature (1)..(1393): Ortholog of  Ceres SEQ ID NO 15225627 as cited in SEQ ID NO 64323
aatcctaccaggcaccactcgcatcgtgtgctcagtcagatccccgtcccgcatttcctaaggccagctgctggtgtgcagatggtggctgcacgcccttgcatttcggcctcgccaggaattcttaccgcacgggtagcagtttctaggactgattgcatgctcagttaccactgctacattccccaaaatcagctgctcctggcctctaaggtttaagcgcaatgatgttgttgtaagagcaatatcggaagagtgtggcccgcaggggcttcccattgatctcagaggtaaaagggcattcattgctggagttgctgatgataatggctatggatgggcaattgcgaaggcacttgctgcggctggtgctgaaattcttgtgggtacatgggtgccggcacttaacatatttgagacaagtctgaggcgtggaaagtttgatgaatcacggaagctgccagatggatctcttatggatattgttaaagtctatccacttgatgctgtctacgattcccctgatgatgttcctgaagatgtcaaatcgaacaaaagatatgcaggggcatcaaactggacagtaaaggaagttgttgaatcagtgaggaatgattttggcagcattgacatactagtgcattctcttgctaatggcccagaggtaacgaagcctttgttggaaacctcaagaagaggctatcttgcggcaatttctgcatccagttactcctatgtttcattgcttcagcacttccttcctataatgaatcccggtggtgctagcatctctctaacatacattgcatctgaaagggcgattcctgggtatggtggtgggatgagttctgctaaagcagctcttgagagtgatacacgggtgcttgcattcgaagctgggcgaaaaggcaaaatcagagttaacaccatatcagcaggccctcttgggagccgagctgctaaggcaattggatttattgagaagatgatagagtactcatatgttaatgcaccattgcagaaggagctgttggctgatgaggtggggaacacagctgcattcctggtttcttcattggcttctgccatcaccggctcgactgtttatgttgacaatgggctcaatacaatggggcttgcaattgacagccctaccataacgtcatagatgtggttgtggtagatagacgacctttcctgctgcattgcggtatcatccttgaataaagatcatagttagttattagtatgagaggtaagggcaggaaagggggaaaattatgaactggtcttttgcgctttctttgctggagaggaacattagagcgatttccagaatgatgggatgctattatgtgatttcatatgattcagaagcagtacaataactccc

SEQ ID NO: 3409 - protein, 230 aa, Zea mays subsp. mays
  peptide (1)..(230): Ceres Seq. ID no. 12359990
MDIVKVYPLDAVYDSPDDVPEDVKSNKRYAGASNWTVKEVVESVRNDFGSIDILVHSLANGPEVTKPLLETSRRGYLAAISASSYSYVSLLQHFLPIMNPGGASISLTYIASERAIPGYGGGMSSAKAALESDTRVLAFEAGRKGKIRVNTISAGPLGSRAAKAIGFIEKMIEYSYVNAPLQKELLADEVGNTAAFLVSSLASAITGSTVYVDNGLNTMGLAIDSPTITS

SEQ ID NO: 3410 - protein, 133 aa, Zea mays subsp. mays
  peptide (1)..(133): Ceres Seq. ID no. 12359991
MNPGGASISLTYIASERAIPGYGGGMSSAKAALESDTRVLAFEAGRKGKIRVNTISAGPLGSRAAKAIGFIEKMIEYSYVNAPLQKELLADEVGNTAAFLVSSLASAITGSTVYVDNGLNTMGLAIDSPTITS

SEQ ID NO: 3411 - DNA, 1725 bp, Zea mays subsp. mays
  misc_feature (1)..(1725): Ceres Seq. ID no. 12410243
  misc_feature (1)..(1725): Ortholog of  Ceres SEQ ID NO 14307156 as cited in SEQ ID NO 54069
  misc_feature (1)..(1725): Ortholog of  Ceres SEQ ID NO 15169651 as cited in SEQ ID NO 64156
aggaggtggggtgagttcgcgggtcgagcggaggagaagcttctggtggtggtggctctcgtcgtcaagcaggaggggagagaggagccggcggcggaggtgaatggcggtggagtaccactgctgctcggcggcctttttcgagcacatcgtcatcatcatcgtgctcgtgctcttcgcgggcctcatgtcgggcctcaccctgggcctcatgtcccttagcctcgtcgatctcgaggtcctcgccaagtccggcaccgagcaggatcgcaagcacgcagctaagattttacctgttgtgaagaaccagcaccttctgctatgcactcttctaatctgcaatgcggctgcaatggaggctttgcccatattccttgatagcttggtgacagcttggggtgctattttaatatcagtgacactgattctgctttttggtgagatcttaccacagtccatctgctcacattatgggctggctattggtgcctcagttgctccattagtccgtgtgcttgtttgggtctgctttcctattgcctatcctataagcaagctattggactatgtgctgggtcatggtcagacagctctcttccgtagagctgaactaaaaacacttgtcactctgcacgggaatgaggctggcaaaggtggagaattaacccatgatgaaactaccataatatcaggagctcttgaactgactgaaaagaaagctaaagatgctatgacacccttgtgtcaaacatttgcaattgatataaatgcaaaacttgacaggaatctaatgcaagaggtacttgagaaagggcatagcagagttcctgtgtattatgaaaagaaaacgaatattattggattgatattggtgaagaatttattatcagttagtgctgatgatgaggttcctataaaaagtgtaactatccgcaaaattcctcgtgttctagaagaaatgcccctctatgacatcctaaacgaatttcagaaaggtcacagccacatggctgtagtcataaggaaaaacaatccaagttaccaaccagctgaacaagctgctaatgatggtggaacttttgaggtgtccattgctattgatgataagaacaacgaaaaggtcgtgaaaaaccttccgccaccactgcaaagatggaagagctaccctaacactcagaacacatcaaatagaggaaataggcctaaaaaatggtccaaagatcaagcagacgttctgcaggtccataaagagcccttgcccacactgagcgaagatgaagaggctgttggtatcataaccatggaggatgtcatagaggagctcctgcaggaggagatatacgacgagacagacgtacatgaggaacaatgacgctggccttgcgccctccctccagctgttagaaagtgcgcttttatgcaaaacttatgtatagataggcagatacactgagagatattttagccgtagcccgtagccgttcattgtagtactataggtggctggctgtctcgagtattggtaaagactgttcggagtgcgtcgttcgttctcgtccagaacagctgggttctgggcatccggggaagaaacggaggcgttgacgcgtgtgtgtaggttcagaagaaaccccaataagataattgcgttgttatatgatgccgctcgcattattaggacgaatctgttgacatatagtcttataaattaaaaacaatgtttcg

SEQ ID NO: 3412 - protein, 422 aa, Zea mays subsp. mays
  peptide (1)..(422): Ceres Seq. ID no. 12410244
MAVEYHCCSAAFFEHIVIIIVLVLFAGLMSGLTLGLMSLSLVDLEVLAKSGTEQDRKHAAKILPVVKNQHLLLCTLLICNAAAMEALPIFLDSLVTAWGAILISVTLILLFGEILPQSICSHYGLAIGASVAPLVRVLVWVCFPIAYPISKLLDYVLGHGQTALFRRAELKTLVTLHGNEAGKGGELTHDETTIISGALELTEKKAKDAMTPLCQTFAIDINAKLDRNLMQEVLEKGHSRVPVYYEKKTNIIGLILVKNLLSVSADDEVPIKSVTIRKIPRVLEEMPLYDILNEFQKGHSHMAVVIRKNNPSYQPAEQAANDGGTFEVSIAIDDKNNEKVVKNLPPPLQRWKSYPNTQNTSNRGNRPKKWSKDQADVLQVHKEPLPTLSEDEEAVGIITMEDVIEELLQEEIYDETDVHEEQ

SEQ ID NO: 3413 - protein, 394 aa, Zea mays subsp. mays
  peptide (1)..(394): Ceres Seq. ID no. 12410245
MSGLTLGLMSLSLVDLEVLAKSGTEQDRKHAAKILPVVKNQHLLLCTLLICNAAAMEALPIFLDSLVTAWGAILISVTLILLFGEILPQSICSHYGLAIGASVAPLVRVLVWVCFPIAYPISKLLDYVLGHGQTALFRRAELKTLVTLHGNEAGKGGELTHDETTIISGALELTEKKAKDAMTPLCQTFAIDINAKLDRNLMQEVLEKGHSRVPVYYEKKTNIIGLILVKNLLSVSADDEVPIKSVTIRKIPRVLEEMPLYDILNEFQKGHSHMAVVIRKNNPSYQPAEQAANDGGTFEVSIAIDDKNNEKVVKNLPPPLQRWKSYPNTQNTSNRGNRPKKWSKDQADVLQVHKEPLPTLSEDEEAVGIITMEDVIEELLQEEIYDETDVHEEQ

SEQ ID NO: 3414 - protein, 386 aa, Zea mays subsp. mays
  peptide (1)..(386): Ceres Seq. ID no. 12410246
MSLSLVDLEVLAKSGTEQDRKHAAKILPVVKNQHLLLCTLLICNAAAMEALPIFLDSLVTAWGAILISVTLILLFGEILPQSICSHYGLAIGASVAPLVRVLVWVCFPIAYPISKLLDYVLGHGQTALFRRAELKTLVTLHGNEAGKGGELTHDETTIISGALELTEKKAKDAMTPLCQTFAIDINAKLDRNLMQEVLEKGHSRVPVYYEKKTNIIGLILVKNLLSVSADDEVPIKSVTIRKIPRVLEEMPLYDILNEFQKGHSHMAVVIRKNNPSYQPAEQAANDGGTFEVSIAIDDKNNEKVVKNLPPPLQRWKSYPNTQNTSNRGNRPKKWSKDQADVLQVHKEPLPTLSEDEEAVGIITMEDVIEELLQEEIYDETDVHEEQ

SEQ ID NO: 3415 - DNA, 1632 bp, Zea mays subsp. mays
  misc_feature (1)..(1632): Ceres Seq. ID no. 12410235
  misc_feature (1)..(1632): Ortholog of  Ceres SEQ ID NO 13595932 as cited in SEQ ID NO 67810
agccctcttcctcgggaagatttcaaatccccgcggcctcttccatctcctgctcggcacggcacctccggctgcccgaaaaatttcgcacatcccagattcccgcccgctctggttcgcgccctcgtctggttcccttgccaacccggtcattcaacgtcgcagccaccccgcgcggctagggctgggactcgaggcctagggtttggctgtaagtttggtaacacgatggcgggggccgcgggggagagcagcggcgagcggcaggggacggtggagcggcggatgctgcggtcgcggtaccacgccgtgaagagcatcatcagcgatgagcgggatgagatgtcgagggcggattcggacaggttcacagccatcatccagcaggtggattgcctacacgagctcgtgcagaggcctagggagcaaatagcggatgcagaagctctgcttggcattacaaacactttggtaacttcggtgaggtcccactcaagtgaaggaatcagcccttctgatttcataacagctttactcaagaagtttgggcagcaagggaatcatgatgatgagtctgtctcattacgatggggtgatcttgggctttctgtttcacatatcttcaggcctgtgcctggatgctgtaccatgcttggtcctatgaatactgaagtaaagcaacggaaagttgtagctgtcggtaggaaacggactgcacggccaacagaaaatacctgtcctgaagagcttgctgagtcttcagaggaagtaaagacagacactgacaggaatgtcttagttatgtttgatatcctcaggcgaaagaagagcgcaaaattggaaaaccttgtgttgaataggctttcatttgcccaaacagttgaaaatgtttttgcactatctttcttagtgaaagatggtagggtggaaataactgtagatgatagcgggcatatagtacggccaaggaatgcacctgctgctagcgctatagcctcaggagaagtctcatacagtcattttgtttttagatttgacttcaaggactggaagcttatgaaagaagttgttacagagggagaagagctgttgccacataggacttcccagagcaatctttgcaacgaagaaaacgaccaaccaaatctggaggcacgtgcgcaaataacacctatcaggaaactcacccggaaccgaggattggtctttcaggatcatgtagtcgaggaaactcctgaagagaaccaagcgtctaagcgcaggcgccttttcaggaatcaagattgacctagcaattgcttggcatgagtagtgtaggcaggcaacctggcttgtgttgtatgcaaaaaattgcctgagcctgagtaacgtgtctttcactaggtctgttgtgccatgctgtcttgttcttggcacagctcgtgcttatctgaacttccagttgtgccagcggagtagagctgtaattataaattgtttgaagttctggtcacatcttgcaactacagaatggtgtttgtagggctgagtgtaactagctagcttggctcggtctggtctgggtcattaactcatttattatcatggcaagatgtgcctcgggtcagcttgttaggctgtcatagcttactg

SEQ ID NO: 3416 - protein, 428 aa, Zea mays subsp. mays
  peptide (1)..(428): Ceres Seq. ID no. 12410236
SPLPREDFKSPRPLPSPARHGTSGCPKNFAHPRFPPALVRALVWFPCQPGHSTSQPPRAARAGTRGLGFGCKFGNTMAGAAGESSGERQGTVERRMLRSRYHAVKSIISDERDEMSRADSDRFTAIIQQVDCLHELVQRPREQIADAEALLGITNTLVTSVRSHSSEGISPSDFITALLKKFGQQGNHDDESVSLRWGDLGLSVSHIFRPVPGCCTMLGPMNTEVKQRKVVAVGRKRTARPTENTCPEELAESSEEVKTDTDRNVLVMFDILRRKKSAKLENLVLNRLSFAQTVENVFALSFLVKDGRVEITVDDSGHIVRPRNAPAASAIASGEVSYSHFVFRFDFKDWKLMKEVVTEGEELLPHRTSQSNLCNEENDQPNLEARAQITPIRKLTRNRGLVFQDHVVEETPEENQASKRRRLFRNQD

SEQ ID NO: 3417 - protein, 352 aa, Zea mays subsp. mays
  peptide (1)..(352): Ceres Seq. ID no. 12410237
MAGAAGESSGERQGTVERRMLRSRYHAVKSIISDERDEMSRADSDRFTAIIQQVDCLHELVQRPREQIADAEALLGITNTLVTSVRSHSSEGISPSDFITALLKKFGQQGNHDDESVSLRWGDLGLSVSHIFRPVPGCCTMLGPMNTEVKQRKVVAVGRKRTARPTENTCPEELAESSEEVKTDTDRNVLVMFDILRRKKSAKLENLVLNRLSFAQTVENVFALSFLVKDGRVEITVDDSGHIVRPRNAPAASAIASGEVSYSHFVFRFDFKDWKLMKEVVTEGEELLPHRTSQSNLCNEENDQPNLEARAQITPIRKLTRNRGLVFQDHVVEETPEENQASKRRRLFRNQD

SEQ ID NO: 3418 - protein, 333 aa, Zea mays subsp. mays
  peptide (1)..(333): Ceres Seq. ID no. 12410238
MLRSRYHAVKSIISDERDEMSRADSDRFTAIIQQVDCLHELVQRPREQIADAEALLGITNTLVTSVRSHSSEGISPSDFITALLKKFGQQGNHDDESVSLRWGDLGLSVSHIFRPVPGCCTMLGPMNTEVKQRKVVAVGRKRTARPTENTCPEELAESSEEVKTDTDRNVLVMFDILRRKKSAKLENLVLNRLSFAQTVENVFALSFLVKDGRVEITVDDSGHIVRPRNAPAASAIASGEVSYSHFVFRFDFKDWKLMKEVVTEGEELLPHRTSQSNLCNEENDQPNLEARAQITPIRKLTRNRGLVFQDHVVEETPEENQASKRRRLFRNQD

SEQ ID NO: 3419 - DNA, 711 bp, Zea mays subsp. mays
  misc_feature (1)..(711): Ceres Seq. ID no. 12345309
  misc_feature (1)..(711): Ortholog of  Ceres SEQ ID NO 12777119 as cited in SEQ ID NO 68987
cccgtctaggcgacgacgacgacgaagcagcgggaggagcataagcgccgccgatcccgagcctccgagcgtgttctcccctcatcctccgcctcgtgccgcagatccctacgtactccgcccgccagccatggcccgctcctcctcgcagtcgcagtcctccgttggcgccggcgccggcgccggcgcgcgcccggccaccgtcgggccgcgcggcacggccgcggcggccgccgggatgcgccgccgccgcgccaccgcgtccggcgggggtggcggattctcggggggcggcgggagcaacatgctccgcttctacaccgacgaggcgccggggctccggctctcgcctaccatggtgctcgtcatgtcgctctgcttcatcggcttcgtcaccgccctccacatcttcggcaagctctaccgctcccggacggccgcggcctccgcgtgatccgatccgatccgaccgctcttgctcccacacatcggatcagacagacagatcagacggtgaaggttttggtttttgggtgatgaatttgtgtatggcgagacgcgcagcttgttgtgttgcctagcttttggttggtccttactttcgatctgcagatggaaaccctagtactggtcaacttaatgcgccctttctgttattttcttcccttgctttgagaattattactggaataactatgactagtttcttcc

SEQ ID NO: 3420 - protein, 150 aa, Zea mays subsp. mays
  peptide (1)..(150): Ceres Seq. ID no. 12345310
PSRRRRRRSSGRSISAADPEPPSVFSPHPPPRAADPYVLRPPAMARSSSQSQSSVGAGAGAGARPATVGPRGTAAAAAGMRRRRATASGGGGGFSGGGGSNMLRFYTDEAPGLRLSPTMVLVMSLCFIGFVTALHIFGKLYRSRTAAASA

SEQ ID NO: 3421 - protein, 107 aa, Zea mays subsp. mays
  peptide (1)..(107): Ceres Seq. ID no. 12345311
MARSSSQSQSSVGAGAGAGARPATVGPRGTAAAAAGMRRRRATASGGGGGFSGGGGSNMLRFYTDEAPGLRLSPTMVLVMSLCFIGFVTALHIFGKLYRSRTAAASA

SEQ ID NO: 3422 - DNA, 1751 bp, Zea mays subsp. mays
  misc_feature (1)..(1751): Ceres Seq. ID no. 12373788
  misc_feature (1)..(1751): Ortholog of  Ceres SEQ ID NO 14303831 as cited in SEQ ID NO 52976
  misc_feature (1)..(1751): Ortholog of  Ceres SEQ ID NO 12619453 as cited in SEQ ID NO 65952
atccctccacgttctcagaaaagtcgtccacgcgtctataaaccacaccaatcttttggcccttcgcttctccgttctcccccaattcgccttcacctcgccgcttcctccttgaccgccaccgttgacgtcgtcttccggcgaggtagctcgccggaagacctcacctggacttttccgacgcaccctccacacactctttaaccctccggaatggccgcctgcttctagctcgtcgacgccccaatctccgcttgcttcctcgacagccccatccgcctcttctcggctctcgctacggctcctctgcctgttcgccatggcggatccgcatcaccgtctcctactccggctacgtggcgcagaacctcgccgcgtcgctcggccaccgcttctcctccgcctccgcctcgggcagccgcctcctccatgacggcgcctggcgccccttctgcatcttcacctccacccgccagcccgagcagcaccgcggcagcggcagcgaccgccatgacggaggcgactacaaccacccgaagccccaggccatcgccgccggagctcactcgttgctgctcacgcgtgcgtgcttatcgtccaagtcgccgccgccgtctcttgccgtggggctgctctcggtgcttgcgcagaggacgggaccgacgcctggaaccaccggatcggcggcttctctctcaggctcgtcgccgatttccctcggtttcaaccccacctccttcctcccgttcctgcagacagcgaggtggctcccgtgcagcgaccttgcccacctcgtcgtcttcggcaccctcttcccctccccgctcgctggcgccttcggctccccccaagaaggcgttgattggtgcttctactggttctaccggaattgcgacgagcagtggtgctggtgcagcgatgagcaggagcaactggctgtcgaggtgggtcagctcctgctccgatgacgccaagacggcgtttgcggctgtgaccgtgccacttctctacgggtcgtccctggccgagccgaagtccatcccgtccaagtccatgtacccgaccttcgatgtcggtgatcggatacttgctgagaaggtctcatacatattccgggatccagaaatttcggacatcgtgatcttccgggctcccccaggacttcaggtttatggctacagctcaggtgatgtgttcatcaagagagttgtggccaagggaggagactatgttgaagtgcgtgatggcaagctgtttgttaatggagtagttcaggatgaggattttgtgctggagccacacaactacgagatggaaccagtgcttgtgccggaaggttatgtgttcgtgttgggagacaaccgcaacaacagctttgattcccacaactggggtccacttccagtgaggaacattgtcgggagatctatcctccggtattggccaccatcgaagatcaatgatacaatttatgagcctgatgtgtcccgcctcacggtgccgtcctcgtagtagtcgctgcagtgatgctggatatccagtgtgtgtacaatgaccttatacttcgtggagcctcatttgatgagttgagctccagttccaattctctcagaatattgtctcctgagtgttccctgtaaattctctttgcctgactgatttgttttcgctgccggttggcagatgcttgttcaaagcacgggaaagtgcagtaccttgcatcttgcaatacaaactaattaaaccggttg

SEQ ID NO: 3423 - protein, 360 aa, Zea mays subsp. mays
  peptide (1)..(360): Ceres Seq. ID no. 12373789
MTAPGAPSASSPPPASPSSTAAAAATAMTEATTTTRSPRPSPPELTRCCSRVRAYRPSRRRRLLPWGCSRCLRRGRDRRLEPPDRRLLSQARRRFPSVSTPPPSSRSCRQRGGSRAATLPTSSSSAPSSPPRSLAPSAPPKKALIGASTGSTGIATSSGAGAAMSRSNWLSRWVSSCSDDAKTAFAAVTVPLLYGSSLAEPKSIPSKSMYPTFDVGDRILAEKVSYIFRDPEISDIVIFRAPPGLQVYGYSSGDVFIKRVVAKGGDYVEVRDGKLFVNGVVQDEDFVLEPHNYEMEPVLVPEGYVFVLGDNRNNSFDSHNWGPLPVRNIVGRSILRYWPPSKINDTIYEPDVSRLTVPSS

SEQ ID NO: 3424 - protein, 333 aa, Zea mays subsp. mays
  peptide (1)..(333): Ceres Seq. ID no. 12373790
MTEATTTTRSPRPSPPELTRCCSRVRAYRPSRRRRLLPWGCSRCLRRGRDRRLEPPDRRLLSQARRRFPSVSTPPPSSRSCRQRGGSRAATLPTSSSSAPSSPPRSLAPSAPPKKALIGASTGSTGIATSSGAGAAMSRSNWLSRWVSSCSDDAKTAFAAVTVPLLYGSSLAEPKSIPSKSMYPTFDVGDRILAEKVSYIFRDPEISDIVIFRAPPGLQVYGYSSGDVFIKRVVAKGGDYVEVRDGKLFVNGVVQDEDFVLEPHNYEMEPVLVPEGYVFVLGDNRNNSFDSHNWGPLPVRNIVGRSILRYWPPSKINDTIYEPDVSRLTVPSS

SEQ ID NO: 3425 - protein, 197 aa, Zea mays subsp. mays
  peptide (1)..(197): Ceres Seq. ID no. 12373791
MSRSNWLSRWVSSCSDDAKTAFAAVTVPLLYGSSLAEPKSIPSKSMYPTFDVGDRILAEKVSYIFRDPEISDIVIFRAPPGLQVYGYSSGDVFIKRVVAKGGDYVEVRDGKLFVNGVVQDEDFVLEPHNYEMEPVLVPEGYVFVLGDNRNNSFDSHNWGPLPVRNIVGRSILRYWPPSKINDTIYEPDVSRLTVPSS

SEQ ID NO: 3426 - DNA, 1420 bp, Zea mays subsp. mays
  misc_feature (1)..(1420): Ceres Seq. ID no. 12344013
  misc_feature (1)..(1420): Ortholog of  Ceres SEQ ID NO 14304148 as cited in SEQ ID NO 57313
  misc_feature (1)..(1420): Ortholog of  Ceres SEQ ID NO 13598513 as cited in SEQ ID NO 64102
  misc_feature (1)..(1420): Ortholog of  Ceres SEQ ID NO 14302224 as cited in SEQ ID NO 64268
attcaacgtagggtacattatataataataagctaatagcagcgccacgcaccgacaccaatacgccatgggttccatcatggagcaacgctgcaacaacgatcagcaggcgctgctcgacgctcagctcgagctctggcacagcacgttcgcgttcatcaagtccatggcgttcaagtcggcgctggagctcggcatcgccgacgccatccactgccacggcggcaccgccacgctcacccagatagccaccaaggccgcgctccacccgtccaagacaccgtgcctgcgcaggctcatgcgcgcgctcacagtcgccggcatcttcagcgtcgccaagaactcgtccgacgatgacggcgatcagcacgtctacggcctcactccggcctcccgacttcttgtcggctcgtcacagaacttggctccaacactgagcctcatccttaacaacgtcttcgtggccccgttccttgacctcggcacgtggttcgagagcgcgctgccggccacagacctgccgctcttcgagctgtcccaccggaagaacgtgtgggacgtcgtcggccacgacccgtccgtgagccagctcttcaacgccgggatggtcgcggatacccgcttcctcatggacatcgccgtcagggagtgcggcgacgtgtttcaggggatacgctccctggtcgacgttggcggcggccatggcgcggcggcgcaggccatctctgcggcgttccctgccatacagtgcaccgtgctggaccttgcacacgtggtcgcaaccgctcccgcttgcgctgggctcagcttcgttgctggcgacatgtttgaggccattccgccagcgaatgctgtcttcctcaagtggatcatgcacgactggggtgacactgagtgtgtcacgatactaaagaactgcaagaaagctatacctccacgagatgcaggcggcaaggtgataatagtagataccgtggttggtgcagggcctccaaaccttaagaacaaagagacacaggtcatgtctgatctcttctttatgatcgtcaacggccttgagagagatgagcaggaatggaggaacgtcatctttgaagctggtttcagtgactacataatcataccagttttaggtgttcgatcaatcatcgagctatacccctgaaatataatccagcttcctcagccggcggccagctcatcacctacatgttgaatgctttggcgtgtggatctgtgtgtgtgttttttcctttaagaacagtgtgcatgtgtgtttaataaattggtatatatagttatatactcactaaaaggatggtttatgtatgcatgtatgcaagtgttccaaccattattatgtctccaaagtgaagaagttgcgtttttcaattttaaggaatgaactccaggattttct

SEQ ID NO: 3427 - protein, 365 aa, Zea mays subsp. mays
  peptide (1)..(365): Ceres Seq. ID no. 12344014
MGSIMEQRCNNDQQALLDAQLELWHSTFAFIKSMAFKSALELGIADAIHCHGGTATLTQIATKAALHPSKTPCLRRLMRALTVAGIFSVAKNSSDDDGDQHVYGLTPASRLLVGSSQNLAPTLSLILNNVFVAPFLDLGTWFESALPATDLPLFELSHRKNVWDVVGHDPSVSQLFNAGMVADTRFLMDIAVRECGDVFQGIRSLVDVGGGHGAAAQAISAAFPAIQCTVLDLAHVVATAPACAGLSFVAGDMFEAIPPANAVFLKWIMHDWGDTECVTILKNCKKAIPPRDAGGKVIIVDTVVGAGPPNLKNKETQVMSDLFFMIVNGLERDEQEWRNVIFEAGFSDYIIIPVLGVRSIIELYP

SEQ ID NO: 3428 - protein, 361 aa, Zea mays subsp. mays
  peptide (1)..(361): Ceres Seq. ID no. 12344015
MEQRCNNDQQALLDAQLELWHSTFAFIKSMAFKSALELGIADAIHCHGGTATLTQIATKAALHPSKTPCLRRLMRALTVAGIFSVAKNSSDDDGDQHVYGLTPASRLLVGSSQNLAPTLSLILNNVFVAPFLDLGTWFESALPATDLPLFELSHRKNVWDVVGHDPSVSQLFNAGMVADTRFLMDIAVRECGDVFQGIRSLVDVGGGHGAAAQAISAAFPAIQCTVLDLAHVVATAPACAGLSFVAGDMFEAIPPANAVFLKWIMHDWGDTECVTILKNCKKAIPPRDAGGKVIIVDTVVGAGPPNLKNKETQVMSDLFFMIVNGLERDEQEWRNVIFEAGFSDYIIIPVLGVRSIIELYP

SEQ ID NO: 3429 - protein, 332 aa, Zea mays subsp. mays
  peptide (1)..(332): Ceres Seq. ID no. 12344016
MAFKSALELGIADAIHCHGGTATLTQIATKAALHPSKTPCLRRLMRALTVAGIFSVAKNSSDDDGDQHVYGLTPASRLLVGSSQNLAPTLSLILNNVFVAPFLDLGTWFESALPATDLPLFELSHRKNVWDVVGHDPSVSQLFNAGMVADTRFLMDIAVRECGDVFQGIRSLVDVGGGHGAAAQAISAAFPAIQCTVLDLAHVVATAPACAGLSFVAGDMFEAIPPANAVFLKWIMHDWGDTECVTILKNCKKAIPPRDAGGKVIIVDTVVGAGPPNLKNKETQVMSDLFFMIVNGLERDEQEWRNVIFEAGFSDYIIIPVLGVRSIIELYP

SEQ ID NO: 3430 - DNA, 933 bp, Zea mays subsp. mays
  misc_feature (1)..(933): Ceres Seq. ID no. 12344431
  misc_feature (1)..(933): Ortholog of  Ceres SEQ ID NO 15175519 as cited in SEQ ID NO 1110
  misc_feature (1)..(933): Ortholog of  Ceres SEQ ID NO 13637980 as cited in SEQ ID NO 58973
  misc_feature (1)..(933): Ortholog of  Ceres SEQ ID NO 12624081 as cited in SEQ ID NO 61729
  misc_feature (1)..(933): Ortholog of  Ceres SEQ ID NO 13599435 as cited in SEQ ID NO 0
cagtcacccaccccatccaaggccctcccaaagtcccaaaggccgccgccgcccgccagcccaccatggccgcgcagtccttcctcctcgccgccactgccgccgccaggtcccccgcggtcttcgccgctccctattcctccgcacgccctttccactcggtccacttcgtcgccggcccgtggggcgccgccgccgccagggcgctcgtcgtcgcggacgccactaagaaggccgtagccgtcctcaagggcgcgtctgaggtcgagggcgtggtcacgctcacgcaggacgacgatggacctacaactgtgaatgtccgtatcactggacttacccctggacttcatggcttccacctccacgagtttggtgatactaccaatgggtgcatatcgacaggaccacattttaatccaaacaatctgacgcacggtgcaccagaagacgaagtccgtcatgcgggtgacctgggaaacattgttgcaaatgctgagggcatagccgaggcaaccattgttgatacccagattcctttgactggcccaaattcagttgttgggagagcatttgtggttcatgagcttgaagatgatttggggaaagggggccatgagctcagcctctctactggaaatgctggtggaagactggcatgtggtgttgttggcctgactccattgtaggttgctcgccgggtgcccgggttgcagttgcagctacgctgttacatccttgccttggtggacttttgtcttcaatcgtgttattgggacagtgacctttttgtattacttggattcattccatgcatgtggtatggtgcgtaatagcctttgcaggtcgactgtataaaaagcaatatttagttgaggaaataagtgttgccacatatccaaatcgatctatgaagcactatgaacatcaaatgtc

SEQ ID NO: 3431 - protein, 227 aa, Zea mays subsp. mays
  peptide (1)..(227): Ceres Seq. ID no. 12344432
VTHPIQGPPKVPKAAAARQPTMAAQSFLLAATAAARSPAVFAAPYSSARPFHSVHFVAGPWGAAAARALVVADATKKAVAVLKGASEVEGVVTLTQDDDGPTTVNVRITGLTPGLHGFHLHEFGDTTNGCISTGPHFNPNNLTHGAPEDEVRHAGDLGNIVANAEGIAEATIVDTQIPLTGPNSVVGRAFVVHELEDDLGKGGHELSLSTGNAGGRLACGVVGLTPL

SEQ ID NO: 3432 - protein, 206 aa, Zea mays subsp. mays
  peptide (1)..(206): Ceres Seq. ID no. 12344433
MAAQSFLLAATAAARSPAVFAAPYSSARPFHSVHFVAGPWGAAAARALVVADATKKAVAVLKGASEVEGVVTLTQDDDGPTTVNVRITGLTPGLHGFHLHEFGDTTNGCISTGPHFNPNNLTHGAPEDEVRHAGDLGNIVANAEGIAEATIVDTQIPLTGPNSVVGRAFVVHELEDDLGKGGHELSLSTGNAGGRLACGVVGLTPL

SEQ ID NO: 3433 - DNA, 1848 bp, Zea mays subsp. mays
  misc_feature (1)..(1848): Ceres Seq. ID no. 12363175
  misc_feature (1)..(1848): Ortholog of  Ceres SEQ ID NO 13654928 as cited in SEQ ID NO 62546
gcacgagaccattacctagaacatcctaatcgaaaagaggatagggaaggcatgcatgatagggacttcaaagacccaggtgagagctcagtcgacggtaatgccgccgcagctcctttagtcgccaggcgattggcatgccacggttcctggttcatctcgcagagttagtttgagttcgaggcttgtgtggtgttgctgattgcgcacaagaggtccaggaacatataggcggcggatctggctgcgttctttctgtttcgtcagagaaggggtttcagcgctgccagctttcacataaacaagttggggaagcagttgaggttttctaattcttcttggaaggattgagatctccagttctgataatgggttcttttgggatgaactggaatcagaaggaccccatggtgtgggattgggaacatctagtaccgtctgtctcaaatgcagttacaaggcacggatctgctaattcatctggtggtactcttacttctaactcagagctagggcatggttcatccaagagctctatttcagcgtccattgattcaccctctggagtagggaacagcttagagttcaacttcgccgctgttgagaggcatgttaagaacacgggcacgaacggcagagtcgatgactcggggaattctccatcgtcaatgatagctttcaaccaaggagagccattaatcagcctgaaacttgggaagagggcttacttcgaaaacgcctgcggaggacaggatgccaaggtttctgcagcttcagacgttacttctgcagccagcgtggtcaagaagactaaggtgtctcagcagaatgcaaagaactggtactgtcaggttgaagggtgcaaagttgacctgtcttctgctaaagattacaatcgcaagcacaaggtctgtgtagtccattctaaagctaccaaggtggttgttgctggtctagagcgtcggttttgtcaacagtgtagccgttttcatggtttagcggagtttgatcagaacaaacgaagctgtcgtaggcgtctgatgcatcataatgcacggaggaggaaacctcaggcagacacaatttcattcaattcatcgacaatgttttatgatacaaggcagcggacaaatcttttctttagtcaaccactttatggccaagtgaggagcaatgcagggtcttcatgggataacttgggaggcttaaaattcatggagacgaaacatccgccagtgcatccaacaaaaacagcatcccctgatgaactgcatttctcagccctccagataactagtgctgcggctcacaccgggacatcatcatgatctcgatgggttcatggcgttcaagggaaccagcacaaaggtccttaaccaaggcgtggaggcttgggcggccgcttccagctcgaacaacggaggcccagaaggtgggcgtgctctctctcttctgtcagacggctcgtggggctcgagttcagccgtcatccagcagcccacatctcacgcggacgccggtgcattgctgccgcccctcgccaccgttgccgtctccaacgccgccgccgccgccgggcatcctctggacccgtccccgggaaggttctggccgcaagacgatcatcccccgctcgtcgacggacccgccacgcagattccggagctggcgcacctccggatatggtgaaaggaaacgcatgtgatgcggtgactggtgacatgccagttcgagggcctggctgggaacacatctggttggttagcctgccgctctggcttgaatttgccggcgacgacagtctttgtttgtatcttttgatcagaacggacacagacatgtttgcgc

SEQ ID NO: 3434 - protein, 319 aa, Zea mays subsp. mays
  peptide (1)..(319): Ceres Seq. ID no. 12363176
MGSFGMNWNQKDPMVWDWEHLVPSVSNAVTRHGSANSSGGTLTSNSELGHGSSKSSISASIDSPSGVGNSLEFNFAAVERHVKNTGTNGRVDDSGNSPSSMIAFNQGEPLISLKLGKRAYFENACGGQDAKVSAASDVTSAASVVKKTKVSQQNAKNWYCQVEGCKVDLSSAKDYNRKHKVCVVHSKATKVVVAGLERRFCQQCSRFHGLAEFDQNKRSCRRRLMHHNARRRKPQADTISFNSSTMFYDTRQRTNLFFSQPLYGQVRSNAGSSWDNLGGLKFMETKHPPVHPTKTASPDELHFSALQITSAAAHTGTSS

SEQ ID NO: 3435 - protein, 314 aa, Zea mays subsp. mays
  peptide (1)..(314): Ceres Seq. ID no. 12363177
MNWNQKDPMVWDWEHLVPSVSNAVTRHGSANSSGGTLTSNSELGHGSSKSSISASIDSPSGVGNSLEFNFAAVERHVKNTGTNGRVDDSGNSPSSMIAFNQGEPLISLKLGKRAYFENACGGQDAKVSAASDVTSAASVVKKTKVSQQNAKNWYCQVEGCKVDLSSAKDYNRKHKVCVVHSKATKVVVAGLERRFCQQCSRFHGLAEFDQNKRSCRRRLMHHNARRRKPQADTISFNSSTMFYDTRQRTNLFFSQPLYGQVRSNAGSSWDNLGGLKFMETKHPPVHPTKTASPDELHFSALQITSAAAHTGTSS

SEQ ID NO: 3436 - protein, 306 aa, Zea mays subsp. mays
  peptide (1)..(306): Ceres Seq. ID no. 12363178
MVWDWEHLVPSVSNAVTRHGSANSSGGTLTSNSELGHGSSKSSISASIDSPSGVGNSLEFNFAAVERHVKNTGTNGRVDDSGNSPSSMIAFNQGEPLISLKLGKRAYFENACGGQDAKVSAASDVTSAASVVKKTKVSQQNAKNWYCQVEGCKVDLSSAKDYNRKHKVCVVHSKATKVVVAGLERRFCQQCSRFHGLAEFDQNKRSCRRRLMHHNARRRKPQADTISFNSSTMFYDTRQRTNLFFSQPLYGQVRSNAGSSWDNLGGLKFMETKHPPVHPTKTASPDELHFSALQITSAAAHTGTSS

SEQ ID NO: 3437 - DNA, 1471 bp, Zea mays subsp. mays
  misc_feature (1)..(1471): Ceres Seq. ID no. 12410223
  misc_feature (1)..(1471): Ortholog of  Ceres SEQ ID NO 12784064 as cited in SEQ ID NO 66982
  misc_feature (1)..(1471): Ortholog of  Ceres SEQ ID NO 15177907 as cited in SEQ ID NO 0
agtccacccccttcccttctttcccctttgcttgctgctgcctgcttctcgccgtcgccgcctcaattccctcctcctcgtccgtcgcctcgtccacgcgcacctcgtcctcctctccgttcccaccacctcctcgaccgcaccgtcgtcgtctagctagcggagcgagctgcgaccagatcggagagccaagcacccaggaagagggggccggggaacaagaagaagccgccggaagccgggcgtggacgtgtggtggttttctgccggcggctgacaagtggtgtaggctacccgctctggccatggatccgtcgggcggcgcgttcctgccgccgctgcagcaagggagctcctccttcccgcggtcctccagcaacgcgtcgctcgccaggagcggcagcggcggcggcggcgttggcgccgggcgcgggaccaggggcaggaagatgatgcgcagggtctgccgcggcgtcatcaccttcatcttcgccatcgctgggctgttcctgggagcggtgaccggcggtctgatcgggctggcgacggagagcggtctgttccgcggcaccgggatcggcgccatcactggcgcgctcgtctccatcgaggtcgtcgactcctccatccgcctctggcaggcgcgccgatccgggatctggagcatcctctacgtgctgaacgtgatctacagcctcctgacgggcaggctggtgcgcgagaaggtcgacccggcggtgcagcgggtggtccgcagccagatgaacgcggtggactcgtcgccgttcagggagtcgccggacctgttcgaggtggaggccaccaacggcatgccgcgggcgtccatcgacaagctccccgagtcgtggatcaccgaggagtacaggcgcgacgccgtcggcgacctctccggctgctccgtctgcctccaggatttccaggtcggggagaaggtgcggagcctgccggactgctggcacgtgttccacgtgccgtgcatcgacggctggctcatcaagcacggctcctgcccgctctgcaggaggaagctgtaggcggatcgaccggacgacgccatgaacgatgttcttctctgcgatcgagccgatgatgtgtgtgtgtgtgcccccgccgccaccaccgatagctgctgctaggatcggaggaggggaggaggaagaagagactgacatctatagaacccttaatttatagagagggcttttgctttgctacttgtacgtgctctactacgtacctattgcatcttttttttttttttgattcaccatgatcgacctccttcctcagatccatccatgcatgtaatataccctggaccggcttgtgcttcgttcgatccattccatgcatctccggactgtgatctcgatctggtgtaatatatataaaaaaactactagtatgtaccatcgcactttggacatctatacatgcatgctggttggtc

SEQ ID NO: 3438 - protein, 350 aa, Zea mays subsp. mays
  peptide (1)..(350): Ceres Seq. ID no. 12410224
STPFPSFPFACCCLLLAVAASIPSSSSVASSTRTSSSSPFPPPPRPHRRRLASGASCDQIGEPSTQEEGAGEQEEAAGSRAWTCGGFLPAADKWCRLPALAMDPSGGAFLPPLQQGSSSFPRSSSNASLARSGSGGGGVGAGRGTRGRKMMRRVCRGVITFIFAIAGLFLGAVTGGLIGLATESGLFRGTGIGAITGALVSIEVVDSSIRLWQARRSGIWSILYVLNVIYSLLTGRLVREKVDPAVQRVVRSQMNAVDSSPFRESPDLFEVEATNGMPRASIDKLPESWITEEYRRDAVGDLSGCSVCLQDFQVGEKVRSLPDCWHVFHVPCIDGWLIKHGSCPLCRRKL

SEQ ID NO: 3439 - protein, 249 aa, Zea mays subsp. mays
  peptide (1)..(249): Ceres Seq. ID no. 12410225
MDPSGGAFLPPLQQGSSSFPRSSSNASLARSGSGGGGVGAGRGTRGRKMMRRVCRGVITFIFAIAGLFLGAVTGGLIGLATESGLFRGTGIGAITGALVSIEVVDSSIRLWQARRSGIWSILYVLNVIYSLLTGRLVREKVDPAVQRVVRSQMNAVDSSPFRESPDLFEVEATNGMPRASIDKLPESWITEEYRRDAVGDLSGCSVCLQDFQVGEKVRSLPDCWHVFHVPCIDGWLIKHGSCPLCRRKL

SEQ ID NO: 3440 - protein, 201 aa, Zea mays subsp. mays
  peptide (1)..(201): Ceres Seq. ID no. 12410226
MMRRVCRGVITFIFAIAGLFLGAVTGGLIGLATESGLFRGTGIGAITGALVSIEVVDSSIRLWQARRSGIWSILYVLNVIYSLLTGRLVREKVDPAVQRVVRSQMNAVDSSPFRESPDLFEVEATNGMPRASIDKLPESWITEEYRRDAVGDLSGCSVCLQDFQVGEKVRSLPDCWHVFHVPCIDGWLIKHGSCPLCRRKL

SEQ ID NO: 3441 - DNA, 1332 bp, Zea mays subsp. mays
  misc_feature (1)..(1332): Ceres Seq. ID no. 12376472
  misc_feature (1)..(1332): Ortholog of  Ceres SEQ ID NO 13638643 as cited in SEQ ID NO 52149
cttcagttcacaaggccaccacgcgcgcccaaaggcccccaaggccccaaccccaaccttgcaggaaaaaaaaagagacgaccccccaaatcggaatccgcacacccatcatccatggccgccgccctgctccgccgctcgccggcggcgcgcgcgctcctctcgccggcactctcgtcccgcctcgtcgcgtccaagccccactcctcgtcccccgcgccgccgccacctgcgaaggccgactccagcacgaagaccttctcgatctaccggtgggacccggactcgccgtcgacgaagccgcacctcaaggactaccaggtggacctgtccgactgcgggccgatggtgctggacgcgctgctcaagatcaagaacgagcaggacccgtcgctcaccttccgccgcagctgccgggagggcatctgcgggagctgcgccatgaacatcgacggggacaacggcctcgcctgcctcaccaagatctcctccgcctcctcggcgtccaccgtctcgccgctgccccacatgttcgtcatcaaggacctggtggtcgacatgaccaacttctacaaccagtacaagagcgtcgagccgtggctcaagcgcaaggacccgccgccgcagctaggcaaggaggtcccgcagaccaaggccgaccgcgccaagctcgacggcatgtacgagtgcatcctctgcgcctgctgctccacctcctgcccatcctactggtggaaccccgaggagtacctcggcccagccgcgctgcttccacgccaataggtggatacaggacagccgtgaccagttcaccaaggagcgcctggacgccatcaacgacgagttcaagctgtaccgctgccacaccatcaagaactgcacgcatgcctgccccaaggggcctgaacccggcaaagcagatcgacacgatcaagaagctccagttgggtgccccaagtgcctgaaaccgagcgtgtcttcccttgaaaacggtcgtggaacagacctgtggaaaaaattgggatgaacttgccacttatttcgttgttgttcttcttctttggtcttcgcgcggtggtttctacctgccaaagacgaataattcccggctggggcccctccagtccactccacccatgcttttgtgtcaggcggagcggaggtagagcatagggagtgaataaccgctaccttatttcatttctatgatgtatctatctaatttggtcctcccctgataatgcacgacccgtagtgttaacaggcgtatttggaccttcaagaagtatttggacatggcaaatgtattttggaatgctcttatctaccgtg

SEQ ID NO: 3442 - protein, 320 aa, Zea mays subsp. mays
  peptide (1)..(320): Ceres Seq. ID no. 12376473
SVHKATTRAQRPPRPQPQPCRKKKETTPQIGIRTPIIHGRRPAPPLAGGARAPLAGTLVPPRRVQAPLLVPRAAATCEGRLQHEDLLDLPVGPGLAVDEAAPQGLPGGPVRLRADGAGRAAQDQERAGPVAHLPPQLPGGHLRELRHEHRRGQRPRLPHQDLLRLLGVHRLAAAPHVRHQGPGGRHDQLLQPVQERRAVAQAQGPAAAARQGGPADQGRPRQARRHVRVHPLRLLLHLLPILLVEPRGVPRPSRAASTPIGGYRTAVTSSPRSAWTPSTTSSSCTAATPSRTARMPAPRGLNPAKQIDTIKKLQLGAPSA

SEQ ID NO: 3443 - protein, 260 aa, Zea mays subsp. mays
  peptide (1)..(260): Ceres Seq. ID no. 12376474
LQFTRPPRAPKGPQGPNPNLAGKKKRRPPKSESAHPSSMAAALLRRSPAARALLSPALSSRLVASKPHSSSPAPPPPAKADSSTKTFSIYRWDPDSPSTKPHLKDYQVDLSDCGPMVLDALLKIKNEQDPSLTFRRSCREGICGSCAMNIDGDNGLACLTKISSASSASTVSPLPHMFVIKDLVVDMTNFYNQYKSVEPWLKRKDPPPQLGKEVPQTKADRAKLDGMYECILCACCSTSCPSYWWNPEEYLGPAALLPRQ

SEQ ID NO: 3444 - protein, 222 aa, Zea mays subsp. mays
  peptide (1)..(222): Ceres Seq. ID no. 12376475
MAAALLRRSPAARALLSPALSSRLVASKPHSSSPAPPPPAKADSSTKTFSIYRWDPDSPSTKPHLKDYQVDLSDCGPMVLDALLKIKNEQDPSLTFRRSCREGICGSCAMNIDGDNGLACLTKISSASSASTVSPLPHMFVIKDLVVDMTNFYNQYKSVEPWLKRKDPPPQLGKEVPQTKADRAKLDGMYECILCACCSTSCPSYWWNPEEYLGPAALLPRQ

SEQ ID NO: 3445 - DNA, 1532 bp, Zea mays subsp. mays
  misc_feature (1)..(1532): Ceres Seq. ID no. 12407804
  misc_feature (1)..(1532): Ortholog of  Ceres SEQ ID NO 13655660 as cited in SEQ ID NO 63727
acagtgtccactgtccagtcgcctagtcgcaaatctcaccccgccgccatggcctcccccgccgccgcctcccccgcgcgccgcctttccgtcattttctcctcgaccaagccacgcgcccgaccacccaaaccggcgccggctccgaaagcgccggccggccaggcggttgcgaaacctgacgagcgctgcgagtcccggaatctcacgaaaatcctgcaggtcatcttccgggagcgcgatccggacaagctggtttcccagttcatcgccgaatcgaccgcgtctgaacgcttccgcaacaagcaccgcgtgtacgacgtggccgtggcccgcctcgcctccttcggccgacacgatggcattgctgccatcatcgactcacagaagccgttcatcgcggcctccagcgtgggcttcgtcgcacgcctcatccgcctctgcggccgcgcctccatgccgtcccacgccgccgcgatcttccatgacctcccaccgaagcacaagtcctccatgactttcaatgccctcctcgggccgcctacctcgacgccagcgacttcgacgcactcgccaccgcgttgcaggaaatcccggccacacaccccactattgctcccaccatatactctcacaatatactcatcagtgcgctgtgcaagaagccggacctctcggccgccgtggatgtcatcacgctcatggagaagcgcggtattacccctgatatcatctctttcaacattctgctcaatgggttttacagcaatgatcgctttgatgacgtcgagaaagtttgggagatgatgaaggagaggaatgttgagccggatgcgaggagctataatgcaaaactgcggggtttggtttcccaagggagggttgaggatgcagctgcattgattgagaggatgcaaaaggagggaccaaagcctgattcagtgtcctacaacgaactgattcgagggtattgcaatgaagggaggttgaatgaagccaagaaggtatatgataatatgataaagaatggatatgcaccaaataggggcacatttcatacccttgtgccacattttgtggaggctggagagcttgatcatgctctaagctgctgccatgagatcttcactaggaagtgcagagtgcagtgctcgttgctgcagggggtagtgactgcgttggttgctgcatcaaggaaggaggaggctaagaggatcgttcatcttggaagggagaactactatcctcgaaagggtttgaggatgccaccacgtactagaaaagacgagggtttgaagatgccgcaacctggtggagaaggcaatgatgtagaagctggaactgattcagaagattctgtatcatatgaagatgggtgcgagcaagaagaggagtcgaaaaatggtcagtgaggatgtacctttgtaatttaagcattgatgtgacatggcgatgcaaactgaatttgctctacttctttgatggcatgatacaacagaattgcctgtgcaattggaattctctcgcacttt

SEQ ID NO: 3446 - protein, 268 aa, Zea mays subsp. mays
  peptide (1)..(268): Ceres Seq. ID no. 12407805
TVSTVQSPSRKSHPAAMASPAAASPARRLSVIFSSTKPRARPPKPAPAPKAPAGQAVAKPDERCESRNLTKILQVIFRERDPDKLVSQFIAESTASERFRNKHRVYDVAVARLASFGRHDGIAAIIDSQKPFIAASSVGFVARLIRLCGRASMPSHAAAIFHDLPPKHKSSMTFNALLGPPTSTPATSTHSPPRCRKSRPHTPLLLPPYTLTIYSSVRCARSRTSRPPWMSSRSWRSAVLPLISSLSTFCSMGFTAMIALMTSRKFGR

SEQ ID NO: 3447 - protein, 252 aa, Zea mays subsp. mays
  peptide (1)..(252): Ceres Seq. ID no. 12407806
MASPAAASPARRLSVIFSSTKPRARPPKPAPAPKAPAGQAVAKPDERCESRNLTKILQVIFRERDPDKLVSQFIAESTASERFRNKHRVYDVAVARLASFGRHDGIAAIIDSQKPFIAASSVGFVARLIRLCGRASMPSHAAAIFHDLPPKHKSSMTFNALLGPPTSTPATSTHSPPRCRKSRPHTPLLLPPYTLTIYSSVRCARSRTSRPPWMSSRSWRSAVLPLISSLSTFCSMGFTAMIALMTSRKFGR

SEQ ID NO: 3448 - protein, 236 aa, Zea mays subsp. mays
  peptide (1)..(236): Ceres Seq. ID no. 12407807
MEKRGITPDIISFNILLNGFYSNDRFDDVEKVWEMMKERNVEPDARSYNAKLRGLVSQGRVEDAAALIERMQKEGPKPDSVSYNELIRGYCNEGRLNEAKKVYDNMIKNGYAPNRGTFHTLVPHFVEAGELDHALSCCHEIFTRKCRVQCSLLQGVVTALVAASRKEEAKRIVHLGRENYYPRKGLRMPPRTRKDEGLKMPQPGGEGNDVEAGTDSEDSVSYEDGCEQEEESKNGQ

SEQ ID NO: 3449 - DNA, 1592 bp, Zea mays subsp. mays
  misc_feature (1)..(1592): Ceres Seq. ID no. 12411477
  misc_feature (1)..(1592): Ortholog of  Ceres SEQ ID NO 14307273 as cited in SEQ ID NO 54302
  misc_feature (1)..(1592): Ortholog of  Ceres SEQ ID NO 14315317 as cited in SEQ ID NO 58242
  misc_feature (1)..(1592): Ortholog of  Ceres SEQ ID NO 13655375 as cited in SEQ ID NO 63347
  misc_feature (1)..(1592): Ortholog of  Ceres SEQ ID NO 12626166 as cited in SEQ ID NO 64505
  misc_feature (1)..(1592): Ortholog of  Ceres SEQ ID NO 13654415 as cited in SEQ ID NO 68820
gtataccagtctagcaccgaactaccaaaaccgaccgagccgcgaacttcacccctgccttctctcccttctccgtccaggccctggtgcccgcgcgttctcgtgcggcaagtgggcgccgccgccggactacgacaggtgcccagttcctcgtcgggtccttcgtcgacgacgagcacccaccaaaaattcgagtattagactctacatgtcaagaaagtatggcgccaggaagcaaggcggagcggaaagcagcactagatgctggcgcatggatgttcaatgtcgtcacatctgttggtatcatcatggtcaacaaaggcttaatggcgactcatggctttagttttgctacaacactgactggacttcattttgcaatgacaaccttgatgacgttagtaatgaaatggctgggatatattcagccatcttatttaccattaccagaactagtaaagtttgccttttttgcaaacctgtcgatcgtcggaatgaacgttagtttgatgtggaactctgttggattctatcagatcgcgaagttgtgtatcattccagtcttatgcattctggaaatcatattcgacaaagttcgttactcaagagatacaaagctcagtatagtgcttgtcctcataggtgttgctgtgtgtactgtgactgatgttagcgtgaactctcaagggctattagctgcagtaatagctgtttggagcacagcactacaacaacattatgttcaccaccttcaatggaagtactcgcttggctcattcaatctcttaggccatactgctccagcgcaggcagcatcattgttaatagtggggccttttgtggacttctggctgactaacaaaagagttgatgcttttaactacacatcaatagttacgttctttatcgtgttgtcgtgcataattgccgttgggacgaatctaagccaattcatatgcatcggaagattcacagccgtctcgttccaagtcctaggccacatgaagacagttctggtgttgaccttggggttccttttctttgggaaagaggggctcaacttccatgtcgcccttggcatgcttctggctgtgatcggcatgatctggtacgggaacgcgtcgtcgaaatctggaggcaaagagcgccaggtctaccccacaccgagcgagaagactcagaagcatggggcgctgtcatcgcagtccgagctcgatcagaaggtctaaacgagacacacaaaggcatccgatgcttgttgagcaccggtcgacctggctttattttttagtacttatttttgagggatgagatgtttctataggattgtaggtggggccatagcagaaagagggtgcctgggtaaaatgcccacgagtttacttttgcagtgagtatgtcaatctaagctggcagatacttgatttgtaatagtctttgtgtgtgtttcgctcttcatgtggcatgttcagtttgatctatagttgtatctttcactttcacactgaaattgaaaagtaaagcgcaaatttccttgtatatgtattacaagtaattaatttggtgctatatatcgcatctgtccggttttt

SEQ ID NO: 3450 - protein, 335 aa, Zea mays subsp. mays
  peptide (1)..(335): Ceres Seq. ID no. 12411478
MAPGSKAERKAALDAGAWMFNVVTSVGIIMVNKGLMATHGFSFATTLTGLHFAMTTLMTLVMKWLGYIQPSYLPLPELVKFAFFANLSIVGMNVSLMWNSVGFYQIAKLCIIPVLCILEIIFDKVRYSRDTKLSIVLVLIGVAVCTVTDVSVNSQGLLAAVIAVWSTALQQHYVHHLQWKYSLGSFNLLGHTAPAQAASLLIVGPFVDFWLTNKRVDAFNYTSIVTFFIVLSCIIAVGTNLSQFICIGRFTAVSFQVLGHMKTVLVLTLGFLFFGKEGLNFHVALGMLLAVIGMIWYGNASSKSGGKERQVYPTPSEKTQKHGALSSQSELDQKV

SEQ ID NO: 3451 - protein, 317 aa, Zea mays subsp. mays
  peptide (1)..(317): Ceres Seq. ID no. 12411479
MFNVVTSVGIIMVNKGLMATHGFSFATTLTGLHFAMTTLMTLVMKWLGYIQPSYLPLPELVKFAFFANLSIVGMNVSLMWNSVGFYQIAKLCIIPVLCILEIIFDKVRYSRDTKLSIVLVLIGVAVCTVTDVSVNSQGLLAAVIAVWSTALQQHYVHHLQWKYSLGSFNLLGHTAPAQAASLLIVGPFVDFWLTNKRVDAFNYTSIVTFFIVLSCIIAVGTNLSQFICIGRFTAVSFQVLGHMKTVLVLTLGFLFFGKEGLNFHVALGMLLAVIGMIWYGNASSKSGGKERQVYPTPSEKTQKHGALSSQSELDQKV

SEQ ID NO: 3452 - protein, 306 aa, Zea mays subsp. mays
  peptide (1)..(306): Ceres Seq. ID no. 12411480
MVNKGLMATHGFSFATTLTGLHFAMTTLMTLVMKWLGYIQPSYLPLPELVKFAFFANLSIVGMNVSLMWNSVGFYQIAKLCIIPVLCILEIIFDKVRYSRDTKLSIVLVLIGVAVCTVTDVSVNSQGLLAAVIAVWSTALQQHYVHHLQWKYSLGSFNLLGHTAPAQAASLLIVGPFVDFWLTNKRVDAFNYTSIVTFFIVLSCIIAVGTNLSQFICIGRFTAVSFQVLGHMKTVLVLTLGFLFFGKEGLNFHVALGMLLAVIGMIWYGNASSKSGGKERQVYPTPSEKTQKHGALSSQSELDQKV

SEQ ID NO: 3453 - DNA, 1340 bp, Zea mays subsp. mays
  misc_feature (1)..(1340): Ceres Seq. ID no. 12406798
  misc_feature (1)..(1340): Ortholog of  Ceres SEQ ID NO 14304176 as cited in SEQ ID NO 56343
atcaaactaaaaaaaatctcaattctcaaagtcgtcgatccagcggtagcagcgcacaaaccgatcgatctcggagagggagagaaccaaccaatttcatcgccgatcaaacaaggaaaaaagatcccggccatggcgacgcggtcgctggagctgacgctgatctcgggcaaggacctcaaggacgtgaacctgatgtccaggatggaggtctacgccgtggtgtcgctctccggcgacccccggtcgcggcagcgggtccaggccgaccgcaccggcggccgcaacccgacctggaacgccacgctccgcttcgccgtcccggccaccggcgccggctccctccacgtcctcctccgcgccgagcgcgccctcggcgaccgcgacgtcggcgaggtccacatcccgctgtccgagctcctctccggcgcccccgacggccccgtccccgccaagttcgtggcctaccaggtgcgcaagatctcctccggcaagccccagggagttctcaacctgtcgtacaagctcggcgaggtcgccaacggctacgcccccgcttccgccgcccagtccgcctacgcccatcctccaccgaccgccgcgtacccgcctccttcaggcaaggctgacgcctacgcgcctcccgccgcgtacccgcctccttcgggcaaggccgacgcgtacgcgccccctgccgcatacccgccggcaaccaaggccgacgcgtacccacctccatacggcgcctacccgcccgccggcggcaaggccgacgctgcttacccgccgtcatccggctacccacccgcggcggcaggcaagccaggcaaggggggcgaaccggtgacggcctacccttcggccggtcccagcacggcggcgccctacgctgctcctccgccgcagtacggcggctacggttacccgccgcagcagggcgcgggctacggctacccgcccccgccgccgcagcaggcggggtacgggtacggctacccgccgccgcaggccgccggctacgggtaccagcagcaggccgtgaggccgcagaagaagaagaacaacttcgggatggggctcggggccgggctgctcggaggcgccgtcgggggcctcctgatcggcgacatgatctcggactcgtcggcgtacgacgccgggttcgacgatggcggcggcttcgatttctagcgcgctccggtggcatgggcgattgggcggtgacgccacgccgcgcatcagagacggagaggttcccgttttggatttgccttttgtgatttgtttccttctgtacgcaatctatgtaattgtcggaacgaaatcaatcaagattatgc

SEQ ID NO: 3454 - protein, 396 aa, Zea mays subsp. mays
  peptide (1)..(396): Ceres Seq. ID no. 12406799
IKLKKISILKVVDPAVAAHKPIDLGEGENQPISSPIKQGKKIPAMATRSLELTLISGKDLKDVNLMSRMEVYAVVSLSGDPRSRQRVQADRTGGRNPTWNATLRFAVPATGAGSLHVLLRAERALGDRDVGEVHIPLSELLSGAPDGPVPAKFVAYQVRKISSGKPQGVLNLSYKLGEVANGYAPASAAQSAYAHPPPTAAYPPPSGKADAYAPPAAYPPPSGKADAYAPPAAYPPATKADAYPPPYGAYPPAGGKADAAYPPSSGYPPAAAGKPGKGGEPVTAYPSAGPSTAAPYAAPPPQYGGYGYPPQQGAGYGYPPPPPQQAGYGYGYPPPQAAGYGYQQQAVRPQKKKNNFGMGLGAGLLGGAVGGLLIGDMISDSSAYDAGFDDGGGFDF

SEQ ID NO: 3455 - protein, 352 aa, Zea mays subsp. mays
  peptide (1)..(352): Ceres Seq. ID no. 12406800
MATRSLELTLISGKDLKDVNLMSRMEVYAVVSLSGDPRSRQRVQADRTGGRNPTWNATLRFAVPATGAGSLHVLLRAERALGDRDVGEVHIPLSELLSGAPDGPVPAKFVAYQVRKISSGKPQGVLNLSYKLGEVANGYAPASAAQSAYAHPPPTAAYPPPSGKADAYAPPAAYPPPSGKADAYAPPAAYPPATKADAYPPPYGAYPPAGGKADAAYPPSSGYPPAAAGKPGKGGEPVTAYPSAGPSTAAPYAAPPPQYGGYGYPPQQGAGYGYPPPPPQQAGYGYGYPPPQAAGYGYQQQAVRPQKKKNNFGMGLGAGLLGGAVGGLLIGDMISDSSAYDAGFDDGGGFDF

SEQ ID NO: 3456 - protein, 331 aa, Zea mays subsp. mays
  peptide (1)..(331): Ceres Seq. ID no. 12406801
MSRMEVYAVVSLSGDPRSRQRVQADRTGGRNPTWNATLRFAVPATGAGSLHVLLRAERALGDRDVGEVHIPLSELLSGAPDGPVPAKFVAYQVRKISSGKPQGVLNLSYKLGEVANGYAPASAAQSAYAHPPPTAAYPPPSGKADAYAPPAAYPPPSGKADAYAPPAAYPPATKADAYPPPYGAYPPAGGKADAAYPPSSGYPPAAAGKPGKGGEPVTAYPSAGPSTAAPYAAPPPQYGGYGYPPQQGAGYGYPPPPPQQAGYGYGYPPPQAAGYGYQQQAVRPQKKKNNFGMGLGAGLLGGAVGGLLIGDMISDSSAYDAGFDDGGGFDF

SEQ ID NO: 3457 - DNA, 1361 bp, Zea mays subsp. mays
  misc_feature (1)..(1361): Ceres Seq. ID no. 12366880
  misc_feature (1)..(1361): Ortholog of  Ceres SEQ ID NO 14315973 as cited in SEQ ID NO 57637
gccagccctcctcttccggcggctcctcggccctcgcggaactcgccacatcccccattgcccccgtcgcccgttcgctccccgtccgaattatttactcaaatcattcatcgccggcccgtcccactcccacctccccaagcaacctgaccacgccaccccgcgaggtccgcgataccgtccaaatccacgcgataacaaccaggccgtcccccttccttccttccctcccgtatatagctagcgaggggcgtggcaatggttcttcagctccgcctgatcccgcgcctggctgccgcagccaggttgacgcccgcgacttcctgcgctccccggctgctcctgcggcgcgcgccgttaccaccggccctcgcgatggcgtcggcgtacagcgccggttacggcgcgggcaggaggctgctattcaggcagctgttcgagaaggagagctccacgtacacctacctcctcgccgacgtcgccgaccccgacaggcccgccgtgctgattgaccctgtcgacagaacagttgacagagatcttaatcttatcaaggaattgggcttaaagctcgtgtttgctatgaatactcatgtacatgctgatcacgtcactggaacaggactaataaaaactaaggtacctggagttaagtctgttatttcaaaagctagtggagcaaaagctgatcattttgttgatcatggggacaaaatacactttggtaaccttttccttgaggtgcgagctactccaggccatacctctggctgtgtgacttatgttacaggtgatgctgatgggcaaccttcaccaaggatggcttttactggtgatgccttaattatccgggcatgtggaaggactgacttccagggaggaagttctgagcagttgtatcagtcagtgcattcacagattttcacattgccaaaggatacactactttatcctgctcatgactataaaggtttcacggtaagtactgttgaagaggaggctgcctataatgctcgactcacaaaagataaggaaactttcaagacgatcatgaataacttgaatttgtcatatccaaagatgatggatgtagctgtacctgccaatttggtctgcggtatccaggatccaccaccgaagatctgagctgttcccgtggaagcctgcaactgcacttctggttgtttatgaactctggatcgccaccagaggcttgcagctgagttgttcattaaataatttgtttgctgcatcctgtgatatcgcgagaaaataatctaaccaatggccggtgtagcctctggttgtatgtggcaaagcactattgtttagagagatcaaaaggaacaatgctgatagcc

SEQ ID NO: 3458 - protein, 295 aa, Zea mays subsp. mays
  peptide (1)..(295): Ceres Seq. ID no. 12366881
MVLQLRLIPRLAAAARLTPATSCAPRLLLRRAPLPPALAMASAYSAGYGAGRRLLFRQLFEKESSTYTYLLADVADPDRPAVLIDPVDRTVDRDLNLIKELGLKLVFAMNTHVHADHVTGTGLIKTKVPGVKSVISKASGAKADHFVDHGDKIHFGNLFLEVRATPGHTSGCVTYVTGDADGQPSPRMAFTGDALIIRACGRTDFQGGSSEQLYQSVHSQIFTLPKDTLLYPAHDYKGFTVSTVEEEAAYNARLTKDKETFKTIMNNLNLSYPKMMDVAVPANLVCGIQDPPPKI

SEQ ID NO: 3459 - protein, 256 aa, Zea mays subsp. mays
  peptide (1)..(256): Ceres Seq. ID no. 12366882
MASAYSAGYGAGRRLLFRQLFEKESSTYTYLLADVADPDRPAVLIDPVDRTVDRDLNLIKELGLKLVFAMNTHVHADHVTGTGLIKTKVPGVKSVISKASGAKADHFVDHGDKIHFGNLFLEVRATPGHTSGCVTYVTGDADGQPSPRMAFTGDALIIRACGRTDFQGGSSEQLYQSVHSQIFTLPKDTLLYPAHDYKGFTVSTVEEEAAYNARLTKDKETFKTIMNNLNLSYPKMMDVAVPANLVCGIQDPPPKI

SEQ ID NO: 3460 - protein, 187 aa, Zea mays subsp. mays
  peptide (1)..(187): Ceres Seq. ID no. 12366883
MNTHVHADHVTGTGLIKTKVPGVKSVISKASGAKADHFVDHGDKIHFGNLFLEVRATPGHTSGCVTYVTGDADGQPSPRMAFTGDALIIRACGRTDFQGGSSEQLYQSVHSQIFTLPKDTLLYPAHDYKGFTVSTVEEEAAYNARLTKDKETFKTIMNNLNLSYPKMMDVAVPANLVCGIQDPPPKI

SEQ ID NO: 3461 - DNA, 1865 bp, Zea mays subsp. mays
  misc_feature (1)..(1865): Ceres Seq. ID no. 12406164
  misc_feature (1)..(1865): Ortholog of  Ceres SEQ ID NO 13657138 as cited in SEQ ID NO 65923
  misc_feature (1)..(1865): Ortholog of  Ceres SEQ ID NO 13584744 as cited in SEQ ID NO 69137
gaaaaatcggtttctcggaagcctgtcaaacacggactggcttagtcaaagccggctttcagacatataatcgcgctcgccgtcgtgcgcacggcagtcggcaggcagtaccggagcagccgtgccaggccccatggacagctcgagcggcatgtgggccgtgctcggccaggcctcgaacgtggcgcagctggtcggcgtggacgcgctcgggctggtgtccatggtcgtgcaggccgcgctggcggcgcgccgccaccgcgacgcgtgccgccggctggcgcagcacgtggaggtcgtcggcggcctgctgcgggagctggagctcgccgagctgatgcggcgggaggccacgcggcggccgctcgaccagctccgggccgcgctgcggcggtgctacgcgctcgtcacggcgtgccaggactgcgggtacctccgcagcctgctcctcggcgcccggatggccgacgagctccgcgcggcggagaaggaggtcgacttgttcatccgcttagtcccacttatcgccctcgtcgacagcacgcatggtcgcagtggcaagactgccgagggagtaccaggtctactcacgaacggttcaaaccatcatgtcaggttttcaagaagtgtttccgcctccatcaaaatacacattcaacgaactactcaaatctgcagtattgcagaacagccattagcaggagcactggacttgggagaacataaaaatctggactttgaagaattgttggagctttgcatccgtactcaagagagttgctcaggattcagaaggtttttgaattatttcagatcattgacgctacaggcaatttcccggaaagtagaatcatcgggtcgggtggttttgctatagtttacaagggtcagttacctgatggatccatggtcgccatcaaaaggatggatgaaggtgccacaatgtttgatttcagcagtgaatttctggctgcgaggcttcagcataccaatctaattagacttttggggtggtgtatccatgggaaagaaaggattctagtgtatgagttcatgcacaagggtaccctgcacagtttaatctttgacaaaagaatggggttgttgctagactggtctaaacgaatcgatataatcagaggggtagctgaaggacttctttaccttcacaaacagtccaagttatggattgttcatagggatttgaagcccaggaacgtcctattagatcatgacatgaagccaaagcttgctgattttggatcggctagaactctgacttcggattccgctgaagagtgtacaagcagggttgtggggactagtggctacaaagctcctgagtacacgtctcgaggtgtctattcactgaagacagatgtgttcagcttcggggtggtggttctagtgaccatcagcggncgagagaacnccatactggagaagcaaggagactctgttggcacccttgtacgagatgcctggcagctatggaacgatggaaggctgcatgagcttgtagatccagtgctgggtgacggattcgaacttgctgaggtggcgcaggaggagccagcagatcgtcccaccatgtccgacgtcgtgtcgctcctgaactttgaaagcataggtctgctgccagatcctaagcagccgtctgagctttgtaagggaggtggtggtacttctggtgacaggttgccgacatgtggtagccagtcgagcaggaccatagacatcacaatcacaagttcagctcctgtgtcaactagaactagggtccgcatcattgtggacccagagacctaaaatgtagacataaaccgatgttaatatgtaaaagaacatggagaacttttaaggcc

SEQ ID NO: 3462 - protein, 300 aa, Zea mays subsp. mays
  peptide (1)..(300): Ceres Seq. ID no. 12406165
  misc_feature (172)..(172): Xaa is any aa, unknown or other
  misc_feature (176)..(176): Xaa is any aa, unknown or other
MVAIKRMDEGATMFDFSSEFLAARLQHTNLIRLLGWCIHGKERILVYEFMHKGTLHSLIFDKRMGLLLDWSKRIDIIRGVAEGLLYLHKQSKLWIVHRDLKPRNVLLDHDMKPKLADFGSARTLTSDSAEECTSRVVGTSGYKAPEYTSRGVYSLKTDVFSFGVVVLVTISXRENXILEKQGDSVGTLVRDAWQLWNDGRLHELVDPVLGDGFELAEVAQEEPADRPTMSDVVSLLNFESIGLLPDPKQPSELCKGGGGTSGDRLPTCGSQSSRTIDITITSSAPVSTRTRVRIIVDPET

SEQ ID NO: 3463 - protein, 294 aa, Zea mays subsp. mays
  peptide (1)..(294): Ceres Seq. ID no. 12406166
  misc_feature (166)..(166): Xaa is any aa, unknown or other
  misc_feature (170)..(170): Xaa is any aa, unknown or other
MDEGATMFDFSSEFLAARLQHTNLIRLLGWCIHGKERILVYEFMHKGTLHSLIFDKRMGLLLDWSKRIDIIRGVAEGLLYLHKQSKLWIVHRDLKPRNVLLDHDMKPKLADFGSARTLTSDSAEECTSRVVGTSGYKAPEYTSRGVYSLKTDVFSFGVVVLVTISXRENXILEKQGDSVGTLVRDAWQLWNDGRLHELVDPVLGDGFELAEVAQEEPADRPTMSDVVSLLNFESIGLLPDPKQPSELCKGGGGTSGDRLPTCGSQSSRTIDITITSSAPVSTRTRVRIIVDPET

SEQ ID NO: 3464 - protein, 288 aa, Zea mays subsp. mays
  peptide (1)..(288): Ceres Seq. ID no. 12406167
  misc_feature (160)..(160): Xaa is any aa, unknown or other
  misc_feature (164)..(164): Xaa is any aa, unknown or other
MFDFSSEFLAARLQHTNLIRLLGWCIHGKERILVYEFMHKGTLHSLIFDKRMGLLLDWSKRIDIIRGVAEGLLYLHKQSKLWIVHRDLKPRNVLLDHDMKPKLADFGSARTLTSDSAEECTSRVVGTSGYKAPEYTSRGVYSLKTDVFSFGVVVLVTISXRENXILEKQGDSVGTLVRDAWQLWNDGRLHELVDPVLGDGFELAEVAQEEPADRPTMSDVVSLLNFESIGLLPDPKQPSELCKGGGGTSGDRLPTCGSQSSRTIDITITSSAPVSTRTRVRIIVDPET

SEQ ID NO: 3465 - DNA, 1230 bp, Zea mays subsp. mays
  misc_feature (1)..(1230): Ceres Seq. ID no. 12410201
  misc_feature (1)..(1230): Ortholog of  Ceres SEQ ID NO 14302008 as cited in SEQ ID NO 56021
accgcaccgcatcgaccagctacacgaatcagacggcgtcatggccggcacgtgcgcccacgtcgagttcctccgcgcgcagccggcttgggcgctggtgctggccgccgtgggcctgctcgtggctgtccgcgccgctgcccgcttcgcgctctgggtctacgccgcgttcctccgcccggggaagcccctgcgccgccgctacggcgcctgggccgtcgtgacgggcgccaccgacggcatcggccgcgccgtcgcgttccgcctcgccgcggccgggctcgggctcgtcctcgtcggccgcaacccggagaagctggccgccgtggccgccgagatcagggccaagcaccccaaggtccccgaggtgcgcaccttcgtgctcgacttcgccagcgaggggctcgcggccggcgtcgaggcgctcaaggactccatccgtggcctcgacgtcggcgtgctcgtcaacaacgccgggctgtcctacccgtacgcgcgctacttccacgaggtggacgaggagctgatgcgcagcctcatccgggtcaacgtcgagggcgtcacgcgggtcacagcacgccgtgctgccaggcatggtcgagcggaagcgcggcgccattgtcaacatcggctccggcgccgcctccgtcgtgccttctgatccgctctactccgtctacgccgccaccaaagcgtatgttgaccaattctcaagatgcctctatgttgagtacaagagcaagggtattgatgtgcaatgcccaggtgcccctatacgtggcgacaaagatggcatctatcaggaagtcttccttcatggttccatctactgacacctatgctcgtgctgccgttcgtcacattggatacgagcctaggtgcacaccgtactggccacactctgtcgtgtggttcttgatctcgattcttcctgagtcccttatagacagcgtgcgcctgggcatgtgcattaagatccgcaagaaggggctggccaaggacgccaagaagaaggcactgtgattgatgtttcagaatgcaggtccagattcgaagatttcctcatcacctgtagtagacatgtgccttgctgtagtcactttattagctccggagtctgttaagaatcgagaatgccattgctccatccacggttatgatgttaaaaattattattcttcaattcaaaatgtaacactaatacgagtaatgatgaatgcaattaacttg

SEQ ID NO: 3466 - protein, 340 aa, Zea mays subsp. mays
  peptide (1)..(340): Ceres Seq. ID no. 12410202
TAPHRPATRIRRRHGRHVRPRRVPPRAAGLGAGAGRRGPARGCPRRCPLRALGLRRVPPPGEAPAPPLRRLGRRDGRHRRHRPRRRVPPRRGRARARPRRPQPGEAGRRGRRDQGQAPQGPRGAHLRARLRQRGARGRRRGAQGLHPWPRRRRARQQRRAVLPVRALLPRGGRGADAQPHPGQRRGRHAGHSTPCCQAWSSGSAAPLSTSAPAPPPSCLLIRSTPSTPPPKRMLTNSQDASMLSTRARVLMCNAQVPLYVATKMASIRKSSFMVPSTDTYARAAVRHIGYEPRCTPYWPHSVVWFLISILPESLIDSVRLGMCIKIRKKGLAKDAKKKAL

SEQ ID NO: 3467 - protein, 219 aa, Zea mays subsp. mays
  peptide (1)..(219): Ceres Seq. ID no. 12410203
PHRIDQLHESDGVMAGTCAHVEFLRAQPAWALVLAAVGLLVAVRAAARFALWVYAAFLRPGKPLRRRYGAWAVVTGATDGIGRAVAFRLAAAGLGLVLVGRNPEKLAAVAAEIRAKHPKVPEVRTFVLDFASEGLAAGVEALKDSIRGLDVGVLVNNAGLSYPYARYFHEVDEELMRSLIRVNVEGVTRVTARRAARHGRAEARRHCQHRLRRRLRRAF

SEQ ID NO: 3468 - protein, 206 aa, Zea mays subsp. mays
  peptide (1)..(206): Ceres Seq. ID no. 12410204
MAGTCAHVEFLRAQPAWALVLAAVGLLVAVRAAARFALWVYAAFLRPGKPLRRRYGAWAVVTGATDGIGRAVAFRLAAAGLGLVLVGRNPEKLAAVAAEIRAKHPKVPEVRTFVLDFASEGLAAGVEALKDSIRGLDVGVLVNNAGLSYPYARYFHEVDEELMRSLIRVNVEGVTRVTARRAARHGRAEARRHCQHRLRRRLRRAF

SEQ ID NO: 3469 - DNA, 1756 bp, Zea mays subsp. mays
  misc_feature (1)..(1756): Ceres Seq. ID no. 12386932
  misc_feature (1)..(1756): Ortholog of  Ceres SEQ ID NO 13660024 as cited in SEQ ID NO 67241
aagacaggaaggagctatccgcgtctgcctcctcccggccctctgctccctcccagagtctccgctagccaagcccccacatggcaccaccgcccgcgggcctcgtgctcgtggctctgctcgcgctggtcctggcgccggcgccggcgcgcggggacaagccggcgaggggcggggcgtccagctccatcgccgccggggcggatacggagccgtcctccgccgtcttcccgctctacggcgacgtctacccgcacgggttgtactacgtggctatgaacatcggcaacccacccaagccatacttcctggacgtggactccggcagcgacctcacctggctgcagtgcgacgcgccctgcaggagctgcaacgaggtgccgcacccgctgtaccggccgacaaagagcaagctggtgccgtgcgtgcaccggctgtgcgcttccctgcacaacgggctggccggcgggaagcacagatgcgactcgccgcacgagcaatgcgactacgtgatcaagtacgcagaccaggggtcgtccaccggcgtgctcatcaacgacagcttcgcgctccgcctcaccaacggctctgtcgctcgccccagcgtcgcgttcgggtgtggttacgaccagcaggtccgcagcggcgacctgagttggcctaccgacggcgtgctggggctcgggaccggctcagtcagcttgctctcgcagctcaaacagcgtggcgtcaccaagaacgtggtcggccactgcctcagcctgaggggcggcgggttcctcttcttcggtgacgatctcgtgccttaccaacgcgcgacatggactcccatggctcgcagcgcgttccaactactactcccctggctccgcaagcctgtacttcggcgaccggtcactgggcgtgagactgacgaaagtggtcttcgacagtggaagctcgttcacctacttcgctgcaaagccataccaagcacttgtcaccgctcttaaggatggcctgagcaggacgctggaagaggaatccgacccttcgctgccactctgctggaaagggcaggaaccattcaagtctgtgcttgatgtgaggaaggagttcaagtctttggtgctcaactttgccagtggcaagaagacgctcatggagatccctcctgagaactacctcattgtcacagaaaacgggaatgcctgtctgggcatcctcaacggatccgagatcggtctcaaggacctgagcattattggagacattacgatgcaggatcacatggtgatatatgacaatgagaaagggaaaattggatggattcgtgcaccctgtgacagagcccccaacgacaatacggttcatgggtttgaggaaggttactgttggcctcaattcctcccggggatcattggtcttcccaacgaagattgcccagcctattaccgttcaaacaaagagtgatttgccgaggcccaagggggagaggccgctagaatgtcacaagaaggatggtcacggaggctggacactgtgttaggatcgtgtgtgttctttaggaaaggagagaaactagcccatgtaaacatcataatgttcatatcaaatataatgatgatcaccctgttacgagtacaatcttttcggaccttttctttgtacattctttacttggttttctttctgttgatgtgatatatactacggttccaggtgtctcgcgactatggtcctgttcaaaacctgtaaacctaatggttagtcagcc

SEQ ID NO: 3470 - protein, 303 aa, Zea mays subsp. mays
  peptide (1)..(303): Ceres Seq. ID no. 12386933
MAPPPAGLVLVALLALVLAPAPARGDKPARGGASSSIAAGADTEPSSAVFPLYGDVYPHGLYYVAMNIGNPPKPYFLDVDSGSDLTWLQCDAPCRSCNEVPHPLYRPTKSKLVPCVHRLCASLHNGLAGGKHRCDSPHEQCDYVIKYADQGSSTGVLINDSFALRLTNGSVARPSVAFGCGYDQQVRSGDLSWPTDGVLGLGTGSVSLLSQLKQRGVTKNVVGHCLSLRGGGFLFFGDDLVPYQRATWTPMARSAFQLLLPWLRKPVLRRPVTGRETDESGLRQWKLVHLLRCKAIPSTCHRS

SEQ ID NO: 3471 - protein, 263 aa, Zea mays subsp. mays
  peptide (1)..(263): Ceres Seq. ID no. 12386934
RQEGAIRVCLLPALCSLPESPLAKPPHGTTARGPRARGSARAGPGAGAGARGQAGEGRGVQLHRRRGGYGAVLRRLPALRRRLPARVVLRGYEHRQPTQAILPGRGLRQRPHLAAVRRALQELQRGAAPAVPADKEQAGAVRAPAVRFPAQRAGRREAQMRLAARAMRLRDQVRRPGVVHRRAHQRQLRAPPHQRLCRSPQRRVRVWLRPAGPQRRPELAYRRRAGARDRLSQLALAAQTAWRHQERGRPLPQPEGRRVPLLR

SEQ ID NO: 3472 - protein, 238 aa, Zea mays subsp. mays
  peptide (1)..(238): Ceres Seq. ID no. 12386935
MNIGNPPKPYFLDVDSGSDLTWLQCDAPCRSCNEVPHPLYRPTKSKLVPCVHRLCASLHNGLAGGKHRCDSPHEQCDYVIKYADQGSSTGVLINDSFALRLTNGSVARPSVAFGCGYDQQVRSGDLSWPTDGVLGLGTGSVSLLSQLKQRGVTKNVVGHCLSLRGGGFLFFGDDLVPYQRATWTPMARSAFQLLLPWLRKPVLRRPVTGRETDESGLRQWKLVHLLRCKAIPSTCHRS

SEQ ID NO: 3473 - DNA, 1766 bp, Zea mays subsp. mays
  misc_feature (1)..(1766): Ceres Seq. ID no. 12410193
  misc_feature (1)..(1766): Ortholog of  Ceres SEQ ID NO 14311203 as cited in SEQ ID NO 53639
  misc_feature (1)..(1766): Ortholog of  Ceres SEQ ID NO 15176053 as cited in SEQ ID NO 57792
  misc_feature (1)..(1766): Ortholog of  Ceres SEQ ID NO 14311175 as cited in SEQ ID NO 60223
  misc_feature (1)..(1766): Ortholog of  Ceres SEQ ID NO 15224727 as cited in SEQ ID NO 64990
  misc_feature (1)..(1766): Ortholog of  Ceres SEQ ID NO 14308023 as cited in SEQ ID NO 65865
  misc_feature (1)..(1766): Ortholog of  Ceres SEQ ID NO 14307972 as cited in SEQ ID NO 66436
  misc_feature (1)..(1766): Ortholog of  Ceres SEQ ID NO 15170175 as cited in SEQ ID NO 67138
  misc_feature (1)..(1766): Ortholog of  Ceres SEQ ID NO 12614670 as cited in SEQ ID NO 68565
atcaggatcatcatcaggttctccgttccactccatggccttccctgctgtgcccctcctcgccgctctgctcctggtcgccgccacgcggctgtgggactacgtcttcgtgcgcctcgtatggcggccgtacgccatcaccaaggggttcagagagcaagggatccatggaccctcctacaggttcttcaagggctgcaacgaggagatcaggagcatgaaggagaagaccgacggtctcgtgctggacgtcggcgaccacaagtacctcccgcggatcgcgccgcactacctcgaatggagggctcagtacggagaaccatttctatattggtacggggcacaagcccgaatttgcatatttgactacgaactagcaaggcaaatcctttcgagcaagtctgggcatttcgtgaagaacgatgcgcaccctactttgttggctctggtcggcaagggactcgggttcatggaaggctctgactgggtgcgccatcgcagggtgatcaaccctgctttcaccattgacaagcttaagattgtgaccgagacgatgctggacttcgccgatagcatggcagatgagttggaagctgaagcatcccagaacgagaacggagaaacacaagtggatatatacaaacatttcagcgatctgacagttgacaatatcgcctacgccatctttggaagcagctacaagttaggcaaacaagtgttcgaggcacaaactgagctgctggggatcaccatggctactttccttgacgtgcccataccaggatccaaataccttccaacccaagcgaatcggcgaaaatggatgctggagacgaagctcaagagcttactcacgcggatcatacagccacggttagcaagcggtgagcacggaaacgatctgctgggcgtgatgctggactcctgcactgagaccaagcaaggagggaagcagcagcaagtggatcgtctgcgtctcagcttgagcatggaggagatcatacacgagtgcaagctgttcttcttcgctggccacgagaacacagcccttctcctcacgtggtccgtgtatttgctcagcatataccccgagtggcaagaaaggctccggaaggaggtcttgagggagttcgggagggacgctcctaaccccaacgcgctcaacagattgaaagagatgacaatggtgttgttcgagaccttgaggctctactcgcctgctctcttcatgcaaaggaagaccctggccgacatgaccgtggggccaataaaactgcccaaaggcactgcaattgtgatacccattccgatcatgcatcgagacaagcaggcatggggcgacgacgcagacgagttcagtccgatgagatttgcgaatgggatcacgggagcagcgaaagttcctcacggcctgctggcgttctcgatggggccaaggtcttgcatcggccagaacttgtcgatgctggaagccaagtcgacgctggccctgatgctccgcaagttctccttcgctctctcccctgactacgtgcacgcgcccgtggatctcttcactctcaaacctaagtttggccttcccgtcattctgaggccactggataatgttttgatttgagttgggcatatagtacaacaggaagtaacttaggtacatatcaaatttgctagctggtcaaaacgttatatgatgttctcaaccctccgttgttctatatcgttgaaaacaagtattttaatttaggtgcggtttggtttggcgctgc

SEQ ID NO: 3474 - protein, 538 aa, Zea mays subsp. mays
  peptide (1)..(538): Ceres Seq. ID no. 12410194
SGSSSGSPFHSMAFPAVPLLAALLLVAATRLWDYVFVRLVWRPYAITKGFREQGIHGPSYRFFKGCNEEIRSMKEKTDGLVLDVGDHKYLPRIAPHYLEWRAQYGEPFLYWYGAQARICIFDYELARQILSSKSGHFVKNDAHPTLLALVGKGLGFMEGSDWVRHRRVINPAFTIDKLKIVTETMLDFADSMADELEAEASQNENGETQVDIYKHFSDLTVDNIAYAIFGSSYKLGKQVFEAQTELLGITMATFLDVPIPGSKYLPTQANRRKWMLETKLKSLLTRIIQPRLASGEHGNDLLGVMLDSCTETKQGGKQQQVDRLRLSLSMEEIIHECKLFFFAGHENTALLLTWSVYLLSIYPEWQERLRKEVLREFGRDAPNPNALNRLKEMTMVLFETLRLYSPALFMQRKTLADMTVGPIKLPKGTAIVIPIPIMHRDKQAWGDDADEFSPMRFANGITGAAKVPHGLLAFSMGPRSCIGQNLSMLEAKSTLALMLRKFSFALSPDYVHAPVDLFTLKPKFGLPVILRPLDNVLI

SEQ ID NO: 3475 - protein, 527 aa, Zea mays subsp. mays
  peptide (1)..(527): Ceres Seq. ID no. 12410195
MAFPAVPLLAALLLVAATRLWDYVFVRLVWRPYAITKGFREQGIHGPSYRFFKGCNEEIRSMKEKTDGLVLDVGDHKYLPRIAPHYLEWRAQYGEPFLYWYGAQARICIFDYELARQILSSKSGHFVKNDAHPTLLALVGKGLGFMEGSDWVRHRRVINPAFTIDKLKIVTETMLDFADSMADELEAEASQNENGETQVDIYKHFSDLTVDNIAYAIFGSSYKLGKQVFEAQTELLGITMATFLDVPIPGSKYLPTQANRRKWMLETKLKSLLTRIIQPRLASGEHGNDLLGVMLDSCTETKQGGKQQQVDRLRLSLSMEEIIHECKLFFFAGHENTALLLTWSVYLLSIYPEWQERLRKEVLREFGRDAPNPNALNRLKEMTMVLFETLRLYSPALFMQRKTLADMTVGPIKLPKGTAIVIPIPIMHRDKQAWGDDADEFSPMRFANGITGAAKVPHGLLAFSMGPRSCIGQNLSMLEAKSTLALMLRKFSFALSPDYVHAPVDLFTLKPKFGLPVILRPLDNVLI

SEQ ID NO: 3476 - protein, 466 aa, Zea mays subsp. mays
  peptide (1)..(466): Ceres Seq. ID no. 12410196
MKEKTDGLVLDVGDHKYLPRIAPHYLEWRAQYGEPFLYWYGAQARICIFDYELARQILSSKSGHFVKNDAHPTLLALVGKGLGFMEGSDWVRHRRVINPAFTIDKLKIVTETMLDFADSMADELEAEASQNENGETQVDIYKHFSDLTVDNIAYAIFGSSYKLGKQVFEAQTELLGITMATFLDVPIPGSKYLPTQANRRKWMLETKLKSLLTRIIQPRLASGEHGNDLLGVMLDSCTETKQGGKQQQVDRLRLSLSMEEIIHECKLFFFAGHENTALLLTWSVYLLSIYPEWQERLRKEVLREFGRDAPNPNALNRLKEMTMVLFETLRLYSPALFMQRKTLADMTVGPIKLPKGTAIVIPIPIMHRDKQAWGDDADEFSPMRFANGITGAAKVPHGLLAFSMGPRSCIGQNLSMLEAKSTLALMLRKFSFALSPDYVHAPVDLFTLKPKFGLPVILRPLDNVLI

SEQ ID NO: 3477 - DNA, 1361 bp, Zea mays subsp. mays
  misc_feature (1)..(1361): Ceres Seq. ID no. 12367972
  misc_feature (1)..(1361): Ortholog of  Ceres SEQ ID NO 15174842 as cited in SEQ ID NO 53054
  misc_feature (1)..(1361): Ortholog of  Ceres SEQ ID NO 14310917 as cited in SEQ ID NO 53231
  misc_feature (1)..(1361): Ortholog of  Ceres SEQ ID NO 15170037 as cited in SEQ ID NO 55447
  misc_feature (1)..(1361): Ortholog of  Ceres SEQ ID NO 13582350 as cited in SEQ ID NO 56734
  misc_feature (1)..(1361): Ortholog of  Ceres SEQ ID NO 12476493 as cited in SEQ ID NO 58163
  misc_feature (1)..(1361): Ortholog of  Ceres SEQ ID NO 12578315 as cited in SEQ ID NO 62451
  misc_feature (1)..(1361): Ortholog of  Ceres SEQ ID NO 13597295 as cited in SEQ ID NO 63743
  misc_feature (1)..(1361): Ortholog of  Ceres SEQ ID NO 13597439 as cited in SEQ ID NO 64081
  misc_feature (1)..(1361): Ortholog of  Ceres SEQ ID NO 13597233 as cited in SEQ ID NO 64370
  misc_feature (1)..(1361): Ortholog of  Ceres SEQ ID NO 13599438 as cited in SEQ ID NO 0
  misc_feature (1)..(1361): Ortholog of  Ceres SEQ ID NO 15226354 as cited in SEQ ID NO 0
agcctcactctcgcgccggctcaaggtacattgcgtgtcctagccaagacacgcagctcatctcagcctcacacgcacagcaagagcgaggcgtgattcgccatgggcggcctcactatggaccaggctttcgtgcaggcccccgagcaccgccccaagcccctcgtcaccgaggccaccggcatccctctcatcgacctctcgcctctgtccgccagcggcggcgccgtggacgcgctggccgccgaggtgggcgcggcgagccgggactggggcttcttcgtggtcgtgggccacggcgtgcccgcagagaccatggcgcgcgcgacggaggcgcagcgcgcgttcttcgcgctgccggcagagcggaaggccgccgtgcggaggaacgaggcggagccgctcgggtactacgagtcggagcacaccaagaacgtgagggactggaaggaggtgtacgacctcgtgccgcgcgagccgccgccgccggctgccgtggccgacggcgagctcgtgttcgagaacaagtggccccaggatctgccgggcttcagagaggcgctggaggagtacgccaaagcgatggaagagctggcgttcaagctgctggagctgatcgctcggagcctgaagctgaggcccgaccggctgcacggcttcttcaaggaccagacgaccttcatccggctgaaccactaccctccttgcccgagccccgacctggccctcggcgtggggcggcacaaggacgccggcgccctgaccatcctgtaccaggacgacgtcggggggctcgacgtccggcggcgctccgacggcgagtgggtccgcgtcaggcccgtgcccgactcgttcatcatcaacgtcggcgacctcatccaggtgtggagcaacgacaggtacgagagcgcggagcaccggggtgtcggtgaactcggcgagggagaggttctccatgccctacttcttcaacccggcgacctacaccatggtggagccggtggaggagctggtgagcaaggacgatccgcccaggtacgacgcctacaactggggcgacttcttcagcaccaggaagaacagcaacttcaagaagctcaacgtggagaacattcagatcgcgcatttcaagaagagcctcgtcctcgcctaactactgctactgctaggatccatgccattgccatgtcgtcttcagattcagagcacgccatgtcgtcgctagcttcgtggtagaacaaataatgatgtgcgtgctgtgtgtaagcatggatatggatgtgaatatgtaatatgatgagcactcctactttggtatgtttgggaataacagacttgtgttggtctggttcattatttgc

SEQ ID NO: 3478 - protein, 377 aa, Zea mays subsp. mays
  peptide (1)..(377): Ceres Seq. ID no. 12367973
MGGLTMDQAFVQAPEHRPKPLVTEATGIPLIDLSPLSASGGAVDALAAEVGAASRDWGFFVVVGHGVPAETMARATEAQRAFFALPAERKAAVRRNEAEPLGYYESEHTKNVRDWKEVYDLVPREPPPPAAVADGELVFENKWPQDLPGFREALEEYAKAMEELAFKLLELIARSLKLRPDRLHGFFKDQTTFIRLNHYPPCPSPDLALGVGRHKDAGALTILYQDDVGGLDVRRRSDGEWVRVRPVPDSFIINVGDLIQVWSNDRYESAEHRGVGELGEGEVLHALLLQPGDLHHGGAGGGAGEQGRSAQVRRLQLGRLLQHQEEQQLQEAQRGEHSDRAFQEEPRPRLTTATARIHAIAMSSSDSEHAMSSLASW

SEQ ID NO: 3479 - protein, 372 aa, Zea mays subsp. mays
  peptide (1)..(372): Ceres Seq. ID no. 12367974
MDQAFVQAPEHRPKPLVTEATGIPLIDLSPLSASGGAVDALAAEVGAASRDWGFFVVVGHGVPAETMARATEAQRAFFALPAERKAAVRRNEAEPLGYYESEHTKNVRDWKEVYDLVPREPPPPAAVADGELVFENKWPQDLPGFREALEEYAKAMEELAFKLLELIARSLKLRPDRLHGFFKDQTTFIRLNHYPPCPSPDLALGVGRHKDAGALTILYQDDVGGLDVRRRSDGEWVRVRPVPDSFIINVGDLIQVWSNDRYESAEHRGVGELGEGEVLHALLLQPGDLHHGGAGGGAGEQGRSAQVRRLQLGRLLQHQEEQQLQEAQRGEHSDRAFQEEPRPRLTTATARIHAIAMSSSDSEHAMSSLASW

SEQ ID NO: 3480 - protein, 309 aa, Zea mays subsp. mays
  peptide (1)..(309): Ceres Seq. ID no. 12367975
PHSRAGSRYIACPSQDTQLISASHAQQERGVIRHGRPHYGPGFRAGPRAPPQAPRHRGHRHPSHRPLASVRQRRRRGRAGRRGGRGEPGLGLLRGRGPRRARRDHGARDGGAARVLRAAGRAEGRRAEERGGAARVLRVGAHQEREGLEGGVRPRAARAAAAGCRGRRRARVREQVAPGSAGLQRGAGGVRQSDGRAGVQAAGADRSEPEAEARPAARLLQGPDDLHPAEPLPSLPEPRPGPRRGAAQGRRRPDHPVPGRRRGARRPAALRRRVGPRQARARLVHHQRRRPHPGVEQRQVRERGAPGCR

SEQ ID NO: 3481 - DNA, 1212 bp, Zea mays subsp. mays
  misc_feature (1)..(1212): Ceres Seq. ID no. 12359992
  misc_feature (1)..(1212): Ortholog of  Ceres SEQ ID NO 14306066 as cited in SEQ ID NO 57378
  misc_feature (1)..(1212): Ortholog of  Ceres SEQ ID NO 14311969 as cited in SEQ ID NO 58929
  misc_feature (1)..(1212): Ortholog of  Ceres SEQ ID NO 14309357 as cited in SEQ ID NO 0
agaacttctccctcagtttccctttatgatccagtccgtccccacgtttgatctcggcgtactgttgtgggagacgcttgcggcgacgatttcccccggtttttatttgaatttctcgggcgctgttatgtgcggcggctagatctgcttgtcgctggtgcagtaggagtttctcgctcggttccgatcctgagaacccgaccgcgcgggtatctgtattccttgatcaacatgtcgcgggaggagaatgtttatatggccaagctggctgagcaagcagaacggtacgaggaaatggttgaatacatggagaaggtggctaagaccacagatgtgcaagagctcactgttgaggagcgtaaccttctatctgttgccttcaagaatgtgattgcggccccccgtgcctcatggcgcattatctcctccatcgagcagaaagaggagtcccgtaagaatgaggaacatgttgcacagatcaaggaataccgtggcaagattgaggctgaattgagcaacatttgtgatggtatcctaaagctgcttgacacgcaccttgtgccttcctccactgccacagagtcgaaggtgttttacctcaagatgaagggtgattatcacaggtaccttgctgagtttaagactggtgctgagaggaaggaatctgcagagagcacaatggtagcttataaggcagctcaggatattgcattggctgaactgccacctattcatcccataaggcttggacttgcacttaacttctcagttttctattacgagattcagaactctccagacaaagcttgcaatcttgccaaggaggcgtttgatgaagctatttctcagttggacatgcttggtgaggattcctacaaagatagcaacttgattatgcagctcctgagggacaacttgaccctctggacggaggacggcattgaggagggcttagaatcctcgaagggcgatgctggtgagggtcagtagcctggtaaacttagattgatggttcgacgtgtttctcaagcacatcgtgttggacgcccagtgctgacagaaggcttttgctgctccatgcattccaagcttctgccctttcgttcgcaccctcttcatgttgttggctggtagtggtcagatttagtcccattggtttagttggccctgggtccatctgaactgatgtattgttactgctaggaagtcaag

SEQ ID NO: 3482 - protein, 252 aa, Zea mays subsp. mays
  peptide (1)..(252): Ceres Seq. ID no. 12359993
MSREENVYMAKLAEQAERYEEMVEYMEKVAKTTDVQELTVEERNLLSVAFKNVIAAPRASWRIISSIEQKEESRKNEEHVAQIKEYRGKIEAELSNICDGILKLLDTHLVPSSTATESKVFYLKMKGDYHRYLAEFKTGAERKESAESTMVAYKAAQDIALAELPPIHPIRLGLALNFSVFYYEIQNSPDKACNLAKEAFDEAISQLDMLGEDSYKDSNLIMQLLRDNLTLWTEDGIEEGLESSKGDAGEGQ

SEQ ID NO: 3483 - protein, 244 aa, Zea mays subsp. mays
  peptide (1)..(244): Ceres Seq. ID no. 12359994
MAKLAEQAERYEEMVEYMEKVAKTTDVQELTVEERNLLSVAFKNVIAAPRASWRIISSIEQKEESRKNEEHVAQIKEYRGKIEAELSNICDGILKLLDTHLVPSSTATESKVFYLKMKGDYHRYLAEFKTGAERKESAESTMVAYKAAQDIALAELPPIHPIRLGLALNFSVFYYEIQNSPDKACNLAKEAFDEAISQLDMLGEDSYKDSNLIMQLLRDNLTLWTEDGIEEGLESSKGDAGEGQ

SEQ ID NO: 3484 - protein, 231 aa, Zea mays subsp. mays
  peptide (1)..(231): Ceres Seq. ID no. 12359995
MVEYMEKVAKTTDVQELTVEERNLLSVAFKNVIAAPRASWRIISSIEQKEESRKNEEHVAQIKEYRGKIEAELSNICDGILKLLDTHLVPSSTATESKVFYLKMKGDYHRYLAEFKTGAERKESAESTMVAYKAAQDIALAELPPIHPIRLGLALNFSVFYYEIQNSPDKACNLAKEAFDEAISQLDMLGEDSYKDSNLIMQLLRDNLTLWTEDGIEEGLESSKGDAGEGQ

SEQ ID NO: 3485 - DNA, 850 bp, Zea mays subsp. mays
  misc_feature (1)..(850): Ceres Seq. ID no. 12342801
  misc_feature (1)..(850): Ortholog of  Ceres SEQ ID NO 13624427 as cited in SEQ ID NO 0
atctcagcttcacttccactccacacctcttcagaatggcttctagcaagctctttgcggttggcctcaccgtcttactaagcattattggactgtgcaatgctattagggtggtaaaccacgccaccgcagatggacaaggcggtggaggtggtggaggcggcgggagcggaaccagctatggctccggatccggctccggctacggcgatgccgaggcctatgacggcagtgcccagtccccaacctctggccacgcatatggcagtggatccggggacggtggtggcgtttggcaaggtgacgacgagtgcgcgtccggttacggggcgggcggcgcatccggtgaaggccatggcgactcaggtaactccaacaccgatggcgctgcgaatgcgagcggagctggcggcgggggcggttctggtgggagcaatgggaatggcagcggatctggtggcggcagtggagttggagaaggcgaaggcgataactatggtccctatggttcgagctacgcaaatagcggtggcgccggaaggggaagcggaggcggtcgtaatggtggattcggcggcggttccggtggtggagcggggagcagtggtggtgccgcgtcaggttatgatgatggcagctacaacggatcaacaccttaattatgttcatttgtttgtaccacactgtcaagcaaccgacacgtactgatagggtttttctgtgcttgtgaaataatttggcctttctgagcgatgcagaagtttgttctactcatgtaataagccactgccatttctctgtatacgccatgtttgggctatagatgtcggttagtagacgttcttttgct

SEQ ID NO: 3486 - protein, 218 aa, Zea mays subsp. mays
  peptide (1)..(218): Ceres Seq. ID no. 12342802
LSFTSTPHLFRMASSKLFAVGLTVLLSIIGLCNAIRVVNHATADGQGGGGGGGGGSGTSYGSGSGSGYGDAEAYDGSAQSPTSGHAYGSGSGDGGGVWQGDDECASGYGAGGASGEGHGDSGNSNTDGAANASGAGGGGGSGGSNGNGSGSGGGSGVGEGEGDNYGPYGSSYANSGGAGRGSGGGRNGGFGGGSGGGAGSSGGAASGYDDGSYNGSTP

SEQ ID NO: 3487 - protein, 207 aa, Zea mays subsp. mays
  peptide (1)..(207): Ceres Seq. ID no. 12342803
MASSKLFAVGLTVLLSIIGLCNAIRVVNHATADGQGGGGGGGGGSGTSYGSGSGSGYGDAEAYDGSAQSPTSGHAYGSGSGDGGGVWQGDDECASGYGAGGASGEGHGDSGNSNTDGAANASGAGGGGGSGGSNGNGSGSGGGSGVGEGEGDNYGPYGSSYANSGGAGRGSGGGRNGGFGGGSGGGAGSSGGAASGYDDGSYNGSTP

SEQ ID NO: 3488 - protein, 191 aa, Zea mays subsp. mays
  peptide (1)..(191): Ceres Seq. ID no. 12342804
MDKAVEVVEAAGAEPAMAPDPAPATAMPRPMTAVPSPQPLATHMAVDPGTVVAFGKVTTSARPVTGRAAHPVKAMATQVTPTPMALRMRAELAAGAVLVGAMGMAADLVAAVELEKAKAITMVPMVRATQIAVAPEGEAEAVVMVDSAAVPVVERGAVVVPRQVMMMAATTDQHLNYVHLFVPHCQATDTY

SEQ ID NO: 3489 - DNA, 1336 bp, Zea mays subsp. mays
  misc_feature (1)..(1336): Ceres Seq. ID no. 12342777
  misc_feature (1)..(1336): Ortholog of  Ceres SEQ ID NO 15176317 as cited in SEQ ID NO 52865
  misc_feature (1)..(1336): Ortholog of  Ceres SEQ ID NO 13518893 as cited in SEQ ID NO 58108
  misc_feature (1)..(1336): Ortholog of  Ceres SEQ ID NO 12617152 as cited in SEQ ID NO 63555
agatagatagagtagtagtaggttgttagctgaggggaggcatcgatggctggagccaagagaggaatcctgctcgtcctgtgcctggccgtcgtcttggtggcgctcgggagtggcggcgtggaggcgaggaagcgagggaagcagtccctggggttctacgagctgcgtcggggcgagttctccatggtcgtcaccaactggggcgccaccatcctctccgtcaggctccccgataagaacgggcacatcgacgacgtcgttcttggctacaagaacatcggatcgtacgtcaacgacacgacctacttcggcgcgctggtggggcgcgtggcgaaccgcatcgccggcgggcggttcaccatcagggaccacgcctaccacacgtatcggaacgacggcaacaacacgctccacggcgggccaccgcgggttcaaccaggtgttctggtccgtccgggagcgcgtcacgggggagttcccgcacatcaccttcgcctaccgcagctacgacggcgagcaagggttcccgggcaacctggacgtgctggtcacctacaagatcgacggcgactgctcgtacagcgtcaccatgtacgcgcggccgctggacaagcccacccccgtgaacctggcgcagcacacgtactggaacctccgcggccacggcaacggcaccgtcctgcgccacgccgtccagatcttcgcgtccgcggtcacgcccgtgggccgcggcctcatcccgacgggcgcggtcacccccgtcgccggcactccgttnnanttccgcgccnngtcggcgcccggcgcgcacatcgccgaggtcgagggtgggtacgacatcaactacgtgctggacggcgagacggacgggcaaggcgtgcgcaaggtggccgtggtcagcgaggcggactccgggcgcgtcatggagctntgggccgaccagccgggcctgcagttctacactggcaacatgcttaagggcgacgagggcaagggcggcgccgtctaccccaaatacgctgggatgtgcctggagacgcaagactacccggacgccgtgcacgagccggccttcccggccgaggtgtaccgccctggccaactctacaagcactacatgctctacaagttctcaatcagcaagtaggaacttctagtacctctcgtgcctgatgcctcatagtttcggtaggtttgcaacctgttgcgactagtaataagggttctgagtctttttttttagaaaaaattgcaacagaaatgtatggttcgagttcgtccaaactttgtctagtcaacattttctgccatttgaatgccatcttaatagtct

SEQ ID NO: 3490 - protein, 311 aa, Zea mays subsp. mays
  peptide (1)..(311): Ceres Seq. ID no. 12342778
  misc_feature (246)..(246): Xaa is any aa, unknown or other
  misc_feature (247)..(247): Xaa is any aa, unknown or other
  misc_feature (250)..(250): Xaa is any aa, unknown or other
  misc_feature (297)..(297): Xaa is any aa, unknown or other
MAGAKRGILLVLCLAVVLVALGSGGVEARKRGKQSLGFYELRRGEFSMVVTNWGATILSVRLPDKNGHIDDVVLGYKNIGSYVNDTTYFGALVGRVANRIAGGRFTIRDHAYHTYRNDGNNTLHGGPPRVQPGVLVRPGARHGGVPAHHLRLPQLRRRARVPGQPGRAGHLQDRRRLLVQRHHVRAAAGQAHPREPGAAHVLEPPRPRQRHRPAPRRPDLRVRGHARGPRPHPDGRGHPRRRHSVXXPRXVGARRAHRRGRGWVRHQLRAGRRDGRARRAQGGRGQRGGLRARHGAXGRPAGPAVLHWQHA

SEQ ID NO: 3491 - protein, 264 aa, Zea mays subsp. mays
  peptide (1)..(264): Ceres Seq. ID no. 12342779
  misc_feature (199)..(199): Xaa is any aa, unknown or other
  misc_feature (200)..(200): Xaa is any aa, unknown or other
  misc_feature (203)..(203): Xaa is any aa, unknown or other
  misc_feature (250)..(250): Xaa is any aa, unknown or other
MVVTNWGATILSVRLPDKNGHIDDVVLGYKNIGSYVNDTTYFGALVGRVANRIAGGRFTIRDHAYHTYRNDGNNTLHGGPPRVQPGVLVRPGARHGGVPAHHLRLPQLRRRARVPGQPGRAGHLQDRRRLLVQRHHVRAAAGQAHPREPGAAHVLEPPRPRQRHRPAPRRPDLRVRGHARGPRPHPDGRGHPRRRHSVXXPRXVGARRAHRRGRGWVRHQLRAGRRDGRARRAQGGRGQRGGLRARHGAXGRPAGPAVLHWQHA

SEQ ID NO: 3492 - protein, 185 aa, Zea mays subsp. mays
  peptide (1)..(185): Ceres Seq. ID no. 12342780
  misc_feature (63)..(63): Xaa is any aa, unknown or other
  misc_feature (64)..(64): Xaa is any aa, unknown or other
  misc_feature (68)..(68): Xaa is any aa, unknown or other
  misc_feature (114)..(114): Xaa is any aa, unknown or other
MYARPLDKPTPVNLAQHTYWNLRGHGNGTVLRHAVQIFASAVTPVGRGLIPTGAVTPVAGTPXXFRAXSAPGAHIAEVEGGYDINYVLDGETDGQGVRKVAVVSEADSGRVMEXWADQPGLQFYTGNMLKGDEGKGGAVYPKYAGMCLETQDYPDAVHEPAFPAEVYRPGQLYKHYMLYKFSISK

SEQ ID NO: 3493 - DNA, 1099 bp, Zea mays subsp. mays
  misc_feature (1)..(1099): Ceres Seq. ID no. 13577617
  misc_feature (1)..(1099): Ortholog of  Ceres SEQ ID NO 13594544 as cited in SEQ ID NO 51236
ccaaaagggtcacagttccgcctccttttcctgccttcctcctcactagtcgctcccccgcggctcgcgcaggcgggcgacacaacgaggctaaatccctatcgcgaggaggcgtgtgaggccagcggctttgcgatgacagcaccagcggacaaggggaagaaggccaagactgatgccgacggcggcgaggagaacgaacagatcgacggcgtcctcgtcctctccatcgagaagctccaggagatacaggacgagctcgagaaggtaaatgaggaagcaagtgacaaggttatggaggtggagcagaaatacagtgagatccgcagacctgtctatctcaagaggggtgacattatcaagaccatcccggacttttggctcacagcgtttatgagccatcctctattaagtgagcttctgactgaagaggaccagaagatattcaagtacttagactccattgatgtggatgattctgatgttaaggcaggatactccattcatcttaacttctctgagaacccgtactttgaggacacaaagcttgcaaagacctatatctttgctgatgatggaacaaccacaataaaagcttccgaaattaagtggaaggaaggaatgggacctgcaaatggaaatggtattaacaagaaggggagtaagcggccattagtagaggaaagtttttttagctggtttggtgatacagagctcaagagtcttgctgatggtgtgcaagatgaggtggcggagatcataaaggaagatttgtggcctaatcctttgaagtacttcaacaatgaggttgacgatgaatttgaaggagatgaagatgatgatgatttggatggtgatgatgacgatgaaggcgatgatttggagaactgagcccttgcgcttggttcagaatgttgtccgtggatgatgtggctgggcggaactgtgacccttttgggagattttttgttgttgttgtttgacttagctggaactcaacgtagggaactgtttaatgccttatgaagtcaaccaacttgaaaggagactgcttatatcataatctcggtatatctatctagcaacgcaatttgacccc

SEQ ID NO: 3494 - protein, 296 aa, Zea mays subsp. mays
  peptide (1)..(296): Ceres Seq. ID no. 13577618
PKGSQFRLLFLPSSSLVAPPRLAQAGDTTRLNPYREEACEASGFAMTAPADKGKKAKTDADGGEENEQIDGVLVLSIEKLQEIQDELEKVNEEASDKVMEVEQKYSEIRRPVYLKRGDIIKTIPDFWLTAFMSHPLLSELLTEEDQKIFKYLDSIDVDDSDVKAGYSIHLNFSENPYFEDTKLAKTYIFADDGTTTIKASEIKWKEGMGPANGNGINKKGSKRPLVEESFFSWFGDTELKSLADGVQDEVAEIIKEDLWPNPLKYFNNEVDDEFEGDEDDDDLDGDDDDEGDDLEN

SEQ ID NO: 3495 - protein, 251 aa, Zea mays subsp. mays
  peptide (1)..(251): Ceres Seq. ID no. 13577619
MTAPADKGKKAKTDADGGEENEQIDGVLVLSIEKLQEIQDELEKVNEEASDKVMEVEQKYSEIRRPVYLKRGDIIKTIPDFWLTAFMSHPLLSELLTEEDQKIFKYLDSIDVDDSDVKAGYSIHLNFSENPYFEDTKLAKTYIFADDGTTTIKASEIKWKEGMGPANGNGINKKGSKRPLVEESFFSWFGDTELKSLADGVQDEVAEIIKEDLWPNPLKYFNNEVDDEFEGDEDDDDLDGDDDDEGDDLEN

SEQ ID NO: 3496 - protein, 198 aa, Zea mays subsp. mays
  peptide (1)..(198): Ceres Seq. ID no. 13577620
MEVEQKYSEIRRPVYLKRGDIIKTIPDFWLTAFMSHPLLSELLTEEDQKIFKYLDSIDVDDSDVKAGYSIHLNFSENPYFEDTKLAKTYIFADDGTTTIKASEIKWKEGMGPANGNGINKKGSKRPLVEESFFSWFGDTELKSLADGVQDEVAEIIKEDLWPNPLKYFNNEVDDEFEGDEDDDDLDGDDDDEGDDLEN

SEQ ID NO: 3497 - DNA, 473 bp, Zea mays subsp. mays
  misc_feature (1)..(473): Ceres Seq. ID no. 12567013
  misc_feature (1)..(473): Ortholog of  Ceres SEQ ID NO 13596108 as cited in SEQ ID NO 68591
atacccattttctcgcaaatccccgccacccccatttynaccgccannttcggtgccgtcagatcgatttcttgtgcatcttggagcatctacaaggggtgggcgactcagcaaaatctgctggcatctcctctcttttcttgcatcgaattttgtaattgccgactgaaccgtgcagagaagtcttgacaagcgcatgggcggaggtggaaatggggaatcgttgcgatctcctccaagtcctttttgagggggccttggctggaggagctgctggtgttgttgttgaaacagctttatatcctattgatacaataaagaccaggcttcaggctgcacaaggcggaagtaaaattcaatggaaaggcatgtatgatgggttagctggaaatattgtcggtgttcttcccgcttctgcaatttttgttggagtatatgaaccagctaaaagaaaactactggaattgtttcct

SEQ ID NO: 3498 - protein, 87 aa, Zea mays subsp. mays
  peptide (1)..(87): Ceres Seq. ID no. 13577844
MGNRCDLLQVLFEGALAGGAAGVVVETALYPIDTIKTRLQAAQGGSKIQWKGMYDGLAGNIVGVLPASAIFVGVYEPAKRKLLELFP

SEQ ID NO: 3499 - protein, 62 aa, Zea mays subsp. mays
  peptide (1)..(62): Ceres Seq. ID no. 13577845
  misc_feature (13)..(13): Xaa is any aa, unknown or other
  misc_feature (16)..(16): Xaa is any aa, unknown or other
IPIFSQIPATPIXTAXFGAVRSISCASWSIYKGWATQQNLLASPLFSCIEFCNCRLNRAEKS

SEQ ID NO: 3500 - protein, 55 aa, Zea mays subsp. mays
  peptide (1)..(55): Ceres Seq. ID no. 13577846
  misc_feature (13)..(13): Xaa is any aa, unknown or other
  misc_feature (16)..(16): Xaa is any aa, unknown or other
YPFSRKSPPPPFXPPXSVPSDRFLVHLGASTRGGRLSKICWHLLSFLASNFVIAD

SEQ ID NO: 3501 - DNA, 1144 bp, Zea mays subsp. mays
  misc_feature (1)..(1144): Ceres Seq. ID no. 12410176
  misc_feature (1)..(1144): Ortholog of  Ceres SEQ ID NO 15179676 as cited in SEQ ID NO 52442
  misc_feature (1)..(1144): Ortholog of  Ceres SEQ ID NO 13582807 as cited in SEQ ID NO 67806
ctctttgcgccgccgcagccccaaaccctcatcccccatcaatctcaggggcgccccagccaccccacccttcactcacctaaccatggcggagcgcggcggcgagcgtggtggagagcgcggcgggttcggccgtggcccgcgccaagaggaagagaagtgggttcccgtcaccaagctcggccgccttgtcaaggagaacaagatcaccaagatcgaggagatctacctgcactcgctccccgtcaaggagcaccagatcgtcgagaccctcgtcccggggctcaaggacgaggtcatgaagatcacgcccgtccagaagcagacccgtgccgggcagcgcacccgcttcaaggccttcgtcgttgtcggcgatggcgacggccacgtcggcctgggagtcaagtgcgccaaggaggtggccaccgccatccgcggcgcccatcatcctagccaagctctccgtcgtccccgtcaggagggggtactgggggaacaagatcggacagccccacaccgtgccctgcaaggtcaccggcaagtgtggctccgtcactgtgcgcatggtgccccgcgcccaggggttctggcatcgtcnccgcgcgcgtgcccaagaaggtgctgcagttcgctggcattgaggatgtcttcacctcgtcccgtggctccactaagacccttggcaacttcgtcaaggcaaccttcgactgcctgatgaagacctacggcttcctcactcctgaattctggagccagaccaagttctccatggccccgttccagcagtacaccgacctgctggcaaagcccaccaagggccttgtgctcgaggccccaactgagacagtagaggagttcgaagacaagatgaaggagcttgaggggatctgcaaccccatcatcgcgaagatgtaccagggcgagggcgcgggcatgggcgctgctgctggcatggatgaggatgccccgtctggtgggagcggtgctggtcccaagatcgaggaggtggattaagttggttagtgttcgaggtttggtttggtgaggtgtgaagtgcctgaactctgatggttgtttgtgaggtgtggtcgcaatagctgcggcctgtggtgaacttctcagaaataaataagttttcgttccc

SEQ ID NO: 3502 - protein, 237 aa, Zea mays subsp. mays
  peptide (1)..(237): Ceres Seq. ID no. 12410177
  misc_feature (199)..(199): Xaa is any aa, unknown or other
SLRRRSPKPSSPINLRGAPATPPFTHLTMAERGGERGGERGGFGRGPRQEEEKWVPVTKLGRLVKENKITKIEEIYLHSLPVKEHQIVETLVPGLKDEVMKITPVQKQTRAGQRTRFKAFVVVGDGDGHVGLGVKCAKEVATAIRGAHHPSQALRRPRQEGVLGEQDRTAPHRALQGHRQVWLRHCAHGAPRPGVLASXPRACPRRCCSSLALRMSSPRPVAPLRPLATSSRQPSTA

SEQ ID NO: 3503 - protein, 209 aa, Zea mays subsp. mays
  peptide (1)..(209): Ceres Seq. ID no. 12410178
  misc_feature (171)..(171): Xaa is any aa, unknown or other
MAERGGERGGERGGFGRGPRQEEEKWVPVTKLGRLVKENKITKIEEIYLHSLPVKEHQIVETLVPGLKDEVMKITPVQKQTRAGQRTRFKAFVVVGDGDGHVGLGVKCAKEVATAIRGAHHPSQALRRPRQEGVLGEQDRTAPHRALQGHRQVWLRHCAHGAPRPGVLASXPRACPRRCCSSLALRMSSPRPVAPLRPLATSSRQPSTA

SEQ ID NO: 3504 - protein, 150 aa, Zea mays subsp. mays
  peptide (1)..(150): Ceres Seq. ID no. 12410179
LFAPPQPQTLIPHQSQGRPSHPTLHSPNHGGARRRAWWRARRVRPWPAPRGREVGSRHQARPPCQGEQDHQDRGDLPALAPRQGAPDRRDPRPGAQGRGHEDHARPEADPCRAAHPLQGLRRCRRWRRPRRPGSQVRQGGGHRHPRRPSS

SEQ ID NO: 3505 - DNA, 1361 bp, Zea mays subsp. mays
  misc_feature (1)..(1361): Ceres Seq. ID no. 12410173
  misc_feature (1)..(1361): Ortholog of  Ceres SEQ ID NO 14308061 as cited in SEQ ID NO 55155
  misc_feature (1)..(1361): Ortholog of  Ceres SEQ ID NO 13654238 as cited in SEQ ID NO 67874
agaaacgggaagttgaagtcgtcgtcgtcaggttacgagccgacgaaactgacagactgtagcaataattggtcgctccccgatccatctgggtttcgcctgccagcggcgagatgtccttcttcttccgggccgcatcgcggcagcgcccgttgccgcaggagatcgcgcgctccatcaaggactccctcgttgccctcgacaccaagaccggcgccaaggctcttgaggatgctgagaaaaacatacttacattgaggcatacacttgctggtgatggagaagtggaaccaaatcaagagcaggttttgcagatagcccttgagatttgcaaggagggtgttctttccctctttgttcagaatcttccttcattgggttgggaggctagaaaggatcttgtccactgctggtgtattttgttgagacagaaggttgatgaaagctattgttgcgtccagtatattgaaaatcattttgatcttttggatttccttgttgtttgctataagaacttggaagtcgcgttgaattgtggaaacatgttgcgagaatgcataaaatatcctacacttgcaaaatatatattggagtcaagcagcttcgagttgtttttccagtatgttgaattgtcaaacttcgatattgcatctgatgctctgaacactttcaaggatttgctaaccaaacatgaagatgccgtctctgaatttctgagctcacattatgagcagttttttggactctacacaaaacttttatcttcaactaattatgtgacacgaagacaatcagtgaagtttctttcagagtttctgttggaggccccaaatgctcaaataatgaagcgttacattttggaagttcattacttaaacattatgatgggcctgctaaaggattcaagcaaaaatatcaggatatgtgccttccacatttttaaggtatttgttgccaatccaaacaagcctcgtgagattattcaggttttggttgagaatcacagagaagtgttgaagctactccacaatctccccacaagcaaaggtgaagatgaacagcttgatgaggagagagatttaattatcaaagaaatcgagaatcttgtgcggttgtcagtataaaccctcaggaaattcgaacgtatccttgaagacatactgtgcaatatgctgccttgtatagagcttgtttttcatgtatggaaaaaaaagtttggccacaaattgcatttttcgcgagaacacttagcatttctgtcagaaaattattgtcgtgtagcagaatttgcaacaggaataatctgcattatggtgtggtgttgataccattaaggattggtgaaagtgcctgccatttgt

SEQ ID NO: 3506 - protein, 336 aa, Zea mays subsp. mays
  peptide (1)..(336): Ceres Seq. ID no. 12410174
MSFFFRAASRQRPLPQEIARSIKDSLVALDTKTGAKALEDAEKNILTLRHTLAGDGEVEPNQEQVLQIALEICKEGVLSLFVQNLPSLGWEARKDLVHCWCILLRQKVDESYCCVQYIENHFDLLDFLVVCYKNLEVALNCGNMLRECIKYPTLAKYILESSSFELFFQYVELSNFDIASDALNTFKDLLTKHEDAVSEFLSSHYEQFFGLYTKLLSSTNYVTRRQSVKFLSEFLLEAPNAQIMKRYILEVHYLNIMMGLLKDSSKNIRICAFHIFKVFVANPNKPREIIQVLVENHREVLKLLHNLPTSKGEDEQLDEERDLIIKEIENLVRLSV

SEQ ID NO: 3507 - protein, 193 aa, Zea mays subsp. mays
  peptide (1)..(193): Ceres Seq. ID no. 12410175
MLRECIKYPTLAKYILESSSFELFFQYVELSNFDIASDALNTFKDLLTKHEDAVSEFLSSHYEQFFGLYTKLLSSTNYVTRRQSVKFLSEFLLEAPNAQIMKRYILEVHYLNIMMGLLKDSSKNIRICAFHIFKVFVANPNKPREIIQVLVENHREVLKLLHNLPTSKGEDEQLDEERDLIIKEIENLVRLSV

SEQ ID NO: 3508 - DNA, 1339 bp, Zea mays subsp. mays
  misc_feature (1)..(1339): Ceres Seq. ID no. 12410169
  misc_feature (1)..(1339): Ortholog of  Ceres SEQ ID NO 15177842 as cited in SEQ ID NO 51547
  misc_feature (1)..(1339): Ortholog of  Ceres SEQ ID NO 13594859 as cited in SEQ ID NO 51974
  misc_feature (1)..(1339): Ortholog of  Ceres SEQ ID NO 13597887 as cited in SEQ ID NO 64295
aagtcgggttggttagaagaacccaatgcaagtgtgagtgagctgacggcacggcggacgcgctctcctctcctctcctcttcttccggctctccctctccgcatgccattccaacgcattacaggttggcttttggctatgcctatcctgcctacgaatgctacaagactgttgaactaaacaaaccagagattgcgcantcatattttggtgtcagtattggattttagttgccctgttgacagttttggagagatttggagatttcacaatatcatggctaccattttactcggaagcaaagctgatgttctttgtatacttgtggtaccctaagacaaagggaactacgtatgtttatggaactttctttaaaccatatatttctcagcatgagaatgaaatagaccggaatctccttgagctgagagctcgagccaccgacacggttgtcctttattttcagaaggctgcttcggcaggacaaagtactttctttgacgttttaaaatatgttgctgcccagtcaccttctcagaaatcaaggcaacgccttcatcaggaatcacagcagccgccacaacaacagcaaccacaagtgcaggtgcagcaagcgcaaccacaaaaacaagcagcacctgttatgcgcagagcatcatccattgctgctcggcaagcagcaatggcacagcaatctcaggagactaaacccgtttcatcttctcccaagatcaagcgtcaaacatcagcaagatctggttcagtggcatccacaaagcctccggtagctgcatccgcaccaaaacctggcggtagcccaaagaaaggcgaggtcaaacctgctgccggcccagttcaaactccaaccacaggtgccgattcaccaaaacccgagcctagcgccccatcactccctggagccgaaggggtggacaatatagccatcgatgaggccagtggtgacgccccagagggcgcagaagagcttgaccctgcgctcgaagaggagacgccgatggaggagacgatccgtgtgacgcgcgccaagctaaggaggcgcatgaccaccgaagatcctgctgggaattagctgcaggccattgtttttccttcccctgcacattgtgttggtgttttttttgggggggggggggggntaggctgtcatgttgtttggtgggatggagatgtactgttgaattggttctttgtgacacagctgattactgtaccttgtttccgtgctttcttagtgcccttgtgatttaagttgtaagtaacacttttcctccgcatgtgaatacatgttagtggcacgggcaacgaacgcaacattat

SEQ ID NO: 3509 - protein, 260 aa, Zea mays subsp. mays
  peptide (1)..(260): Ceres Seq. ID no. 12410170
MFFVYLWYPKTKGTTYVYGTFFKPYISQHENEIDRNLLELRARATDTVVLYFQKAASAGQSTFFDVLKYVAAQSPSQKSRQRLHQESQQPPQQQQPQVQVQQAQPQKQAAPVMRRASSIAARQAAMAQQSQETKPVSSSPKIKRQTSARSGSVASTKPPVAASAPKPGGSPKKGEVKPAAGPVQTPTTGADSPKPEPSAPSLPGAEGVDNIAIDEASGDAPEGAEELDPALEEETPMEETIRVTRAKLRRRMTTEDPAGN

SEQ ID NO: 3510 - protein, 148 aa, Zea mays subsp. mays
  peptide (1)..(148): Ceres Seq. ID no. 12410171
MRRASSIAARQAAMAQQSQETKPVSSSPKIKRQTSARSGSVASTKPPVAASAPKPGGSPKKGEVKPAAGPVQTPTTGADSPKPEPSAPSLPGAEGVDNIAIDEASGDAPEGAEELDPALEEETPMEETIRVTRAKLRRRMTTEDPAGN

SEQ ID NO: 3511 - protein, 135 aa, Zea mays subsp. mays
  peptide (1)..(135): Ceres Seq. ID no. 12410172
MAQQSQETKPVSSSPKIKRQTSARSGSVASTKPPVAASAPKPGGSPKKGEVKPAAGPVQTPTTGADSPKPEPSAPSLPGAEGVDNIAIDEASGDAPEGAEELDPALEEETPMEETIRVTRAKLRRRMTTEDPAGN

SEQ ID NO: 3512 - DNA, 1360 bp, Zea mays subsp. mays
  misc_feature (1)..(1360): Ceres Seq. ID no. 13496132
  misc_feature (1)..(1360): Ortholog of  Ceres SEQ ID NO 15171755 as cited in SEQ ID NO 57047
  misc_feature (1)..(1360): Ortholog of  Ceres SEQ ID NO 13597613 as cited in SEQ ID NO 65334
  misc_feature (1)..(1360): Ortholog of  Ceres SEQ ID NO 13655958 as cited in SEQ ID NO 65456
ataaattccgaaggcggtcttccgagagcaacagctgctcaggcaggcaggcaggcaggcaccaacagccaacccgacgcaaggaaccaattaaccaccgtcccgctgatgtcgtcggcgacgccagcgcccgcgcgccaccggacgtgccgcacgtactggtgctaccagtgcggccgcgcgctccgcatcatctcctgcccgtccaccgacgtcttctgcccgcgctgcttcggccgcttcctccacgaggaggtcgacccgccgacggcgcgccacgggttcccgccggcgcacttccttccgcacccgttccacccgcagcaccagtacgccggccgtccgcgccgctgggtcatctacggcgaggagccgacgacggtaccaggccgtgcgttccgccagcctgcgccggcacagggacctgccacgcctcctgctcctgcaccggcgctggttggacgacggcgcgtgccttccccgccgccggcgccggtgccgcggcggccgtccacgcccccggccatggaccccggggactacttcatggggccgaacctgaacagcctcatcgaggagctcacgcagaacgacaggccggggccggcgccggcgccaccgtcggcaatcgactcgctcccgacggtgcgggtcgccggggcgcacctgtcggacggctcgcagtgccccgtgtgcaaggaggacttcgagctcggggaggccgcgcggcagctgccgtgcaagcacgtctaccactccgattgcatcgtgccgtggctccgcctgcacaactcctgccccggtctgccgataccagctacctagagccgggtccaacggcagcagccaggccgcacctcgcggcggaagcaacggcaacaacaggaacagggagatggagagagagcccctgacgatggtgcaatgggggccattctcctggctgtttccaccgcgcgggatggacgaccccggggacgcgtgggagcacgggcagcgcggcaggcacgacgcggcggacgccggcgcattctacgcttggtggcgctctctgtttctcatatagatgttctcgtggagtccttatcgcatccaaagatgtacgcctcctacccagtaactatggcgccgttctctcagttcaatgtcaaagatggaagattggtggaagcctgatgccaaaatcagcgtagatgtaaaaatgaaatacgcccactgtaaagacgagtgaattacacatcgttaaagggcacgtaaaacgactgtttggatgatataccatgttaacagtaatttctggaacgcaccgaagacatttctatgtgatgtatctgatacactgaaactctgatgttggtag

SEQ ID NO: 3513 - protein, 303 aa, Zea mays subsp. mays
  peptide (1)..(303): Ceres Seq. ID no. 13496133
KFRRRSSESNSCSGRQAGRHQQPTRRKEPINHRPADVVGDASARAPPDVPHVLVLPVRPRAPHHLLPVHRRLLPALLRPLPPRGGRPADGAPRVPAGALPSAPVPPAAPVRRPSAPLGHLRRGADDGTRPCVPPACAGTGTCHASCSCTGAGWTTARAFPAAGAGAAAAVHAPGHGPRGLLHGAEPEQPHRGAHAERQAGAGAGATVGNRLAPDGAGRRGAPVGRLAVPRVQGGLRARGGRAAAAVQARLPLRLHRAVAPPAQLLPRSADTSYLEPGPTAAARPHLAAEATATTGTGRWRESP

SEQ ID NO: 3514 - protein, 274 aa, Zea mays subsp. mays
  peptide (1)..(274): Ceres Seq. ID no. 13496134
INSEGGLPRATAAQAGRQAGTNSQPDARNQLTTVPLMSSATPAPARHRTCRTYWCYQCGRALRIISCPSTDVFCPRCFGRFLHEEVDPPTARHGFPPAHFLPHPFHPQHQYAGRPRRWVIYGEEPTTVPGRAFRQPAPAQGPATPPAPAPALVGRRRVPSPPPAPVPRRPSTPPAMDPGDYFMGPNLNSLIEELTQNDRPGPAPAPPSAIDSLPTVRVAGAHLSDGSQCPVCKEDFELGEAARQLPCKHVYHSDCIVPWLRLHNSCPGLPIPAT

SEQ ID NO: 3515 - protein, 238 aa, Zea mays subsp. mays
  peptide (1)..(238): Ceres Seq. ID no. 13496135
MSSATPAPARHRTCRTYWCYQCGRALRIISCPSTDVFCPRCFGRFLHEEVDPPTARHGFPPAHFLPHPFHPQHQYAGRPRRWVIYGEEPTTVPGRAFRQPAPAQGPATPPAPAPALVGRRRVPSPPPAPVPRRPSTPPAMDPGDYFMGPNLNSLIEELTQNDRPGPAPAPPSAIDSLPTVRVAGAHLSDGSQCPVCKEDFELGEAARQLPCKHVYHSDCIVPWLRLHNSCPGLPIPAT

SEQ ID NO: 3516 - DNA, 1557 bp, Zea mays subsp. mays
  misc_feature (1)..(1557): Ceres Seq. ID no. 12376476
  misc_feature (1)..(1557): Ortholog of  Ceres SEQ ID NO 15174752 as cited in SEQ ID NO 53279
  misc_feature (1)..(1557): Ortholog of  Ceres SEQ ID NO 14308389 as cited in SEQ ID NO 55226
  misc_feature (1)..(1557): Ortholog of  Ceres SEQ ID NO 15177652 as cited in SEQ ID NO 56858
  misc_feature (1)..(1557): Ortholog of  Ceres SEQ ID NO 15226087 as cited in SEQ ID NO 58655
  misc_feature (1)..(1557): Ortholog of  Ceres SEQ ID NO 13662197 as cited in SEQ ID NO 63622
  misc_feature (1)..(1557): Ortholog of  Ceres SEQ ID NO 14313292 as cited in SEQ ID NO 67393
actcaaatcacaaaccccgctacctcttaactcttcacacgcacaccgtcgtcaaccatggttgctgacatgaaggagaacggcggcgcggtgttggcggcgggcgagaaggcgccgcaggtggtcgtcaagcgcggcgagccgacgctggtgccgccggcggaggcgacgccgacgggcgggcagtactacctgtccaacctggaccagaacatcgcggtgatcgtgcagacggtgtactgctacaagcccagcggcggcggcggcgacgtggcggccgcgctccgcgacgcgctggcgcgcgtgctggtgcactactacccgctggcggggcggctgggcgtaagcccggagatgaagctgaccgtggagctgaccggcgagggcgccgtgttcgtggaggccgacgccgcctgcgaactcgccaccgtcggcgacctcaccaagcccgaccccgccgcgctcggccagctcgtctactccgtccccggcgccaagcacatcctcgagatgcctcccatgaccgcgcaggtgacaaggttcaagtgtgggggcttcgcacttggcctggccatgaaccactgcatgttcgacggcatcggcgccatggagttcgtcaactcgtgggccgagacggcgcgcggcgtcgctgagctcaccgtgccgccgttcctggaccgcagcgtcctgaaggcgcgcgacccgccggtgcacaccttcccgcaccacgagttcgccgagatcccggacgtctccgacacggcggcgctctacggcgcgcaggagctgcagtaccgctccttctgcttcgacccggaccggcctggagcgcgtccgcgggctggcgcttgccgacggcgccctcggccgctgcaccaccttcgaggcgctgtcggggctcgtgtggcgcgcgcgcaccaaggcgctcgggctggcgcccgggcagcgcacgaagctgctgttcgccgtggacggacggcgccggttcgtgccgccgctcccgcggggctacttcggcaacggcatcgtgctgaccaacgccctggccacggccggcgagctgctgtccgcgcccgtgtcgcgcgcagccgggctggtgcaggaggccgtgcggatggtgactgacgactacatgcggtcggcggtggactacttcgaggcgacgcgggcccggccgtcgctggcgtccacgctgctcatcaccacgtggtcgcgcctcgagttccacggcgccgacttcgggtggggcgagcccgtcatgtcgggcccagtcacgctgccggagaaggaggtcatcctcttcctcgcacacggcaaagagaggaagagcatcaacgtgctgctcggcctgccagccaccgcgatggacgccttccaagagctcgtggacgagatatgactgattcatcggtgatgagcagcgatgacggacagggatgggttgctatacatacatatataatgcagggtgcgcctgctttggtttatgtacgaacgtgttaatattccttctatgttggtgtctaagtttaatgagcatatgagaaattgttatcg

SEQ ID NO: 3517 - protein, 355 aa, Zea mays subsp. mays
  peptide (1)..(355): Ceres Seq. ID no. 12376477
MVADMKENGGAVLAAGEKAPQVVVKRGEPTLVPPAEATPTGGQYYLSNLDQNIAVIVQTVYCYKPSGGGGDVAAALRDALARVLVHYYPLAGRLGVSPEMKLTVELTGEGAVFVEADAACELATVGDLTKPDPAALGQLVYSVPGAKHILEMPPMTAQVTRFKCGGFALGLAMNHCMFDGIGAMEFVNSWAETARGVAELTVPPFLDRSVLKARDPPVHTFPHHEFAEIPDVSDTAALYGAQELQYRSFCFDPDRPGARPRAGACRRRPRPLHHLRGAVGARVARAHQGARAGARAAHEAAVRRGRTAPVRAAAPAGLLRQRHRADQRPGHGRRAAVRARVARSRAGAGGRADGD

SEQ ID NO: 3518 - protein, 351 aa, Zea mays subsp. mays
  peptide (1)..(351): Ceres Seq. ID no. 12376478
MKENGGAVLAAGEKAPQVVVKRGEPTLVPPAEATPTGGQYYLSNLDQNIAVIVQTVYCYKPSGGGGDVAAALRDALARVLVHYYPLAGRLGVSPEMKLTVELTGEGAVFVEADAACELATVGDLTKPDPAALGQLVYSVPGAKHILEMPPMTAQVTRFKCGGFALGLAMNHCMFDGIGAMEFVNSWAETARGVAELTVPPFLDRSVLKARDPPVHTFPHHEFAEIPDVSDTAALYGAQELQYRSFCFDPDRPGARPRAGACRRRPRPLHHLRGAVGARVARAHQGARAGARAAHEAAVRRGRTAPVRAAAPAGLLRQRHRADQRPGHGRRAAVRARVARSRAGAGGRADGD

SEQ ID NO: 3519 - protein, 256 aa, Zea mays subsp. mays
  peptide (1)..(256): Ceres Seq. ID no. 12376479
MKLTVELTGEGAVFVEADAACELATVGDLTKPDPAALGQLVYSVPGAKHILEMPPMTAQVTRFKCGGFALGLAMNHCMFDGIGAMEFVNSWAETARGVAELTVPPFLDRSVLKARDPPVHTFPHHEFAEIPDVSDTAALYGAQELQYRSFCFDPDRPGARPRAGACRRRPRPLHHLRGAVGARVARAHQGARAGARAAHEAAVRRGRTAPVRAAAPAGLLRQRHRADQRPGHGRRAAVRARVARSRAGAGGRADGD

SEQ ID NO: 3520 - DNA, 1333 bp, Zea mays subsp. mays
  misc_feature (1)..(1333): Ceres Seq. ID no. 12367911
  misc_feature (1)..(1333): Ortholog of  Ceres SEQ ID NO 14303381 as cited in SEQ ID NO 53959
aactactctactaccaggcacaccgcacacccaatacggaaagaccaccgcaaacgccaccacgcccacgcctcgccgcgcaccacatctgaaacctccagcccgacgccggcgccggcgccgctgctcgcctgctcgtcacatttcctggtgcccgccaagccccgcgacctgggctccccagctccatccatcaaccgcctgcagccgcggaaatggcagcgccgacgacgctgcgctcggcggcggcgcgggcgcgcgcgcgcgcagcggagctcgtgagagggcggtggccgcagcggcgtctggggacgacgtccgcggcggagacggagagcaaaaagaataaggaggaggaggaggagggggccgggtgggagctctcggcggcgcgggagtactacgactaccgcaagtctatctacggcgacgtcacgcaccgcgccctcctcgtcgacgccgtcggcaccctcgtcgtccccgcccagcccaccgcgcaggtgtataagagcattggtgagaagtatggagtgaagtactcggaagacgagatcctgatgagataccggcgggcatacgagcaaccatggggtggatcacgtctcaggtatgtggatgatgggagaaccttttggcagcacatagtcacttcttctacaggatgttcagatgcacagtactttgaggaactctatcaatactttatgacagaaaaggcctggaagctttgtgaccccgatgccgaaagtgtatttaaagctttgaggaaagctggcgttaaaactgcagtcgtctccaatttcgatacccgtctacggccactcctgcaggccttgaaatgtgaccactggtttgatgcagttgcagtcctctgcagaggttgcagcagagaagccgaatccaataatattcttgaaggcctgtgagttactgggcgtgaagcctgaagaagctgtgcacgttggcgacgatcgtagaaatgatatatggggagcgagagatgcaggctgcgatgcttggctctggggcagcgacgttcgctctttcaaggaggttgccgagcggatcggtgttgaggtgacgaagtgactaagtgagctaggatggtgaatatacggaggcagaggtagtacccaggatcgcggtcgtcaaggaagccagtgaccccatccttgtggtgaaattcctgtgctggtttgtaggcttgtagctgtatgtatgacaacttattagggttccgttgaacctgctatgcatgcatgcttgctgccctgacagtgacaggcgaatgcgtcccatgcacttgaatatgagggtctgggttctggacttc

SEQ ID NO: 3521 - protein, 236 aa, Zea mays subsp. mays
  peptide (1)..(236): Ceres Seq. ID no. 12367912
MAAPTTLRSAAARARARAAELVRGRWPQRRLGTTSAAETESKKNKEEEEEGAGWELSAAREYYDYRKSIYGDVTHRALLVDAVGTLVVPAQPTAQVYKSIGEKYGVKYSEDEILMRYRRAYEQPWGGSRLRYVDDGRTFWQHIVTSSTGCSDAQYFEELYQYFMTEKAWKLCDPDAESVFKALRKAGVKTAVVSNFDTRLRPLLQALKCDHWFDAVAVLCRGCSREAESNNILEGL

SEQ ID NO: 3522 - protein, 122 aa, Zea mays subsp. mays
  peptide (1)..(122): Ceres Seq. ID no. 12367913
MRYRRAYEQPWGGSRLRYVDDGRTFWQHIVTSSTGCSDAQYFEELYQYFMTEKAWKLCDPDAESVFKALRKAGVKTAVVSNFDTRLRPLLQALKCDHWFDAVAVLCRGCSREAESNNILEGL

SEQ ID NO: 3523 - DNA, 1935 bp, Zea mays subsp. mays
  misc_feature (1)..(1935): Ceres Seq. ID no. 12352214
  misc_feature (1)..(1935): Ortholog of  Ceres SEQ ID NO 13594380 as cited in SEQ ID NO 58039
  misc_feature (1)..(1935): Ortholog of  Ceres SEQ ID NO 13597407 as cited in SEQ ID NO 64106
  misc_feature (1)..(1935): Ortholog of  Ceres SEQ ID NO 15180690 as cited in SEQ ID NO 0
accccattcgcatctctgcttctttctgcttgggtgccctctgccctgaccacagggcccaaccatatcttcttcctcacacagagacactgagcgagcgagcttgagatcgatctcaggaggcggccggcggcggcagcagcagcagagcttgttggcgccgccatggcgataggtggcttcgtggaagcccctgccggcgccgactacggtggccgcgtgacgtccttcgtggtgctctcctgcatcgtagccggtagcggcggcatcctcttcggctacgacctcggcatctcaggtggggttacctccatggagtcgttccttagaaagttcttcccggacgtgtaccaccagatgaaaggagacaaggacgtgagcaactactgccgcttcgacagcgagcttctcaccgtcttcacctcctccctctacatcgccggcctcgtcgccacgctcttcgcctcctccgtcaccaggaggttcggccgccgcacctccatacttatcggaggcaccgtcttcgtcatcggctccgtcttcggcggggcagccgtcaacgtatacatgctcctactcaacaggatactccttggagtaggcctcggattcacaaaccagtccatcccgctgtacctctcagagatggcgccaccgcagtaccgtggcgccatcaacaacggcttcgagctctgcatcagcatcggcatcctcatcgccaacctcatcaactacggcgtggagaagatagcaggtggatggggctggaggatctctctgtccctggccgccgtgccggccgcgttcctcaccgtcggcgccatctacctgcccgagacgcccagcttcatcatccaacgccgcggcggcagcaacaacgtcgacgaggcaaggctgctcctccagaggctgcgtggcaccaccagggtccagaaagagctcgacgatctcgtgtccgcgaccaggacgaccaccacagggcgtcccttccgcaccatactgaggcgcaagtacaggccgcagctggtcatagctctcctcgtacccttcttcaaccaggtcaccggcatcaacgtcatcaacttctacgcgccggtcatgttccggaccatcgggctcaaggagagcgcgtccctcatgtcggccgtggtcacgcgcgtctgcgccacggccgccaacgtggtggccatggtggtcgtggacaggttcggccgccggaagctcttcctggtgggcggcgtgcagatgatcctgtcgcaggccatggtgggagcggtgctggccgccaagttccaggagcacggagggatggagaaggagtacgcgtacctggtgctcgtcatcatgtgcgtcttcgtcgcgggcttcgcctggtcctggggccctctcacctacctggtgcccaccgagatctgcccgctggagatcaggtcggcggggcagagcgtcgtcatcgccgtcatcttcttcgtcaccttcctcatcggccagaccttcctggcgatgctgtgccacctcaagttcggcaccttcttcctcttcggcggctgggtgtgcgtcatgacgctcttcgtgtatttcttcctgccggagaccaagcagctgcccatggcagcagatggaacaggtctggaggacccactggttttggaaaaggattgtagacgaagatgcagcaggggagcaaccgagagaggaagcagcaggaaccatagctctgtcgtccacgtccaccacaacatagtcatcatcaacaatactcatggcatgggcctgccctgtatagatagataattaactagctgcaccgcacagattgtctccgactataagctagctagctagttggatgcatgcatgcatgcattctgttatttctgtgaccatgaatcaaagggccttccaacagaacagaatatgagatgagatgaatcc

SEQ ID NO: 3524 - protein, 542 aa, Zea mays subsp. mays
  peptide (1)..(542): Ceres Seq. ID no. 12352215
MAIGGFVEAPAGADYGGRVTSFVVLSCIVAGSGGILFGYDLGISGGVTSMESFLRKFFPDVYHQMKGDKDVSNYCRFDSELLTVFTSSLYIAGLVATLFASSVTRRFGRRTSILIGGTVFVIGSVFGGAAVNVYMLLLNRILLGVGLGFTNQSIPLYLSEMAPPQYRGAINNGFELCISIGILIANLINYGVEKIAGGWGWRISLSLAAVPAAFLTVGAIYLPETPSFIIQRRGGSNNVDEARLLLQRLRGTTRVQKELDDLVSATRTTTTGRPFRTILRRKYRPQLVIALLVPFFNQVTGINVINFYAPVMFRTIGLKESASLMSAVVTRVCATAANVVAMVVVDRFGRRKLFLVGGVQMILSQAMVGAVLAAKFQEHGGMEKEYAYLVLVIMCVFVAGFAWSWGPLTYLVPTEICPLEIRSAGQSVVIAVIFFVTFLIGQTFLAMLCHLKFGTFFLFGGWVCVMTLFVYFFLPETKQLPMAADGTGLEDPLVLEKDCRRRCSRGATERGSSRNHSSVVHVHHNIVIINNTHGMGLPCIDR

SEQ ID NO: 3525 - protein, 493 aa, Zea mays subsp. mays
  peptide (1)..(493): Ceres Seq. ID no. 12352216
MESFLRKFFPDVYHQMKGDKDVSNYCRFDSELLTVFTSSLYIAGLVATLFASSVTRRFGRRTSILIGGTVFVIGSVFGGAAVNVYMLLLNRILLGVGLGFTNQSIPLYLSEMAPPQYRGAINNGFELCISIGILIANLINYGVEKIAGGWGWRISLSLAAVPAAFLTVGAIYLPETPSFIIQRRGGSNNVDEARLLLQRLRGTTRVQKELDDLVSATRTTTTGRPFRTILRRKYRPQLVIALLVPFFNQVTGINVINFYAPVMFRTIGLKESASLMSAVVTRVCATAANVVAMVVVDRFGRRKLFLVGGVQMILSQAMVGAVLAAKFQEHGGMEKEYAYLVLVIMCVFVAGFAWSWGPLTYLVPTEICPLEIRSAGQSVVIAVIFFVTFLIGQTFLAMLCHLKFGTFFLFGGWVCVMTLFVYFFLPETKQLPMAADGTGLEDPLVLEKDCRRRCSRGATERGSSRNHSSVVHVHHNIVIINNTHGMGLPCIDR

SEQ ID NO: 3526 - protein, 478 aa, Zea mays subsp. mays
  peptide (1)..(478): Ceres Seq. ID no. 12352217
MKGDKDVSNYCRFDSELLTVFTSSLYIAGLVATLFASSVTRRFGRRTSILIGGTVFVIGSVFGGAAVNVYMLLLNRILLGVGLGFTNQSIPLYLSEMAPPQYRGAINNGFELCISIGILIANLINYGVEKIAGGWGWRISLSLAAVPAAFLTVGAIYLPETPSFIIQRRGGSNNVDEARLLLQRLRGTTRVQKELDDLVSATRTTTTGRPFRTILRRKYRPQLVIALLVPFFNQVTGINVINFYAPVMFRTIGLKESASLMSAVVTRVCATAANVVAMVVVDRFGRRKLFLVGGVQMILSQAMVGAVLAAKFQEHGGMEKEYAYLVLVIMCVFVAGFAWSWGPLTYLVPTEICPLEIRSAGQSVVIAVIFFVTFLIGQTFLAMLCHLKFGTFFLFGGWVCVMTLFVYFFLPETKQLPMAADGTGLEDPLVLEKDCRRRCSRGATERGSSRNHSSVVHVHHNIVIINNTHGMGLPCIDR

SEQ ID NO: 3527 - DNA, 1938 bp, Zea mays subsp. mays
  misc_feature (1)..(1938): Ceres Seq. ID no. 12373312
  misc_feature (1)..(1938): Ortholog of  Ceres SEQ ID NO 14311535 as cited in SEQ ID NO 51559
  misc_feature (1)..(1938): Ortholog of  Ceres SEQ ID NO 15176200 as cited in SEQ ID NO 55188
tcgcagaagccgcagccacgccccacgcccccacaccaagccgtatcgtcttctccctcttgtccggttcgggtggtccgcggtcggggtgagtgagtgagcagctttgcttctccatctccccattcccttccctccccagcccccccggcccggcggcggtacgtgaccctgacgccgcagcgctagctagctcgccggaacggcaggtggcggcgcgcgacctgagagcacagcagcaccggaccggctcaggcaggcgaccggcagaaaagatggcgggagcagcagctgtggagacggcggcggcggcggcggcggcggcggcagcggccaacggaaaagcgtgctgccacgccgccaaggggcccgggtacgccacgccgctggaggccatggagaagggccccagggagaagctcgtctacgtcacctgcgtctacaacggcactggaattaacaagccggattaccttgcgacggtggatttggatcccagctctcctacatactcccaggtgatccacaggctcccggtcacccacatcggcgacgagctgcatcactctggctggaactcctgcagctcctgccacggtgacccatcggccaagcgccgcttcctgatcctgccttccttgctgtcaggccgtgtgtatgtcgtcgacacagcgacagacccaagggcgccatccttgcataaggtggttgagtctgaggacattgctgagaatactgggcttgggttccctcacacgtctcattgccttgcgtctggcgacattatgatttcttgccttggggacaaggaggggaatgcagctggcaatggcttcctgctgttggattcagagtttaatgtcaaaggacgttgggaaaagccaggtcacagtcccttggttggatatgacttctggtaccagcctcgccacaagacgatgatcagttcctcatggggagcccctgcagcctttaggacaggtttcgatcttcaacatgtccaggatggcctgtatggaaggcacctgcatgtgtacgactggcctggcggtgagctcaagcagacacttgatctaggtgacactggactccttccccttgaggtgaggtttttacatgatccatcaaaggacactggctatgttggctgtgctttaacaagcaacatggtgagatttttcaagaccgcggatggatcgtggagccatgaggttgctatctctgtgaaaccactgaaggtccgcaactggattctgccggaaatgccaggattgataactgattttgtcatctctcttgatgaccgttatctctactttgtaaactggcttcatggcgatattaggcagtacaacattgaggatcccgcaaagcctttcttggctggacaagtatgggttggtggtcttcttcagaagggcagtgatgtcgtctatgttactgatgatggtcaggaacagcagtataatgtgcctcaagtcaagggtcatcgacttagaggtgggccacagatgattcagctgagcttggatggcaagaggatatacgtgacaaactcacttttcagccgatgggatgagcagtttttcggtgatgatcttgtcaagaagggctcccacatgttgcagatcgatgtcgacaccgagaaaggaggcctggctgtcaaccccaacttcttcgtcgattttggcaccgagcctgatggtcctgccctggcccacgagatgagatatcctggtggggactgcacctctgatatatggatctgaggtcaaggattcggcgtaattaacaggctgctggagaatccctgttgttgtatgcactgtaattaacatggtatccgtgcggtgttccgtcttgtactgcgactgttgccagtggaataaggcatggtttcatgagaactctagattaataaaagaagtcctgattctg

SEQ ID NO: 3528 - protein, 497 aa, Zea mays subsp. mays
  peptide (1)..(497): Ceres Seq. ID no. 12373313
MAGAAAVETAAAAAAAAAAANGKACCHAAKGPGYATPLEAMEKGPREKLVYVTCVYNGTGINKPDYLATVDLDPSSPTYSQVIHRLPVTHIGDELHHSGWNSCSSCHGDPSAKRRFLILPSLLSGRVYVVDTATDPRAPSLHKVVESEDIAENTGLGFPHTSHCLASGDIMISCLGDKEGNAAGNGFLLLDSEFNVKGRWEKPGHSPLVGYDFWYQPRHKTMISSSWGAPAAFRTGFDLQHVQDGLYGRHLHVYDWPGGELKQTLDLGDTGLLPLEVRFLHDPSKDTGYVGCALTSNMVRFFKTADGSWSHEVAISVKPLKVRNWILPEMPGLITDFVISLDDRYLYFVNWLHGDIRQYNIEDPAKPFLAGQVWVGGLLQKGSDVVYVTDDGQEQQYNVPQVKGHRLRGGPQMIQLSLDGKRIYVTNSLFSRWDEQFFGDDLVKKGSHMLQIDVDTEKGGLAVNPNFFVDFGTEPDGPALAHEMRYPGGDCTSDIWI

SEQ ID NO: 3529 - protein, 457 aa, Zea mays subsp. mays
  peptide (1)..(457): Ceres Seq. ID no. 12373314
MEKGPREKLVYVTCVYNGTGINKPDYLATVDLDPSSPTYSQVIHRLPVTHIGDELHHSGWNSCSSCHGDPSAKRRFLILPSLLSGRVYVVDTATDPRAPSLHKVVESEDIAENTGLGFPHTSHCLASGDIMISCLGDKEGNAAGNGFLLLDSEFNVKGRWEKPGHSPLVGYDFWYQPRHKTMISSSWGAPAAFRTGFDLQHVQDGLYGRHLHVYDWPGGELKQTLDLGDTGLLPLEVRFLHDPSKDTGYVGCALTSNMVRFFKTADGSWSHEVAISVKPLKVRNWILPEMPGLITDFVISLDDRYLYFVNWLHGDIRQYNIEDPAKPFLAGQVWVGGLLQKGSDVVYVTDDGQEQQYNVPQVKGHRLRGGPQMIQLSLDGKRIYVTNSLFSRWDEQFFGDDLVKKGSHMLQIDVDTEKGGLAVNPNFFVDFGTEPDGPALAHEMRYPGGDCTSDIWI

SEQ ID NO: 3530 - protein, 327 aa, Zea mays subsp. mays
  peptide (1)..(327): Ceres Seq. ID no. 12373315
MISCLGDKEGNAAGNGFLLLDSEFNVKGRWEKPGHSPLVGYDFWYQPRHKTMISSSWGAPAAFRTGFDLQHVQDGLYGRHLHVYDWPGGELKQTLDLGDTGLLPLEVRFLHDPSKDTGYVGCALTSNMVRFFKTADGSWSHEVAISVKPLKVRNWILPEMPGLITDFVISLDDRYLYFVNWLHGDIRQYNIEDPAKPFLAGQVWVGGLLQKGSDVVYVTDDGQEQQYNVPQVKGHRLRGGPQMIQLSLDGKRIYVTNSLFSRWDEQFFGDDLVKKGSHMLQIDVDTEKGGLAVNPNFFVDFGTEPDGPALAHEMRYPGGDCTSDIWI

SEQ ID NO: 3531 - DNA, 1163 bp, Zea mays subsp. mays
  misc_feature (1)..(1163): Ceres Seq. ID no. 12352218
  misc_feature (1)..(1163): Ortholog of  Ceres SEQ ID NO 13504028 as cited in SEQ ID NO 56107
actctcccgactcaggatttatacccacccccgtcggtcgatcccctccctccctcccgccgccgccgccgccgcccgtagccaagaccaagatcccgtctcgcccggcgtcgcacctgacctaaccctgagccctgtgatatgccggttcaggtcggaggcagcaaggtggcggacccgaggccggccagggtggtggacctatcgcccgtaggcgacaggtcccgcgcctcctccaagaagaaccgccgccgccacaagaaggccgacgccgcctcttccatctcgcccatgcagaggctcttcgacaccagcagggaggtcttcgccaactcctacccgggcttcgtcccgccgccggacgccgtcgcccgcctctcgggcctcctcaatgagctgaagcctcgtgacgtcagggttgccccaagcatgtccgtcttcaagcatgccgatcctacaagcccccctccagttacctatttgcacttctacggttcctccgagttttcgtttggtatcttctgtttaccgaaatcggcaattattcccctccacaaccatcctgggatgacagtgtttagcaagatactgtttggttccatgcacctcaagtcctatgattgggctaaaagtctgccggcgggtagcaacgataatgcacttgagaactctgatggagcaggagctcgtctggccaaggtgaacacagatgccgtttttgacgcttcatctgagaccgtagttctgtaccctgaaaatggagggaacttgcactgctttacggcgctgaccccttgtgccgtgctggatgtgatgggccctccctacaaccgtgctcaaggaagggattgcgcgtattacagcgaatcgccctactcgtgtgctggagatgcacaatattcttggctcaaagaggttcacagcacatttgagatggaaggcataaagatggagcccaacttcatcgtctaataattaagcaggcatggcatggcatgtcatcgtaatgctgctagtttcatgtagataatctctagctgcgggggtgtagtacaactggaagacggccagatgctcttttgacattcgtttgccttaatttcatatgcctccctttatgtatgttaacaattcgaatcttgggtcatggtcactttttttcc

SEQ ID NO: 3532 - protein, 276 aa, Zea mays subsp. mays
  peptide (1)..(276): Ceres Seq. ID no. 12352219
MPVQVGGSKVADPRPARVVDLSPVGDRSRASSKKNRRRHKKADAASSISPMQRLFDTSREVFANSYPGFVPPPDAVARLSGLLNELKPRDVRVAPSMSVFKHADPTSPPPVTYLHFYGSSEFSFGIFCLPKSAIIPLHNHPGMTVFSKILFGSMHLKSYDWAKSLPAGSNDNALENSDGAGARLAKVNTDAVFDASSETVVLYPENGGNLHCFTALTPCAVLDVMGPPYNRAQGRDCAYYSESPYSCAGDAQYSWLKEVHSTFEMEGIKMEPNFIV

SEQ ID NO: 3533 - protein, 226 aa, Zea mays subsp. mays
  peptide (1)..(226): Ceres Seq. ID no. 12352220
MQRLFDTSREVFANSYPGFVPPPDAVARLSGLLNELKPRDVRVAPSMSVFKHADPTSPPPVTYLHFYGSSEFSFGIFCLPKSAIIPLHNHPGMTVFSKILFGSMHLKSYDWAKSLPAGSNDNALENSDGAGARLAKVNTDAVFDASSETVVLYPENGGNLHCFTALTPCAVLDVMGPPYNRAQGRDCAYYSESPYSCAGDAQYSWLKEVHSTFEMEGIKMEPNFIV

SEQ ID NO: 3534 - protein, 180 aa, Zea mays subsp. mays
  peptide (1)..(180): Ceres Seq. ID no. 12352221
MSVFKHADPTSPPPVTYLHFYGSSEFSFGIFCLPKSAIIPLHNHPGMTVFSKILFGSMHLKSYDWAKSLPAGSNDNALENSDGAGARLAKVNTDAVFDASSETVVLYPENGGNLHCFTALTPCAVLDVMGPPYNRAQGRDCAYYSESPYSCAGDAQYSWLKEVHSTFEMEGIKMEPNFIV

SEQ ID NO: 3535 - DNA, 901 bp, Zea mays subsp. mays
  misc_feature (1)..(901): Ceres Seq. ID no. 12351498
  misc_feature (1)..(901): Ortholog of  Ceres SEQ ID NO 15174142 as cited in SEQ ID NO 64367
ttccacttcacagcctctccgcctccgctcctcgcgccgccgccgcgtctcctcctgtacaggtaaggagaggaagagggcgaaatggtgaagcacaacaacgtcatccccaacgggcacttcaagaagcactggcagaactatgtcaagacatggttcaaccagcccgcccgcaagcagaggcgccgcatcgctcgtcaaaagaaggctgtgaagatattcccccgcccgactgctggtcctctacgccccattgttcaatgccagactttaaagtacaacatgaagtcaagggctgggagaggctttacccttgaggagctgaaggctgctggcatcccaaagaagcttgctccaaccattggtatttctgttgatcaccgccgcaagaacaaatcccttgagggactgcaggccaatgtccagaggcttaagacatacaaggccaagctggttatcttcccaaggcgtgcacacaaggttaaggctggtgactctactccagaggagcttgccaccgctacccaggtccagggtgactacatgccatttactcgtggtgagaaacgttcagttgaggttgtgaaggtcacagatgagatgaagtcatttgctgcctatggcaagctccgccttgagcggatgaacaagaaacatcttggtgcccgccagaagaaggcagctgaggcagagaaggaagataagaagtgaagcggttgaagatagtaccctgttttgttctattcagtcattagtgaatgctactacttaaagtgcttgttctatgttttttttgcggtaatggaaatagagcccagacaaacattttggtgtcctactgtttgatgccttgtacttgtttgcgaactcagctatctaatgggttattggattcttgctc

SEQ ID NO: 3536 - protein, 208 aa, Zea mays subsp. mays
  peptide (1)..(208): Ceres Seq. ID no. 12351499
MVKHNNVIPNGHFKKHWQNYVKTWFNQPARKQRRRIARQKKAVKIFPRPTAGPLRPIVQCQTLKYNMKSRAGRGFTLEELKAAGIPKKLAPTIGISVDHRRKNKSLEGLQANVQRLKTYKAKLVIFPRRAHKVKAGDSTPEELATATQVQGDYMPFTRGEKRSVEVVKVTDEMKSFAAYGKLRLERMNKKHLGARQKKAAEAEKEDKK

SEQ ID NO: 3537 - protein, 142 aa, Zea mays subsp. mays
  peptide (1)..(142): Ceres Seq. ID no. 12351500
MKSRAGRGFTLEELKAAGIPKKLAPTIGISVDHRRKNKSLEGLQANVQRLKTYKAKLVIFPRRAHKVKAGDSTPEELATATQVQGDYMPFTRGEKRSVEVVKVTDEMKSFAAYGKLRLERMNKKHLGARQKKAAEAEKEDKK

SEQ ID NO: 3538 - protein, 104 aa, Zea mays subsp. mays
  peptide (1)..(104): Ceres Seq. ID no. 12351501
PLHSLSASAPRAAAASPPVQVRRGRGRNGEAQQRHPQRALQEALAELCQDMVQPARPQAEAPHRSSKEGCEDIPPPDCWSSTPHCSMPDFKVQHEVKGWERLYP

SEQ ID NO: 3539 - DNA, 1524 bp, Zea mays subsp. mays
  misc_feature (1)..(1524): Ceres Seq. ID no. 12352222
  misc_feature (1)..(1524): Ortholog of  Ceres SEQ ID NO 14312216 as cited in SEQ ID NO 53930
  misc_feature (1)..(1524): Ortholog of  Ceres SEQ ID NO 12779935 as cited in SEQ ID NO 66774
  misc_feature (1)..(1524): Ortholog of  Ceres SEQ ID NO 13598695 as cited in SEQ ID NO 67368
  misc_feature (1)..(1524): Ortholog of  Ceres SEQ ID NO 13591174 as cited in SEQ ID NO 68289
aggatacacctatctgcttctgctagctttctttacagagacgacaggatagctagagccgagggagagatcagggtcgacgatagatgggggtgcatggggctgttgccaaacgaccctgcagcaggcagcatctcctcctcctcgtcgtcgctattctcataggtagctacttcgccgccgccgccgccgccgctgcggacgagcagaaaagcaggaatagaggagctggtcgtcgcagccgcaggaggcgggccgcggcggcagtgacgtcgccgcctgcgcccctcatggtgcccatcaccatcctcgagtccgccgtcgacttgggagccgtgtgcatggacggaacaccgcctgcttaccacctgcacccgggctccggagcagggaacaacagctggatcgtcaacctggaggtgaacgggttttacttccgcgggcagcgcgtctgggacgccaccgtccggcacctcctctccatcgggatggccgctgcggaccaggtgttgctcgctggctgctccgccggcgggctggcggtcatactgcactgcgaccagttccaggccttcttccctcggtccaacaacgccgccgccgccggcggtaccaccaccactactaccgtcaagtgcctcgccgacgccggcctcttcctcgacgccatcgacgtctccggcgggcgcagccttcggtcctactactccgacatcgtggccatgcagggggtgggtcccaacctgccgccggcgtgcactgcccgtttggacaccgcctcgtgcttcttccctcagaacgtgatcgatggcgtaaacacccccatcttcctgctcaacgcagcgtacgacgcctggcagatacaggagagcctggcacccagcggagctgaccccagcggagcctggcgagcctgcaagtccaaccactctgcctgcgacgcgacccagatgaaattcctgcaaggtttcagggaccagatggtagcgtccgtgttgggcgggcgcttcgccggctccaggagcaacaacgggctcttcatcaactcctgcttcgcgcactgccagtccgagctgccggccacctggagctggagccacgcggcaggtgcctcccccgccatccaaagcagggggattgccaagtcagtgggcgactggtacttcggtcgagctcaagtcaaggcgatcgactgcccctacccctgcgacggaacatgccgcaacatcatatgatcacagacagacaggctcatgttgttgtaccctgtggctttgtgccgcacacgtcggccgtgtccgctgcagcttgcataactctcgtgggccactaaaagccgacggaattaattgattctcgtcggtggtcaacagaaattaattaaaccttgtccacaaagtcccatcggttctcaagaaccgacgagaattactaattttcgtcgatatattgcttattctcaggtgtgagaaatgttcccgtcattattcatcaagaatggcactcgacatgtgtgttttgccg

SEQ ID NO: 3540 - protein, 382 aa, Zea mays subsp. mays
  peptide (1)..(382): Ceres Seq. ID no. 12352223
MGVHGAVAKRPCSRQHLLLLVVAILIGSYFAAAAAAAADEQKSRNRGAGRRSRRRRAAAAVTSPPAPLMVPITILESAVDLGAVCMDGTPPAYHLHPGSGAGNNSWIVNLEVNGFYFRGQRVWDATVRHLLSIGMAAADQVLLAGCSAGGLAVILHCDQFQAFFPRSNNAAAAGGTTTTTTVKCLADAGLFLDAIDVSGGRSLRSYYSDIVAMQGVGPNLPPACTARLDTASCFFPQNVIDGVNTPIFLLNAAYDAWQIQESLAPSGADPSGAWRACKSNHSACDATQMKFLQGFRDQMVASVLGGRFAGSRSNNGLFINSCFAHCQSELPATWSWSHAAGASPAIQSRGIAKSVGDWYFGRAQVKAIDCPYPCDGTCRNII

SEQ ID NO: 3541 - protein, 314 aa, Zea mays subsp. mays
  peptide (1)..(314): Ceres Seq. ID no. 12352224
MVPITILESAVDLGAVCMDGTPPAYHLHPGSGAGNNSWIVNLEVNGFYFRGQRVWDATVRHLLSIGMAAADQVLLAGCSAGGLAVILHCDQFQAFFPRSNNAAAAGGTTTTTTVKCLADAGLFLDAIDVSGGRSLRSYYSDIVAMQGVGPNLPPACTARLDTASCFFPQNVIDGVNTPIFLLNAAYDAWQIQESLAPSGADPSGAWRACKSNHSACDATQMKFLQGFRDQMVASVLGGRFAGSRSNNGLFINSCFAHCQSELPATWSWSHAAGASPAIQSRGIAKSVGDWYFGRAQVKAIDCPYPCDGTCRNII

SEQ ID NO: 3542 - protein, 297 aa, Zea mays subsp. mays
  peptide (1)..(297): Ceres Seq. ID no. 12352225
MDGTPPAYHLHPGSGAGNNSWIVNLEVNGFYFRGQRVWDATVRHLLSIGMAAADQVLLAGCSAGGLAVILHCDQFQAFFPRSNNAAAAGGTTTTTTVKCLADAGLFLDAIDVSGGRSLRSYYSDIVAMQGVGPNLPPACTARLDTASCFFPQNVIDGVNTPIFLLNAAYDAWQIQESLAPSGADPSGAWRACKSNHSACDATQMKFLQGFRDQMVASVLGGRFAGSRSNNGLFINSCFAHCQSELPATWSWSHAAGASPAIQSRGIAKSVGDWYFGRAQVKAIDCPYPCDGTCRNII

SEQ ID NO: 3543 - DNA, 1736 bp, Zea mays subsp. mays
  misc_feature (1)..(1736): Ceres Seq. ID no. 12390518
  misc_feature (1)..(1736): Ortholog of  Ceres SEQ ID NO 14302142 as cited in SEQ ID NO 0
aatgacaagctagaagattaccaggcattccccctcccccaaaatgattgcaacgacatcgcactgagtccaagtatcagagtaggatgatgtattcccctccgcgcaccgatcccgacagagaggaagagcagtgcttctcaatcggaagcatgcaagagggggttcagctctacagttctactggagatgctcaactaaatagaaatatgaacacaggcaagtgtttagaggatggcaaaaggaagggttctggagaggacagttcatcactacgttctctaggtgaaaccagtgcattgcagcgagaagtcagcatggagtgtgctgatgagaaggcgggtgatgctagaggccaagagagaggactacgtgcatgtccgggcaaagcgcggccaagccaccaacagccacaggccttgcagaaagatttcgaagggaaaagataaatgaaaggatgaagcttcttcaagaccttgtcccaggttgcaacaagattacaggcaaggccatgatgcttgatgagatcataaactatgtgcaatctctgcagcgacagattgagttcctttcgatgaagctctcagcgatcggccctgggctcaactgtgacctcgacctacaagatatcctctgcacacaagatgctagctctgcttttccaggatacaacctgcaaacgagcaatgtgcatattaatctgtacagagcatctgaagaaggtttctcacacaggaacaggatcatccctagtccagcaaatgttcacgtgacaagaaacgcccagctatctgcatttcctcagagaggagttatctggaacgaggagctttgcagcatcgcttcagatagaaatgctggtagcctgattcaatgaaagtggagtgacattgtggcaactgacaagccggcagtttaatggtgatcaactctgaaagtcttgacaagttgggttgctactgaggtgccttttcaagttgcagtggtagcacgacttctcttgggatgagctagttaacttttggtatttgagaggaattctggtgtgtccacccatcctgtacagttattagaataactaatcaaaggagtactgtgaaattcttgcgatctggtggagaaaatagtggacaattttcgtctggaatttctgacacaactgagttagtgctttggtggggtgtggctccacctaattatttaaaaaaaaaaaaaaaaaacggcacgagaagctttttttttttttttttcgaatatgcatatttttacatgttttttattcgcttttgtttatgttgaatcagaaactggatggtagaaagaaaataagcctctccagctgtcccatgagccatctatgtttctgggctctcttacagatttatattatgtgatgaactagagttcatatatcatatatgaggataagaacagtacagttgttgtactccaacaccatgaaaccaacagttgaccaactttatttattcctataagtatttgtagcagcagtgcgcatacgacatcccggccaccaactagcagctcaatcaaggagtgtattcggatgtggatcagccgcctagtacaacttgtagttcaggtccaatgcaagcgactagtagtatcaagtctcatcaacacaataacgacagaatgaatcgggcactagcctagaaagcattcataaactccgagcctgtacaccatctacagcctaaagactgacttgactc

SEQ ID NO: 3544 - protein, 166 aa, Zea mays subsp. mays
  peptide (1)..(166): Ceres Seq. ID no. 12390519
MSGQSAAKPPTATGLAERFRREKINERMKLLQDLVPGCNKITGKAMMLDEIINYVQSLQRQIEFLSMKLSAIGPGLNCDLDLQDILCTQDASSAFPGYNLQTSNVHINLYRASEEGFSHRNRIIPSPANVHVTRNAQLSAFPQRGVIWNEELCSIASDRNAGSLIQ

SEQ ID NO: 3545 - protein, 139 aa, Zea mays subsp. mays
  peptide (1)..(139): Ceres Seq. ID no. 12390520
MKLLQDLVPGCNKITGKAMMLDEIINYVQSLQRQIEFLSMKLSAIGPGLNCDLDLQDILCTQDASSAFPGYNLQTSNVHINLYRASEEGFSHRNRIIPSPANVHVTRNAQLSAFPQRGVIWNEELCSIASDRNAGSLIQ

SEQ ID NO: 3546 - protein, 121 aa, Zea mays subsp. mays
  peptide (1)..(121): Ceres Seq. ID no. 12390521
MMLDEIINYVQSLQRQIEFLSMKLSAIGPGLNCDLDLQDILCTQDASSAFPGYNLQTSNVHINLYRASEEGFSHRNRIIPSPANVHVTRNAQLSAFPQRGVIWNEELCSIASDRNAGSLIQ

SEQ ID NO: 3547 - DNA, 1466 bp, Zea mays subsp. mays
  misc_feature (1)..(1466): Ceres Seq. ID no. 12410153
  misc_feature (1)..(1466): Ortholog of  Ceres SEQ ID NO 12778345 as cited in SEQ ID NO 62792
  misc_feature (1)..(1466): Ortholog of  Ceres SEQ ID NO 13662513 as cited in SEQ ID NO 63303
aacaaaaaaaaaaccctagaactccaaaaccttcagccccacgctatggccctcgcactgcgcctccgtcgggtcctcgcggcggcctccaccgcggcacccctgctccgcccgtccacctcggtcgcccggccttgcccgctcgttcccctcgcctccccggtcgcgccgctcccgctgccgccgtggcgattcctgcccggcggcggcgccgggttcaggtccacggcggcggcggctgcgcggggcgggaccgactatgggacggacgacagcaagatctcccccgacgagatcctcttcgagggctgcgactacaaccactggctcatcaccatggacttcccggaccccaagccgtcgcgcgaagagatgatcgagacatacctccagactctcgccaaggtcgtcgggagttatgaggaggccaagaagaggatgtatgcttttagtacgacgacttatgttggttttcaggctgtaatgaccgaggaaatgtcagaaaaatttcgcggtttgcctggagtagttttcattttgcctgattcatatctatatccagaaacaaaggagtacggaggagacaaatatgacaatggtgtcatcactccaagaccaccacctgttcattatagcagaccatcaagaactgacaggaaccgtaactaccgaggaaactaccaggatggccctccacagcaaggaaattaccagaacaaccgtcctccaccagaaggtggttaccagaacaacccgccgcagcaaggaaactaccagacataccgctcgcagcaagatggaagaggctatgccccacagcagaattatgcacaaggtggtcaggatggtagaggtttggaaggaatgattacacagaccgttcaggctacaatggaccacctgattttcgaagtcaaactcagtaccaagggcatgtaaatccagctgggcaaggtcaaggttacaacaacccccaagagcgtagcaacttctcgcaagggcagggaggaggttttaggcctggtggtccttcagcacctgggtcttatggccaaccatcagcacctggatcttatggtcaacctaatacacttggtaactatgggcaggtacctccatcagtgaatcctggtggtaacagagttcctggtgtgaatcctagttatggtggggatggcagacagggggctggaccagcatatggtggagataactggcaaagaggttctggtcagtatcctagcccaggtgaaggacaaggaaactggcaggtatgagagcatttgatatacacatttcacttttaaaatgccgttactgtttgaattgaaatacagcagtttaaagttaaaccgggacatcctttgtttgaccagttctagattgaattcgtaaactgtgtgccgagtttcagatgtacgactacagtttttctccctgttaaatgttttttagatttatgagct

SEQ ID NO: 3548 - protein, 312 aa, Zea mays subsp. mays
  peptide (1)..(312): Ceres Seq. ID no. 12410154
NKKKTLELQNLQPHAMALALRLRRVLAAASTAAPLLRPSTSVARPCPLVPLASPVAPLPLPPWRFLPGGGAGFRSTAAAAARGGTDYGTDDSKISPDEILFEGCDYNHWLITMDFPDPKPSREEMIETYLQTLAKVVGSYEEAKKRMYAFSTTTYVGFQAVMTEEMSEKFRGLPGVVFILPDSYLYPETKEYGGDKYDNGVITPRPPPVHYSRPSRTDRNRNYRGNYQDGPPQQGNYQNNRPPPEGGYQNNPPQQGNYQTYRSQQDGRGYAPQQNYAQGGQDGRGLEGMITQTVQATMDHLIFEVKLSTKGM

SEQ ID NO: 3549 - protein, 297 aa, Zea mays subsp. mays
  peptide (1)..(297): Ceres Seq. ID no. 12410155
MALALRLRRVLAAASTAAPLLRPSTSVARPCPLVPLASPVAPLPLPPWRFLPGGGAGFRSTAAAAARGGTDYGTDDSKISPDEILFEGCDYNHWLITMDFPDPKPSREEMIETYLQTLAKVVGSYEEAKKRMYAFSTTTYVGFQAVMTEEMSEKFRGLPGVVFILPDSYLYPETKEYGGDKYDNGVITPRPPPVHYSRPSRTDRNRNYRGNYQDGPPQQGNYQNNRPPPEGGYQNNPPQQGNYQTYRSQQDGRGYAPQQNYAQGGQDGRGLEGMITQTVQATMDHLIFEVKLSTKGM

SEQ ID NO: 3550 - protein, 200 aa, Zea mays subsp. mays
  peptide (1)..(200): Ceres Seq. ID no. 12410156
MDFPDPKPSREEMIETYLQTLAKVVGSYEEAKKRMYAFSTTTYVGFQAVMTEEMSEKFRGLPGVVFILPDSYLYPETKEYGGDKYDNGVITPRPPPVHYSRPSRTDRNRNYRGNYQDGPPQQGNYQNNRPPPEGGYQNNPPQQGNYQTYRSQQDGRGYAPQQNYAQGGQDGRGLEGMITQTVQATMDHLIFEVKLSTKGM

SEQ ID NO: 3551 - DNA, 1105 bp, Zea mays subsp. mays
  misc_feature (1)..(1105): Ceres Seq. ID no. 12410149
  misc_feature (1)..(1105): Ortholog of  Ceres SEQ ID NO 13639317 as cited in SEQ ID NO 59781
agttccacttccaccaccgcggccgccgcgccctataaatggccgccatcggcagctgcactccggtaccaatccccgattccttacacgctaagccacgcaacgcaacgcaactagccatgacgatgaagtccagcagcggcggcggccatgtcatcggggtcccggtcacctccaaggcgcacgggatagaggaggtgtccagggatccgtccttcggcaagggcgccggcgatcacctcgccgtctcgttgacgcaccccagcccttacgcgtctttcggctacaagcacacaggcagcaaaggccaggtgacccactgggtgagcaagctgagcagaagggcgcagggcttcagagagcatgtgaccttgggggccgaagctgtcggagacggtgaaggggaagctgagcctgggcgcgcggatcctgcaggccggcggggtggagcgcgtgttccgccaggccttctccgccgccgacaagggcgagcggctgctcaaggcgctgcagtgctacatctacaccacgggcgggcccatcgccggcatgctcttcgtctccaccaggaaggtcgccttccgcagcgaccgccccatcaccgtcacctcccccggcggcggcggcgacacggcgcgggtcacctacaaggtggccatcccgctgcggaggatccgcagggtgcggcccagcgagaacgtccacaggcccgaggagaagtacatccacgtctccaccgtcgacggcttcgagttctggttcatgggcttcgtcagctaccagaggtcgtgcaagtacatgcagcaggccgtctcggagatgcgatgaccggtgtctgtatcgctgccccctgtcggaacgatgtgaagtgactaggatgttatgggtctcgcttcgccatcttttgtcgccaagcagccgtagctaaaaagattgccctgtctttaattttggatcggtgcaattgtgttccttccgcgtacgaatttggaccagcatctctgttgttcccaaagtggttgctctcgatctactagtacacatggaccgaaaaaattaaccatttgtgcatctttgttgaatgcaacagttctatgtgtttctg

SEQ ID NO: 3552 - protein, 277 aa, Zea mays subsp. mays
  peptide (1)..(277): Ceres Seq. ID no. 12410150
MAAIGSCTPVPIPDSLHAKPRNATQLAMTMKSSSGGGHVIGVPVTSKAHGIEEVSRDPSFGKGAGDHLAVSLTHPSPYASFGYKHTGSKGQVTHWVSKLSRRAQGFREHVTLGAEAVGDGEGEAEPGRADPAGRRGGARVPPGLLRRRQGRAAAQGAAVLHLHHGRAHRRHALRLHQEGRLPQRPPHHRHLPRRRRRHGAGHLQGGHPAAEDPQGAAQRERPQARGEVHPRLHRRRLRVLVHGLRQLPEVVQVHAAGRLGDAMTGVCIAAPCRNDVK

SEQ ID NO: 3553 - protein, 250 aa, Zea mays subsp. mays
  peptide (1)..(250): Ceres Seq. ID no. 12410151
MTMKSSSGGGHVIGVPVTSKAHGIEEVSRDPSFGKGAGDHLAVSLTHPSPYASFGYKHTGSKGQVTHWVSKLSRRAQGFREHVTLGAEAVGDGEGEAEPGRADPAGRRGGARVPPGLLRRRQGRAAAQGAAVLHLHHGRAHRRHALRLHQEGRLPQRPPHHRHLPRRRRRHGAGHLQGGHPAAEDPQGAAQRERPQARGEVHPRLHRRRLRVLVHGLRQLPEVVQVHAAGRLGDAMTGVCIAAPCRNDVK

SEQ ID NO: 3554 - protein, 248 aa, Zea mays subsp. mays
  peptide (1)..(248): Ceres Seq. ID no. 12410152
MKSSSGGGHVIGVPVTSKAHGIEEVSRDPSFGKGAGDHLAVSLTHPSPYASFGYKHTGSKGQVTHWVSKLSRRAQGFREHVTLGAEAVGDGEGEAEPGRADPAGRRGGARVPPGLLRRRQGRAAAQGAAVLHLHHGRAHRRHALRLHQEGRLPQRPPHHRHLPRRRRRHGAGHLQGGHPAAEDPQGAAQRERPQARGEVHPRLHRRRLRVLVHGLRQLPEVVQVHAAGRLGDAMTGVCIAAPCRNDVK

SEQ ID NO: 3555 - DNA, 1448 bp, Zea mays subsp. mays
  misc_feature (1)..(1448): Ceres Seq. ID no. 12343332
  misc_feature (1)..(1448): Ortholog of  Ceres SEQ ID NO 15169358 as cited in SEQ ID NO 53739
  misc_feature (1)..(1448): Ortholog of  Ceres SEQ ID NO 14313591 as cited in SEQ ID NO 60400
aacgagtctaaaccactgaaaaaaaggctcctgtatctcccatagtcccatcttcttgcagccgaagcaaagtgagggcggcgagatgaacggcggcggggaggacgggaagcagcagccgcacctggtactggcgcacaagctgttcctcctgtcgcactccgacgtcgacgacctcgccaaggtcgacctacgcgctgacgtgttcgcggcagtcaaatccgatgacatggcagctctgtacgagtcgttggcggcggacggcgtactggagacggacgcggcgctgctggccgagatgcgcgccaggatcgacgaggagatccggaagctcgacgagaagattgctgatgcagaggagaacttgggtgagagtgaagtgcgtgaggcccatctcgccaaatccttatatttcataagggttggggagaaggagaaagcactggagcagcttaaagttactgaaggaaaaactgtagctgttgggcaaaagatggaccttgttttctacacactacaaataggattgttctatatggactttgatctcatctcgaagtccattgacaaagcgaaaaacttgtttgaggaaggtggtgattgggaaaggaagaacagattgaaagtatatgaagggttgtactgcatggcaactagaaacttcaagaaagctgctagtttattcttggattcaatttcaactttcacgacatatgagctattcacatatgatacattcatcttctacacagtcctcacgagtgttatatctctggaccgtgtatctctgaaacaaaaggttgtagatgcacctgagatcttagccgtaattggcaaagtacctcacctctcagagtttctcaattccctctacaattgccagtacaagtcattttttattgcattctctggcttgactgaaccaatcaagttagagcgttacttgcagcctcattttcgctactacatgcgtgaagtgcgcactgttgtctactcacagtttctggaatcgtacaagagtgtgacaatggaagccatggctgctgcatttggcgttacagtcgactttatagaccaggaactgtcacgcttcattgccgctgggaagctccactgcaagatagacaaagttgctggcgtcttggaaacgaaccgacctgatgctaggaacgccttctaccaggcaaccatcaagcaaggagactttttgctgaaccgcatccagaagctgtcacgagttatcgacctgtaggggagagcccttcatgcaggagcttgccttggttcctggagtgtacgggcggtgcttgactttcaatgggtctcagttgaagaagcttttagggatatttgtgttctgagaaattgtgttctgcactttttagcctaactacatgaagccccaaaaaaaattcatggcgttgcttgtagacgtctcttcattgatg

SEQ ID NO: 3556 - protein, 388 aa, Zea mays subsp. mays
  peptide (1)..(388): Ceres Seq. ID no. 12343333
MNGGGEDGKQQPHLVLAHKLFLLSHSDVDDLAKVDLRADVFAAVKSDDMAALYESLAADGVLETDAALLAEMRARIDEEIRKLDEKIADAEENLGESEVREAHLAKSLYFIRVGEKEKALEQLKVTEGKTVAVGQKMDLVFYTLQIGLFYMDFDLISKSIDKAKNLFEEGGDWERKNRLKVYEGLYCMATRNFKKAASLFLDSISTFTTYELFTYDTFIFYTVLTSVISLDRVSLKQKVVDAPEILAVIGKVPHLSEFLNSLYNCQYKSFFIAFSGLTEPIKLERYLQPHFRYYMREVRTVVYSQFLESYKSVTMEAMAAAFGVTVDFIDQELSRFIAAGKLHCKIDKVAGVLETNRPDARNAFYQATIKQGDFLLNRIQKLSRVIDL

SEQ ID NO: 3557 - protein, 340 aa, Zea mays subsp. mays
  peptide (1)..(340): Ceres Seq. ID no. 12343334
MAALYESLAADGVLETDAALLAEMRARIDEEIRKLDEKIADAEENLGESEVREAHLAKSLYFIRVGEKEKALEQLKVTEGKTVAVGQKMDLVFYTLQIGLFYMDFDLISKSIDKAKNLFEEGGDWERKNRLKVYEGLYCMATRNFKKAASLFLDSISTFTTYELFTYDTFIFYTVLTSVISLDRVSLKQKVVDAPEILAVIGKVPHLSEFLNSLYNCQYKSFFIAFSGLTEPIKLERYLQPHFRYYMREVRTVVYSQFLESYKSVTMEAMAAAFGVTVDFIDQELSRFIAAGKLHCKIDKVAGVLETNRPDARNAFYQATIKQGDFLLNRIQKLSRVIDL

SEQ ID NO: 3558 - protein, 317 aa, Zea mays subsp. mays
  peptide (1)..(317): Ceres Seq. ID no. 12343335
MRARIDEEIRKLDEKIADAEENLGESEVREAHLAKSLYFIRVGEKEKALEQLKVTEGKTVAVGQKMDLVFYTLQIGLFYMDFDLISKSIDKAKNLFEEGGDWERKNRLKVYEGLYCMATRNFKKAASLFLDSISTFTTYELFTYDTFIFYTVLTSVISLDRVSLKQKVVDAPEILAVIGKVPHLSEFLNSLYNCQYKSFFIAFSGLTEPIKLERYLQPHFRYYMREVRTVVYSQFLESYKSVTMEAMAAAFGVTVDFIDQELSRFIAAGKLHCKIDKVAGVLETNRPDARNAFYQATIKQGDFLLNRIQKLSRVIDL

SEQ ID NO: 3559 - DNA, 1535 bp, Zea mays subsp. mays
  misc_feature (1)..(1535): Ceres Seq. ID no. 12410145
  misc_feature (1)..(1535): Ortholog of  Ceres SEQ ID NO 12589744 as cited in SEQ ID NO 325
  misc_feature (1)..(1535): Ortholog of  Ceres SEQ ID NO 14316239 as cited in SEQ ID NO 54472
  misc_feature (1)..(1535): Ortholog of  Ceres SEQ ID NO 13654809 as cited in SEQ ID NO 62798
gcacggcacacatcatcctagcaaacgtccttatccggctacaactttcgcgacgtctgcgacatcagaaaactgagctcgccccctcttgccttccctcctccgccggaccgctgctgtccgcctccaaccctccagttcgacgcaggcggcgacggcggcgcgccgagatgaaggtctccgtgaagacgctcaagggatctagcttccagatcgaagtggagcccaccgacaaggttgctgctgtgaaaaaggtcatagagaatatgcaagagcaggcttcctatccagctgaccaacaagtccttatacatcaaggaaaggtgctcagcgatgacaccacattagaggaaaatcaagtgactgagaataatttccttgttataatgctcagacagaacaagggatcatcaagtgcagcaccggctaagacaactgcgaatcaggcacctcctactcagacagtgcctgttgttccacctcaaacgtcagcagccccagctgcaccagcacctattgtacctgtcagtgcactggctgcaactgctacagcctcagcagctcctgctgttgctgtatccaccgaggcagatagttatggtcaggctgcctcaaacctagttgctggcagcaacttggaaggaacaattcaatccattcttgaaatgggtggcgggatatgggacagagacactgtactacgtgccctgcgggttgcgtataacaacccagagcgcgctgttgagtacttatattctgggattcctgaacaaatggatgttcctacatcacctccgagtatccagccagtcaatcctgtccaggctgcacaagcagctcaaactgcagctccatctggaccaaatgctaaccctctagacctctttccccaatctcttccgaatgcttccgccaatgctggcacaggaaaccttgatgttttgcgcaataacgtacaattccaaaacctgcttggtttggtgcaggctaatcctcagattttgcagccattgcttcaagaattgggtaaacaaaatccccaggttatgcagctaatccaggaaaaccaagcagagttcatgcggatgatcaatgaaccacttgagggagacgaagagaatgaaatgatgctggaccagatggcggatgcagctgagaccattgcagtgactccagaggagaacgaagctatacttcgtcttgaagggatgggctttgaccgggcactggtcctggaagtgttcttcgcgtgcaacaagaatgagcagctgaccgccaactacctcttggatcacatgcacgagttcgacaacgatgacgggctcggagggccaccgctatgagggcgctctcgatccctacatcatgcgaacgaaggctgtagggcagtagtaggaaaacgttttgggattcgtcccgtctgttcgctcactctacatattcgtttggctttgctgtttagtacagaatttctagatttacggacttactacttgatatcctgatatagaggtcacggccaagcttactttttc

SEQ ID NO: 3560 - protein, 446 aa, Zea mays subsp. mays
  peptide (1)..(446): Ceres Seq. ID no. 12410146
TAHIILANVLIRLQLSRRLRHQKTELAPSCLPSSAGPLLSASNPPVRRRRRRRRAEMKVSVKTLKGSSFQIEVEPTDKVAAVKKVIENMQEQASYPADQQVLIHQGKVLSDDTTLEENQVTENNFLVIMLRQNKGSSSAAPAKTTANQAPPTQTVPVVPPQTSAAPAAPAPIVPVSALAATATASAAPAVAVSTEADSYGQAASNLVAGSNLEGTIQSILEMGGGIWDRDTVLRALRVAYNNPERAVEYLYSGIPEQMDVPTSPPSIQPVNPVQAAQAAQTAAPSGPNANPLDLFPQSLPNASANAGTGNLDVLRNNVQFQNLLGLVQANPQILQPLLQELGKQNPQVMQLIQENQAEFMRMINEPLEGDEENEMMLDQMADAAETIAVTPEENEAILRLEGMGFDRALVLEVFFACNKNEQLTANYLLDHMHEFDNDDGLGGPPL

SEQ ID NO: 3561 - protein, 390 aa, Zea mays subsp. mays
  peptide (1)..(390): Ceres Seq. ID no. 12410147
MKVSVKTLKGSSFQIEVEPTDKVAAVKKVIENMQEQASYPADQQVLIHQGKVLSDDTTLEENQVTENNFLVIMLRQNKGSSSAAPAKTTANQAPPTQTVPVVPPQTSAAPAAPAPIVPVSALAATATASAAPAVAVSTEADSYGQAASNLVAGSNLEGTIQSILEMGGGIWDRDTVLRALRVAYNNPERAVEYLYSGIPEQMDVPTSPPSIQPVNPVQAAQAAQTAAPSGPNANPLDLFPQSLPNASANAGTGNLDVLRNNVQFQNLLGLVQANPQILQPLLQELGKQNPQVMQLIQENQAEFMRMINEPLEGDEENEMMLDQMADAAETIAVTPEENEAILRLEGMGFDRALVLEVFFACNKNEQLTANYLLDHMHEFDNDDGLGGPPL

SEQ ID NO: 3562 - protein, 358 aa, Zea mays subsp. mays
  peptide (1)..(358): Ceres Seq. ID no. 12410148
MQEQASYPADQQVLIHQGKVLSDDTTLEENQVTENNFLVIMLRQNKGSSSAAPAKTTANQAPPTQTVPVVPPQTSAAPAAPAPIVPVSALAATATASAAPAVAVSTEADSYGQAASNLVAGSNLEGTIQSILEMGGGIWDRDTVLRALRVAYNNPERAVEYLYSGIPEQMDVPTSPPSIQPVNPVQAAQAAQTAAPSGPNANPLDLFPQSLPNASANAGTGNLDVLRNNVQFQNLLGLVQANPQILQPLLQELGKQNPQVMQLIQENQAEFMRMINEPLEGDEENEMMLDQMADAAETIAVTPEENEAILRLEGMGFDRALVLEVFFACNKNEQLTANYLLDHMHEFDNDDGLGGPPL

SEQ ID NO: 3563 - DNA, 1486 bp, Zea mays subsp. mays
  misc_feature (1)..(1486): Ceres Seq. ID no. 12406450
  misc_feature (1)..(1486): Ortholog of  Ceres SEQ ID NO 15175496 as cited in SEQ ID NO 56127
  misc_feature (1)..(1486): Ortholog of  Ceres SEQ ID NO 13639124 as cited in SEQ ID NO 56718
  misc_feature (1)..(1486): Ortholog of  Ceres SEQ ID NO 13596474 as cited in SEQ ID NO 62169
  misc_feature (1)..(1486): Ortholog of  Ceres SEQ ID NO 13598714 as cited in SEQ ID NO 62656
  misc_feature (1)..(1486): Ortholog of  Ceres SEQ ID NO 13597519 as cited in SEQ ID NO 64759
  misc_feature (1)..(1486): Ortholog of  Ceres SEQ ID NO 13597870 as cited in SEQ ID NO 64982
  misc_feature (1)..(1486): Ortholog of  Ceres SEQ ID NO 13656123 as cited in SEQ ID NO 65212
actagctccactccaccacacacaccgcgcagctagctgtcaccggagcaagaaggaagaaaaaccagcggcaccgatcgatcgacgacacgcgcgcgatcgaggtgaggagcgaaagaaaaggtggccttttcgaagccgccggacggagtgtagcgctagctagctccccaggccggagaggaggatggtgggacgaggagcggcgacggccctcgtgtgggcggcggtggtggcggtcgcgacggtggtgtcgcgggcgcagcagctgcaggtggggttctacgacacgctgtgcccggcggcggagatcatcgtgcaggaggaggtgagcaaggcggcgtccggcaaccccggcgtcgccgcgggcctcctgcgcctccacttccacgactgcttcgtcagggggtgcgacgcgtcggtgctgctggactcgtcggcgggcaaccaggcggagaaggacgcggcgcccaacgccagcctgcgcgggttcgaggtcatcgacagcgccaagacgcggctggagcaggcctgcttcggcgtcgtctcctgcgccgacgtcctcgccttcgccgcccgcgacgccctcgcgctggtcgggggcgacgcgtaccaggtgccggcggggcggagggacggcaacgtctcctcggcgcaggaggcgggcgcgaacctgccgccgccgacggcgagcgcgagccagctgacgcaggcgttcggcgccaaggggctgagccaggccgagatggtggcgctgtcgggggcgcacacggtgggcgcggcgcgctgcagctccttcgcgccccgcctctactcgtacgggcccagcggcgcggggcaggacccgtccatggaccccgcgtacctggcggcgctggcgcagcagtgcccgccgcaggggaccggcgccgccgacccgcccctccccatggaccccgtcacgcccaccgccttcgacaccaactactacgccaacctggtcgccaggcgcggcctgctcgcctccgaccaggcgctgctcgccgacccggccaccgccgcgcaggtgctcgcctacaccaacagccccgccaccttccagaccgacttcgtcgccgccatgatcaagatgggtgccatacaggtgctcaaccggcacagccggcaccgtccggaccaactgcagggtggctagctagctagctcatccatgagaatgtacctgtanactcatgtgcttaaaatcatacgacgaaactgtacgtacggcgtagagtggtgtggcggggtccaatgattcagattgtacgtacgtgtccatcgatccaactgtagttgtgtacgcagtacagtacgtgctagctacggatcagttgcttatatatagcttgtgcgtttttttacactttcttttgtccttttggtttataatttttattaagatatacaaatatttctcttcagattcggatcgaatacaaatattaaaaatggttcgttctttttc

SEQ ID NO: 3564 - protein, 328 aa, Zea mays subsp. mays
  peptide (1)..(328): Ceres Seq. ID no. 12406451
MVGRGAATALVWAAVVAVATVVSRAQQLQVGFYDTLCPAAEIIVQEEVSKAASGNPGVAAGLLRLHFHDCFVRGCDASVLLDSSAGNQAEKDAAPNASLRGFEVIDSAKTRLEQACFGVVSCADVLAFAARDALALVGGDAYQVPAGRRDGNVSSAQEAGANLPPPTASASQLTQAFGAKGLSQAEMVALSGAHTVGAARCSSFAPRLYSYGPSGAGQDPSMDPAYLAALAQQCPPQGTGAADPPLPMDPVTPTAFDTNYYANLVARRGLLASDQALLADPATAAQVLAYTNSPATFQTDFVAAMIKMGAIQVLNRHSRHRPDQLQGG

SEQ ID NO: 3565 - DNA, 1381 bp, Zea mays subsp. mays
  misc_feature (1)..(1381): Ceres Seq. ID no. 12364411
  misc_feature (1)..(1381): Ortholog of  Ceres SEQ ID NO 12612470 as cited in SEQ ID NO 55136
  misc_feature (1)..(1381): Ortholog of  Ceres SEQ ID NO 12612425 as cited in SEQ ID NO 56789
  misc_feature (1)..(1381): Ortholog of  Ceres SEQ ID NO 13503512 as cited in SEQ ID NO 65121
gcacgagaccattacctagaacatcctaatcgaaaaatcatccgtttctgtcagttccttttctaaaagaaaaaaatacagtcgcatctcgcctccagcagggtgagttcgcctcggcagggtgtggcataccatggagagctcgtcgccgtcagtgccgttcccgctgctgcaggcgccggtcgagagcacctaccgcgcctgcaccatcccctaccgtttcccctccgacaacccgcgcaaggccacccctgtcgagatccaatggattgacctctttctcaactctgtcccgtccttcaaacagcgggcggagaacgaccccaccgtacccgatgcgcccgcgaaagcggagaagttcgcgcagaggtacacgtcaatgcttgaagagttgaagaagaatccggagagccatggaggaccaccagattgcatacttctttgtaggcttcgtgagctagtactcagagagctgggatttagggatatcttcaagaaggtcaaggatgaggagaatgccaaggctatgtcactttttgagggagttattaagcggaatgacgaaattgaggatgacggcaaaagaattgagaacttggtccgtggaattttagctggaaacatttttgatctaggatctgcacagcttgcagaagtttttgctaaagatggcatgtcatttttggcaagttgccagaatcttgtatctcgaccatgggttattgatgaccttgatgcttttaagagtaaatggaccaagaaatcatgggaaaaggcagttatttttgttgataactctggtgctgatattatcttgggtatattaccatttgcgagggagttgctccgacgtggcacaaaggtgatacttgctgctaatgatatgccttcgatcaacgatgtcacgtatccagagcttgttgagattataaacaagctcaaggatgcagatggaaaactatcaagtgtggacgcatctggcctccttgttgccaactctggcaacgatctgcctgtaattgatttgtctagtgtatcaccagagcttgcctttatggcaaatgatgctgacctggtggtgctcgaaggcatgggaagggcaattgaaactaacctatatgcgcagatgaaatgtgactcgatcaagattggaatggttaagcatcctgaggtcgcccaatttttaggaggaagactttatgattgcgtcttcaagttcaatgaggcctgaactacgagatacatttgataacacaataccggccgcactagtggtggcttagttctccccaagatcagcttgttaggtgttgcactgaacataattttgttagtatcagcaataatttcaatcaaaataagctacgtatatgtggtggtt

SEQ ID NO: 3566 - protein, 365 aa, Zea mays subsp. mays
  peptide (1)..(365): Ceres Seq. ID no. 12364412
MESSSPSVPFPLLQAPVESTYRACTIPYRFPSDNPRKATPVEIQWIDLFLNSVPSFKQRAENDPTVPDAPAKAEKFAQRYTSMLEELKKNPESHGGPPDCILLCRLRELVLRELGFRDIFKKVKDEENAKAMSLFEGVIKRNDEIEDDGKRIENLVRGILAGNIFDLGSAQLAEVFAKDGMSFLASCQNLVSRPWVIDDLDAFKSKWTKKSWEKAVIFVDNSGADIILGILPFARELLRRGTKVILAANDMPSINDVTYPELVEIINKLKDADGKLSSVDASGLLVANSGNDLPVIDLSSVSPELAFMANDADLVVLEGMGRAIETNLYAQMKCDSIKIGMVKHPEVAQFLGGRLYDCVFKFNEA

SEQ ID NO: 3567 - protein, 283 aa, Zea mays subsp. mays
  peptide (1)..(283): Ceres Seq. ID no. 12364413
MLEELKKNPESHGGPPDCILLCRLRELVLRELGFRDIFKKVKDEENAKAMSLFEGVIKRNDEIEDDGKRIENLVRGILAGNIFDLGSAQLAEVFAKDGMSFLASCQNLVSRPWVIDDLDAFKSKWTKKSWEKAVIFVDNSGADIILGILPFARELLRRGTKVILAANDMPSINDVTYPELVEIINKLKDADGKLSSVDASGLLVANSGNDLPVIDLSSVSPELAFMANDADLVVLEGMGRAIETNLYAQMKCDSIKIGMVKHPEVAQFLGGRLYDCVFKFNEA

SEQ ID NO: 3568 - protein, 234 aa, Zea mays subsp. mays
  peptide (1)..(234): Ceres Seq. ID no. 12364414
MSLFEGVIKRNDEIEDDGKRIENLVRGILAGNIFDLGSAQLAEVFAKDGMSFLASCQNLVSRPWVIDDLDAFKSKWTKKSWEKAVIFVDNSGADIILGILPFARELLRRGTKVILAANDMPSINDVTYPELVEIINKLKDADGKLSSVDASGLLVANSGNDLPVIDLSSVSPELAFMANDADLVVLEGMGRAIETNLYAQMKCDSIKIGMVKHPEVAQFLGGRLYDCVFKFNEA

SEQ ID NO: 3569 - DNA, 1389 bp, Zea mays subsp. mays
  misc_feature (1)..(1389): Ceres Seq. ID no. 13498794
  misc_feature (1)..(1389): Ortholog of  Ceres SEQ ID NO 13654054 as cited in SEQ ID NO 67735
  misc_feature (1)..(1389): Ortholog of  Ceres SEQ ID NO 15180245 as cited in SEQ ID NO 0
gcattgagcgcgattcattcccctcgtgggctcccagttcagtaaaccctacgccctgcggcacacacccatctcgccgcgccgccgcgtaaaccccacccgagcccatctcgccctcgcgcctccccgccctcgcgcaggcgcaacaatggcggccgcctcgaggggcctgctcgcgcgcctccgtgtcctctcactctccggcggcgggagcccgtggctccgcttccccgccttcccggctcttctccgcggaggccttcgtctcccattccgatgacgacgacgctgggggcgagggaggaggcgggggccggatcatcgaggcacggtccggggtgatgggccccacctcgcggcgcaccggcgtcatcggcgtcaagtgcgggatgtcggcgatgtgggacaagtggggcgccaaggtgcccatcaccgtcctctgggtcgacgacaacgttgttacccaggtcaagaccgccgagaaggagggtttcttcgccctacagcttggagcaggtcaaaagaaggaaaaacacctaacaaagcctgaagttggccactttagagcacagggagtgcctctgaaaagaaagctaagggaatttcctgtcactgaggatgcgcttcttcctgttggcacaagcatcacagttcgtcactttgttcctggacaatttgttgatgtcactggaatcacgaaggggaaaggttttgcaggtgtaatgaaaagatatggttttggtgggatgcctgcatcacatggaacatctttggcgcatcgcagtggtggctctactggtcaaagagatgctcctggaagggttttcaaaaacagaaaaatgcctggacgcatgggtggtgtgcaacgcacagtgaagaatgtatgggtctatcaaatagacccagccaggaacttactgtatctgaagggccaggttcctggtcctcaaggtagctttattttcgttaaggattctatatataagaaacctgacacggctttgctcccatttcctacatacttcacgcgtgaaggtgagcctgaagacttggagcccctgattgctgatcttggtgatgttgacccattcatggcagccgattaagacaatgcacaaagttggttaattcctttttgtgttctaagcactccttgagctcgtccattccacgagattgtcaaactctcgatggatgtgagcagttcctgaatcacaagctttatccggttactggccagcctgatcaatgttgttccatgtacattacctggcaagtataccagtgctctaatggtttttagatgattgttttgattgaccgaatataacctttttctcaataagttgtacgcggagccacaagtagtatataaaatcagaatatttc

SEQ ID NO: 3570 - protein, 254 aa, Zea mays subsp. mays
  peptide (1)..(254): Ceres Seq. ID no. 13498795
MGPTSRRTGVIGVKCGMSAMWDKWGAKVPITVLWVDDNVVTQVKTAEKEGFFALQLGAGQKKEKHLTKPEVGHFRAQGVPLKRKLREFPVTEDALLPVGTSITVRHFVPGQFVDVTGITKGKGFAGVMKRYGFGGMPASHGTSLAHRSGGSTGQRDAPGRVFKNRKMPGRMGGVQRTVKNVWVYQIDPARNLLYLKGQVPGPQGSFIFVKDSIYKKPDTALLPFPTYFTREGEPEDLEPLIADLGDVDPFMAAD

SEQ ID NO: 3571 - protein, 238 aa, Zea mays subsp. mays
  peptide (1)..(238): Ceres Seq. ID no. 13498796
MSAMWDKWGAKVPITVLWVDDNVVTQVKTAEKEGFFALQLGAGQKKEKHLTKPEVGHFRAQGVPLKRKLREFPVTEDALLPVGTSITVRHFVPGQFVDVTGITKGKGFAGVMKRYGFGGMPASHGTSLAHRSGGSTGQRDAPGRVFKNRKMPGRMGGVQRTVKNVWVYQIDPARNLLYLKGQVPGPQGSFIFVKDSIYKKPDTALLPFPTYFTREGEPEDLEPLIADLGDVDPFMAAD

SEQ ID NO: 3572 - protein, 235 aa, Zea mays subsp. mays
  peptide (1)..(235): Ceres Seq. ID no. 13498797
MWDKWGAKVPITVLWVDDNVVTQVKTAEKEGFFALQLGAGQKKEKHLTKPEVGHFRAQGVPLKRKLREFPVTEDALLPVGTSITVRHFVPGQFVDVTGITKGKGFAGVMKRYGFGGMPASHGTSLAHRSGGSTGQRDAPGRVFKNRKMPGRMGGVQRTVKNVWVYQIDPARNLLYLKGQVPGPQGSFIFVKDSIYKKPDTALLPFPTYFTREGEPEDLEPLIADLGDVDPFMAAD

SEQ ID NO: 3573 - DNA, 1255 bp, Zea mays subsp. mays
  misc_feature (1)..(1255): Ceres Seq. ID no. 12347891
  misc_feature (1)..(1255): Ortholog of  Ceres SEQ ID NO 13639250 as cited in SEQ ID NO 56555
  misc_feature (1)..(1255): Ortholog of  Ceres SEQ ID NO 15177034 as cited in SEQ ID NO 60024
  misc_feature (1)..(1255): Ortholog of  Ceres SEQ ID NO 13598257 as cited in SEQ ID NO 63008
  misc_feature (1)..(1255): Ortholog of  Ceres SEQ ID NO 13597309 as cited in SEQ ID NO 63851
  misc_feature (1)..(1255): Ortholog of  Ceres SEQ ID NO 12599167 as cited in SEQ ID NO 64443
cttcccttcctccttccttcccaggagccaggaactccattgcattatttccaccccaagaacacagcacagagtcggatccgaatccacaggagaggcataagcacaactcactccccactccccactcatcagtccctccacccatcagctagccatgggcaaggactgcggcaaacacggcgacgacgacctccggcgctcgtgcaggcgcctgctagccatcctcgtggtcctcgcgctgaccgttggcgtcgtcgcgctgatcgtctacctggtgctccgccccacgcacccgcgcttctacctgcaggacgcgtcgctccggcagctggacctctccaacgccaccaccagcaccagcaccagcaccctgctctccaccgcgatccaggtgacgctggcgtcgcgcaacccgaacgagcgcgtcggggtctactacgaccgcctcgacgtgtacgcgtcgtacaagtaccagcagctcacggtggcggcgtcgctgccgcccgcgtaccagggccacggggacgtcggcgtctggtcgccggtgctggccggtcccaacgtgcccctcgcgccctacctcgccgacgcgctccgccaggactgccaggcggggtacctcgtcctccaggtcaagctcgacggccgcgtccgctggaaggtcggcagctgcgtctccagccactaccacctcttcgtcacctgcccggccttcctcgtcaccgccggcggcaacggcgcgcccggggccgccgggttcaggttccagaccaccacctactgccacgtcgaggtctaggtctaggtctagccggccccttgcctgtctgtgctgctgtgttgtccgtactccgtatacaaacagaggccgccgcctgcgaaggaaacagagatacaaaggcctgccttgcgccatatatcatgggatggctgcctgtctccctcactctctctctctctctctcagctgcactgcctgcattgctggtgtgttactgctgcagttatgcggacgtaaaggatggtaaaaatttcctactttttttcttcttcttttaagtaagattctcctttaacgtacgatcaattacagttggaggggtagcagtaacagtaatttctatgtccagccatttcggtgagactactttcaacacagagaaaaccgattgtacctttgcgcgtctctcttaattaagtcttatgactgatttggtaatcagagaattgaatagaaatgaaatttctctcc

SEQ ID NO: 3574 - protein, 353 aa, Zea mays subsp. mays
  peptide (1)..(353): Ceres Seq. ID no. 12347892
LPFLLPSQEPGTPLHYFHPKNTAQSRIRIHRRGISTTHSPLPTHQSLHPSASHGQGLRQTRRRRPPALVQAPASHPRGPRADRWRRRADRLPGAPPHAPALLPAGRVAPAAGPLQRHHQHQHQHPALHRDPGDAGVAQPERARRGLLRPPRRVRVVQVPAAHGGGVAAARVPGPRGRRRLVAGAGRSQRAPRALPRRRAPPGLPGGVPRPPGQARRPRPLEGRQLRLQPLPPLRHLPGLPRHRRRQRRARGRRVQVPDHHLLPRRGLGLGLAGPLPVCAAVLSVLRIQTEAAACEGNRDTKACLAPYIMGWLPVSLTLSLSLSAALPALLVCYCCSYADVKDGKNFLLFFFFF

SEQ ID NO: 3575 - protein, 214 aa, Zea mays subsp. mays
  peptide (1)..(214): Ceres Seq. ID no. 12347893
MGKDCGKHGDDDLRRSCRRLLAILVVLALTVGVVALIVYLVLRPTHPRFYLQDASLRQLDLSNATTSTSTSTLLSTAIQVTLASRNPNERVGVYYDRLDVYASYKYQQLTVAASLPPAYQGHGDVGVWSPVLAGPNVPLAPYLADALRQDCQAGYLVLQVKLDGRVRWKVGSCVSSHYHLFVTCPAFLVTAGGNGAPGAAGFRFQTTTYCHVEV

SEQ ID NO: 3576 - DNA, 779 bp, Zea mays subsp. mays
  misc_feature (1)..(779): Ceres Seq. ID no. 13492985
  misc_feature (1)..(779): Ortholog of  Ceres SEQ ID NO 13661065 as cited in SEQ ID NO 60947
ccacctcaattattgcccacccatccccgctccctcctctcctctcctcccgtcccacccatctcctcgcaccagcgccggggaaatggcggccgcgctgtggacgctgctgctggtggtggccctgtcggcggcgctggcgctggcctcgaaccgccccgtggcggcggcggcgaccgcggcggcggaggcggcgaacgaggtgctccgcgcgcaccagctgccggggggcctgctgccggcggggatcacggcgttccggcacgacgccgccacgggagcgttcgaggcccggctggacgcgccctgcacggcgcgcttcgaggtcggcctccgctacaacgccaccgtctccggggtcatcagccccggccagatcgccgacatctccggcgtcgccgcgcaggacctcttcatgtggttccccgtccacgacatcaaggtcgacatcccctcctccggcgtcatctacttcaacgtcggcgtcgtcaagaagcacctcccgctcgccgtcttcgacgcgccgccggcctgcacgcccgacccgctcctgcaggtcatttctcatcctagcctcactctctcgatggcacgagctctaattcatcgatcttgggaccagtgacctccttgacatcattcaatcctcaatgatcttgaatgttggcacaacctttatacccagtttctttactgaaagctgcaagtagcatgcgcaggagcttttcagcatgtcatattccacggagcagagagtcgtgaatacacaagagatacgg

SEQ ID NO: 3577 - protein, 207 aa, Zea mays subsp. mays
  peptide (1)..(207): Ceres Seq. ID no. 13492986
HLNYCPPIPAPSSPLLPSHPSPRTSAGEMAAALWTLLLVVALSAALALASNRPVAAAATAAAEAANEVLRAHQLPGGLLPAGITAFRHDAATGAFEARLDAPCTARFEVGLRYNATVSGVISPGQIADISGVAAQDLFMWFPVHDIKVDIPSSGVIYFNVGVVKKHLPLAVFDAPPACTPDPLLQVISHPSLTLSMARALIHRSWDQ

SEQ ID NO: 3578 - protein, 199 aa, Zea mays subsp. mays
  peptide (1)..(199): Ceres Seq. ID no. 13492987
TSIIAHPSPLPPLLSSRPTHLLAPAPGKWRPRCGRCCWWWPCRRRWRWPRTAPWRRRRPRRRRRRTRCSARTSCRGACCRRGSRRSGTTPPRERSRPGWTRPARRASRSASATTPPSPGSSAPARSPTSPASPRRTSSCGSPSTTSRSTSPPPASSTSTSASSRSTSRSPSSTRRRPARPTRSCRSFLILASLSRWHEL

SEQ ID NO: 3579 - protein, 190 aa, Zea mays subsp. mays
  peptide (1)..(190): Ceres Seq. ID no. 13492988
PPQLLPTHPRSLLSSPPVPPISSHQRRGNGGRAVDAAAGGGPVGGAGAGLEPPRGGGGDRGGGGGERGAPRAPAAGGPAAGGDHGVPARRRHGSVRGPAGRALHGALRGRPPLQRHRLRGHQPRPDRRHLRRRRAGPLHVVPRPRHQGRHPLLRRHLLQRRRRQEAPPARRLRRAAGLHARPAPAGHFSS

SEQ ID NO: 3580 - protein, 179 aa, Zea mays subsp. mays
  peptide (1)..(179): Ceres Seq. ID no. 13492989
MAAALWTLLLVVALSAALALASNRPVAAAATAAAEAANEVLRAHQLPGGLLPAGITAFRHDAATGAFEARLDAPCTARFEVGLRYNATVSGVISPGQIADISGVAAQDLFMWFPVHDIKVDIPSSGVIYFNVGVVKKHLPLAVFDAPPACTPDPLLQVISHPSLTLSMARALIHRSWDQ

SEQ ID NO: 3581 - DNA, 2009 bp, Zea mays subsp. mays
  misc_feature (1)..(2009): Ceres Seq. ID no. 12372657
  misc_feature (1)..(2009): Ortholog of  Ceres SEQ ID NO 14316204 as cited in SEQ ID NO 59644
gcacgagaccattacctagaacatcctaatcaaaactgttcacggccctcgccaaatccccaaaatccaagcgcgtcgccgacggcattgcgtcgccattgcctccaaatccgtgtgcgactcgcgtgatcccagatcccgctcgccgtattccccgcagtgacctctgacaagagcattttccgcgcggaaaatgccgccgtttcggccggctcttggaagggcgcttcttctgtaggaccgcggcgcgaggctgcgatggcgttcgccgccagcgagggaaatctttccccggcgctgcccctggccactctgatcggccgcgagctccgcggcgacggtaccgagcgcccgcacgtgcgctacggccactctggcttcgccaagcgcggcgaggactacttcctcgtcaagcccgactgcctccgcgtccccggagacccttcctcctctttctccgtcttcgctgtattcgacggccacaatggcgtgtcggcggcggtgttcagcaaggagaaactgctggagcacgtgatgagcgcggtgcccgagggcatcagtcgcgaggactggctacaggcgctgccgcgcgcgctcgtcgcaggattcgtcaagacagacattgacttccagcgcaagggtgagacgtcaggaacgacggcgacacttgttgtggttgatgggttcacggtcactgtcgcgtcggtgggagattctaggtgcattctggatacacagggaggcgaggtctcattgctgactgtggatcaccggctagaggagaatgcagaggagcgtgagcgcgtcacagcgagtggaggagaggtcagccggcttaatctctgtggtggacaggaggtgggtcctctccgatgctggccaggtggattgtgcctttcaaggtcaattggggatactgatgtcggcgagttcatcgtaccgattccacatgtcaagcaagtgaagctcccaaatactggtggaagactaataattgcatcagatggaatatgggacgctctgtcctcagagagtgctgctcaggcatgccggggattgcgtgcagaactggctgcaaaacttgttgttaagcaagctctgaagacaagtgggctgaaagatgacaccacatgtgtggttgtcgacatcatcccatctgatcattgttcaacaccaccagcattgtctccaaagaaaaatcagaacaagttgaagcatcttatttttggtaaaaggtctcatagttctgttggaaagctcagcaaatctgcttcattgggttcagtggaagaaatattcgaggagggatctgcaatgttggaagaaaggttgggaagtaattttccaccaaaagcaaatctgcctccatttcgctgtgcaatctgccaagtggaccaagagccattcgaaggtttaatgacggacaatgtaggtggctgctgctcaaccccatcaacaccatggggtggtccttatctttgctcaggctgtaggaaaaagaacgacgcgatggaaggtaaacgatcgaatcgttcaacgacgtgcaggtgaaggttctgataggaatcactgggactgggtcctgtgatcctgtcgtgcaagcttgcaaagtagtctccgatttcggttttctgctccttgtaaaaagagaagaataaaccgtctgtcgtttgattgaagtattgttcggtgaaaactaactgaactccagcctgatctgaaaaaaccggggtactaataacaagcctgatttctattgacatcccctatcaaactttcgtttgctctgagaggatagctgacagaactttgaggctgtagttttgtgaacccttagcatgtagagggaaatgagtagcttaacaatgttttatagaacgatggtgtggcttctcattgttgctttagaatgcattttgtgtttgtggagcaaaaaaaaaaaaaaaaaagcttcgggtggacccggtcaacttcaagctcctaagccactgcctgctggtgagcccatc

SEQ ID NO: 3582 - protein, 430 aa, Zea mays subsp. mays
  peptide (1)..(430): Ceres Seq. ID no. 12372658
MAFAASEGNLSPALPLATLIGRELRGDGTERPHVRYGHSGFAKRGEDYFLVKPDCLRVPGDPSSSFSVFAVFDGHNGVSAAVFSKEKLLEHVMSAVPEGISREDWLQALPRALVAGFVKTDIDFQRKGETSGTTATLVVVDGFTVTVASVGDSRCILDTQGGEVSLLTVDHRLEENAEERERVTASGGEVSRLNLCGGQEVGPLRCWPGGLCLSRSIGDTDVGEFIVPIPHVKQVKLPNTGGRLIIASDGIWDALSSESAAQACRGLRAELAAKLVVKQALKTSGLKDDTTCVVVDIIPSDHCSTPPALSPKKNQNKLKHLIFGKRSHSSVGKLSKSASLGSVEEIFEEGSAMLEERLGSNFPPKANLPPFRCAICQVDQEPFEGLMTDNVGGCCSTPSTPWGGPYLCSGCRKKNDAMEGKRSNRSTTCR

SEQ ID NO: 3583 - protein, 338 aa, Zea mays subsp. mays
  peptide (1)..(338): Ceres Seq. ID no. 12372659
MSAVPEGISREDWLQALPRALVAGFVKTDIDFQRKGETSGTTATLVVVDGFTVTVASVGDSRCILDTQGGEVSLLTVDHRLEENAEERERVTASGGEVSRLNLCGGQEVGPLRCWPGGLCLSRSIGDTDVGEFIVPIPHVKQVKLPNTGGRLIIASDGIWDALSSESAAQACRGLRAELAAKLVVKQALKTSGLKDDTTCVVVDIIPSDHCSTPPALSPKKNQNKLKHLIFGKRSHSSVGKLSKSASLGSVEEIFEEGSAMLEERLGSNFPPKANLPPFRCAICQVDQEPFEGLMTDNVGGCCSTPSTPWGGPYLCSGCRKKNDAMEGKRSNRSTTCR

SEQ ID NO: 3584 - DNA, 1135 bp, Zea mays subsp. mays
  misc_feature (1)..(1135): Ceres Seq. ID no. 12410133
  misc_feature (1)..(1135): Ortholog of  Ceres SEQ ID NO 13595782 as cited in SEQ ID NO 57677
  misc_feature (1)..(1135): Ortholog of  Ceres SEQ ID NO 13596009 as cited in SEQ ID NO 68258
gaagaatagccttgtctagcaagaagaagatagagggatgatgtgattatacgcaaaatactaaaacctagggtggtagtacaagcagtagttatgagcaggcctcttctctttctttcctgttccgttctttttctttttccctgcggaattccccttcttccctagtgcctcgattcgatatttcgattggattggattaccaagggacagagggagggaatcccacacacacctctggccctcgcgaggccaagggaagggaagcactcagcacccagcagcagaaggaccgccgtaaatggcgctgccggtggcgaagctggggaccctggcgctgcggacgctgtccaagcccatcgccagccgcctcaagagccaggccgctgtccaccccaagttccgcaacttcatcatcgccatcgcccaggcaaaccaccagatcaccacaaagatacagaggcgcatttatgagcatgccacagatgtggcgatcaggcctttggatgagcagaaagctgttcaagctgctacagatctcatcggggaagcctttatcttctcggtcgctgttgctgctctaatttttgaggttcagagaaacgcaaggtccgaggctaggaaggaggaagctcgtagacaggaacttgaggaattgaaacgaagggaagagagtatagctaaagaattggaagatcttaaattgaagcttagtgaaattgagcagcttgctaaagggcgaggcctgacaggaatcttgaacttgaaacgggtccatggcacagaggtcggcaaggcagcagcacctctgcgtgagtaagcaatccggctttggcgcaggaaagtatgattccttgtcgcccccattatttggtaagacttgtgttgtcgtgctcaacctattctttggtgctcatattggatccacatttgtagtggttgatccatggacaccctgagacagtggtaataatacagcgtaacaaagaaatcaaattaaagcgcaatatgtatgtgctacttggtggcggtgaccacaaaatcagatgttaagatggattagggcttgtttggttgtatacttaaggtgtaaaaaatgccacgtttcagattaaagctggttgtttggactgtc

SEQ ID NO: 3585 - protein, 172 aa, Zea mays subsp. mays
  peptide (1)..(172): Ceres Seq. ID no. 12410134
MALPVAKLGTLALRTLSKPIASRLKSQAAVHPKFRNFIIAIAQANHQITTKIQRRIYEHATDVAIRPLDEQKAVQAATDLIGEAFIFSVAVAALIFEVQRNARSEARKEEARRQELEELKRREESIAKELEDLKLKLSEIEQLAKGRGLTGILNLKRVHGTEVGKAAAPLRE

SEQ ID NO: 3586 - DNA, 1885 bp, Zea mays subsp. mays
  misc_feature (1)..(1885): Ceres Seq. ID no. 12365283
  misc_feature (1)..(1885): Ortholog of  Ceres SEQ ID NO 13596021 as cited in SEQ ID NO 62020
attccctactcaaacgcagccgccgagcgcctctcgcctctcgccctacaggaggcaccctacagaacccaaccaaaaagcgccggcggcaaacagaacccaacccaaagcgccggcggcaagcgaagagaaagcgccggcactaatccgacgatggacgcgtcggccggcggcggcggcaactccctgccgaccactggcgcggacgggtcgaagcgccgcgtcttctacttctacgacgcggaggtgggcaactactactacgggcagggccacccgatgaagccgcaccgcatccgcatgacccacgcgctgctcggccgctacggcctcctcgaccagatgcaagtgttccgccctcaccctgcccgcgaccgcgacctctgccgcttccacgccgacgattacgtctccttcctccggtccgtcacccccgaaacgcagcaggaccagatccgcgcgctcaagcgcttcaacgtcggcgaggactgccccgtcttcgacggtctctacagtttctgtcagacgtacgcggggggctctgttggcggcgccgtcaagctcaaccatggccatgatatcgccatcaactgggccggcggactccaccacgccaagaagtgcgaggcctccgggttttgctatgttaatgacattgtcctcgccatcctcgagctcctcaagtaccaccagcgcgttctgtacgtggacattgatatccaccacggggacggcgtggaggaggctttttataccacagaccgggtgatgacagtctcattccacaagtttggagattatttccctgggacaggggacattcgtgatgttgggcactcaaagggtaaatattactccctgaatgttcccctggacgatggtattgatgatgagagctaccagtcgttgttcaagccaataatgggcaaggtgatggaggtcttcaaccctggtgcagtcgtgctccagtgtggtgcggattcattgtcgggtgacaggttgggctgtttcaacctctctattaagggtcacgcagaatgtgtaagatttatgaggtccttcaacgtcccgctgttgctgcttggtggtggtgggtataccataagaaacgttgcacggtgttggtgctacgagacaggagttgcccttggtcatgagctcactgacaagatgccacctaatgagtactatgagtattttggtccagattacactctacatgtcgctccaagtaacatggagaataaaaacacacggcatcaattggatgacataaaatcaaaacttctagataatctttcaaaactccgacatgctcctagtgttcagtttcaagagcgatctcctgaggctgagttacctgagcaagatgaagacaaagagaatcctgatgaaagacatgatgctgattctgatgtggagatgaatgatgccaaacctttgcaggactctggaaggatgtcaatagtgtagctgcagaacattctagaggcactggacctgtggctgatggagttggttcctcgaaacaaacctttccgaatgccactagtcgaatggccatagatgaaccaaacgctcttgagagttgagcaagagggttcaaacaaattgcaggaccaaccatcgatgcacctcaagtagctaatgtcatctgtagcctgtcgattcttttgcgcaaattcattaactgtaggcaagccatgcgtggactgaagcagggagcagaagtaagtgctcgaccaagaagttgtgcatctgaaatctatattttttgcgcgtcatatttgtattaccgacagttgcaaacgatggtttaatcatgaaaaatttgtctttccacccttggcttctgcagtggaaggggttgatatcgtagtatgcg

SEQ ID NO: 3587 - protein, 490 aa, Zea mays subsp. mays
  peptide (1)..(490): Ceres Seq. ID no. 12365284
IPYSNAAAERLSPLALQEAPYRTQPKSAGGKQNPTQSAGGKRRESAGTNPTMDASAGGGGNSLPTTGADGSKRRVFYFYDAEVGNYYYGQGHPMKPHRIRMTHALLGRYGLLDQMQVFRPHPARDRDLCRFHADDYVSFLRSVTPETQQDQIRALKRFNVGEDCPVFDGLYSFCQTYAGGSVGGAVKLNHGHDIAINWAGGLHHAKKCEASGFCYVNDIVLAILELLKYHQRVLYVDIDIHHGDGVEEAFYTTDRVMTVSFHKFGDYFPGTGDIRDVGHSKGKYYSLNVPLDDGIDDESYQSLFKPIMGKVMEVFNPGAVVLQCGADSLSGDRLGCFNLSIKGHAECVRFMRSFNVPLLLLGGGGYTIRNVARCWCYETGVALGHELTDKMPPNEYYEYFGPDYTLHVAPSNMENKNTRHQLDDIKSKLLDNLSKLRHAPSVQFQERSPEAELPEQDEDKENPDERHDADSDVEMNDAKPLQDSGRMSIV

SEQ ID NO: 3588 - protein, 439 aa, Zea mays subsp. mays
  peptide (1)..(439): Ceres Seq. ID no. 12365285
MDASAGGGGNSLPTTGADGSKRRVFYFYDAEVGNYYYGQGHPMKPHRIRMTHALLGRYGLLDQMQVFRPHPARDRDLCRFHADDYVSFLRSVTPETQQDQIRALKRFNVGEDCPVFDGLYSFCQTYAGGSVGGAVKLNHGHDIAINWAGGLHHAKKCEASGFCYVNDIVLAILELLKYHQRVLYVDIDIHHGDGVEEAFYTTDRVMTVSFHKFGDYFPGTGDIRDVGHSKGKYYSLNVPLDDGIDDESYQSLFKPIMGKVMEVFNPGAVVLQCGADSLSGDRLGCFNLSIKGHAECVRFMRSFNVPLLLLGGGGYTIRNVARCWCYETGVALGHELTDKMPPNEYYEYFGPDYTLHVAPSNMENKNTRHQLDDIKSKLLDNLSKLRHAPSVQFQERSPEAELPEQDEDKENPDERHDADSDVEMNDAKPLQDSGRMSIV

SEQ ID NO: 3589 - protein, 397 aa, Zea mays subsp. mays
  peptide (1)..(397): Ceres Seq. ID no. 12365286
MKPHRIRMTHALLGRYGLLDQMQVFRPHPARDRDLCRFHADDYVSFLRSVTPETQQDQIRALKRFNVGEDCPVFDGLYSFCQTYAGGSVGGAVKLNHGHDIAINWAGGLHHAKKCEASGFCYVNDIVLAILELLKYHQRVLYVDIDIHHGDGVEEAFYTTDRVMTVSFHKFGDYFPGTGDIRDVGHSKGKYYSLNVPLDDGIDDESYQSLFKPIMGKVMEVFNPGAVVLQCGADSLSGDRLGCFNLSIKGHAECVRFMRSFNVPLLLLGGGGYTIRNVARCWCYETGVALGHELTDKMPPNEYYEYFGPDYTLHVAPSNMENKNTRHQLDDIKSKLLDNLSKLRHAPSVQFQERSPEAELPEQDEDKENPDERHDADSDVEMNDAKPLQDSGRMSIV

SEQ ID NO: 3590 - DNA, 1428 bp, Zea mays subsp. mays
  misc_feature (1)..(1428): Ceres Seq. ID no. 15180566
  misc_feature (1)..(1428): Ortholog of  Ceres SEQ ID NO 15225627 as cited in SEQ ID NO 64323
atcctaccaggcaccactcgcatcgtgtgctcagtcagatccccgtcccgcatttcctaaggccaggttagttggcattgaagacgatgactgcttctgcagctgctggtgtgcagatggtggctgcacgcccttgcatttcggcctcgccaggaattcttaccgcacgggtagcagtttctaggactgattgcatgctcagtaccactgctacattccccaaaatcagctgctcctggcctctaaggtttaagcgcaatgatgttgttgtaagagcaatatcggaagagtgtggcccgcaggggcttcccattgatctcagaggtaaaagggcattcattgctggagttgctgatgataatggctatggatgggcaattgcgaaggcacttgctgcggctggtgctgaaattcttgtgggtacatgggtgccggcacttaacatatttgagacaagtctgaggcgtggaaagtttgatgaatcacggaagctgccagatggatctcttatggatattgttaaagtctatccacttgatgctgtctacgattcccctgatgatgttcctgaagatgtcaaatcgaacaaaagatatgcaggggcatcaaactggacagtaaaggaagttgttgaatcagtgaggaatgattttggcagcattgacatactagtgcattctcttgctaatggcccagaggtaacgaagcctttgttggaaacctcaagaagaggctatcttgcggcaatttctgcatccagttactcctatgtttcattgcttcagcacttccttcctataatgaatcccggtggtgctagcatctctctaacatacattgcatctgaaagggcgattcctgggtatggtggtgggatgagttctgctaaagcagctcttgagagtgatacacgggtgcttgcattcgaagctgggcgaaaaggcaaaatcagagttaacaccatatcagcaggccctcttgggagccgagctgctaaggcaattggatttattgagaagatgatagagtactcatatgttaatgcaccattgcagaaggagctgttggctgatgaggtggggaacacagctgcattcctggtttcttcattggcttctgccatcaccggctcgactgtttatgttgacaatgggctcaatacaatggggcttgcaattgacagccctaccataacgtcatagatgtggttgtggtagatagacgacctttcctgctgcattgcggtatcatccttgaataaagatcatagttagttattagtatgagaggtaagggcaggaaagggggaaaattatgaactggtcttttgcgctttctttgctggagaggaacattagagcgatttccagaatgatgggatgctattatgtgatttcatatgattcagaagcagtacaataactccct

SEQ ID NO: 3591 - protein, 371 aa, Zea mays subsp. mays
  peptide (1)..(371): Ceres Seq. ID no. 15180567
MTASAAAGVQMVAARPCISASPGILTARVAVSRTDCMLSTTATFPKISCSWPLRFKRNDVVVRAISEECGPQGLPIDLRGKRAFIAGVADDNGYGWAIAKALAAAGAEILVGTWVPALNIFETSLRRGKFDESRKLPDGSLMDIVKVYPLDAVYDSPDDVPEDVKSNKRYAGASNWTVKEVVESVRNDFGSIDILVHSLANGPEVTKPLLETSRRGYLAAISASSYSYVSLLQHFLPIMNPGGASISLTYIASERAIPGYGGGMSSAKAALESDTRVLAFEAGRKGKIRVNTISAGPLGSRAAKAIGFIEKMIEYSYVNAPLQKELLADEVGNTAAFLVSSLASAITGSTVYVDNGLNTMGLAIDSPTITS

SEQ ID NO: 3592 - protein, 361 aa, Zea mays subsp. mays
  peptide (1)..(361): Ceres Seq. ID no. 15180568
MVAARPCISASPGILTARVAVSRTDCMLSTTATFPKISCSWPLRFKRNDVVVRAISEECGPQGLPIDLRGKRAFIAGVADDNGYGWAIAKALAAAGAEILVGTWVPALNIFETSLRRGKFDESRKLPDGSLMDIVKVYPLDAVYDSPDDVPEDVKSNKRYAGASNWTVKEVVESVRNDFGSIDILVHSLANGPEVTKPLLETSRRGYLAAISASSYSYVSLLQHFLPIMNPGGASISLTYIASERAIPGYGGGMSSAKAALESDTRVLAFEAGRKGKIRVNTISAGPLGSRAAKAIGFIEKMIEYSYVNAPLQKELLADEVGNTAAFLVSSLASAITGSTVYVDNGLNTMGLAIDSPTITS

SEQ ID NO: 3593 - protein, 335 aa, Zea mays subsp. mays
  peptide (1)..(335): Ceres Seq. ID no. 15180569
MLSTTATFPKISCSWPLRFKRNDVVVRAISEECGPQGLPIDLRGKRAFIAGVADDNGYGWAIAKALAAAGAEILVGTWVPALNIFETSLRRGKFDESRKLPDGSLMDIVKVYPLDAVYDSPDDVPEDVKSNKRYAGASNWTVKEVVESVRNDFGSIDILVHSLANGPEVTKPLLETSRRGYLAAISASSYSYVSLLQHFLPIMNPGGASISLTYIASERAIPGYGGGMSSAKAALESDTRVLAFEAGRKGKIRVNTISAGPLGSRAAKAIGFIEKMIEYSYVNAPLQKELLADEVGNTAAFLVSSLASAITGSTVYVDNGLNTMGLAIDSPTITS

SEQ ID NO: 3594 - DNA, 1233 bp, Zea mays subsp. mays
  misc_feature (1)..(1233): Ceres Seq. ID no. 12410129
  misc_feature (1)..(1233): Ortholog of  Ceres SEQ ID NO 13594671 as cited in SEQ ID NO 51800
  misc_feature (1)..(1233): Ortholog of  Ceres SEQ ID NO 12784099 as cited in SEQ ID NO 66784
atgtataacgcgacccccctccccagtccccccagcggcaaggcggcaaccgttctcccgcgtcccgcactcccgccccttttccttttgctccttccttcctcgggaagcctagggcttaggctttaagcgccgcgatgtacggcggcggcggcggcggcgggcactacgacggaggcagcggtggcgccgggaacgctaacgcgctcttcggcggcgggggcttcatgccctcacagtccacggtggtcccggagaacagcggcctctctaagggtcggagcgcgcagacgctgctcccgctcaccgtgaaacagaccatggacgcggcgcaaaccagcggtgacaggtctaatttcgccatcaacggcgttgaggtgtctacgattaggcttgttggacgcatgctaggtaaggttgagcgtgtcacagatgttgtattcactcttgatgatggtactggcaagatagatgtgaatcgctgggaaaatgaggcttccgatgctaaggagatggctgatgctaataacgagaactatgtcatagtcattggcggtttgaaaggttttcaaggaaagcgccatgtagttgcctatgctgtgcggcgtgtgacaaacttcaatgaaataacctgtcactttctgcactgcattcaggtgcatatggagctcacagggttaaagatctattcttcagctgcaacatatggaggagtagcccatgccccatcacagccaaatccggttgatggaaactacatatccaacttggtcttgagtgtttttcatgacccatctgtcatggaccaggagcatggactgcacatcaaagatgtcatagatcgtctcaaactaccagatgatgtagtcagtgcggccatccaaggtcatgttgatgtgggcaacatttacaacacaattgatgacttccactacaaatctgtccggaatggatgaccacgttgcaagtccagcgttcaggctccgtgtaggtatggagccgtttcaaggaagaagaaatgtaaaccctcttcaggatcgcctatattttgcagataggcttcatggtcaacagcttagcatatcggtttaggtgtgtattgctctcatatgtaatgatacataagatgtgagtagactaggtctacctgcaggacatcagtccgttcctacggaaatttgttatgaacgttttacattctaagacctatataaccgtgaagcacgcaaatcg

SEQ ID NO: 3595 - protein, 272 aa, Zea mays subsp. mays
  peptide (1)..(272): Ceres Seq. ID no. 12410130
MYGGGGGGGHYDGGSGGAGNANALFGGGGFMPSQSTVVPENSGLSKGRSAQTLLPLTVKQTMDAAQTSGDRSNFAINGVEVSTIRLVGRMLGKVERVTDVVFTLDDGTGKIDVNRWENEASDAKEMADANNENYVIVIGGLKGFQGKRHVVAYAVRRVTNFNEITCHFLHCIQVHMELTGLKIYSSAATYGGVAHAPSQPNPVDGNYISNLVLSVFHDPSVMDQEHGLHIKDVIDRLKLPDDVVSAAIQGHVDVGNIYNTIDDFHYKSVRNG

SEQ ID NO: 3596 - protein, 242 aa, Zea mays subsp. mays
  peptide (1)..(242): Ceres Seq. ID no. 12410131
MPSQSTVVPENSGLSKGRSAQTLLPLTVKQTMDAAQTSGDRSNFAINGVEVSTIRLVGRMLGKVERVTDVVFTLDDGTGKIDVNRWENEASDAKEMADANNENYVIVIGGLKGFQGKRHVVAYAVRRVTNFNEITCHFLHCIQVHMELTGLKIYSSAATYGGVAHAPSQPNPVDGNYISNLVLSVFHDPSVMDQEHGLHIKDVIDRLKLPDDVVSAAIQGHVDVGNIYNTIDDFHYKSVRNG

SEQ ID NO: 3597 - protein, 211 aa, Zea mays subsp. mays
  peptide (1)..(211): Ceres Seq. ID no. 12410132
MDAAQTSGDRSNFAINGVEVSTIRLVGRMLGKVERVTDVVFTLDDGTGKIDVNRWENEASDAKEMADANNENYVIVIGGLKGFQGKRHVVAYAVRRVTNFNEITCHFLHCIQVHMELTGLKIYSSAATYGGVAHAPSQPNPVDGNYISNLVLSVFHDPSVMDQEHGLHIKDVIDRLKLPDDVVSAAIQGHVDVGNIYNTIDDFHYKSVRNG

SEQ ID NO: 3598 - DNA, 1375 bp, Zea mays subsp. mays
  misc_feature (1)..(1375): Ceres Seq. ID no. 12352226
  misc_feature (1)..(1375): Ortholog of  Ceres SEQ ID NO 13654989 as cited in SEQ ID NO 63117
gatctggccacccgagcacggccaaaaaggcgctcgcccagcgcttcaccagatagagcaacacagctcagctcagctcagcctcggaccagcagccggcgtgcggagctgcggtgcggcgtcgtgcgtgcgccagaacaggatgctgcccgccgggtgcggcctcctctcgtgcctccgcctcgacaagcagggcgacgcgggccgaaccgacccccgcgtcgcggacgagcccgccgcgtcgctcggcaagggcagcgggtcgtcggccaggcggttcgcgtgggccgagatcgagtccgtcacggcgggcttctcctcccgcgtcatcggccagggcggcttcagcaccgtctacctggcctgcctctcctcctcccgcctcggcgccgtcaaggtgcagcgcagcagcgagcgcctccaccgcgccttccgccaggagctccacgtgctcctctcgctccgccacccgcacatcgtccgcctgctcggctactgcgacgaacgagaggaaggcgtgttggtctttgagtacgcaccgaacggcgacctccacgagaggctccacggcagcggcaaggcgccgctcccgtgggcgcgccgcatggcggtggcgttccaggtggccatggcgctggagcacctccacgagagccgcgacccggcggtgatccacggcgacgtgaaggcctccaacgtgctgctggacgccagcctcgacgccaagctctgcgacctgggcttcgcgcacgtgggcttctcggccgcgctccagccgccggaggccagcggggccagggccagggcgtcgtcggcgccgcgcgccgtcgtcatgggctccccgggctacgtggacccgcacttcctccgctccggcgtcgccacccaagaagggcgacgtgtacagcttcggcgtgctgctgctcgagctcctcacggggagggaggccatatgcgccgacacggggcgccggctcgccgccgcggtgggtcctacgctcggcgaaggaagagtagcggaggcagtggaccggaggctcggagacgagtacgacacgcacgaggcggccaccgtggcggcgcttgcgctgcggtgcatcggcgacggccccgggacgcggccctccatggtggaggtggttcgcgagctccaggagaagacgaccgcgctgatctcggccgctggatgcaaacctgccggcaagatgggttcctgagctgtattgtcggccgaagaagaccgtaaataccattagctttgtttagagagagtagaaggtgaaggtaatgtttttttatttattttacttatataagtttcttgatgtagtggattagtagtagttgaatcggattacatagaaaaatttccgtg

SEQ ID NO: 3599 - protein, 414 aa, Zea mays subsp. mays
  peptide (1)..(414): Ceres Seq. ID no. 12352227
IWPPEHGQKGARPALHQIEQHSSAQLSLGPAAGVRSCGAASCVRQNRMLPAGCGLLSCLRLDKQGDAGRTDPRVADEPAASLGKGSGSSARRFAWAEIESVTAGFSSRVIGQGGFSTVYLACLSSSRLGAVKVQRSSERLHRAFRQELHVLLSLRHPHIVRLLGYCDEREEGVLVFEYAPNGDLHERLHGSGKAPLPWARRMAVAFQVAMALEHLHESRDPAVIHGDVKASNVLLDASLDAKLCDLGFAHVGFSAALQPPEASGARARASSAPRAVVMGSPGYVDPHFLRSGVATQEGRRVQLRRAAARAPHGEGGHMRRHGAPARRRGGSYARRRKSSGGSGPEARRRVRHARGGHRGGACAAVHRRRPRDAALHGGGGSRAPGEDDRADLGRWMQTCRQDGFLSCIVGRRRP

SEQ ID NO: 3600 - protein, 367 aa, Zea mays subsp. mays
  peptide (1)..(367): Ceres Seq. ID no. 12352228
MLPAGCGLLSCLRLDKQGDAGRTDPRVADEPAASLGKGSGSSARRFAWAEIESVTAGFSSRVIGQGGFSTVYLACLSSSRLGAVKVQRSSERLHRAFRQELHVLLSLRHPHIVRLLGYCDEREEGVLVFEYAPNGDLHERLHGSGKAPLPWARRMAVAFQVAMALEHLHESRDPAVIHGDVKASNVLLDASLDAKLCDLGFAHVGFSAALQPPEASGARARASSAPRAVVMGSPGYVDPHFLRSGVATQEGRRVQLRRAAARAPHGEGGHMRRHGAPARRRGGSYARRRKSSGGSGPEARRRVRHARGGHRGGACAAVHRRRPRDAALHGGGGSRAPGEDDRADLGRWMQTCRQDGFLSCIVGRRRP

SEQ ID NO: 3601 - protein, 213 aa, Zea mays subsp. mays
  peptide (1)..(213): Ceres Seq. ID no. 12352229
MAVAFQVAMALEHLHESRDPAVIHGDVKASNVLLDASLDAKLCDLGFAHVGFSAALQPPEASGARARASSAPRAVVMGSPGYVDPHFLRSGVATQEGRRVQLRRAAARAPHGEGGHMRRHGAPARRRGGSYARRRKSSGGSGPEARRRVRHARGGHRGGACAAVHRRRPRDAALHGGGGSRAPGEDDRADLGRWMQTCRQDGFLSCIVGRRRP

SEQ ID NO: 3602 - DNA, 1282 bp, Zea mays subsp. mays
  misc_feature (1)..(1282): Ceres Seq. ID no. 12374443
  misc_feature (1)..(1282): Ortholog of  Ceres SEQ ID NO 13596891 as cited in SEQ ID NO 62868
  misc_feature (1)..(1282): Ortholog of  Ceres SEQ ID NO 12617235 as cited in SEQ ID NO 63990
  misc_feature (1)..(1282): Ortholog of  Ceres SEQ ID NO 13655371 as cited in SEQ ID NO 68945
tacctaccccctgcgcttgcacaaaatccttcttgatccgcacaggaaggtggaaggtcccggcagaagaacttggcgggcgaaaggcgaaaccgacgtgctcccgggcgggcggcgacagcggcatggagcgagagcggcaggcagtggcgaggaacaggaaggtggtgctgcgcgggtacatcgaccgcgcgcccagggaggaagacatggagctcgtcgacggcggcgccgtggagctgcgcgtccccgagggcggcggcggccccgcggtgctggtgaagaacctctacctatcctgcgacccttacatgcgcggcaggatgcgggacttccgcaactcctacatcccgcccttcaaacctggatcacctattgaagggtttggcgtggggagggtggtcgactccactcatccaggattcagtgccggtgacgttgtttccgggatgactggatgggaggactacagtctgatcaccaatcctgaacagctcaggaagatccagcaaagcgacataccactctcctatcatctgggccttcttggcatgcctggctttacagcttatgttggattctatgagatctgttcaccaaagaaaggggagtttgtttttgtttctgcggcatcgggagcagttgggcaaattgttggtcaacttgcgaagctccatggttgctatgttgttggaagcgctgggacagatcagaaggttgagctcttaaaggaaaaattcggatttgatgcgactttcaattataaggaagagcctgacttgactgctgccctgaaaaggcacttccctgaaggcatagacatctacttcgagaacgtaggcgggccgatgctcgatgctgtactactcaacatgcgagtacatggccgcattgcggtgtgtggcatggtttcccagcacggggtgactgcccctgccgggatccacaacctgttctccttgataagcaagaggatagcgatgaaggggttcatccagagcgattacgtgcacctgttcccgcagttcgtcgatgacatcaccaggcattacagagacgggaagatcgtgtatgtggaagacatgagcgttgggctggagagtgggccggcttccttcgtcggtctgttcagcggtaaaaatgttggcaagcaggtcgtctgtgtgtcgcgggattgaaaggcctggattttgttccctactggccagtacccttaaataaaatcaggaaaacattattttcaactccgagaaggaccccactagccagtaccacggtcgtg

SEQ ID NO: 3603 - protein, 391 aa, Zea mays subsp. mays
  peptide (1)..(391): Ceres Seq. ID no. 12374444
PTPCACTKSFLIRTGRWKVPAEELGGRKAKPTCSRAGGDSGMERERQAVARNRKVVLRGYIDRAPREEDMELVDGGAVELRVPEGGGGPAVLVKNLYLSCDPYMRGRMRDFRNSYIPPFKPGSPIEGFGVGRVVDSTHPGFSAGDVVSGMTGWEDYSLITNPEQLRKIQQSDIPLSYHLGLLGMPGFTAYVGFYEICSPKKGEFVFVSAASGAVGQIVGQLAKLHGCYVVGSAGTDQKVELLKEKFGFDATFNYKEEPDLTAALKRHFPEGIDIYFENVGGPMLDAVLLNMRVHGRIAVCGMVSQHGVTAPAGIHNLFSLISKRIAMKGFIQSDYVHLFPQFVDDITRHYRDGKIVYVEDMSVGLESGPASFVGLFSGKNVGKQVVCVSRD

SEQ ID NO: 3604 - protein, 350 aa, Zea mays subsp. mays
  peptide (1)..(350): Ceres Seq. ID no. 12374445
MERERQAVARNRKVVLRGYIDRAPREEDMELVDGGAVELRVPEGGGGPAVLVKNLYLSCDPYMRGRMRDFRNSYIPPFKPGSPIEGFGVGRVVDSTHPGFSAGDVVSGMTGWEDYSLITNPEQLRKIQQSDIPLSYHLGLLGMPGFTAYVGFYEICSPKKGEFVFVSAASGAVGQIVGQLAKLHGCYVVGSAGTDQKVELLKEKFGFDATFNYKEEPDLTAALKRHFPEGIDIYFENVGGPMLDAVLLNMRVHGRIAVCGMVSQHGVTAPAGIHNLFSLISKRIAMKGFIQSDYVHLFPQFVDDITRHYRDGKIVYVEDMSVGLESGPASFVGLFSGKNVGKQVVCVSRD

SEQ ID NO: 3605 - protein, 322 aa, Zea mays subsp. mays
  peptide (1)..(322): Ceres Seq. ID no. 12374446
MELVDGGAVELRVPEGGGGPAVLVKNLYLSCDPYMRGRMRDFRNSYIPPFKPGSPIEGFGVGRVVDSTHPGFSAGDVVSGMTGWEDYSLITNPEQLRKIQQSDIPLSYHLGLLGMPGFTAYVGFYEICSPKKGEFVFVSAASGAVGQIVGQLAKLHGCYVVGSAGTDQKVELLKEKFGFDATFNYKEEPDLTAALKRHFPEGIDIYFENVGGPMLDAVLLNMRVHGRIAVCGMVSQHGVTAPAGIHNLFSLISKRIAMKGFIQSDYVHLFPQFVDDITRHYRDGKIVYVEDMSVGLESGPASFVGLFSGKNVGKQVVCVSRD

SEQ ID NO: 3606 - DNA, 1074 bp, Zea mays subsp. mays
  misc_feature (1)..(1074): Ceres Seq. ID no. 12386832
  misc_feature (1)..(1074): Ortholog of  Ceres SEQ ID NO 15180793 as cited in SEQ ID NO 0
atattaatggagctgctttgcacgggcggcagacagccgtagacagagcagtgacggtcgtcgtacacagatcacgatgctgctcccacactcttcatcagcctctgcaactgctaccactcgtgggctagcactagcagcagcagcagcagcaccgccgcgtccgaccgctcgcccccggcgcgcgcgcctcctgcctccacgcgcgcgggccgagacgcatgcgacgggcgttggcgccgaccgcgcggccgaggcgcttctccaaagcgggctgcgccgtgagtcgctgccgcggcacgtcgcggtggtgatggacgggaactcgcggtgggcgcgcgagcgggggctgacgcccgcggacggccacaaggccggcggccgcaacctggagcgggtcgttgcgctgtcgcgcgcctggggcatccgcgcgctcaccgccttcgtctgctcccgcgagaacttgagccgccccaaggccgaggtcgactacatgatgggcttgtccgagtggctgataggcgacaacatcgacaagctctcgaggcaggggatccggctgcaggtgatcggcgacgccgcgaagatgccagcctctntgcggagcgcagcggcgcaggccgacgaggccacgaggcacaactcgcagctgcacgtgatgctggccatctgctacagcgggcgatgggacatggtccaggcgtgccgggagctggcccgggaggcgcaggcgaaccggctcagtccggacgacatcgacgagtcggtcatcgccggcaagctcgcgacgagcgccgccggcgagttctcctgtcccgacctggtcatcagaaccagcggcgagatgaggctcagcaacttcttgctgtggcagtcggcgtactcggagttgttcttcaccggcaagatgtggcctgactttggggaggctgagtacctggaagcgttgcgctccttccagggcagagaccgccgcttcggccaatcaaaattactctaacagtctaactcgatggagccacgaagtggagcgccagtatatgtgaagagttatggattgttcggttagctttc

SEQ ID NO: 3607 - protein, 307 aa, Zea mays subsp. mays
  peptide (1)..(307): Ceres Seq. ID no. 12386833
  misc_feature (175)..(175): Xaa is any aa, unknown or other
MLLPHSSSASATATTRGLALAAAAAAPPRPTARPRRARLLPPRARAETHATGVGADRAAEALLQSGLRRESLPRHVAVVMDGNSRWARERGLTPADGHKAGGRNLERVVALSRAWGIRALTAFVCSRENLSRPKAEVDYMMGLSEWLIGDNIDKLSRQGIRLQVIGDAAKMPASXRSAAAQADEATRHNSQLHVMLAICYSGRWDMVQACRELAREAQANRLSPDDIDESVIAGKLATSAAGEFSCPDLVIRTSGEMRLSNFLLWQSAYSELFFTGKMWPDFGEAEYLEALRSFQGRDRRFGQSKLL

SEQ ID NO: 3608 - protein, 228 aa, Zea mays subsp. mays
  peptide (1)..(228): Ceres Seq. ID no. 12386834
  misc_feature (96)..(96): Xaa is any aa, unknown or other
MDGNSRWARERGLTPADGHKAGGRNLERVVALSRAWGIRALTAFVCSRENLSRPKAEVDYMMGLSEWLIGDNIDKLSRQGIRLQVIGDAAKMPASXRSAAAQADEATRHNSQLHVMLAICYSGRWDMVQACRELAREAQANRLSPDDIDESVIAGKLATSAAGEFSCPDLVIRTSGEMRLSNFLLWQSAYSELFFTGKMWPDFGEAEYLEALRSFQGRDRRFGQSKLL

SEQ ID NO: 3609 - protein, 168 aa, Zea mays subsp. mays
  peptide (1)..(168): Ceres Seq. ID no. 12386835
  misc_feature (36)..(36): Xaa is any aa, unknown or other
MMGLSEWLIGDNIDKLSRQGIRLQVIGDAAKMPASXRSAAAQADEATRHNSQLHVMLAICYSGRWDMVQACRELAREAQANRLSPDDIDESVIAGKLATSAAGEFSCPDLVIRTSGEMRLSNFLLWQSAYSELFFTGKMWPDFGEAEYLEALRSFQGRDRRFGQSKLL

SEQ ID NO: 3610 - DNA, 488 bp, Zea mays subsp. mays
  misc_feature (1)..(488): Ceres Seq. ID no. 12345933
  misc_feature (1)..(488): Ortholog of  Ceres SEQ ID NO 14309152 as cited in SEQ ID NO 0
gagacctagaaccctcttccccctcgatggccgtagggagcggcggcggctcgcggcgcgcgcgtccgaacgtgctagtgacggggacgccggggacggggaagacgacaacgtgctcgctccttgccgacgccgcaggcctccgccacgtcaacatcggcgacctcgtccgcgagaagagcctccacgacggctgggacgccgacctcgagtgccatgtcatcaacgaggacctggtgtgcgacgagcttgaggacatgatggaagaaggtggcatactagtagattaccacggatgtgatttctttccagaacgttggtttgacctcgtagtttatttttgcttaatcttttgtttggtcagttgtttgttagggctgttgatttgtatagattcagactacatctcttctggcttgtggatttcgatagacttgttgtacattgacatatgctggtctcaaatgaggatgataggttcttggtcc

SEQ ID NO: 3611 - protein, 162 aa, Zea mays subsp. mays
  peptide (1)..(162): Ceres Seq. ID no. 12345934
DLEPSSPSMAVGSGGGSRRARPNVLVTGTPGTGKTTTCSLLADAAGLRHVNIGDLVREKSLHDGWDADLECHVINEDLVCDELEDMMEEGGILVDYHGCDFFPERWFDLVVYFCLIFCLVSCLLGLLICIDSDYISSGLWISIDLLYIDICWSQMRMIGSWS

SEQ ID NO: 3612 - protein, 154 aa, Zea mays subsp. mays
  peptide (1)..(154): Ceres Seq. ID no. 12345935
MAVGSGGGSRRARPNVLVTGTPGTGKTTTCSLLADAAGLRHVNIGDLVREKSLHDGWDADLECHVINEDLVCDELEDMMEEGGILVDYHGCDFFPERWFDLVVYFCLIFCLVSCLLGLLICIDSDYISSGLWISIDLLYIDICWSQMRMIGSWS

SEQ ID NO: 3613 - protein, 83 aa, Zea mays subsp. mays
  peptide (1)..(83): Ceres Seq. ID no. 12345936
RPRTLFPLDGRRERRRLAARASERASDGDAGDGEDDNVLAPCRRRRPPPRQHRRPRPREEPPRRLGRRPRVPCHQRGPGVRRA

SEQ ID NO: 3614 - DNA, 1345 bp, Zea mays subsp. mays
  misc_feature (1)..(1345): Ceres Seq. ID no. 13502498
  misc_feature (1)..(1345): Ortholog of  Ceres SEQ ID NO 12609045 as cited in SEQ ID NO 51314
  misc_feature (1)..(1345): Ortholog of  Ceres SEQ ID NO 14316312 as cited in SEQ ID NO 60042
  misc_feature (1)..(1345): Ortholog of  Ceres SEQ ID NO 13598492 as cited in SEQ ID NO 63882
  misc_feature (1)..(1345): Ortholog of  Ceres SEQ ID NO 13657914 as cited in SEQ ID NO 66230
  misc_feature (1)..(1345): Ortholog of  Ceres SEQ ID NO 13595877 as cited in SEQ ID NO 67702
  misc_feature (1)..(1345): Ortholog of  Ceres SEQ ID NO 13654367 as cited in SEQ ID NO 67993
ataccgcaaccagctattgagctactgcctctgaccaagtcccaagctgcgctgcgcctgctatgtcgtcgtcctcgcccgtatcggcggtctcatcagccactgcgccgcacgtcgtggacgactgcctcggcatcgtgcagcttcttagcgatggcaccgtgacgcgctccgcggactactccgacatccctctcctgggcgaggtgccgtccaacctgcccgtccagtggaaggacgtcgtctacgaccccgcgcacgcgctccgcctccgcatgtacaggcccaccgacaccgacggcggcaggacgaccaacaacaagctgccggtgctagtctacttccacggcggcggcttctgcatctgcagcttcgagatgccccacttccacgccggcgggctccgcctcgccgccgagctcccggcgctcgtgctctccgccgactaccgcctggggcccgagcaccgcctccccgcggcgcaccgcgacgccgaggccgtcctgtcctggctccgcgcccaggccgaggccgacccgtggcttgtcgagtcggctgacatgggcagggtgttcgtctgcggcgactcggccggcggcaacatcgcgcaccacatcgccgtccagtacggcacgggccacctcgccctcggccccgtcgtccggcttggcggctacatcatgctgtggccctacttcgccgccgaggagaggacggcgtccgagacggccggtcttgacgtcgaccaccagttcgttagcacggcgctgttggatcagatgtggcgcctggcgctgccggtcggcgcgaccagggaccacccagcagcgaacccgttcggaccggacagcgtcccgctggaggacgtcgccttccagccgctgctcgtcgtggacccagaccaggacgtgctgcacgaccgcacacaggactatgccgctaggttgacggccatggggaaactggtcgagctcgtcgtgttcagaggccagggccacgggttcttcgtcttcgacccgtgtggtgaagctttccgaccagctgatccacgtcattcggcgcttcgtactgttgcataagcatccatgtaatcttgttgatcttagtactaccatgtagttgcattagtgagtcatgtactcatgtgttcgtcagtcggacaagtttgtttcgtagaatcgcggacgagctggagagtgcacagcccgtgcagtgaccgcgtctagggatgtgtttccgccacggtgtgcatgtcatgcacgtcgcacgttcgtccttagaagtcggatcgtgcagctgtattccgtggcggggaaacgtggaactaccccagtgtatttggttc

SEQ ID NO: 3615 - protein, 338 aa, Zea mays subsp. mays
  peptide (1)..(338): Ceres Seq. ID no. 13502499
MSSSSPVSAVSSATAPHVVDDCLGIVQLLSDGTVTRSADYSDIPLLGEVPSNLPVQWKDVVYDPAHALRLRMYRPTDTDGGRTTNNKLPVLVYFHGGGFCICSFEMPHFHAGGLRLAAELPALVLSADYRLGPEHRLPAAHRDAEAVLSWLRAQAEADPWLVESADMGRVFVCGDSAGGNIAHHIAVQYGTGHLALGPVVRLGGYIMLWPYFAAEERTASETAGLDVDHQFVSTALLDQMWRLALPVGATRDHPAANPFGPDSVPLEDVAFQPLLVVDPDQDVLHDRTQDYAARLTAMGKLVELVVFRGQGHGFFVFDPCGEAFRPADPRHSALRTVA

SEQ ID NO: 3616 - protein, 267 aa, Zea mays subsp. mays
  peptide (1)..(267): Ceres Seq. ID no. 13502500
MYRPTDTDGGRTTNNKLPVLVYFHGGGFCICSFEMPHFHAGGLRLAAELPALVLSADYRLGPEHRLPAAHRDAEAVLSWLRAQAEADPWLVESADMGRVFVCGDSAGGNIAHHIAVQYGTGHLALGPVVRLGGYIMLWPYFAAEERTASETAGLDVDHQFVSTALLDQMWRLALPVGATRDHPAANPFGPDSVPLEDVAFQPLLVVDPDQDVLHDRTQDYAARLTAMGKLVELVVFRGQGHGFFVFDPCGEAFRPADPRHSALRTVA

SEQ ID NO: 3617 - protein, 233 aa, Zea mays subsp. mays
  peptide (1)..(233): Ceres Seq. ID no. 13502501
MPHFHAGGLRLAAELPALVLSADYRLGPEHRLPAAHRDAEAVLSWLRAQAEADPWLVESADMGRVFVCGDSAGGNIAHHIAVQYGTGHLALGPVVRLGGYIMLWPYFAAEERTASETAGLDVDHQFVSTALLDQMWRLALPVGATRDHPAANPFGPDSVPLEDVAFQPLLVVDPDQDVLHDRTQDYAARLTAMGKLVELVVFRGQGHGFFVFDPCGEAFRPADPRHSALRTVA

SEQ ID NO: 3618 - DNA, 1250 bp, Zea mays subsp. mays
  misc_feature (1)..(1250): Ceres Seq. ID no. 12414165
  misc_feature (1)..(1250): Ortholog of  Ceres SEQ ID NO 12609045 as cited in SEQ ID NO 51314
  misc_feature (1)..(1250): Ortholog of  Ceres SEQ ID NO 14316312 as cited in SEQ ID NO 60042
  misc_feature (1)..(1250): Ortholog of  Ceres SEQ ID NO 13598492 as cited in SEQ ID NO 63882
  misc_feature (1)..(1250): Ortholog of  Ceres SEQ ID NO 13595877 as cited in SEQ ID NO 67702
  misc_feature (1)..(1250): Ortholog of  Ceres SEQ ID NO 13654367 as cited in SEQ ID NO 67993
tccactccactccagccaggcgccagcactcacccacccatggcgtccgaagccgcgccgcgggtcgtcgtggacgagtgccggggcgtgctgtccgtgtacagcgacggcacggtggtgcggcgcgcgcagccggggttcgcgacgccggtgcgggacgacggcacggtcgactggaaggacgtgacgttcgacgaggccccgcgggctggcgctccgcctctacctcccccgggaccgcggggccgcggccgggcggcgcctgccggtcttcttctactaccacggcggcggcttctgcatcgggtcccgcgcctggcccaactgccagaactactgcctgcgcctggcctccgacctgggcgcgctcgtggtggcgccggactaccgcctcgcgcccgagcaccgcctccccgccgccatcgacgacggcgcggcggcggtcctgtggctggcgaggcagggcggcggggacccctgggtcgccgaggccgccgacctcggccgcgtcttcgtgtcgggcgactcggccggcggcaccatcgcgcaccacctcgccgtgcgcttcggtggctcgcccgcggacctggcccccgtcgccgtgcggggatacgtccagctcatgccattcttcggcggcgtggcgcgcacgcggtcggaggccgagtgccccgccgacgctttcctcgaccggcccctcaacgaccgctactggcgcctgtcgctgccggagggcgccacgcccgaccaccccgtggccaacccgttcggccccggcgcgccgccgctggacgccgtcgagttcgcgcccaccctggtcgtcgtcggcggccgcgacctcctccacgaccgcgccgtcgactacgccgccaggctcagggccgccgggaagcccgtcgtggtcagggacttccacggccagcagcacggcttcttcaccatcgacccctggtccgacgcctccgccgagctcatgcgcgtcatcaagcgcttcgtcgacgccgacggccgcttcgacttcgactgacacgtcggtgtcgaactctagtattaaatccgagggagcgagcagaatggtctgcgtcgagccgtcgagtagttcccgggttgaaatcaatgtggtttggtgattgtgatatttttcttgctcgtttgtttttattatggacggttctcctgttaaaaagtagtagcccggtgtgtttagtaggaatcttgtatctagattcgctcgaggaacattctagatg

SEQ ID NO: 3619 - protein, 416 aa, Zea mays subsp. mays
  peptide (1)..(416): Ceres Seq. ID no. 12414166
STPLQPGASTHPPMASEAAPRVVVDECRGVLSVYSDGTVVRRAQPGFATPVRDDGTVDWKDVTFDEAPRAGAPPLPPPGPRGRGRAAPAGLLLLPRRRLLHRVPRLAQLPELLPAPGLRPGRARGGAGLPPRARAPPPRRHRRRRGGGPVAGEAGRRGPLGRRGRRPRPRLRVGRLGRRHHRAPPRRALRWLARGPGPRRRAGIRPAHAILRRRGAHAVGGRVPRRRFPRPAPQRPLLAPVAAGGRHARPPRGQPVRPRRAAAGRRRVRAHPGRRRRPRPPPRPRRRLRRQAQGRREARRGQGLPRPAARLLHHRPLVRRLRRAHARHQALRRRRRPLRLRLTRRCRTLVLNPRERAEWSASSRRVVPGLKSMWFGDCDIFLARLFLLWTVLLLKSSSPVCLVGILYLDSLEEHSR

SEQ ID NO: 3620 - protein, 403 aa, Zea mays subsp. mays
  peptide (1)..(403): Ceres Seq. ID no. 12414167
MASEAAPRVVVDECRGVLSVYSDGTVVRRAQPGFATPVRDDGTVDWKDVTFDEAPRAGAPPLPPPGPRGRGRAAPAGLLLLPRRRLLHRVPRLAQLPELLPAPGLRPGRARGGAGLPPRARAPPPRRHRRRRGGGPVAGEAGRRGPLGRRGRRPRPRLRVGRLGRRHHRAPPRRALRWLARGPGPRRRAGIRPAHAILRRRGAHAVGGRVPRRRFPRPAPQRPLLAPVAAGGRHARPPRGQPVRPRRAAAGRRRVRAHPGRRRRPRPPPRPRRRLRRQAQGRREARRGQGLPRPAARLLHHRPLVRRLRRAHARHQALRRRRRPLRLRLTRRCRTLVLNPRERAEWSASSRRVVPGLKSMWFGDCDIFLARLFLLWTVLLLKSSSPVCLVGILYLDSLEEHSR

SEQ ID NO: 3621 - protein, 375 aa, Zea mays subsp. mays
  peptide (1)..(375): Ceres Seq. ID no. 12414168
HSTPARRQHSPTHGVRSRAAGRRGRVPGRAVRVQRRHGGAARAAGVRDAGAGRRHGRLEGRDVRRGPAGWRSASTSPGTAGPRPGGACRSSSTTTAAASASGPAPGPTARTTACAWPPTWARSWWRRTTASRPSTASPPPSTTARRRSCGWRGRAAGTPGSPRPPTSAASSCRATRPAAPSRTTSPCASVARPRTWPPSPCGDTSSSCHSSAAWRARGRRPSAPPTLSSTGPSTTATGACRCRRAPRPTTPWPTRSAPARRRWTPSSSRPPWSSSAAATSSTTAPSTTPPGSGPPGSPSWSGTSTASSTASSPSTPGPTPPPSSCASSSASSTPTAASTSTDTSVSNSSIKSEGASRMVCVEPSSSSRVEINVVW

SEQ ID NO: 3622 - DNA, 1457 bp, Zea mays subsp. mays
  misc_feature (1)..(1457): Ceres Seq. ID no. 12406983
  misc_feature (1)..(1457): Ortholog of  Ceres SEQ ID NO 14307296 as cited in SEQ ID NO 53966
  misc_feature (1)..(1457): Ortholog of  Ceres SEQ ID NO 15226041 as cited in SEQ ID NO 62920
  misc_feature (1)..(1457): Ortholog of  Ceres SEQ ID NO 15179340 as cited in SEQ ID NO 0
acctcccttgacccgtcgtcccatgctaaaagcccagggttaggagctagaggtaatctctctcccgtctctccccagtgggcgtgggggcgccgcatggaagccatggacgtcaagtacaagcccgtcatgttccccaacggcgccggcctcaagaagccgaagccggcggcggccgtggcgctggccggggagccgctgtaccgggagtgcctcaagaaccacgccgcgagcctgggcgggcacgccgtcgacggttgcggcgagttcatgccctcgccgggggccaaccccgccgacccgacgtcgctcaagtgcgcggcgtgcgggtgccaccgcaacttccaccgccggacgctggagggttcccctccgccgcccgcgcccgcgccgctggcgcttcccgcctccgccgagcgtgatgcacggccagccgcaccgcgcccgggaggagacgcccgaggaccgccacccgggggtcgtcgacgccgacgactccgattccgactcggaaggctcggagtacgacgaggagcggtcggtgtccccgccgccgccgccgcaccacctgctgccggcgccggtggcgcagcagcccccgccaccgtcctacttcccgacggcgccgcacatggtgctctcgctaggttccggcgtgcccgggcccgcggtggcggtatccccggcgcagaggctggccccgacccagctgacgccgtccagcgcgccgccccacgccgggggcgcgatgcccatgcccaggaagcggttccgcaccaagttcaccgccgagcagaagcagcggatgcaggagctgtcggagcggctcgggtggcggctgcagaagcgcgacgaggccatcgtcgacgagtggtgccgcgacatcggcgtcggcaagggcgtcttcaaggtctggatgcacaacaacaagcacaacttcctgggcgggcacagcgcccgccgcagcgcctcctcgcccgcccccgcccccgccgccgcgtcgctccaaaccccagccgccggcgccggcgctgctgcagcaccgtcattccacccgtccaggatcacccctccccctcccgtcctcacctcgtccccgacggccgccaccggcttcaacatcaacggcgccgcctcgtcggcgcccaccgtcgccaccgactacaccacggacaacgccaacggagcttcgtcgccgcactccgcttgaactagagaagggagaagagaggaggggggaagggaagggagagcggagagagagaaacatttagcttaatttcagtgatcactcgttttttttttctttagacttcttgccatctactaagaaattaaccccaagaaaaagcatgccgctgtgcgccatgcctagaaatccaagcttcttcctcccctgtactagtactgtatgctcttgggatccgatgatgatgctgatgctgatttaggattag

SEQ ID NO: 3623 - protein, 404 aa, Zea mays subsp. mays
  peptide (1)..(404): Ceres Seq. ID no. 12406984
TSLDPSSHAKSPGLGARGNLSPVSPQWAWGRRMEAMDVKYKPVMFPNGAGLKKPKPAAAVALAGEPLYRECLKNHAASLGGHAVDGCGEFMPSPGANPADPTSLKCAACGCHRNFHRRTLEGSPPPPAPAPLALPASAERDARPAAPRPGGDARGPPPGGRRRRRLRFRLGRLGVRRGAVGVPAAAAAPPAAGAGGAAAPATVLLPDGAAHGALARFRRARARGGGIPGAEAGPDPADAVQRAAPRRGRDAHAQEAVPHQVHRRAEAADAGAVGAARVAAAEARRGHRRRVVPRHRRRQGRLQGLDAQQQAQLPGRAQRPPQRLLARPRPRRRVAPNPSRRRRRCCSTVIPPVQDHPSPSRPHLVPDGRHRLQHQRRRLVGAHRRHRLHHGQRQRSFVAALRLN

SEQ ID NO: 3624 - protein, 372 aa, Zea mays subsp. mays
  peptide (1)..(372): Ceres Seq. ID no. 12406985
MEAMDVKYKPVMFPNGAGLKKPKPAAAVALAGEPLYRECLKNHAASLGGHAVDGCGEFMPSPGANPADPTSLKCAACGCHRNFHRRTLEGSPPPPAPAPLALPASAERDARPAAPRPGGDARGPPPGGRRRRRLRFRLGRLGVRRGAVGVPAAAAAPPAAGAGGAAAPATVLLPDGAAHGALARFRRARARGGGIPGAEAGPDPADAVQRAAPRRGRDAHAQEAVPHQVHRRAEAADAGAVGAARVAAAEARRGHRRRVVPRHRRRQGRLQGLDAQQQAQLPGRAQRPPQRLLARPRPRRRVAPNPSRRRRRCCSTVIPPVQDHPSPSRPHLVPDGRHRLQHQRRRLVGAHRRHRLHHGQRQRSFVAALRLN

SEQ ID NO: 3625 - protein, 369 aa, Zea mays subsp. mays
  peptide (1)..(369): Ceres Seq. ID no. 12406986
MDVKYKPVMFPNGAGLKKPKPAAAVALAGEPLYRECLKNHAASLGGHAVDGCGEFMPSPGANPADPTSLKCAACGCHRNFHRRTLEGSPPPPAPAPLALPASAERDARPAAPRPGGDARGPPPGGRRRRRLRFRLGRLGVRRGAVGVPAAAAAPPAAGAGGAAAPATVLLPDGAAHGALARFRRARARGGGIPGAEAGPDPADAVQRAAPRRGRDAHAQEAVPHQVHRRAEAADAGAVGAARVAAAEARRGHRRRVVPRHRRRQGRLQGLDAQQQAQLPGRAQRPPQRLLARPRPRRRVAPNPSRRRRRCCSTVIPPVQDHPSPSRPHLVPDGRHRLQHQRRRLVGAHRRHRLHHGQRQRSFVAALRLN

SEQ ID NO: 3626 - DNA, 1493 bp, Zea mays subsp. mays
  misc_feature (1)..(1493): Ceres Seq. ID no. 12469735
  misc_feature (1)..(1493): Ortholog of  Ceres SEQ ID NO 14313159 as cited in SEQ ID NO 54676
  misc_feature (1)..(1493): Ortholog of  Ceres SEQ ID NO 13598547 as cited in SEQ ID NO 65200
  misc_feature (1)..(1493): Ortholog of  Ceres SEQ ID NO 12617920 as cited in SEQ ID NO 65480
ataaaatgatttcttttatagagtgtacagctggcagtcgccgagccgtcctaactcagcgagagggtttcgaattggcgccaagccgccaaccattccccccaatcccgcctgccagccctagggtttctgctacgccatggcgggaaccgccgccgccgctcccatggacatcgatgcagccgcgccgcctcccccgccgcctggtgcggcggccaagggcaaggcgctgctctccgctggcggcagggcagcgccctgggtcgagaagtaccggccccagtccctcgccgacgtcgccgcccaccgcgatatcgtcgacacaattgacaggcttacaaacgagaatagacttccacacttgttgctatatgggccacctggcactgggaaaacatcgacgattctggctgttgcgaggaagctatatgggtctcagtatagcaacatgatcctggagctcaatgcgtcagatgaacgtggcattgatgttgtcaggcagcagatccaggattttgctggggcacgcagcctctcttttggagcaaggccttctgttaagctggttctcttggatgaagcagacgcaatgacaaaggatgcacaatttgcattgagaagagttatcgagaagtatacaaggagcacaaggtttgcactcatatgcaaccatgtcaacaaaattatccctgcgctacaatcaaggtgcaccaggtttagatttgctccactagatggcagtcatgttagagagcgtcttcaacatataataaaatctgaggggctcagtgtagatgacggtggcttgacagccctagtgcggttaagcaatggtgatatgaggaaggctttgaatatattgcagtcaacgcacatggcatcccaacaaatcacagaagaagctgtctatctttgcacaggaaaccccatgccaaaagatattgagcagatagctttttggctattaaatgaaccattttcaaccagcttcaaatatatatctgacatgaagatgagaaaagggctggccttggttgatatcatacgggaggttactatgtttgtgttcaaaatacaaatgccatctgatgttcgtgtaaagctaatcaataacttggctgatattgagtacagactaagctttgcatgcaacgataaactgcagctgggcgcactgatctcaactttcacggacactcgcacggctatggttgctgctgccagctaattccagtaatgtgaaggatgtttctgctgctccctctggaatctgaagatgaagcgcagctacattatggggtcaacatcttgcctgtagttagcaagctgaaaggtttggtgagggttgtcttagatcatctgtatgtctgctggacgtgatgtggtaactgcctggaacttgggagtactcgtatgactgaacgctgccaggcgttctcatgttatgcgtgtaagattctatccagtagtataaaccctagtgccgttctttg

SEQ ID NO: 3627 - protein, 362 aa, Zea mays subsp. mays
  peptide (1)..(362): Ceres Seq. ID no. 12469736
MAGTAAAAPMDIDAAAPPPPPPGAAAKGKALLSAGGRAAPWVEKYRPQSLADVAAHRDIVDTIDRLTNENRLPHLLLYGPPGTGKTSTILAVARKLYGSQYSNMILELNASDERGIDVVRQQIQDFAGARSLSFGARPSVKLVLLDEADAMTKDAQFALRRVIEKYTRSTRFALICNHVNKIIPALQSRCTRFRFAPLDGSHVRERLQHIIKSEGLSVDDGGLTALVRLSNGDMRKALNILQSTHMASQQITEEAVYLCTGNPMPKDIEQIAFWLLNEPFSTSFKYISDMKMRKGLALVDIIREVTMFVFKIQMPSDVRVKLINNLADIEYRLSFACNDKLQLGALISTFTDTRTAMVAAAS

SEQ ID NO: 3628 - protein, 353 aa, Zea mays subsp. mays
  peptide (1)..(353): Ceres Seq. ID no. 12469737
MDIDAAAPPPPPPGAAAKGKALLSAGGRAAPWVEKYRPQSLADVAAHRDIVDTIDRLTNENRLPHLLLYGPPGTGKTSTILAVARKLYGSQYSNMILELNASDERGIDVVRQQIQDFAGARSLSFGARPSVKLVLLDEADAMTKDAQFALRRVIEKYTRSTRFALICNHVNKIIPALQSRCTRFRFAPLDGSHVRERLQHIIKSEGLSVDDGGLTALVRLSNGDMRKALNILQSTHMASQQITEEAVYLCTGNPMPKDIEQIAFWLLNEPFSTSFKYISDMKMRKGLALVDIIREVTMFVFKIQMPSDVRVKLINNLADIEYRLSFACNDKLQLGALISTFTDTRTAMVAAAS

SEQ ID NO: 3629 - protein, 259 aa, Zea mays subsp. mays
  peptide (1)..(259): Ceres Seq. ID no. 12469738
MILELNASDERGIDVVRQQIQDFAGARSLSFGARPSVKLVLLDEADAMTKDAQFALRRVIEKYTRSTRFALICNHVNKIIPALQSRCTRFRFAPLDGSHVRERLQHIIKSEGLSVDDGGLTALVRLSNGDMRKALNILQSTHMASQQITEEAVYLCTGNPMPKDIEQIAFWLLNEPFSTSFKYISDMKMRKGLALVDIIREVTMFVFKIQMPSDVRVKLINNLADIEYRLSFACNDKLQLGALISTFTDTRTAMVAAAS

SEQ ID NO: 3630 - DNA, 1218 bp, Zea mays subsp. mays
  misc_feature (1)..(1218): Ceres Seq. ID no. 12387244
  misc_feature (1)..(1218): Ortholog of  Ceres SEQ ID NO 14313955 as cited in SEQ ID NO 54407
attccccaatctagggttgctgagctccccaccactgccggccatgcccgacgcggatgttgacaccgtgattcgcgaagccgccgcggccgcggccccagccggcgacgacgacagcgagggtgacaccgaggaggaggaggaggagggggacgaggtcgacgaggacgaggacgacgacgaggagttacccgccgaggcgccggcgccggacgaggagcaacctgctccagcgcccatctcgaccttgccggggaatccaaaccagctgacgctggtcttccagggcgaggtttacgttttcgaatccgtcacccccgagaaggttcaagctgtgctgctacttttaggacgtggtgaactaccacctggtttagctggcatggttttacccaatcaaaatgaaaacaagggctatgacgatatacttcagaggacagacattccagcaaaaagggttgcttcactaattaggttccgtgagaaaaggaaggaaagaaattttgataagaaaatacgttatgctgttcgcaaagaagtggcactcaggatgcagcgtcggaaggggcaatttgctggaagagccagtctggagggagaatctccagctcctggatgtgatcctggttctcagggctcaggcctagattttgcatctcgagaatcaatgtgccagaactgtggtactagtgaaaaaatgaccccagcaatgcgtcgtggtccagcgggtccaaggactttgtgcaatgcttgtggattgatgtgggcaaacaagggtaccctgagaagttgccccagggcaaaagttgaatctcctgcggttgcaactgagcagggaacaagtgacaacaaagccctggcaacactgaataataacaatgttgctgcaagcaatggcgaagccacaagtgcagcagagaaaggagtgccaaaggcgccgtgacagtatatagacattattgtcagagacaaagatttcggattctttgcctatagctagacaagacaccccgttagaaatatttggtaatgataatgattgtcatcaagtgtacattcattcttgcttgacagtgttagacgtgtaattaatataagctgtccgattgtgtaaacagtaaacccatatggcatctgttgtgttacaacttacactttctaactttcttcattctcataacatcatgatcaaagattcgatgctacccattgattgtc

SEQ ID NO: 3631 - protein, 313 aa, Zea mays subsp. mays
  peptide (1)..(313): Ceres Seq. ID no. 12387245
FPNLGLLSSPPLPAMPDADVDTVIREAAAAAAPAGDDDSEGDTEEEEEEGDEVDEDEDDDEELPAEAPAPDEEQPAPAPISTLPGNPNQLTLVFQGEVYVFESVTPEKVQAVLLLLGRGELPPGLAGMVLPNQNENKGYDDILQRTDIPAKRVASLIRFREKRKERNFDKKIRYAVRKEVALRMQRRKGQFAGRASLEGESPAPGCDPGSQGSGLDFASRESMCQNCGTSEKMTPAMRRGPAGPRTLCNACGLMWANKGTLRSCPRAKVESPAVATEQGTSDNKALATLNNNNVAASNGEATSAAEKGVPKAP

SEQ ID NO: 3632 - protein, 299 aa, Zea mays subsp. mays
  peptide (1)..(299): Ceres Seq. ID no. 12387246
MPDADVDTVIREAAAAAAPAGDDDSEGDTEEEEEEGDEVDEDEDDDEELPAEAPAPDEEQPAPAPISTLPGNPNQLTLVFQGEVYVFESVTPEKVQAVLLLLGRGELPPGLAGMVLPNQNENKGYDDILQRTDIPAKRVASLIRFREKRKERNFDKKIRYAVRKEVALRMQRRKGQFAGRASLEGESPAPGCDPGSQGSGLDFASRESMCQNCGTSEKMTPAMRRGPAGPRTLCNACGLMWANKGTLRSCPRAKVESPAVATEQGTSDNKALATLNNNNVAASNGEATSAAEKGVPKAP

SEQ ID NO: 3633 - protein, 186 aa, Zea mays subsp. mays
  peptide (1)..(186): Ceres Seq. ID no. 12387247
MVLPNQNENKGYDDILQRTDIPAKRVASLIRFREKRKERNFDKKIRYAVRKEVALRMQRRKGQFAGRASLEGESPAPGCDPGSQGSGLDFASRESMCQNCGTSEKMTPAMRRGPAGPRTLCNACGLMWANKGTLRSCPRAKVESPAVATEQGTSDNKALATLNNNNVAASNGEATSAAEKGVPKAP

SEQ ID NO: 3634 - DNA, 1415 bp, Zea mays subsp. mays
  misc_feature (1)..(1415): Ceres Seq. ID no. 12352230
  misc_feature (1)..(1415): Ortholog of  Ceres SEQ ID NO 14307464 as cited in SEQ ID NO 59636
atcgaatcggatcggaggggaagcaggagcccgcagggggcggctagcgctggtgcgtgcttcctccattatattatcattgcgcctcgtcctccccaatcctcattgcccatcacattccatcgaccagtctcaattcaaggagctgaggacgacctgtccgtccggagctgatcgagaaacggaggggcggttccagtttcagtccagctagctagctagctagaagatcccattcgctgacagatgggttcctacatccaaggagatgatgaggtccctgtgtacgagtcgggcgccgaggtgcttgcgaaggtgcaagagaaatgggcggcggcggcggcatcgcggcctcctccctacccggccatgtactcgagcgtgttcggcggcatcatcctggacccggccatgatggttctccccatcgacgaccacatggtccaccggggccacggcgtgttcgacacggccatgatcctggacggcgccctgtacgagctggacgcgcacctggaccgcttcctccggtcggccgcggcggcgcgcgtggacacggccccgttcccgcgcgaggcgctgcggcgcatcctgatccagatgaccgccgcctcgggctgccgcatgggctccatccgctactggctcagctccgggcccggcgacttcctgctgtcatccaggggctgcccgtcgccggcgttctacggcgtggtgatcgcgtcggagtacgagcagtgcggggtggacggcaccggggtgcgcgcggtcacggccacggtgcccatgaagccgccgcagttcgcgaccgtgaagaacgtgaactacctgcccaacgtgctgtccatcatggacgccgaggaccgcggcgccttcgcgtccgtgtgggtggacgaccaagggtacgtggccgagggccccatggtgaacgtggcgttcgtgacgcccgagcgggagctcgtgctcccggccttcgacaagatcctcagcgggtgcacggccaagaggatgctcgcgctggcgcctcgcctcgtggacgccggcctgctcgcgggcgtcagcaccagggacatcacggccgaggacgccaagcgcagcgccgagatggcgttcgtcggcagcggcctccccgtgctgcccgtcgtcgagtgggacggcaaacccatcggagacgggaaggttgggaagctgatgccggcgctgtctgatctgctgtgggaggacatgaagtccggtcccgacaggatccccgttccatacaagcagtagcctgaagcgaaggcgaagccatgacatctctctctctgtgtgtgtgtgtgtttgcagtcgaatggtgattgccttgcctgaataaaaataaacctctctctgtatatctgagcgaatcgttttggaaatacgagcagattccattc

SEQ ID NO: 3635 - protein, 340 aa, Zea mays subsp. mays
  peptide (1)..(340): Ceres Seq. ID no. 12352231
MGSYIQGDDEVPVYESGAEVLAKVQEKWAAAAASRPPPYPAMYSSVFGGIILDPAMMVLPIDDHMVHRGHGVFDTAMILDGALYELDAHLDRFLRSAAAARVDTAPFPREALRRILIQMTAASGCRMGSIRYWLSSGPGDFLLSSRGCPSPAFYGVVIASEYEQCGVDGTGVRAVTATVPMKPPQFATVKNVNYLPNVLSIMDAEDRGAFASVWVDDQGYVAEGPMVNVAFVTPERELVLPAFDKILSGCTAKRMLALAPRLVDAGLLAGVSTRDITAEDAKRSAEMAFVGSGLPVLPVVEWDGKPIGDGKVGKLMPALSDLLWEDMKSGPDRIPVPYKQ

SEQ ID NO: 3636 - protein, 299 aa, Zea mays subsp. mays
  peptide (1)..(299): Ceres Seq. ID no. 12352232
MYSSVFGGIILDPAMMVLPIDDHMVHRGHGVFDTAMILDGALYELDAHLDRFLRSAAAARVDTAPFPREALRRILIQMTAASGCRMGSIRYWLSSGPGDFLLSSRGCPSPAFYGVVIASEYEQCGVDGTGVRAVTATVPMKPPQFATVKNVNYLPNVLSIMDAEDRGAFASVWVDDQGYVAEGPMVNVAFVTPERELVLPAFDKILSGCTAKRMLALAPRLVDAGLLAGVSTRDITAEDAKRSAEMAFVGSGLPVLPVVEWDGKPIGDGKVGKLMPALSDLLWEDMKSGPDRIPVPYKQ

SEQ ID NO: 3637 - protein, 293 aa, Zea mays subsp. mays
  peptide (1)..(293): Ceres Seq. ID no. 12352233
MGGGGGIAASSLPGHVLERVRRHHPGPGHDGSPHRRPHGPPGPRRVRHGHDPGRRPVRAGRAPGPLPPVGRGGARGHGPVPARGAAAHPDPDDRRLGLPHGLHPLLAQLRARRLPAVIQGLPVAGVLRRGDRVGVRAVRGGRHRGARGHGHGAHEAAAVRDREERELPAQRAVHHGRRGPRRLRVRVGGRPRVRGRGPHGERGVRDARAGARAPGLRQDPQRVHGQEDARAGASPRGRRPARGRQHQGHHGRGRQAQRRDGVRRQRPPRAARRRVGRQTHRRREGWEADAGAV

SEQ ID NO: 3638 - DNA, 1838 bp, Zea mays subsp. mays
  misc_feature (1)..(1838): Ceres Seq. ID no. 12405709
  misc_feature (1)..(1838): Ortholog of  Ceres SEQ ID NO 14313038 as cited in SEQ ID NO 59520
  misc_feature (1)..(1838): Ortholog of  Ceres SEQ ID NO 13595464 as cited in SEQ ID NO 59792
  misc_feature (1)..(1838): Ortholog of  Ceres SEQ ID NO 14316416 as cited in SEQ ID NO 60078
gctgttcccctccctcctttttttcgtcgtctcgcacgctctctttctctctctctctctctcttgcccatccccccacctcggctgggctcagctcagctcctaaaccggcacctacctctctgcctgctgccccggcccctgatcctgatttccccaatcgagagtccgagacccgagaggaggcacaggcacctgcgctagctgcagctgcaaatcgtcttccccagatccggcgccgcctagttcgctcctgctcgcgacagcgcccagagccgtccgcgtgcgcccgcagagatcgtttcggggacagccgagcagagcagagctgactctgccgcttgttgcccgttcttggctgctgttgctggcgagagcgcgcaggaggagcggttgatttttgattctctctgtccctccctcccttgcttcgcttcgctcgcgcggggtgcgtgcacgtaccatgagaagatgatgcgcgccaggcccaaaggtacattcgccgacgcgatgagggagagctcccctcctcctcctccccctccccctccggctccggcttcggcagcggtgaaagaggacgagtgggaggtgcggcccggcgggatgctggtgcagaagcggagccccgacgccgacgcccccgccggggcgcccgtccctaccatccgcgtcaaggtcaagttcaacggcgtgtaccacgagatctacatcaactcccaggcctccttcggtgagctgaagaagatgctgtcggcgcggaccgggctgcaccccgaggaccagaagctggtgtacaaggacaaggagcgggactccaaggcgttcctggacatggccggcgtcaaggaccgctccaagttggtgctgctcgaggaccccgccgcgcaggccaagcgcctcctcgagcagcgccgcaccgacaaggcggagcgcgccgccaagtccatctctcgcatcggcctcgacgtcgacaagctcgccaccaaggtgtcggcgctggaggccatcgtcagcaagggcggcaaggtggtggacgctgacgtggtcgccctcaccgaggcgctcatgaacgagctggtcaagctggactccatcgccgccgacggcgaagtcaaggtgcagcgacgaatgcaggagaagcgggtgcagaagtacgtggagacgctggacgctatccgcgccaagaacgcggcggcgcccaaggccaaggccaaggccaacgacgacatgaatgggcacgccaaggcccgcgcgccgcaactcccgccgcgcccgccgcccgtgtcgcagaggcggaacttccagcagccctccccggcgccagcgccgcccacgcagggctgggagtcgttcgacctgctgtcgtcggtgccgtccacgtcctcggccaccgtgaccaccaccatggcggccgcgaccaccaccacctcgccggccggcgtctccccgatcccgcggttcgactgggagctcttctgaagccctccctcctcgcggcgcgtcggcgtgccggttggtcgatcagacggtacctacctcccttgtccatggatcttccctgctctcatcagtagtgccattgtttcttctgtggattctttccatttcttttcgcctcattctctcttcttttcttccatttcctttcgaatttgtatatctactatatgtctacaaaaagaacagagagaccgacgcggtgcggtgagtgtgttcactgggtcaaaagtccgtcagttgacaactcctcctcgtgaggatccatccatgcatgttgttgttcagtcacagcaaataagtggtggtcttattatgatggcgatgaagaagtttcc

SEQ ID NO: 3639 - protein, 336 aa, Zea mays subsp. mays
  peptide (1)..(336): Ceres Seq. ID no. 12405710
MMRARPKGTFADAMRESSPPPPPPPPPAPASAAVKEDEWEVRPGGMLVQKRSPDADAPAGAPVPTIRVKVKFNGVYHEIYINSQASFGELKKMLSARTGLHPEDQKLVYKDKERDSKAFLDMAGVKDRSKLVLLEDPAAQAKRLLEQRRTDKAERAAKSISRIGLDVDKLATKVSALEAIVSKGGKVVDADVVALTEALMNELVKLDSIAADGEVKVQRRMQEKRVQKYVETLDAIRAKNAAAPKAKAKANDDMNGHAKARAPQLPPRPPPVSQRRNFQQPSPAPAPPTQGWESFDLLSSVPSTSSATVTTTMAAATTTTSPAGVSPIPRFDWELF

SEQ ID NO: 3640 - protein, 335 aa, Zea mays subsp. mays
  peptide (1)..(335): Ceres Seq. ID no. 12405711
MRARPKGTFADAMRESSPPPPPPPPPAPASAAVKEDEWEVRPGGMLVQKRSPDADAPAGAPVPTIRVKVKFNGVYHEIYINSQASFGELKKMLSARTGLHPEDQKLVYKDKERDSKAFLDMAGVKDRSKLVLLEDPAAQAKRLLEQRRTDKAERAAKSISRIGLDVDKLATKVSALEAIVSKGGKVVDADVVALTEALMNELVKLDSIAADGEVKVQRRMQEKRVQKYVETLDAIRAKNAAAPKAKAKANDDMNGHAKARAPQLPPRPPPVSQRRNFQQPSPAPAPPTQGWESFDLLSSVPSTSSATVTTTMAAATTTTSPAGVSPIPRFDWELF

SEQ ID NO: 3641 - protein, 323 aa, Zea mays subsp. mays
  peptide (1)..(323): Ceres Seq. ID no. 12405712
MRESSPPPPPPPPPAPASAAVKEDEWEVRPGGMLVQKRSPDADAPAGAPVPTIRVKVKFNGVYHEIYINSQASFGELKKMLSARTGLHPEDQKLVYKDKERDSKAFLDMAGVKDRSKLVLLEDPAAQAKRLLEQRRTDKAERAAKSISRIGLDVDKLATKVSALEAIVSKGGKVVDADVVALTEALMNELVKLDSIAADGEVKVQRRMQEKRVQKYVETLDAIRAKNAAAPKAKAKANDDMNGHAKARAPQLPPRPPPVSQRRNFQQPSPAPAPPTQGWESFDLLSSVPSTSSATVTTTMAAATTTTSPAGVSPIPRFDWELF

SEQ ID NO: 3642 - DNA, 1124 bp, Zea mays subsp. mays
  misc_feature (1)..(1124): Ceres Seq. ID no. 12352234
  misc_feature (1)..(1124): Ortholog of  Ceres SEQ ID NO 15225993 as cited in SEQ ID NO 61065
aatgccggcactgccggtcccaccgccggcgccaccgctcccgcggcggtatcctcgactcccagaaccgtcctgctctttgtgctctcgaaagcgccggatctaaccttcaccacctccggggcctcctccgccaccgccgcctgccaggcggcctccactcctttggctgctacgcctcgccacaggcatcctcgatggtcgccaaccttgtggagggcgtgtcgtaccccttcttctactcgctcgccgacatgggtaccctccccgaccaccccacaagaacatcgctcgcctcctcaaggccaagcgcttccgcaagcccgatatctccgagaccatccaggagctgctcggcggcgaggtggggagggggcaaccatccggtgggttggtggtggacgtgggtgccaatgttggcatggcatcattcgtggccggctggccgccgtgacggagtttcgggtgctggcattcgagcccgtgttcgagaatctgcagcggagatgcgacggggtgtacctcaaccgggtgcaggaccgcattgtggtgtatcacgctgcgtcgctgcagcttctgatcgagttgggactattacgatgcacaaggtgattggtcgactggacaacagtgctatatctgcagatggtacaaagttagcattcaagtctaatgcagaaattgctgttgaagtttccacaattcctttggatgaagttgttccagatactgagagagttcttatgatctaagttgatgttcaaggctgggaataccacgtactgggaggtgcatcaaatttgctttcaaggattaaaggtgaagctccctatccctaccttatatatgaagaagatgaacacctactgcaggctggcaacagcagtgcacaggacataaggacatttctcactagtgttggttataaccactgtaaaaggcatggaaatggtgctcactgtaaaaggaatagacaaatttgtttctgattgatgctcttatgctcctaagctaggtttgtatatgaactctgaagaatcagctgagttctggcagttttgcccctttgttacttagcaatgccagatgtttatacatgtcatgtgcccaatagttgtattgct

SEQ ID NO: 3643 - protein, 249 aa, Zea mays subsp. mays
  peptide (1)..(249): Ceres Seq. ID no. 12352235
CRHCRSHRRRHRSRGGILDSQNRPALCALESAGSNLHHLRGLLRHRRLPGGLHSFGCYASPQASSMVANLVEGVSYPFFYSLADMGTLPDHPTRTSLASSRPSASASPISPRPSRSCSAARWGGGNHPVGWWWTWVPMLAWHHSWPAGRRDGVSGAGIRARVRESAAEMRRGVPQPGAGPHCGVSRCVAAASDRVGTITMHKVIGRLDNSAISADGTKLAFKSNAEIAVEVSTIPLDEVVPDTERVLMI

SEQ ID NO: 3644 - protein, 203 aa, Zea mays subsp. mays
  peptide (1)..(203): Ceres Seq. ID no. 12352236
NAGTAGPTAGATAPAAVSSTPRTVLLFVLSKAPDLTFTTSGASSATAACQAASTPLAATPRHRHPRWSPTLWRACRTPSSTRSPTWVPSPTTPQEHRSPPQGQALPQARYLRDHPGAARRRGGEGATIRWVGGGRGCQCWHGIIRGRLAAVTEFRVLAFEPVFENLQRRCDGVYLNRVQDRIVVYHAASLQLLIELGLLRCTR

SEQ ID NO: 3645 - protein, 184 aa, Zea mays subsp. mays
  peptide (1)..(184): Ceres Seq. ID no. 12352237
MVANLVEGVSYPFFYSLADMGTLPDHPTRTSLASSRPSASASPISPRPSRSCSAARWGGGNHPVGWWWTWVPMLAWHHSWPAGRRDGVSGAGIRARVRESAAEMRRGVPQPGAGPHCGVSRCVAAASDRVGTITMHKVIGRLDNSAISADGTKLAFKSNAEIAVEVSTIPLDEVVPDTERVLMI

(The sequence listing continues in the following parts.)
